United States Patent Application Publication US 2005/0108791 A1 - sequence listing, part 4

SEQ ID NO: 12787 - protein, 392 aa, Dicella nucifera
DLEPVNPADVPVTAAGALKSYNLASKAISRLQSLPSGNISLLCDVLVKEVRDLTGYDRVMVYKFHEDEHGDVVSECRRSDLESYLGLHYPATDIPQASRFLFMKNKVRMICDCLAPPVKVIQDERLPQPLSLCGSTLRSPHGCHAQYMTNMGTIASLVMSVTINEEDETMDGDQQQMTRKLWGLVVCHHTSPRFVPFPLRYACEFLIQVFGVQINKEVELAAQVRENHILQIQTMLCDMLLRDAPVAIITQSPNVMDLVKCDGAALYFKNKTWLLGVTPTEKQIRDIAEWLLEYHSGNTGLSTDSLMEAGYPGASVLGDAVCGMAAVSITSRDFLFWFRSHTAKEIKWGGAKHDPDDKDDGRKMHPRSSFKAFLEVVKWRSIPWEDIEMDAI

SEQ ID NO: 12788 - protein, 374 aa, Plagiopteron suaveolens
ALSIAGAVQSQKLAVRAISQLQSLPGGDIKLLCDTVVQSVRDLTGYDRVMVYKFHEDEHGEVIAESKRPDLEPYIGLHYPATDIPQASRFLFKQNRVRIIVDCHASPVSVIQDDGLMQPLCLVGSTLRAPHGCHAQYMDNMGSIASLAMAVIINGNDEDGTGGRNPTRLWGLVVCHHTSARCIPFPLRYACEFLMQAFGLQLNMELQLAAQLLEKHVLKTQTLLCDMLLRESPTGIVTQSPSIMDLVKCDGAALYYQANYYPLGVTPTEAQIKDIVEWLLAFHGDSTGLSTDSLADAGYPGATLLGDAVCGMTVAYITNRDFLFWFRSHTAKEIKWGGAKHHPEDKDDGQRMHPRSSFKAFLEVVKSRSLPWEN

SEQ ID NO: 12789 - protein, 374 aa, Plagiopteron suaveolens
ALSIAGAVQSQKLAVRAISQLQSLPGGDIKLLCDTVVQSVRDLTGYDRVMVYKFHEDEHGEVIAESKRPDLEPYIGLHYPATDIPQASRFLFKQNRVRIIVDCHASPVSVIQDDGLMQPLCLVGSTLRAPHGCHAQYMDNMGSIASLAMAVIINGNDEDGTGGRNPTRLWGLVGWHHPSARCIPFPLRYACEFLMQAFGLQLNMELQLAAQLLEKHVLKTQTLLCDMLLRESPTGIVTQSPSIMDLVKCDGAALYYQANYYPLGVTPTEAQIKDIVEWLLAFHGDSTGLSTDSLADAGYPGATLLGDAVCGMAVAYITNRDFLFWFRSHTAKEIKWGGAKHHPEDKDDGQRMHPRSSFKAFLEEVKSRSLPWEN

SEQ ID NO: 12790 - protein, 554 aa, Pleea tenuifolia
  unsure (1)..(554): unsure at all Xaa locations
DLEPVNPADVPVTAAGALKSYKLAAKAISKLQSLPTGNISLLCDVLVREVSDLTGYDRVVAYKFHEDEHGEVIAECRRSELEPYLGLHYPATDIPRASRFLFMKNKVRMICDCSAAPVKVIQDKRLAQPLSLCGSILRAPHGCHAQYMASMGSVASLVMSVTIIEDDNETGSDQQEKGRKLWGVVVCHHTSPRFIPFPLRYACEFLIQVFCMQLTKEVELADQMREKHILQTQTVLCDMLLRDAPVGIFTQSPNVMDLVKCDGAALYYRNQFWLLGISPREAQIRDIAGWLLEYHDGTTGLSTDSLLDAGYPGASALGDEVCGMAAIRITDKDFLFWFRSHTAKEXTWGGAKHDLVEKDSDGRKMHPRSSFKAFLEVVEGRSLPWEDVEMDAIHSLQLILRDSLQGERASIDSKAIVNAPLDDAKKIQGMDELSLVTNEMIRLIETAAVPILAVDVLGNVNGWNIKAAELTGLVVQQAIGMPLIDLVEGDSIDVAKNMLFLALQGKEERDVEIKLKTFGHQEKNGPKILVVNACCSRDMKEDIVGVCFVAQDVT

SEQ ID NO: 12791 - protein, 467 aa, Tacca chantieri
SGKPFYAIIHRVTACLIVDFEPVKPSELPMTAAGALQSYKLAAKAIARLQSLPGGSMERLCDTVIEEVFELTGYDRVMVYKFHEDDHGEVFREITKPGLEPYQGLHYPATDIPQAARFLFMKNKVRMICDCRAKPVKIYQDDKLPLDLTFCGSTLRAPHSCHLQYMENMNSIASLVMAEVVNEGEEDDENLEPGQTQQQKKKRLWGLVVCHHESPRFVPFPLRYACEFLMQVFAIHVNKEFELENQIREKNILRTQTLLCDMLLRDTTPVGIMNQSPNIMDLVKCDGAALLYQNKVWRLGLTPTEAQIRDIAYWLAEYHMDSTGLSTDSLHDAGYPGALGLADVVCGMAAARITSKDMLFWFRSHIAAEIRWGGAKHDPADKDDGRRMHPRTSFKAFLEAVKMRSLPWKDYEMDAIHSLQLILRGTFSDSRNVNSRASLDARVNDLKLEGMVELQAVTNEMVRLMET

SEQ ID NO: 12792 - protein, 245 aa, Afrostyrax sp. Cheek 5007
ALSIAGAVQSQKLAVRAISQLRSLPGGDIKLLCDTVVESVRELTGYDRVMVYKFHEDEHGEVVAESKRSDLEPYLGLHYPATDIPQASRFLFKQNRVRMIVDCNAMPVPVSQDEGLMQPLCLVGSTLRAPHDCHAQYMANMGSIASLAMAVIINGNDDEAIGGRNSMRLWGLVVCHHTSARCIPFPLRYACEFLMQAFGLQLNMELQLASQLLEKHVLRTQTLLCDMLLRDSPTGIVTQNPSTMD

SEQ ID NO: 12793 - protein, 245 aa, Afrostyrax sp. Cheek 5007
ALSIAGAVQSQKLAVRAISQLQSLPGGDIKLLCDTVVESVREHTGYDRVMVYKFHEDEHGEVVAESKRSDLEPYLGLHYPATDIPQASRFLFKQNRVRMIVDCNAMPVPVSQDEGLMQPLCLVGSTLRAPHDCHAQYMANMGSIASLAMAVIINGNDDEAIGGRNSMRLWGLVVCHHTSARCIPFPLRYACEFLMQAFGLQLNMESQLATQLVEKHVLRTQTLLCDMLLRDSPTGIVTQNPSTMD

SEQ ID NO: 12794 - protein, 918 aa, Salmonella enterica subsp. enterica serovar Typhi
MTNYSLRARMMILILAPTVLIGLLLSIFFVVHRYNDLQRQLEDAGASIIEPLAVSSEYGMNLQNRESIGQLISVLHRRHSDIVRAISVYDDHNRLFVTSNFHLDPSQMQLPAGAPFPRRLSVDRHGDIMILRTPIISESYSPDESAIADAKNTKNMLGYVALELDLKSVRLQQYKEIFISSVMMLFCIGIALIFGWRLMRDVTGPIRNMVNTVDRIRRGQLDSRVEGFMLGELDMLKNGINSMAMSLAAYHEEMQHNIDQATSDLRETLEQMEIQNVELDLAKKRAQEAARIKSEFLANMSHELRTPLNGVIGFTRLTLKTELNPTQRDHLNTIERSANNLLAIINDVLDFSKLEAGKLILESIPFPLRNTLDEVVTLLAHSSHDKGLELTLNIKNDVPENVIGDPLRLQQVITNLVGNAIKFTESGNIDILVEKRALSNTKVQIEVQIRDTGIGIPERDQSRLFQAFRQADASISRRHGGTGLGLVITQKLVNEMGGDISFHSQPNRGSTFWFHINLDLNPNVIIDGPSTACLAGKRLAYIEPNATAAQCTLDLLSDTPVEVIYSPTFSALPLAHYDIMILSVPVTFREPLTMQHERLAKAASMTDFLLLALPCHAQINAEKLKQGGAAACLLKPLTSTRLLPALTEYCQLNHHPEPLLMDTSKITMTVMAVDDNPANLKLIGALLEDKVQHVELCDSGHQAVDRAKQMQFDLILMDIQMPDMDGIRACELIHQLPHQQQTPVIAVTAHAMAGQKEKLLSAGMNDYLAKPIEEEKLHNLLLRYKPGANVAARLMAPEPAEFIFNPNATLDWQLALRQAAGKPDLARDMLQMLIDFLPEVRNKIEEQLVGENPNGLVDLVHKLHGSCGYSGVPRMKNLCQLIEQQLRSGVHEEELEPEFLELLDEMDNVAREAKKILG

SEQ ID NO: 12795 - protein, 376 aa, Apluda mutica
ALSIAGAVQSQKLAVRAISRLQALPGGDVKLLCDTVVEHVRELTGYDRVMVYRFHEDEHGEVVAESRRDNLEPYLGLHYPATDIPQASRFLFRQNRVRMIADCHATPVRVIQDPGLSQPLCLVGSTLRAPHGCHAQYMANMGSIASLVMAVIISSGGDDEQTGRGGISSAMKLWGLVVCHHTSPRCIPFPLRYACEFLMQAFGLQLNMELQLAHQLSEKHILRTQTLLCDMLLRDSPTGIVTQSPSIMDLVKCDGAALYYHGKYYPLGVTPTESQIKDIIEWLTVCLGDSTGLSTDSLADAGYLGAAALGDAVCGMAVAYITPSDYLFWFRSHTAKEIKWGGAKHHPEDKDDGQRMHPRSSFQAFFEVVKSRSLPW

SEQ ID NO: 12796 - protein, 376 aa, Chionachne koenigii
ALSIAGAVQSQKLAVRAISRLQALPGGDVKLLCDTVVEHVRELTGYDRVMVYRFHEDEHGEVVAESRRDNLEPYLGLHYPATDIPQASRFLFRQNRVRMIADCHATPVRVVQDPGLSQPLCLVGSTLRSPHGCHAHYMANMGSIASLVMAVIISSGGDDEHTGRGGISSAMKLWGLVVCHHTSPRCIPFPLRYACEFLMQAFGLQLNMELQLAHQLSEKHILRTQTLLCDMLLRDSPTGIVTQSPSIMDLVKCDGAALYYHGKYYPLGVTPTESQIKDIIEWLTVCHGDSTGLSTDSLADAGYLGAATLGDAVCGMAVAYITPSDYLFWFRSHTAKEIKWGGAKHHPEDKDDVQRMHPRSSFKAFLEVVKSRSLPW

SEQ ID NO: 12797 - protein, 376 aa, Coelorachis selloana
ALSIAGAVQSQKLAVRAISRLQALPGGDVKLLCDTVVEHVRELTGYDRVMVYRFHEDEHGEVVAESRRDNLEPYLGLHYPATDIPQASRFLFRQNRVRMIADCHATPVRVIQDPGLSQPLCLVGSTLRAPHGCHAQYMANMGSIASLVMAVIISSGGDDEQTGRGGISSSMKLWGLVVCHHTSPRCIPFPLRYACEFLMQAFGLQLNMELQLAHQLSEKHILRTQTLLCDMLLRDSPTGIVTQSPSIMDLVKCDGAALYYHGKYYPLGVTPTESQIKDIIEWLTVCHGDSTGLSTDSLADAGYLGAAALGDAVCGMAVAYITPSDYLFWFRSHTAKEIKWGGAKHHPEDKDDGQRMHPRSSFKAFLEVVKSRSLPW

SEQ ID NO: 12798 - protein, 376 aa, Elionurus muticus
ALSIAGAVQSQKLAVRAISRLQALPGGDVKLLCDTVVEHVRELTGYDRVMVYRFHEDEHGEVVAESRRDNLEPYLGLHYPATDIPQAPRFLFRQNRVRMIADCHATSVRVIQDPGLSQPLCLVGSTLRAPHGCHAQYMANMGSIASLVMAVIISSGGDDEQTGRGGISSSMKLWGLVVCHHTSPRCIPFPLRYACEFLMQAFGLQLNMELQLAHQLSEKHILRTQTLLCDMLLRDSPTGIVTQSPSIMDLVKCDGAALYYHGKYYPLGITPTESQIKDIIEWLTVCHGDSTGLSTDSLADAGYLGAAALGDAVCGMAVAYITPSDYLFWFRSHTAKEIKWGGAKHHPEDKDDGQRMHPRSSFKAFLEVVKSRTLPW

SEQ ID NO: 12799 - protein, 376 aa, Ischaemum afrum
  unsure (1)..(376): unsure at all Xaa locations
ALSIAGAVQSQKLAVRAISRLQALPGGDVKLLCDTVVEHVRELTGYDRVMVYRFHEDEHGEVVAESRRDSLEPYLGLHYPATDIPQASRFLFRQNRVRMIADCHATPVRVVQDPGLSQPLCLVGSTLRAPHGCHAQYMANMGSIASLVMAVIISSGGDDEQTGRGGISSAMKLWGLVVCHHTSPRCIPFPLRYACEFLMQAFGLQLNMELQLAHQLSEKHILRTQTLLCDMLLRDSPTGIVTQSPSIMDLVKCDGAALYYXGKYYPLGVTPTESQIKDIIEWLTVCHGDSTGLSTDSLADAGYLGAAALGDAVCGMAVAYITPSDYLFWFRSHTAKEIKWGGAKHHPEDKDDGQRMHPRSSFKAFLEVVKSRSLPW

SEQ ID NO: 12800 - protein, 323 aa, Microstegium nudum
ALSIAGAVQSQKLAVRAISRLQALPGGDVKLLCDTVVEHVRELTGYDRVMVYRFHEDEHGEVVAESRRDNLEPYLGLHYPATDIPQASRFLFRQNRVRMIADCHATPVRVIQDPGLSQPLCLVGSTLRAPHGCHAQYMANMGSIASLVMAVIISSGGDDEQTGRGGISSAMKLWGLVVCHHTSPRCIPFPLRYACEFLMQAFGLQLNMELQLAHQLSEKHILRTQTLLCDMLLRDSPTGIVTQSPSIMDLVKCDGAALYYHGKYYPLGVTPTESQIKDIIEWLTVCHGDSTGLSTDSLADAGYLGAAALGDAVCGMAVAYITP

SEQ ID NO: 12801 - protein, 333 aa, Phacelurus digitatus
TGYDRVMVYRFHEDEHGEVVAESRRDNLEPYLGLHYPATDIPQASRFLFRQNRVRMIADCHATPVRVIQDPGLSQPLCLVGSTLRAPHGCHAQYMANMGSIASLVMAVIISSGGDDEQTGRGGISSAMKLWGLVVCHHTSPRCIPFPLRYACEFLMQAFGLQLNMELQLAHQLSEKHILRTQTLLCDMLLRDSPTGIVTQSPSIMDLVKCDGAALYYHGKYYPLGVTPTESQIKDIIEWLTVCHGDSTGLSTDSLADAGYLGAAALGDAVCGMAVAYITPSGYLFWFRSHTAKEIKWGGAKHHPEDKDDGQRMHPRSSFKAFLEVVKSRSLPW

SEQ ID NO: 12802 - protein, 464 aa, Sarcandra glabra
SGKPFYAIIHRVTASLIIDFEPVKPYEVPMTAAGALQSYKLAAKAIARLQSLPGGSMEKLCDTVVQEVFDLTGYDRVMAYKFHEDDHGEVISAITKPGLEPYLGLHYPATDIPQAARFLFMKNKVRMICDCDAKPVKVFQDEKLVFDLTLCGSTLRAPHSCHLQYMANMNSIASLVMAVVVNEGEEDDSLEPGQQQQRKRKRLWGLIVCHNTTPRFVPFPLRYACEFLMQVFAIHVNKELELESQIQEKNIFRTQTLLCDMLMRDTPLGIVSQNPNVMDLVKCDGAALLYKKKIWRLGLTPSETQIHDISFWLSEYHMDSTGFSTDSLNDAGYPGALAIGDAVCGMAAVWITSKDMLFWFRSHTAAEVRWGGAKHDPDDKDDNRGMHPRSSFKAFLEVVKTRSLPWKDNEMDAIHSLQLILRGTFKDVENSHTKTMIYSQLNDLKLEGMEELQAVTNEMVRLIE

SEQ ID NO: 12803 - protein, 465 aa, Sarcandra glabra
SGKPFYAIMHRIDVGPVIDLEPVNPADVPVTAAGALKSYKLAAKAISRLQSLPSGNISLLCDVLVREVSELMGYDRVMAYKFHEDEHGEVIAECRRSDLEPYLGLHYPATDIPQASRFLFMKNKVRMICDCSAAPVKVIQDKRLGQPMSLCGSALRAPHGCHAQYMANMGSIASLVMSVTINEDDDETESDPQQQQEKPRKLWGLVVCHHTGPRFVPFPLRYACEFLIQVFGIQLNKEVELAAQLREKHMLKTQTVLCDMLLRDAPMRIVTQSPNVMDLVKCDGAALYYRNQFWLLGTTPTEAQIRDIAEWLLDYHDGSTGLSTDSLMEAGYPGASVLGDAVCGMAAVKITSKDFLFWFRSHSAKEIKWGGAKHDPINKDDDGRKMHPRSSFKAFLEVMKQRSLRWEDVEMDAIHSLQLILRGSLQEESENDSKAIVNASLDVAKIQGMDELRFVTNEMVRLIET

SEQ ID NO: 12804 - protein, 394 aa, Buergersiochloa bambusoides
EPARTEDPALSIAGAVQSQKLAVRAISRLQALPGGDVKLLCDTVVEHVRELTGYDRVMVYRFHDDEHGEVVAESRRADLEPYLGLHYPATDIPQASRFLFRQNRVRMIADCHAAPVRVIQDSALPQPLCLVGSTLRGPHGCHAQYMANMGSIASLVMAVIISSGGDDEHNSAQGGIPSAMKLWGLVVCHHTSPRCIPFPLRYACEFLMQAFGLQLNMELQLAHQLSEKHILRTQTLLCDMLLRDSPTGIVTQSPSIMDLVKCDGAALYYHGKYYLLDVTPTEAQIKDIIEWLTLCHGDSTGLSTDSLADAGYPGAAALGDAVCGMAVAYITPSDYLFWFRSHTAKEIKWGGAKHHPEDKDDGQRMHPRSSFKAFLEVVKSRSLPWENAEMDAIH

SEQ ID NO: 12805 - protein, 394 aa, Ammophila arenaria
EPASTEDPAVSIAGAVQSQKLAVRAISRLQALPGGDVNLLCDTVVEHVRELTGYDRVMVYKFHDDEHGEVLAESRRADLEPYLGLHYPATDIPQASRFLFRQNRVRMIADCHAAPVRVIQDPAMPQPLCLVGSTLRSPHGCHAQYMANMGSIASLVMAVIISSGGEDEHSMGRGAVPSAMKLWGLVVCHHTSPRCIPFPLRYACEFLMQAFGLQLNMELQLAHQLSEKHILRTQTLLCDMLLRDSPTGIVTQSPSIMDLVKCDGAALYYHGKYYPLGITPTEAQIKDIIEWLTVCHGETTGLSTDSLADAGYPGATALGDAVCGVAVAYITPSDYLFWFRSHTAKEIKWGGAKHHPEDKDDGQRMHPRSSFKAFLEVVKSRSLPWENAEMDAIH

SEQ ID NO: 12806 - protein, 394 aa, Elymus sp. Kellogg s.n.
EPARTEDPALSIAGAVQSQKLAVRAISRLQALPGGDVKLLCDTVVEHVRELTGYDRVMVYKFHDDEHGEVLSESRRGDLEPYLGLHYPATDIPQASRFLFLQNRVRMIADCHAAAVRVIQDPAMPQPLCLVGSTLRSPHGCHAQYMANMGSIASLVMAVIISSGGEDEHNMTRGVIPSAMKLWGLVVCHHTSPRCIPFPLRYACEFLMQAFGLQLNMELQLAHQLSEKHILRTQTLLCDMLLRDSPTGIVTQTPSIMDLVKCDGAALFYHGKYYPLGVTPTESQIKDIIEWLTVCHGDSTGLSTDSLADAGYPGATALGDAVCGMAVAYITPSDYLFWFRSHTAKEIKWGGAKHHPEDKDDGQRMHPRSSFKAFLEVVKSRSLPWENAEMDAIT

SEQ ID NO: 12807 - protein, 394 aa, Ehrharta erecta
EPARTEDPALSIAGAVQSQKLAVRAISRLQALPGGDVKLLCDTVVEHVRELTGYDRVMVYRFHEDEHGEVVAESRRNDLEPYLGLHYPATDIPQASRFLFRQNRVRMIADCHAAPVRVIQDPGLPQQLCLVGSTLRSPHGCHAQYMANMGSIASLVMAVIISSAGDDENNMARGGIPSAMKLWGLVVCHHTSPRCIPFPLRYACEFLMQAFGLQLNMELQLAHQLSEKHILRTQTLLCDMLLRDSPTGIVTQSPSIMDLVKCDGAALYYHGKYYPLGVTPTESQIKDIIEWLTVCHGDSTGLSTDSLADAGYPGSAALGDAVSGMAVAYITPSDYLFWFRSHTAKEIKWGGAKHHPEDKDDGQRMHPRSSFKAFLEVVKSRSLPWENAEMDAIH

SEQ ID NO: 12808 - protein, 394 aa, Phalaris arundinacea
EPASTEDPALSIAGAVHSQKLAVRAISRLQALPGGDVKLLCGTVVEHVRELTSYDRVMVYKFHDDEHGEVLAESRRADLEPYLGLHYPATDIPQASRFLFRQNRVRMIADCHAAPVRVIQDPAMPQPLCLVGSTLRSPHGCHAQYMANMGSIASLVMAVIISSGGEDEHSMGRGAVPSAMKLWGLVVCHHTSPRCIPFPLRYACEFLMQAFGLQLNMELQLAHQLSEKHILRTQTLLCDMLLRDSPTGIVTQSPSIMDLVKCDGAALYYHGKCYPLGITPTEAQIKDIIEWLTVCHGETTGLSTDSLADAGYPGATALGDAVCGMTVAYITPSDYLFWFRSHTAKEIKWGGAKHHPEDRDDGQRMHPRSSFKAFLEVVKSRSLPWENAEMDAIH

SEQ ID NO: 12809 - protein, 397 aa, Puelia ciliata
TGYDRVMVYRFHDDEHGEVVAESRHADLEPYLGLHYPATDIPQASRFLFRQNRVRMIADCHAAPVRVIQDPALPQPLCLVGSTLRAPHGCHAQYMANMGSIASLVMAVIITSGGDDEHNMARGGISSAMKLWGLVVCHHTSPRCIPFPLRYACEFLMQAFGLQLNMELQLAHQLSEKHILRTQTLLCDMLLRDSPTGIVTQSPSIMDLVKCDGAALYYHGKYYPLGVTPTEAQIKDIIEWLTLCHGDSTGLSTDSLADAGYHGAAALGDAVCGMAVAYITPSDYLFWFRSHTAREIKWGGAKHRPEDKDDGQRMHPRSSFKAFLEVVKSRSLPWEHAEMDAIHSLQLILRDSFRDAAEGTSNSKAIVNGQVQLGELELRGIDELSSVAREMVRLIET

SEQ ID NO: 12810 - protein, 393 aa, Sesleria insularis
EPARTEDPALSIAGAVQSQKLAVRAISRLQALPGGDVKLLCDTVVEHVRELTGYDRVMVYKFHDDEHGEVLAESRRADLEPYLGLHYPATDIPQASRFLFRQNRVRMIADCHAAPVRVIQDPAMPQPLCLVGSTLRSPHGCHAQYMANMGSIASLVMAVIISSGGEDNMSRGGAVPSAMKLWGLVVCHHTSPRCIPFPLRYACEFLMQAFGLQLNMELQLAHQLSEKHILRTQTLLCDMLLRDSPTGIVTQSPSIMDLVKCDGAALYYHGKYYPLGITPTGAQIKDIIEWLKVCHGDSTGLSTDSLADAGYPGATALGDAVCGMAVAYITPSDYLFWFRSHTAKEIKWGGAKHHPEDKDDGQRMHPRSSFKAFLEVVKSRSLPWENAEMDAIH

SEQ ID NO: 12811 - protein, 393 aa, Sporobolus giganteus
EPARTEDPALSVAGAVQSQKLAVRAISRLQALPGGDVKLLCDTVVEHVRELTGYDRVMVYRFHEDEHGEVVAESRRDDLEPYLGLHYPATDIPQASRFLFRQNRVRMIADCHATPVRVIQDPGLSQPLCLVGSTLRAPHGCHAQYMANMGSIASLVMAMIIIVVVMTKQTSRSGISSAMKLWGLVVCHHTSPRFIPFPLRYACEFLMQAFGLQLNMELQLAHQLSEKHILRTQTLLCDLLLRDSPTGIVTQSPSIMDLVKCDGAALYYHGKYYPLGVTPTESQIKDIIEWLTVCHGDSTGLSTDSLADAGYHGAAALGDAVCGMAVAYITPSDYLFWFRSHTAKEIKWGGAKPHPEDKDDGQRMHPRSSFKAFLEVVKSRSLPWENAEMDAIH

SEQ ID NO: 12812 - protein, 752 aa, Cytophaga hutchinsonii
MKIKDIVNRDLVNLQNCDQEPIHIPGSIQPHGFLIAITKETWEIRFCSENVIDFIGLSHKQLLGKKITEIFDDIFFGKVIQCKDYAVGESKLIQGKIEDKEFDFTAHQNEDVIILESEIHIDNTPKNDLFDMSKQFMDYMEDSHTLIRLCELVASGIKKVTDYDRVMIYRFDKDYNGEVIAETKQDKLESFLGLHYPHTDIPVQARELYIKNLLRVIGDVNYKPVPIYTIDDSENQNLDLSCSVLRSVSPIHVQYLHNIGVGATLTISLIHKKKLWGLVACHHYSPKYLHYETKLAAKLQGHFITSQIEIREQNEQYATSQKLHQAVDDLISRKFSADRNSLKDIVIDSNVLQLCKAAGISILIDKKEVYKSGLTPADGDIQKLAEYVKHAIDKEQYATHFITAELPDFKNITASGIAGINYHALDKTSNSCIMWYKPETITEVKWAGDPNKAIEKDKNGLSPRKSFELWGEKVKNQSIPWSQPDLIASSNFANFLQKHLGYIFLAEEEEKQRQMTEILKEVNSELENINWISTHDLQEPLRKIQIITSYVLSVENTLSEASYEKLQKINKSANRMQALISDILRYTKLKASTEILESVDLKNIVTEVIQEVDDALEAKKANIYISDLPEMSGIPFLLAQLFLNLISNSLKFADATRVLSIHIVQEGIIVKEEQEYYKISYTDNGIGFNKDYNELIFKIFSRLHSVAEYPGSGIGLALCKKIMKTHKGFIEAQGIPEKGAIFYLYFPVSKNS

SEQ ID NO: 12813 - protein, 506 aa, Cytophaga hutchinsonii
MSKQNYDSKFCGSLPISFVNQIQDYGFLLVCDPALIVLQVSDNAEAFTRISYQSFIDKNLKELLTADSFQLLQEKLSSKAQKRFTCTLEFYGGVRTSFLTLIHVKEEYILFEFEPSDDTDIKGFREVYQQIHEASAAIQQSQELGESLSIAVKELKTFSGFDKVMIYKFDEDWNGHVLAEAMEPGMESYLGITFPASDIPKQARELYLKNPYRLIPDREYKPSKLYPVINPASSGFVDLGVCNLRGVIKVHLEYLTNMNVKSSMSTRILKDNTLWGLIACHHREKKFLNFDQCSVFEMFSNVVSTRLSALETEQNLTKTTENQALMNSIIEELYSQTMLINAIDNCAALIMQLLDCTGLVHIRESKVKSFGACPSASSIHELVIWLQMKNFTTLYATAALTEAYEDAAAIASVASGLLAFPVIPDKGEYILCFRAEILQRIDWGGNPNEAIRFNEDMKTYHPRHSFEIWKEEIKSTSQPFQEYEMNFAKELQRIFIETRLKEQNRR

SEQ ID NO: 12814 - protein, 1317 aa, Cytophaga hutchinsonii
MEEIEFLKKSLQEEIISRKQLEIELEKNKLEIEKLKKKFSNSHKEILENYIRKEQDLLSNSSRLSSLIVNLDSAILLEDENRKIVLVNQKFCDIFGIPLSPQELIGTDCSNSAQQSKIKFKNPDQFISRIEELLENKKKVLSDELQLIDGKILKRDFIPVYHNNEYLGHLWNYEDLTNYINVKKKIESLSRFPKESPNPILRCSADGMVIYANAAAKPFVSVLSTTKYNSNNNVTYDSLVSNVKASFKTRMLLKNEIRIKDRTYNVSYVPVEHEDYVNIYATDITSTKESEEKIYLLKELLNQLDEFIQVIDKEGNFVFINESSANRFQRTIEEFETLNIKNIVPSFYNNMTWEEQFDFFKQKQNFLLESTHTKPDKTSYPIESSVKYTTVHEKEYIISFSKDISERKRTEQALQDQKQFYEDILNNIPSDIAVFNTNYQYLYVNPAAIKDEETRKWIIGKTDLDYCRYRGKDDSLAIMRRKNHDILHEFKKPIEWEDVFTDKDGNVSYVLRKFHPVLDENDNIKIIIGNGINITEIKQVQEKLAKSEELYRLVIHAANDGIWDWDIASGSLYLSERWKSMLGYTDETLANHISSWEKTMHPDDLSIAKEILQNHFEKRKPYNYTLRYLHVDGSIRWIMCRGFAIRNRKGEPYRMVGSCTDVTDTQIAEEKLKENEEKLQAIFNHSHDAKFLVDPCTNKIIEFNKRTLELFETDKPDTLYTIPLTSLRKYPLTDAELADTQNQFKQLGYWNQEVLYITQKKNEFWGNIVAKTIFINKKEVILVRITDISENKKIEQELIKAKQIAEESTKAKEMFLANMSHEIRTPMNGILGMAELISRTSLDVTQKKHVQLIKNSADNLLIIINDILDIAKIESGKLTIEQIPFDICEVIKSAIQTLTYKAEEKGIDLIIHPIKLDHRVVIGDPFRLTQALLNLINNAIKFTENGSVEISGRIPHSSSTDITFEFTVKDTGIGIPQEKLDSIFEGFTQASPDTSRKYGGTGLGLTISKNLIQMQGGNIWVESVVGKGSKFIFSITYKKGDLLDVSPNNKNKINLYQLHDLKVLLAEDNEVNQYFAKTLMDEIGVKVDVANNGIEAFQFFEQNEYDIILMDIQMPYMGGIETTSKIRSHANKTKAKIPIIALTANALVGDSEKYIEAGMSDYISKPFDRETLFRKLQLHAGSNKNIFQDAKNIHLFQSDTNDAYLPNYSHLEKNFQNNTVFLKKIFTLFIESTPEIVNELKLFSEGKDYEKLQATAHKLKASVDAFKIVALHQTIRNIEKFAANKTNLDEIPDLVKSTDDILKIAQEDITKKLKQIE

SEQ ID NO: 12815 - protein, 1222 aa, Cytophaga hutchinsonii
MSQEHESSFQDPSRDELIQQVKELQIINANQRPEKILQEAFEKINLLVITIDQDGLIVYANEAFLEVIGWEKQRLLGENWKEFLEPGKDKNKEEHIYTLIKKQGFIDQLKRKFLSKEGDYRTIKFNVVIHHPIGNDVHLTTLIGEDITDKKKVIRALKDSNDQLQDLFENANDLIQVFDLDGKIQFVNRAWKDILQYSDEEILKLNFRDIIAKEQVGVTMEHLNNILAGKKDDKFETVFTSKNGRNIQVICSVNVRYEKEKPVSFRGIFHDNTEHMRAERAQNLYYKISTLAINSDRLDSLLDNIHKELRTIIAVNNFHVALYDRDHNYLNFPYYVDENIGPKPISMKRIVGKGLTEYSLFNEEPTFLYEEDINKLSEAGAIELLGPTPKIWLGVPLRLENRTIGVICVKSHSDRNKYKRRHVELLDFISGQIALVIERKRNEEQIIDKTARLNAIFESSSHLIWSVNRKRGLTSFNQNYANAIFRKYQKYPTIYDEGVTKEVLVLSDPEFHDSIDKKYKDAFNGQPQHFEACNTNQNGEIFWRETYLNPIFLPDGRIDEVSGISHDITEKKQWEITIQESEEKFRNIFESFQDIYYRTDLSGYITMISPSGCELSGYTQEEIIGKHISEFFTTPKQQVNLIREVLKTGRVKNYETNVNIKGGESIQSISNIRLIYNNEGKPIGVDGVARDITFLKKASQELYHAKEIAEKSLKVKENFLANMSHEIRTPMNGVIGMIDLLNETPLMEEQRKYVQTIKKSSETLLNILNDILDLSKIEAGKMQLRLAPISIEQTVEKLHALFYQQATLKNIDLLYSIDSNVPKVVLADETRLLQILSNLTSNAIKFTDQGSVRIQISLQSKKDLVNKIRVNISDTGIGIAQDKLNVLFGYFNQVDNSSSKSYGGTGLGLAISKELSKLMNGEIGVQTEANKGSVFWFTFEANESKRLVEAKVETPNAFSSEKTFKDYPKILLVDDNAINLFVASEILRKAGCEIDTAGNGLEAIQKVKENPYRMVLMDIQMPQMDGIEATAEIRKLNLAYTPPIIAMTAYSMKEDKDRFMVNGMDDYIAKPIKAESLISKVKAWLDSNAAKNGHTATQTSDETAVEIPILDLEVFEKLKSLSGAEIIDQIYKEFENESLEQIVDCKNSLAMGDFHNILNKLHTLKGVSGTLGLIELESISRLVESKLKKGDYPELAVDIEKLSEAHNRFIEHYTFILNSNSK

SEQ ID NO: 12816 - protein, 192 aa, Sequoiadendron giganteum
DDHGEVISEIRRSDLEPYLGLHYPATDLPQASRFLFMKNKVRMICDCYATPVKVVEDNRLPRELILCGSTLRAPHGCHAEYMSNMGSIASLAIAVTINAKEEDGDTDGQQQQQKGRRLWGLVVCHHTSPRFVPFPMRYACEFLMQVFAIQLNKEVELADQLREKHILRTQTLLCDMLLRDAPMGIIRQKPNI

SEQ ID NO: 12817 - protein, 1140 aa, Adiantum capillus-veneris
MSSKTMTYSSSAAEPRSSSSSVVGSKHNRRVVVAQTTADAKLHAVFEQAQSEGDTGGSSFDYMRSIEDARGSVLSERVPAQAVTAYLQRMQRGGLIQPFGCMLALEEGSFRVIAYSENAAEMLDLMPQSVPSVGVQVLVLGIGTDARTLFTYASAAALEKASGAVDVSMLNPITVHCRSSSKPFNAIVHRIDVGLVIDFEPVRPADVAVWAAAGALQSHKLAAKAISRLQALPVGDIDLLCDSVVEEVRELTGYDRVMAYKFHEDEHGEVLAEIRRSDLEPYLGLHYPATDIPQASRFLFMKNRVRMICDCRALPVRVIQDKELRQPLSLAGSTLRAPHGCHSQYMANMGSIASLVMAVVVNDNDEDVSNRSQQPKMRRLWGLVVCHHTTPRAVPFALRSACEFLMQVFGLQLNMELELAAQMREKHILRTQTLLCDMLLRDAPIGIVSESPNIMDLVKCDGAALYYGKNFWLLGTTPIEAQIKDLAEWLLDVHRDSTGLSTDSLADAGYPGAAALGDAVCGMAAAKITTRDFLFWFRSHTAKEIKWGGAKHDPEDRDDGRKMHPRSSFKAFLEVVKRRSLPWEDMEMDAIHSLQLILRGSFQDIDDSDTKTMIHARLNDLKLHGMDELSTVANEMVRLIETATAPIFAVDAGGFINGWNAKVAELTGLTVEEAMSRSLVRDVVVNASMETAERVLDLALQGQEEQNVEIKLKTYGDQAIKGPVILIVNACSSRDFTDNVVGVCFVGQDVTGQKVVMDKFTRIQGDYKTIVQNPNPLIPPIFGADEFGYCSEWNPAMEKFSGWKREDVIGKMLIGEVFGSDLACCKLRGQDSMTKFMIILNAAMGGRDSDRFPFGFFDRYGKYAEALLIANKRTDSDGAITGVFCFLHTASPELQQALQVQKRSARTALDRLKEVAYMKQEIRNPLYGIVFTRKLLDNTNLTDEQKQIMETSSLCEKQLQNILDEDNFEKLDQGNVDLDTLEFTMGTVMDAVISQGMIRSREKGLQLIRETHVEIKNTRLFGDQYRLQQVLADFLTTAIRFTSSSDGWVGIKVVPTIKNMKDGLHIVHFEFRVSHPGSGIPEDLVQQMYDRSQEITQEGMGLSVSRKLVKLMNGDVKYTREAGVCYFLVTVELPLVQEDD

SEQ ID NO: 12818 - protein, 1118 aa, Adiantum capillus-veneris
MSSTRHSYSSGGSGKSKHGRRIAQTSADAKLYAAYEESSESGSFDYSQSVSAGKEGISSQLVTAYLQRMQRGGLVQQFGCLIAVEEETFRVLAYGANAPEMLDVATQAVPTMGQYSRLCIGADVRTLLSPASASALDRVIGVVDVSMFNPITVQSRSSGKPFYAILHRNDVGLVIDLEPIRPDDASITGGALQSHKLAAKAIARLQSLPGGDIGLLCDSVVEEVHELTGFDRVMAYKFHEDEHGEVVAEIRRTDLEPYIGLHYPATDIPQAARFLFMKNRVRMICDCRLPPVKLIQDKTLSQPMSLTGSKLRAPHGCHTQYMANMNSISSLVMAVIVNDSDDDSPGHSSQGIKLWGLVVCHHTSPRYVPFPVRSACEFLMQVFSLQLNMEVGMAAQVREKHILRTQTLLCDMLLRDAPIGIVSQSPNIMDLVTCDGAALYYGKKCWLLGTTPTEAQIVDIAAWLLDCHKDSTGLSTDSLAKTGYPEASCLGDAVCGLAAAKITATDFLFWFRSHTAKEVRWGGARHDPEERDDGRRMHPRSSFKAFLEVVKQQSLPWEDVEMDAIHSLQLILRGSFQDIDDSNTKTMIHARLNDLKLQGLDELSTVASEMVRLIETATAPILAVDGQGLINGWNGKVAELTGLSFETAMGKSLAKELVHEESKTIVERVLHLALEGEEEQDIEIHLRTYDQHKQKGVVILIVNTCCSRDVSNNVVGVCFVGQDVTGQKLVLDRFIRIQGDYKAIVQSLNPLIPPIFGADEYGFCSEWNAAMEKLSNWRREEVLGKMLVGEIFGLQMVCCRLQGQDVVTKLMIVLNDAVNGQESEKFPLVFYDRNGRRVEALLIASKRTDADGRITGVFCFLHTASPELLQALIIKRAKEKVDKELSYVKEELKKPLEGLAFTRTVLEGTNLTIEQRQLIKTNAWCERQLRKILEDDLNNIEEGYMDLEMSEFFMGSVIDAVISQGMAASRGKGVQILTEIPNDVKLMCLFGDQARLQQVLADLLFCAINHATTTNEDEKDWVTIKVSRTKTRLDDGVHLMHFEFRISHSGQGISEALVEEMTNKSQKWTPEGLAISISCTLIRLMNGDVKYTTDAGNKCFLVTIQFPLAHRDDATSVR

SEQ ID NO: 12819 - protein, 1117 aa, Adiantum capillus-veneris
MSSTRHSYSSGGSGKSKHGRRIAQTSANAKLYAAYEESSESGSFDYSQSVSAGKEGISSQLVTAYLQRMQRGGLVQQFGCLIAVEEETFRVLHMCEAPEMLDVATQAVPTMGQYSRLCIGADVRTLLSPASASALDRVIGVVDVSMFNPITVQSRSSGKPFYAILHRNDVGLVIDLEPIRPDDASITGGALQSHKLAAKAIARLQSLPGGDIGLLCDSVVEEVHELTGFDRVMAYKFHEDEHGEVVAEIRRTDLEPYIGLHYPATDIPQAARFLFMKNRVRMICDCRLPPVKLIQDKTLSQPMSLTGSTLRAPHGCHTQYMANMNSISSLVMAVIVNDSDDDSAGHSSQGIKLWGLVVCHHTSPRYVPFPVRSACEFLMQVFSLQLNMEVGMAAQVREKHILRTQTLLCDMLLRDAPIGIVSQSPNIMDLVTCDGAALYYGKKCWLLGTTPTEAQIVDIAAWLLDCHKDSTGLSTDSLAKTGYPEASCLGDAVCGLAAAKITATDFLFWFRSHTAKEVRWGGARHDPEERDDGRRMHPRSSFKAFLEVVKQQSLPWEDVEMDAIHSLQLILRGSFQDIDDSNTKTMIHARLNDLKLQGLDELSTVASEMVRLIETATAPILAVDGQGLINGWNGKVAELTGLSFETAMGKSLAKELVHEESKTIVERVLHLALEGEEEQDIEIHLRTYDQHKQKGVVILIVNTCCSRDVSNNVVGVCFVGQDVTGQKLVLDRFIRIQGDYKAIVQSLNPLIPPIFGADEYGFCSEWNAAMEKLSNWRREEVLGKMLVGEIFGLQMVCCRLQGQDVVTKLMIVLNDAVNGQESEKFPLVFYDRNGRRVEALLIASKRTDADGRITGVFCFLHTASPELLQALIIKRAKEKVDKELSYVKEELKKPLEGLAFTRTVLEGTNLTIEQRQLIKTNAWCERQLRKILEDDLNNIEEGYMDLEMSEFFMGSVIDAVISQGMAASRGKGVQILTEIPNDVKLMCLFGDQARLQQVLADLLFCAINHATTTNEDEKDWVTIKVSRTKTRLDDGVHLMHFESRISHSGQGISEALVEEMTNKSQKWTPEGLAISISCTLIRLMNGDVKYTTDAGNKCFLVTIQFPLAHRDDATSVR

SEQ ID NO: 12820 - protein, 973 aa, Adiantum capillus-veneris
MSSKTMTYSSSAAEPRSSSSSVVGSKHNRRVVVAQTTADAKLHAVFEQAQSEGDTGGSSFDYMRSIEDARGSVLSERVPAQAVTAYLQRMQRGGLIQPFGCMLALEEGSFRVIAYSENAAEMLDLMPQSVPSVGVQVLVLGIGTDARTLFTYASAAALEKASGAVDVSMLNPITVHCRSSSKPFNAIVHRIDVGLVIDFEPVRPADVAVWAAAGALQSHKLAAKAISRLQALPVGDIDLLCDSVVEEVRELTGYDRVMAYKFHEDEHGEVLAEIRRSDLEPYLGLHYPATDIPQASRFLFMKNRVRMICDCRALPVRVIQDKELRQPLSLAGSTLRAPHGCHSQYMANMGSIASLVMAVVVNDNDEDVSNRSQQPKMRRLWGLVVCHHTTPRAVPFALRSACEFLMQVFGLQLNMELELAAQMREKHILRTQTLLCDMLLRDAPIGIVSESPNIMDLVKCDGAALYYGKNFWLLGTTPIEAQIKDLAEWLLDVHRDSTGLSTDSLADAGYPGAAALGDAVCGMAAAKITTRDFLFWFRSHTAKEIKWGGAKHDPEDRDDGRKMHPRSSFKAFLEVVKRRSLPWEDMEMDAIHSLQLILRGSFQDIDDSDTKTMIHARLNDLKLHGMDELSTVANEMVRLIETATAPIFAVDAGGFINGWNAKVAELTGLTVEEAMSRSLVRDVVVNASMETAERVLDLALQGQEEQNVEIKLKTYGDQAIKGPVILIVNACSSRDFTDNVVGVCFVGQDVTGQKVVMDKFTRIQGDYKTIVQNPNPLIPPIFGADEFGYCSEWNPAMEKFSGWKREDVIGKMLIGEVFGSDLACCKLRGQDSMTKFMIILNAAMGGRDSDRFPFGFFDRYGKYAEALLIANKRTDSDGAITGVFCFLHTASPELQQALQVQKRSARTALDRLKEVAYMKQEIRNPLYGIVFTRKLLDNTNLTDEQKQIMETSSLCEKQLQNILDEDNFEKLDQ

SEQ ID NO: 12821 - protein, 1142 aa, Mesotaenium caldariorum
MSTSRMSQSSGESTAKTKREVRVAQATADAKLNTAFEASAAVGGSFDYTKSVGASLNAGSEAIPSSAVTAYLQRMQRGGITQTFGCMLMVEEGSFRVRAFSENAGEMLDLVPQAVPSMGQQSLIAVGTDIRTLFTSASVSLLEKAAMATDVSVMNPVSLQSRAAKKPFFAVLHRIDVGLVVDLEPVRPSDPNVSAAGAMQSHKLAAKAISRLQSLPGGDIGLLCDAVVEEVRELTGYDRVMAYKFHEDEHGEVIAEIRRSDLEPYLGLHYPATDIPQAARFLFMKNRVRIICDCSAPPVKVIQDPTMKHPISLAGSTLRGVHGCHAQYMANMGSVASLVMAVIINDNSSEEGATAAGGILHKGRKLWGLVVCHHSSPRYVPFPLRSACEFLMQVFGLQLNMEVELSSQLREKHILRTQTLLCDMLLRDAPMGIVSQSPNITDLVKCDGAALFYHGRAWLLGVTPSEAQVRDIAAWLLDSHKDSTGLSTDSLADAGYPNADSLGVSVCGMAAARITSKDFLFWFRSHAQKEVKWAGAKQEPGDRDREEGEEGGRMHPRSSFQAFLEVVKQRSLPWEDVEMDAIHSLQLILRGSFQDMEGEGGGSQQGNKRMINARLNDLKLQGMDELSTVANEMVRLIETATAPILAVDSLGCVNGWNAKVSELTGLPVSEAMGKSLVKDLVQRESREAVERVLYMALNGEEEQNVEIQLKTWGPQLHSHGGTVILVVNACASRDVSESVVGVCFVGQDVTGEKEVLDKFIRIQGDYTTIVRSRNSLIPPIFGSDEYGCCTEWNPAMEKLTGVRREDVIGRMLMGDVFGSALRLRGSDGLTQFMIVLNRAMDGADTDKFPFTFYDREGKCVDSLLTANKRTDADGAITGVFCFLHTVSLELQQALSVQKAAERVAEAKAKELAYIRQEIQNPLDGIHFARSFIEHTELSEDQKQLMETSATCEKQLRRILDDMDLESIEEGYLELETGEFMMATVMNSVVSQGMVQSSKKGLQLFCDTPPEFKSMCVFGDQVRLQQVLADFLMNAVQFTPASGWVEIKVVPNVRSLPGGITMAHMEFRVTHSGEGLPEDLVHQMFDRADAHSKSQEGLGLSMCRKIVRLMSGEVRYVREPGKSYFLVLLDLPLAQREDAGSAM

SEQ ID NO: 12822 - protein, 577 aa, Mesotaenium caldariorum
VFGLQLNMEVELSSQLREKHILRTQTLLCDMLLRDAPMGIVSQSPNITDLVKCDGAALFYHGRAWLLGVTPSEAQVRDIAAWLLDSHKDSTGLSTDSLADAGYPNADSLGVSVCGMAAARITSKDFLFWFRSHAQKEVKWAGAKQEPGDRDREEGEEGGRMHPRSSFQAFLEVVKQRSLPWEDVEMDAIHSLQLILRGSFQDMEGEGGGSQQGNKRMINARLNDLKLQGMDELSTVANEMVRLIETATAPILAVDSLGCVNGWNAKVSELTGLPVSEAMGKSLVKDLVQRESREAVERVLYMALNGEEEQNVEIQLKTWGPQLHSHGGTVILVVNACASRDVSESVVGVCFVGQDVTGEKEVLDKFIRIQGDYTTIVRSRNSLIPPIFGSDEYGCCTEWNPAMEKLTGVRREDVIGRMLTGDVFGSALRLRGSDGLTQFMIVLNRAMDGADTDKFPFTFYDREGKCVDSLLTANKRTDADGAITGVFCFLHTVSLELQQALSVQKAAERVAEAKAKELAYIRQEIQNPLDGIHFARSFIEHTELSEDQKQLMETSATCEKQLRRILDDMDLESIEEG

SEQ ID NO: 12823 - protein, 1126 aa, Physcomitrella patens
MSTTKLAYSSGSSVKSKHSVRVAQTTADAKLQAVYEESGDSGDSFDYSKSVHASKSTGENVPALAVTAYLQRMQRGGLVQTFGCMLCVDESSFRVIAYSENAPEMLDLMPQAVPSVGQQEVLGIGTDARTLFTPSSAAALEKCAGAVDVTMLNPISVHCRSSGKPFYAILHRIDVGLVIDFEPVRPNDAVVSSAGALQSHKLAAKAISRLQALPGGDIGLLCDTVVEEVRQLSGYDRVMAYKFHEDEHGEVLAEIRRSDLEPYLGLHYPATDIPQASRFLFMKNRVRMIGDCYAPPVKVVQDKDLRQPISLAGSTLRAPHGCHAQYMGNMNSIASLVMAVIVNDPDEDPNSRGGQQRGRKLWGLVVCHHTSPRTVSFPLRSACEFLMLVFGLQLNMEVELAAQLREKHILRTQTLLCDMLLRDAPIGIVSQSPNIMDLVKCDGAALYYGKRFWLLGITPNEVQIKEIADWFLEHHQDSTGLSTDSLADAGYPGAAQLGDAVCGMAAAKITPRDFLFWFRSHTAKEIKWGGAKHDPDEKDDGRKMHPRSSFKAFLEVVKRRSLPWEDIEMDAIHSLQLISRGSFQDIDDSDTKTMIHARLNDLKLQGMDELSTVANEMVRLIETATAPILAVDSSGFINGWNAKVAELTGLPVGEAMGRSLVKDLILEESIDVVQRLLYLALQGEEEQNIEIQLKTFGPQKEKGAVILIVNACSSRDVQDNVVGVCFVGQDVTGQKQVLDKFTRIQGDYKAIVQNPNPLIPPIFGTDEYGYCSEWNPSMEKLTGWKREEVLGKLLVGEIFGMQLMCCRLKGQDAMTKFMIALNSAMDGQDTDRFPFSFFDRQGKYVDALLTVNKRTDAEGSITGVFCFLHTTSVELLQALTVQRATEKVAFAKLKELAYIRQEIKNPLYGIMFTRNLMEDTDLSEDQRQFVETSAVCERQLRKVLDDMDLESIEDGYLELDTNEFVMGTVMDAVVSQGMITSREKGLQLIRETPREIKNMCLFGDQVRLQQVLADFLLNAVKFTPSSGGWVGIKVVPTKKRLGGGIHVMHLEFRVTHSGMGLPEELVHEMFDRGRGMTQEGLGLSMCRKLVKLMNGNVQYIRETGKSYFLVEVELPLAQRDDAGSVR

SEQ ID NO: 12824 - protein, 1130 aa, Physcomitrella patens
MSTPKLAYSSGSSVKSKHSVRVAQTTADAKLQAVYEESGDSGDSFDYSKSVHASKSTGENVSAQAVTAYLQRMQRGGLMQTFGCMLCVEESNFRVIAFSENAPEMLDLMPQAVPSVGQQEVLGIGTDARTLFTPSSAAALEKCAGTVDVTMLNPISVHCRSSGKPFYAILHRIDVGLVIDFEPVRSNDAIVSSAGVLQSHKLAAKAISRLQALPGGDIGLLCDIVVQEVRELSGYDRVMAYKFHEDEHGEVLAEIRRSDLEPYLGLHYPATDIPQASRFLFMKNKVRMIGDCFASPVKVIQDKDLRQPISLAGSTLRAPHGCHAQYMGNMNSIASLVMAVIVNDPDEDPNARGGQQRGRKLWGLVVCHHTSPRTVSFPLRSACEFLMQVFGLQLNMEVELAAQLREKHILRTQTLLCDMLLRDAPIGIVSQSPNIMDLVKCDGAALHYGKRFWLLGITPNDAQIKEIADWLLEHHQDSTGLSTDSLADAGYPGAAQLGDAVCGMAAAKITSKDFLFWFRSHTAKEIKWGGAKHDPDEKDDGRKMHPRSSFKAFLVVVKRRSLPWEDIEMDAIHSLQLILRGSFQDIDDSDTKTMIHARLNDLKLQDMDELSTVANEMVRLIETATAPILAVDSGGFINGWNAKVAELTGLPVEEAMGRSLVKDLILNESIDVVQRLLHLALQGDEEQNIEIQLKTFGPQKEKGAVILIVNACSSRDVQDNVVGVCFVGQDVTGQKQVLDKFTRIQGDYKAIVQNPNPLIPPIFGTDEYGYCSEWNPSMEKLTGWKREEVIGKLLVGEIFGIQLMCCRLKSQDAMTKFMIVLNGAMDGQDTDRFPFSFFDRQGKYVDPLLTVNKRTDAEGSITGVFCFLHTTSVELLQALTVQRSTEKVAFAKLKELAYIRQEIKNPLYGIVFTRNLMEDTDLSVDQRQLVETSAVCERQLRKILDDLDLESIEDGYLELDTTEFEMGTVMDAVVSQGMITSREKGLQLIRETPSEIKNMCLYGDQVRLQQVLADFLLNAVRFTPSSEGWVGIKVVPTKKRLGRGVHVMHVEFRVTHPGLGLPEELVHEMFGRGRGMTQEGLGLSMCRKLVKLMNGTVQYIRETGKSCFLVEVELPLAQRDDAGSVRSTVV

SEQ ID NO: 12825 - protein, 1123 aa, Physcomitrella patens
MSTPKKTYSSTSSAKSKAHSVRVAQTTADAALQAVFEKSGDSGDSFDYSKSVSKSTAESLPSGAVTAYLQRMQRGGLTQSFGCMIAVEGTGFRVIAYSENAPEILDLVPQAVPSVGEMDTLRIGTDVRTLFTASSVASLEKAAEAQEMSLLNPITVNCRRSGKQLYAIAHRIDIGIVIDFEAVKTDDHLVSAAGALQSHKLAAKAITRLQALPGGNIGLLCDTVVEEVRELTGYDRVMAYRFHEDEHGEVVAEIRRADLEPYLGLHYPGTDIPQASRFLFMKNKVRIIADCSAPPVKVIQDPTLRQPVSLAGSTLRSPHGCHAQYMGNMGSIASLVMAVIINDNEEDSHGSVQRGRKLWGLVVCHHTSPRTVPFPLRSACGFLMQVFGLQLNMEVELAAQLREKHILRTQTLLCDMLLRDAPIGIVSQIPNIMDLVKCDGAALYYGKRFWLLGTTPTESQIKDIAEWLLEYHKDSTGLSTDSLADANYPAAHLLGDAVCGMAAAKITAKDFLFWFRSHTAKEIKWGGAKHDPGEKDDGRKMHPRSSFKAFLEVVKRRSLPWEDVEMDAIHSLQLILRGSFQDIDDSDTKTMIHARLNDLKLHDMDELSVVANEMVRLIETATAPILAVDSNGMINGWNAKIAQVTGLPVSEAHGRSLVKDLVTDESVAVVERLLYLALRGEEEQNVEIKLKTFGTQTEKGVVILIVDACSSIHVSENVVGVCFVGQDVTGQKMFMDKFTRIQGDYKTIVQNPHPLIPPIFGADEFGYCFEWNPAMEGLTGWKKDEVVGKLLVGEIFGMQMMCCRMKSQDAMTKFMIALNTAMDGQSTDKFTFSFFDREGKYVDVLLSTNKRTNADGVITGVFCFLQIASSELQQALKVQRATEKVAVAKLKELAYIRQEIKNPLCGITFTRQLLEDTDLSDDQQQFLDTSAVCEQQLQKVLNDMDLESIEDGYLELDTAEFEMGTVMNAVISQGMTTSREKGLQIFRETPREINTMRLLGDQIRLQQVLSDFLLNTVRFTPSPEGWVKIKVVPTRKRLGGSVHVVHLEFRVSHPGAGLPEELVLEMYDRGKGMTQEGLGLNMCRKLVRLMNGDVHYVREAMQCYFVVNVELPMAQRDDASSQM

SEQ ID NO: 12826 - protein, 1122 aa, Physcomitrella patens
MSAPKKTYSSTSSAKSKAHSVRVAQTTADAALHAVFEKSGVSGDNFDYSKSVSKSTAGSLHTGAVTAYLQRMQRGGLTQSFGCMVAVEETGFRVIAYSENAPEFLDLMPQAVPNIGEINTLGIGTDVRTLFTPSSAASLEKAAETQEISLLNPITVYCRSKKPLYAIAHRIDIGIVIDFEAVNMNDVTISADGALQSHKLAAKAITRLQALPGGDIGLLCDTVVEEVRELTGYDRVMAYKFHEDEHGEVVAEIRRTDLEPYLGLHYPATDIPQASRFLFMKNRVRMIGDCSAPPEKIVQDPNLRQPVSLAGSTLRSPHGCHAQYMGNMGSISSIVMAVIINDNEDDSRGSVQRGRKQWGLVVCHHTSPRTVPFPLRSACEFLMQVFGLQLNMEVELAAQLREKHILRTQTLLCDMLLRDAPTGIVSQVPNIMDLVKCDGAALYYGKRFWLLGTTPTESQIKDIAEWLLEYHKDSTGLSTDSLADANYPAAHLLGDAVCGMAAAKITSKDFLFWFRSHTAKEIKWGGAKHDPGEKDDNRKMHPRSPFKAFLEVVKRRSLPWEDVEMDAIHSLQLILRGSFQDIDDSDTKTMIHARLNDLKLHDMDELSIVANEMVRLIETATAPILAVDSNGMINGWNAKIAQETGLPVAEAMGRSLVKDLVMDESLEVVERLLYLALRGEEEQGVEIKLKTFGAQTVKGAVTLIVNACASRDVSENVVGVCFVGQDVTGQKMFMDKFTRIQGDYKTIVQNPHPLIPPIFGADEFGYCFEWNPAMEGLTGWKRDEVIGKLLVGEIFGMQKMCCQMKSQDAMTKFMISLNSAMDGQNTDKFSLSFFDREGRYVDALLSTNKRTNADGAITGVICFLQIASSELQQALRVQQATEKVAIAKLKELAYIRQEIKNPLCGITFTRQLLEDTDLSNDQKQFLDTSAVCEQQLQKVLNDLDLESIEDGYLELDTAEFEMRTVMDAVISQGMTISREKGLQIIRETPREIITMRLFGDQVRLQQVLSDFLLNAVRFTPSSEGWVKIKVVPTRKRLGGNEHVMHLEFRVSHPGAGLPEELVLEMFDKGKGMTQEGLGLNICRKLVRLMNGDVQYVREAMQCYFVLYVELPLAQQDDAASQM

SEQ ID NO: 12827 - protein, 1132 aa, Physcomitrella patens
MSTPKKTYSSTSSAKSKAHSVRVAQTTADAALQAVFEKSGDSGDSFDYSKSVSKSTAESLPSGAVTAYLQRMQRGGLTQSFGCMIAVEGTGFRVIAYSENAPEILDLVPQAVPSVGEMDTLRIGTDVRTLFTASSVASLEKAAEAQEMSLLNPITVNCRRSGKQLYAIAHRIDIGIVIDFEAVKTDDHLVSAAGALQSHKLAAKAITRLQALPGGNIGLLCDTVVEEVRELTGYDRVMAYRFHEDEHGEVVAEIRRADLEPYLGLHYPGTDIPQASRFLFMKNKVRIIADCSAPPVKVIQDPTLRQPVSLAGSTLRSPHGCHAQYMGNMGSIASLVMAVIINDNEEDSHGSVQRGRKLWGLVVCHHTSPRTVPFPLRSACGFLMQVFGLQLNMEVESAAQLREKHILRTQTLLCDMLLRDAPIGIVSQIPNIMDLVKCDGAALYYGKPFWLLGTTPTESQIKDIAEWLLEYHKDSTGLSTDSLADANYPAAHLLGDAVCGMAAAKITAKDFLFWFRSHTAKEIKWGGAKHDPGENHDGRKMHPRSSFKAFLEVVKRRSLPWEDVEMDAIHSLQLILRGSFQDIADSDTKTMIHARLNDLKLHDMDELSVVANEMVRLIETATAPILAVDSNGMINGWNAKIAQVTGLPVSEAHGRSLVKDLVTDESVAVVERLLYLALRGEEEQNVEIKLKTFGTQTEKGVVILIVDACSSIHVSENVVGVCFVGQDVTGQKMFMDKFTRIQGDYKTIVQNPHPLIPPIFGADEFGYCFEWNPAMEGLTGWKKDEVVGKLLVGEIFGMQMMCCRMKSQDAMTKFMIALNTAMDGQSTDKFTFSFFDREGKYVDVLLSTNKRTNADGVITGVFCFLQIASSELQQALKVQRATEKVAVAKLKELAYIVREIKNPLCGLTFTRQLLEDTDLSDDQQQFLDTSAVCEQQLQKSLNDMDLESIEDGYLELDTAEFEMGTVMNAVISQGMTTSREKGLQIFRETPREINTMRLLGDQIRLQQVLSDFLLNTVRFTPSPEGWVKIKVVPTRKRLGGSVHVVHLEFRVSHPGAGLPEELVLEMYDRGKGMTQEGLGLNMCRKLVRLMNGDVHYVREAMQCYFVVNVELPMAQRDDASSQCRSLYSYLLA

SEQ ID NO: 12828 - protein, 1126 aa, Ceratodon purpureus
  unsure (1)..(1126): unsure at all Xaa locations
MASAKMAYSSGSGIKSKHSVRVAQTTSDAKLQAVYEESNDSGDSFDYSKSVAQAAKSTGQQQVPAQAVTAYLQRMQRGGLTQTFGCMLAVEENTFRVIAYSENAPELLDVMPQAVPSLGQQDVLGIGTDARSLFTPSSATALERAAGAADLSLVNPISVHSRASGKPFYAIIHRIDVGIVMGFEPVRPNDVIVSTAGTLHSHKLAAKAIARLQALSGGDIGLLCDTVVEEVRELTGYDRVMAYKFHEDEHGEVLAEIRRSDLEPYLGLHYPSTDIPQASRFLFMKNRVRMIVDCWAPPVKVIQDKDLRQPISLAGSTLRAPHGCHAQYMGNMGSVASVTMAVIXNDQEDDFGGQQTRARRLWGLVVCHHTSARTISFPLRSACEFLMQVFGLQLNMEVELENQKREKHILRTQTMLCDMLLRDAPVGIVSQCPNIMDLVKCDGAALYYGKRFWLLGITPSEEQIEEIANWLLEHHQDSTGLSTDSLADAGYPGANLLGDAVCGMAAARITPTDFLFWFRSHTAKEIKRGGAKHEADDKDDGRKMTPRSSFNAFLEVMKRRSVPWEDIEMDAIHSLQLILRGSFQDIDDSDTKTMIHARLNDLKLQGMDELSTVANEMVRLIETATAPILAVDSNGFINGWNAKVAELTGLPVGDAMGRSLVQDLIVDESVEVVERLLYLALQGDEEQDVEIQLRTFGPQKGKGAVILIVNACSSRDVQDNVVGVCFVGQDVTSQKQVHDKFTRIHGDYKSIVQNPNPLIPPIFGSDELGYCTEWSPSMEKLTGWKRDEVLGKMLVGEVFGTQQICCRLKGQDSVTKFMIVLNNAMDGQDTDKYPFSFYDRQGKFVEALLTANKRTDADGYITGVFCFLHIASPELLQALTVQRATEKVAFAKLKELAYIRQEIKNPLYGIMFTRNLMEDTDLSDEQKQFMDTSAVCERQLRKILDDMDLESIEDGYLELETAESELGSMMDAVVSQGMITSREKGLQLIRETPREINDMSLFGDQVRLQHVLADFLLNAVRLTPSSEGWVGIKVVPTKKRLGGGFHVVHLEFRVAHPGSGLPEELVHEMFDRGRGMTQEGLGLSMCRKLVKLMNGEVKYIRDTGKSYFLVNLELPLTVRDESGMLR

SEQ ID NO: 12829 - protein, 1121 aa, Ceratodon purpureus
MSAPKKTYSSTTSAKSKHSVRVAQTTADAALEAVYEMSGDSGDSFDYSKSVGQSAESVPAGAVTAYLQRMQRGGLIQTFGCMVAVEEPNFCVIAYSENASEFLDLMPQAVPSMGEMDVLGIGTDIRTLFTPSSGAALEKAAATQDISLLNPITVHCRRSGKPLYAIAHRIDIGIVIDFEAVKMNDVSVSAAGALQSHKLAAKAITRLQALPGGDIGLLCDTVVEEVRELTGYDRVMAYKFHEDEHGEVVAEIRRMDLEPYLGLHYPATDIPQASRFLFMKNRVRVIADCCASPVKLIQDPDIKQPVSLAGSTLRAPHGCHAQYMGNMGSIASLVMAVIINDNEEDSRGAIQRGRKLWGLVVCHHTSPRTVPFPLRSACEFLMQVFGMQLNMEVELAAQLREKHILRTQTLLCDMLLRDAPIGIVSQTPNIMDLVKCDGAALYYGKRFWLLGTTPTENQIKDIAEWLLEYHKDSTGLSTDSLADANYPGAHLLGDAVCGMAAAKITAKDFLFWFRSHTAKEVKWGGAKHDPAEKDDGRKMHPRSSFKAFLEVVKRRSLPWEDVEMDAIHSLQLILRGSFQDIDDSDTKTMIHARLNDLKLHGMDELSVVANEMVRLIETATAPILAVDSTGMINGWNAKIAHVTGLPVSEAMGRSLVKDLVLDESVVVVERLLYLASQGEEEQNVEIKLKTFGTQTEKEAVILIVNACSSRDVSDSVVGVCFVGQDVTGQKMFMDKFTRIQGDYKTIVKNPHPLIPPIFGGDEYGYCFEWNPAMEALTGWKHDEVVGKLLVGEIFGMEMMCCRLKSQDSMTKFMISLNNAMDGTNTDKFSFSFCNREGKFVEALLSTNKRTNADGVITGVFCFLQIASSELQQALTVQRATEKVAIAKLKELAYIRQEIKNPLCGITFTRQLLEDTDLSDDQKQFLDTSAVCEQQLQKVLNDMDLESIEDGYLELDTAEFEMGTVMDAVISQGMTTSREKGLQIIRETPREISTMRLFGDQIRLQQVLSDFLINAIRFTPSSEGWVKIKVVPTRKRLGGNVHVMHLEFRVSHPGGGLPDELVLEMYDRAKGMTQEGLGLNMCRKLVRLMNGDVQYVRENAQCYFVVYVELPMAQRDDAASQM

SEQ ID NO: 12830 - protein, 1121 aa, Ceratodon purpureus
MSAPKKTYSSTTSAKSKHSVRVAQTTADAALEAVYEMSGDSGDSFDYSKSVGQSAESVPAGAVTAYLQRMQRGGLIQTFGCMVAVEEPNFCVIAYSENASEFLDLMPQAVPSMGEMDVLGIGTDIRTLFTPSSGAALEKAAATQDISLLNPITVHCRRSGKPLYAIAHRIDIGIVIDFEAVKMNDVSVSAAGALQSHKLAAKAITRLQALPGGDIGLLCDTVVEEVRELTGYDRVMAYKFHEDEHGEVVAEIRRMDLEPYLGLHYPATDIPQASRFLFMKNRVRVIADCCASPVKLIQDPDIKQPVSLAGSTLRAPHGCHAQYMGNMGSIASLVMAVIINDNEEDSRGAIQRGRKLWGLVVCHHTSPRTVPFPLRSACEFLMQVFGMQLNMEVELAAQLREKHILRTQTLLCDMLLRDAPIGIVSQTPNIMDLVKCDGAALYYGKRFWLLGTTPTENQIKDIAEWLLEYHKDSTGLSTDSLADRNYPGAHLLGDAVCGMAAAKITAKDFLFWFRSHTAKEVKWGGAKHDPAEKDDGRKMHPRSSFKAFLEVVKRRSLPWEDVEMDAIHSLQLILRGSFQDIDDSDTKTMIHARLNDLKLHGMDELSVVANEMVRLIETATAPILAVDSTGMINGWNAKIAHVTGLPVSEAMGRSLVKDLVLDESVVVVERLLYLASQGEEEQNVEIKLKTFGTQTEKEAVILIVNACSSRDVSDSVVGVCFVGQDVTGQKMFMDKFTRIQGDYKTIVKNPHPLIPPIFGGDEYGYCFEWNPAMEALTGWKHDELVGKLLVGEIFGMEMMCCRLKSQDSMTKFMISLNNAMDGTNTDKFSFSFCNREGKFVEALLSTNKRTNADGVITGVFCFLQIASSELQQALTVQRATEKVAIAKLKELAYIRQEIKNPLCGITFTRQLLEDTDLSDDQKQFLDTSAVCEQQLQKVLNDMDLESIEDGYLELDTAEFEMGTVMDAVISQGMTTSREKGLQIIRETPREISTMRLFGDQIRLQQVLSDFLINAIRFTPSSEGWVKIKVVPTRKRLGGNVHVMHLEFRVSHPGGGLPDELVLEMYDRGKGMTQEGLGLNMCRKLVRLMNGDVQYVRENAQCYFVVYVELPMAQRDDAASQM

SEQ ID NO: 12831 - protein, 1134 aa, Selaginella martensii
MSTTKLTYSSGSSAKSKHSVRVAQTTADAKLHAVYEESGESGDSFDYSKSINATKSTGETIPAQAVTAYLQRMQRGGLVQPFGCMLAVEEGSFRVIAFSDNAGEMLDLMPQSVPSLGSGQQDVLTIGTDARTLFTAAASALEKAAGAVDLSMLNPIWVQSKTSAKPFYAIVHRIDVGLVMDLEPVKASDTRVGSAAGALQSHKLAAKAISRLQSLPGGDIGLLCDTVVEEVRDVTGYDLVMAYKFHEDEHGEVVAEIRRSDLEPYLGLHYPATDIPQASRFLFMKNRVRMICDCSAPPVKITQDKELRQPISLAGSTLRAPHGCHAQYMGNMGSVASLVMAMIINDNDEPSGGGGGGGQHKGRRLWGLVVCHHTSPRSVPFLRSACEFLMQVFGLQLNMEAAVAAHVREKHILRTQTLLCDMLLRDAPIGIVSQSPNIMDLVKCDGAALYYGKRFWLLGITPSEAQIKDIAEWLLEHHKDSTGLSTDSLADAGYPGAASLGDEVCGMAAAKITAKDFLFWFRSHTAKEVKWGGAKHDPDDKDDGRKMHPRSSFKAFLEVVKRRSLPWEDVEMDAIHSLQLILRGSFQDIDDSDTKTMIHARLNDLKLQGMDELSTVANEMVRLIETATAPILAVDSSGFINGWNAKVADVTGLPVTEAMGRSLAKELVLHESADMVERLLYLALQGDEEQNVELKLKTFGGQKDKEAVILVVNACASRDVSDNVVGVCFVGQDVTGQKVVMDKFTRIQGDYKAIVQNPNPLIPPIFGADEFGYCSEWNPAMEKLSGWRREEVLGKMLVGEIFGIQMMYCRLKGQDAVTKFMIVLNSAADGQDTEKFPFAFFDRQGKYVEALLTATKRADAEGSITGVFCFLHIASAELQQALTVQRATEKVALSKLKELAYIRQEIKNPLYGIMFTRTLMETTDLSEDQKQYVETGAVCEKQIRKILDDMDLESIEDGYLELDTTEFMMGTVMDAVISQGMITSKEKNLQLIRETPKEIKAMFLYGDQVRLQQVLADFLLNAIRFTPSSENWVGIKVATSRKRLGGVVHVMHLEFRITHPGVGLPEELVQEMFDRGRGMTQEGLGLSMCRKLVKLMNGEVEYIREAGKNYFLVSLELPLAQRDDAGSVKFQASS

SEQ ID NO: 12832 - protein, 267 aa, Selaginella martensii
FCFLHIASAELQQALTVQRATEKVALSKLKELGLHPPEIKNPLYGIMFTRTLMETTDLSEDQKQYVETGTVCEKQIRKILDDMDLESIEDGYLELDTTEFMMGTVMDAVISQGMITSKEKNLQLIRETPKEIKAMFLYGDQVRLQQVLADFLLNAIRFTPSSENWVGIKVATSRKRLGGVVHVMHLEFRITHPGVGLPEELVQEMFDRGRGMTQEGLGLSMCRKLVKLMNGEVEYIREAGKNYFLVSLELPLAQRDDAGSVKFQASS

SEQ ID NO: 12833 - protein, 1131 aa, Pinus sylvestris
MASNSRHTQSQSTGSNNRRSSTNTNTTTNKATAMAQYNSDARLLQVFEQSGESGKSFDYTRSIQVHNRAVPEQQITAYLSRIQRGGRIQPFGCVLAVEETTFRIIAYSENEEMLDLGAQSVPSMEKPQQDVLTIGTDVRTLFTAASAHSLEKAAVAQEISLMNPIWVHCKNSRKPFYAIVHRIDVGMVIDLEPLRTGDAFMSAAGAVQSQKLAVRAISRLQSLPCGDVGLLCDTVVENVRELTGYDRVMVYKFHEDEHGEVVAEIRRSDLEPYLGLHYPATDIPQASRFLFMQNRVRMICDCMATPVKVIQSEELMQPLCLVGSTPSAPHGCHAQYMANMGSIRSLLMAVIINGNDDEGGGSGRNSMKLWGLVVCHHTSPRAVPFPLRYACEFLMQALGLQLNMELQLAAQLTEKHILRTQTLLCDMLLRDAPMGIVTQSPSIKDLVKCDGAALYYGGMCWMLGVTPTEAQIKDIADWLLEHHGDSTGLSTDSLADAGYPGAASLGDAVCGMASARITSKDFLFWFRSHTAKEMKWGGAKHHPDDKDDARRMHPRSSFKAFLEVVKRRSLPWDNVEIDAIHSLQLILRCSFRDIDDSGTKTMVHSRLNYLRLQGIDELSSVASEMVRLIETATAPILAVDYNGLVNGWNAKVAELTGLPVGEAMGMSLVQDLVFEQSVERVEKMLHNALRGEEEKNVEMMLKTFGPQKEKEAVILVVNACSSRDFTDNIVGVCFVGQDVTSQKVVMDKFIRIQGDYRSIVQSPNPLIPPIFASDEYACCSEWNAAMEKVTGWTHDEVIGKMLVGEIFGGCCRLKGQDAVTKFTIVLHQCNHGQEIEKFPFAFFDKQGKYVEALLTANKRTDADGRITGSFCFFRIASSELQHALEVQRQQEKKCFARLKELAYIRQEIKNPLYGMMFTRKLLEETDLSDDQKQFVETSAVCERQMQKVMDDMDLESLEDGYMELDTAEFILGTVIDAVVSQGMIVLREKGLQLIREIPGEVKTMRLYGDEVKIQQILADFLLNVLRFTPSPEGWVAIKVFPTLKQLGGGLHVVHLEFRITHPGLGLPAELVQDLFDRSQWATQEGVGLSMCRKLLKLMNGDVRYIRESGICYFLVNVEFPMAQREDAASIK

SEQ ID NO: 12834 - protein, 1151 aa, Populus balsamifera subsp. trichocarpa
MASQSQRQSNQRQHQNQAAQSSGTSNMRQHHHATESVSKAIAQYTVDAQLHAVFEQSGGSGKSFDYSQSVRTTSQSVPEEQITAYLSKIQRGGHIQPFGCMIAVDEGSFRVIAYSENAKEMLGLTPQSVPSLDKQEILSDGTDVRTLFRPSSSAMLEKAFGAREIILLNPIWIHSKNSGKPFYAILHRIDVGIVIDLEPARTEDPALSIAGAVQSQKLAVRSISQLQSLPGGDIKLLCDTVVESVRELTGYDRVMVYKFHEDEHGEVVAENKRADLEPYIGLHYPSTDIPQASRFLFKQNRVRMIVDCHATPVRVIQDEALMQPLCLVGSTLRAPHGCHAQYMANMGSIASLAMAVIINGNEEEAIGGRNSTRLWGLVVCHHTSARCIPFPLRYACEFLMQAFGLQLNMELQLASQLSEKHVLRTQTLLCDMLLRDSPTGIVTQSPSIMDLVKCDGAALYYQGQYYPLGVTPTEAQIKDIVEWLLALHGDSTGLSTDSLADAGYPGAASLGNAVCGMAVAYITKRDFLFWFRSHTAKEIKWGGAKHHPEDKDDGQRMHPRSSFKAFLEVVKSRSLLWENAEMDAIHSLQLILRDSFRDVEATNSKAVVHAQLEDTELQGMDELSSVAREMVRLIETATAPIFAVDVDGCINGWNAKVAELTGLSVDKAMGKSLVHDLVYKEYEETVDKLLHRALRGEEDKNVEIKLRTFGSEHQKKALFVVVNACSSKDYMNNIVGVCFVGQDVTGQKVVMDKYVHIQGDYKAIVHSPNPLIPPIFASDENTCCLEWNTAMEKFTGWSRGEVIGKMLVGEVFGSCCQLKGSDALTKFMIALHNAIGGQDTDKLPFSFFDRNGKYVQALLTANKRVNMEGEIVGAFCFLQIASNELQQALKVQRQQEKKCSARMKELAYICQEIRNPLSGLRFTNSLLENTDLTEDQKQFLETSAACEKQILKITRDVDLESIENGLLELEKAEFLFGSVINAVVSQAMLLLRERNLQLLRDIPEEIKTLVVYGDQARIQQVLADFLLNMVRYAPSSAGWVEIHVCPTLKQISDGHTLVHMEFKYALLNSFACLPPELVQDMFHSSRWVTQEGLGLSMCRKILKLMNGEVQYIRESERCYFLVILEVPMPNKCERYNCKKCCRLGCLVCNVY

SEQ ID NO: 12835 - protein, 1146 aa, Populus balsamifera subsp. trichocarpa
MASQSQRQSNQPVHNQAQSSGTSNMRQHHHATESVSKAIAQYTVDAQLHAVFEQSGGTGRSFDYSKSVRTTNQSVPEQQITAYLSKIQRGGHIQPFGCMIAADEQSFRVIAYSENAKDMLGLTPQSVPSLEKQEILFVGADVRILFRPSSAVLLEKAFGAREITLLNPIWIHSKNSGKPFYAILHRIDVGIVIDLEPARTEDPALSIAGAVQSQKLAVRAISQLQSLPGGDIKLLCDTVVDSVRELTGYDRVMVYKFHEDEHGEVVAENKRVDLEPYIGLHYPSTDIPQASRFLFKQNRVRMIVDCHAIPVRVIQDEALMQPLCLVGSTLRAPHGCHAQYMENMGSIASLAMAVIIYGNDEEAIGGRNSMRLWGLVVCHHTSARCIPFPLRYACEFLMQAFGLQLNMELQLASQLLEKHVLRTQTLLCDMLLRDSPTGIVTQSPSIMDLVKCDGAALYYQGQYYPLGVTPTETQIKDIVEWLLTLHGDPTGLSTDSLADAGYPGAAFLGDAVCGMAVAYIAERDFLFWFRSHTAKEVKWGGAKHHPEDKDDGQRMHPRSSFKAFLEVVKSRSLPWENAEMDAIHSLQLILRDSFRDAEATNSKAVVHTQLKDMELQGMDELSSVAREMVRLIETATAPIFAVDVDGRINGWNAKVAELTGLSVEEAMGKSLVHDLVYKEYEEIVDKLIHRAVKGEEDKNVEIKLRTFCSEHQKKAVFVVVNACSSKDYMDNIVGVCFVGQDITGQKVVMDKYVLIQGDYKAIVHSPNPSIPPIFASDENTCCLEWNTAMEKLTGWSRGEVVGKMLVGEVFGSCCRLKGPDALTKFMIALHNAIGGIDTDKLPFSFFDRNEKNVQTLLTANKRVNMEGDIIGAFCFLQIASPELQQTLKVQKQQEKKSFARMKELAYICQEIKNPLSGIHFTNSLLENTDLTEDQQQFLETSAACEKQILKIIRDIDLESIENGSLELEKAEFLLGSVINAVVSQAMLLLRERNLQLLRDIPEEIKTLAVYGDQARIQQVLADFLLNMVRYAPSSAGWVEIHVCPTLKQISDGHTLVHTEFKYLERVLQTRMLGLQHPLRSFLNFKLTLVMLHREGMVPKIQFQGLSVCQGRLIWLSYPENTTVTLYPLTIWFLLLYRRQSRSITHT

SEQ ID NO: 12836 - protein, 1172 aa, Arabidopsis thaliana
MVSGVGGSGGGRGGGRGGEEEPSSSHTPNNRRGGEQAQSSGTKSLRPRSNTESMSKAIQQYTVDARLHAVFEQSGESGKSFDYSQSLKTTTYGSSVPEQQITAYLSRIQRGGYIQPFGCMIAVDESSFRIIGYSENAREMLGIMPQSVPTLEKPEILAMGTDVRSLFTSSSSILLERAFVAREITLLNPVWIHSKNTGKPFYAILHRIDVGVVIDLEPARTEDPALSIAGAVQSQKLAVRAISQLQALPGGDIKLLCDTVVESVRDLTGYDRVMVYKFHEDEHGEVVAESKRDDLEPYIGLHYPATDIPQASRFLFKQNRVRMIVDCNATPVLVVQDDRLTQSMCLVGSTLRAPHGCHSQYMANMGSIASLAMAVIINGNEDDGSNVASGRSSMRLWGLVVCHHTSSRCIPFPLRYACEFLMQAFGLQLNMELQLALQMSEKRVLRTQTLLCDMLLRDSPAGIVTQSPSIMDLVKCDGAAFLYHGKYYPLGVAPSEVQIKDVVEWLLANHADSTGLSTDSLGDAGYPGAAALGDAVCGMAVAYITKRDFLFWFRSHTAKEIKWGGAKHHPEDKDDGQRMHPRSSFQAFLEVVKSRSQPWETAEMDAIHSLQLILRDSFKESEAAMNSKVVDGVVQPCRDMAGEQGIDELGAVAREMVRLIETATVPIFAVDAGGCINGWNAKIAELTGLSVEEAMGKSLVSDLIYKENEATVNKLLSRALRGDEEKNVEVKLKTFSPELQGKAVFVVVNACSSKDYLNNIVGVCFVGQDVTSQKIVMDKFINIQGDYKAIVHSPNPLIPPIFAADENTCCLEWNMAMEKLTGWSRSEVIGKMIVGEVFGSCCMLKGPDALTKFMIVLHNAIGGQDTDKFPFPFFDRNGKFVQALLTANKRVSLEGKVIGAFCFLQIPSPELQQALAVQRRQDTECFTKAKELAYICQVIKNPLSGMRFANSLLEATDLNEDQKQLLETSVSCEKQISRIVGDMDLESIEDGSFVLKREEFFLGSVINAIVSQAMFLLRDRGLQLIRDIPEEIKSIEVFGDQIRIQQLLAEFLLSIIRYAPSQEWVEIHLSQLSKQMADGFAAIRTEFRMACPGEGLPPELVRDMFHSSRWTSPEGLGLSVCRKILKLMNGEVQYIRESERSYFLIILELPVPRKRPLSTASGSGDMMLMMPY

SEQ ID NO: 12837 - protein, 1164 aa, Arabidopsis thaliana
MVSGGGSKTSGGEAASSGHRRSRHTSAAEQAQSSANKALRSQNQQPQNHGGGTESTNKAIQQYTVDARLHAVFEQSGESGKSFDYSQSLKTAPYDSSVPEQQITAYLSRIQRGGYTQPFGCLIAVEESTFTIIGYSENAREMLGLMSQSVPSIEDKSEVLTIGTDLRSLFKSSSYLLLERAFVAREITLLNPIWIHSNNTGKPFYAILHRVDVGILIDLEPARTEDPALSIAGAVQSQKLAVRAISHLQSLPSGDIKLLCDTVVESVRDLTGYDRVMVYKFHEDEHGEVVAESKRNDLEPYIGLHYPATDIPQASRFLFKQNRVRMIVDCYASPVRVVQDDRLTQFICLVGSTLRAPHGCHAQYMTNMGSIASLAMAVIINGNEEDGNGVNTGGRNSMRLWGLVVCHHTSARCIPFPLRYACEFLMQAFGLQLNMELQLALQVSEKRVLRMQTLLCDMLLRDSPAGIVTQRPSIMDLVKCNGAAFLYQGKYYPLGVTPTDSQINDIVEWLVANHSDSTGLSTDSLGDAGYPRAAALGDAVCGMAVACITKRDFLFWFRSHTEKEIKWGGAKHHPEDKDDGQRMNPRSSFQTFLEVVKSRCQPWETAEMDAIHSLQLILRDSFKESEAMDSKAAAAGAVQPHGDDMVQQGMQEIGAVAREMVRLIETATVPIFAVDIDGCINGWNAKIAELTGLSVEDAMGKSLVRELIYKEYKETVDRLLSCALKGDEGKNVEVKLKTFGSELQGKAMFVVVNACSSKDYLNNIVGVCFVGQDVTGHKIVMDKFINIQGDYKAIIHSPNPLIPPIFAADENTCCLEWNTAMEKLTGWPRSEVIGKLLVREVFGSYCRLKGPDALTKFMIVLHNAIGGQDTDKFPFPFFDRKGEFIQALLTLNKRVSIDGKIIGAFCFLQIPSPELQQALEVQRRQESEYFSRRKELAYIFQVIKNPLSGLRFTNSLLEDMDLNEDQKQLLETSVSCEKQISKIVGDMDVKSIDDGSFLLERTEFFIGNVTNAVVSQVMLVVRERNLQLIRNIPTEVKSMAVYGDQIRLQQVLAEFLLSIVRYAPMEGSVELHLCPTLNQMADGFSAVRLEFRMACAGEGVPPEKVQDMFHSSRWTSPEGLGLSVCRKILKLMNGGVQYIREFERSYFLIVIELPVPLMMMMPSS

SEQ ID NO: 12838 - protein, 1164 aa, Arabidopsis thaliana
MVSGGGSKTSGGEAASSGHRRSRHTSAAEQAQSSANKALRSQNQQPQNHGGGTESTNKAIQQYTVDARLHAVFEQSGESGKSFDYSQSLKTAPYDSSVPEQQITAYLSRIQRGGYTQPFGCLIAVEESTFTIIGYSENAREMLGLMSQSVPSIEDKSEVLTIGTDLRSLFKSSSYLLLERAFVAREITLLNPIWIHSNNTGKPFYAILHRVDVGILIDLEPARTEDPALSIAGAVQSQKLAVRAISHLQSLPSGDIKLLCDTVVESVRDLTGYDRVMVYKFHEDEHGEVVAESKRNDLEPYIGLHYPATDIPQASRFLFKQNRVRMIVDCYASPVRVVQDDRLTQFICLVGSTLRAPHGCHAQYMTNMGSIASLAMAVIINGNEEDGNGVNTGGRNSMRLWGLVVCHHTSARCIPFPLRYACEFFMQAFGLQLNMELQLALQVSEKRVLRMQTLLCDMLLRDSPAGIVTQRPSIMDLVKCNGAAFLYQGKYYPLGVTPTDSQINDIVEWLVANHSDSTGLSTDSLGDAGYPRAAALGDAVCGMAVACITKRDFLFWFRSHTEKEIKWGGAKHHPEDKDDGQRMNPRSSFQTFLEVVKSRCQPWETAEMDAIHSLQLILRDSFKESEAMDSKAAAAGAVQPHGDDMVQQGMQEIGAVAREMVRLIETATVPIFAVDIDGCINGWNAKIAELTGLSVEDAMGKSLVRELIYKEYKETVDRLLSCALKGDEGKNVEVKLKTFGSELQGKAMFVVVNACSSKDYLNNIVGVCFVGQDVTGHKIVMDKFINIQGDYKAIIHSPNPLIPPIFAADENTCCLEWNTAMEKLTGWPRSEVIGKLLVREVFGSYCRLKGPDALTKFMIVLHNAIGGQDTDKFPFPFFDRKGEFIQALLTLNKRVSIDGKIIGAFCFLQIPSPELQQALEVQRRQESEYFSRRKELAYIFQVIKNPLSGLRFTNSLLEDMDLNEDQKQLLETSVSCEKQISKIVGDMDVKSIDDGSFLLERTEFFIGNVTNAVVSQVMLVVRERNLQLIRNIPTEVKSMAVYGDQIRLQQVLAEFLLSIVRYAPMEGSVELHLCPTLNQMADGFSAVRLEFRMACAGEGVPPEKVQDMFHSSRWTSPEGLGLSVCRKILKLMNGGVQYIREFERSYFLIVIELPVPLMMMMPSS

SEQ ID NO: 12839 - protein, 1112 aa, Arabidopsis thaliana
MGFESSSSAASNMKPQPQKSNTAQYSVDAALFADFAQSIYTGKSFNYSKSVISPPNHVPDEHITAYLSNIQRGGLVQPFGCLIAVEEPSFRILGLSDNSSDFLGLLSLPSTSHSGEFDKVKGLIGIDARTLFTPSSGASLSKAASFTEISLLNPVLVHSRTTQKPFYAILHRIDAGIVMDLEPAKSGDPALTLAGAVQSQKLAVRAISRLQSLPGGDIGALCDTVVEDVQRLTGYDRVMVYQFHEDDHGEVVSEIRRSDLEPYLGLHYPATDIPQAARFLFKQNRVRMICDCNATPVKVVQSEELKRPLCLVNSTLRAPHGCHTQYMANMGSVASLALAIVVKGKDSSKLWGLVVGHHCSPRYVPFPLRYACEFLMQAFGLQLQMELQLASQLAEKKAMRTQTLLCDMLLRDTVSAIVTQSPGIMDLVKCDGAALYYKGKCWLVGVTPNESQVKDLVNWLVENHGDDSTGLTTDSLVDAGYPGAISLGDAVCGVAAAEFSSKDYLLWFRSNTASAIKWGGAKHHPKDKDDAGRMHPRSSFTAFLEVAKSRSLPWEISEIDAIHSLRLIMRESFTSSRPVLSGNGVARDANELTSFVCEMVRVIETATAPIFGVDSSGCINGWNKKTAEMTGLLASEAMGKSLADEIVQEESRAALESLLCKALQGEEEKSVMLKLRKFGQNNHPDYSSDVCVLVNSCTSRDYTENIIGVCFVGQDITSEKAITDRFIRLQGDYKTIVQSLNPLIPPIFASDENACCSEWNAAMEKLTGWSKHEVIGKMLPGEVFGVFCKVKCQDSLTKFLISLYQGIAGDNVPESSLVEFFNKEGKYIEASLTANKSTNIEGKVIRCFFFLQIINKESGLSCPELKESAQSLNELTYVRQEIKNPLNGIRFAHKLLESSEISASQRQFLETSDACEKQITTIIESTDLKSIEEGKLQLETEEFRLENILDTIISQVMIILRERNSQLRVEVAEEIKTLPLNGDRVKLQLILADLLRNIVNHAPFPNSWVGISISPGQELSRDNGRYIHLQFRMIHPGKGLPSEMLSDMFETRDGWVTPDGLGLKLSRKLLEQMNGRVSYVREDERCFFQVDLQVKTMLGVESRGTEGSSSIK

SEQ ID NO: 12840 - protein, 1156 aa, Glycine max
MLQQAERRIPPFRRRKSTPHEQRLSHHSSNNNNNIDSMSKAIAQYTEDGVHAVFEQSGESGRSFNYSESIRIASESVPEQQITAYLVKIQRGGFIQPFGSMIAVDEPSFRILGYSDNARDMLGITPQSVPSLDDKNDAAFALGPQSVPSLDDKNDAAFALGTDVRALFTHSSALLLEKAFSAREISLMNPIWIHSRTSGKPFYGILHRIDVGIVIDLEPARTEDPALSIAGAVQSQEALVRAISQLQSLPSADVKLLCDTVVESVRELTGYDRVMVYKFHEDEHGEVVSESKRPDLEPYIGLHYPATDIPQASRFLFKQNRVRMIVDCHASAVRVVQDEALVQPLCLVGSTLGAPHGCHAQYMANMGSIASLVMAVIINGNDEEGVGGRSSMRLWGLVVCHHTSARCIPFPLRYACEFLMQAFGLQLNMELQLAAQSLEKRVLRTQTLLCDMLLRDSPTGIVTQSPSIMDLVKCDGAALYFQGNYYPLGVTPTEAQIRDIIEWLLAFHGDSTGLSTDSLGDAGYPGLPRLGMQFVGWQVAYITEKDFLFWFRSHTAKEIKWGGAKLILRTRMMGQRMHPLSSFKAFLEVVKSRSLPWENAEMDAIHSLQLILRDSFKDAEHRNSKAVVDPHVSEQELQGVDELSSVAREMVRLIETATAPIFAVDVDGHVNGWNAKVSELTGLPVEEAMGKSLVHDLVFKESEETVNKLLSREEDKNVETKMRTFGKEHQNKAAFLVVNACSSKHFTNNVVGVCFVGQNVTGQKIVMHKFINIQGDYKAIVHSPNPLIPPIFASDDNTCCLEWNTAMEKLDPSNENVTVGGVDVIGKMLVGEVFGSCCQLKGSDSITKFMIVLHNALGGQDTDKFPFSFLDRHGKYVQTFLTANKRVNMEGQIIGAFCFLQIMSPELQQALKAQRQQEKEFLGRMKELAYICQGVKKPLSGIRFTNSLLEATSLTNEQKQFLETSVACEKQMLKIIRDVDLESIEDGSLELEKGEFLLGNVINAVVSQVILLLRERNLQLIRDIPEEIKTLAVYGDQLRIQQVLSDFLLNIVRYAPSPDGWVEIHVRPRIKQISDGLTLLHAEFRMVCPGEGLPPELIQDMFNNSRWGTQEGLGLSMSRKILKLMNGEVQYIREAERCYFYVLLELPVTRRSSKKC

SEQ ID NO: 12841 - protein, 1156 aa, Glycine max; identical to SEQ ID NO: 12840

SEQ ID NO: 12842 - protein, 1121 aa, Pisum sativum
  unsure (1)..(1121): unsure at all Xaa locations
SNNNNNRNIKRESLSMRKAIAQYTEDAXLHAVFEKSGDSFDYAQSIRVTAATESVPEQQITAYLAKIQRGGFIQPFGSMIAVDETSFRVLAYSENARDMLGIAPQSVPSMEDDSSSSSFFSLGVDVRSLFSASSSVLLEKAFSAREISLMNPIWIHSRSTGKPFYGILHRIDIGVVIDLEPARSEDPALSIAGAVQSQKLAVRAISQLQALPGGDVKLLCDAVVESVRELTGYDRVMVYKFHEDEHGEVVAESKRVDLEPYIGLHYPATDIPQASRFLFKQNRVRMIVDCNASPVRVFQDEALVQPVCLVGSTLRAPHGCHAQYMANMGSIASLAMAVIINGNDEDGGGIGGAARGSMRLWGLVVCHHTSARCIPFPLRYACEFLMQAFGLQLNMELQLAVQSLEKRVLKTQTLLCDMLLRDSHTGIVTQSPSIMDLVKCDGAALYYQGNYHPLGVTPTESQIRDIIDWLLAFHSDSTGLSTDSLADAGYPGAASLGDAVCGMAVAYITEKDFLFWFRSHTAKEIKWGGAKHHPEDKDDGQKMHPRSSFKAFLEVVKIRSMQWDNAEMDAIHSLQLILRDSFKEAENNDSKAVVHTHMAELELQGVDELSSVAREMVRLIETATAPIFAVDVDGRINGWNAKVSELTGLLVEEAMGKSLVHDLVYKESRETVDKLLSHALKGEEDKNVEIKMKTFGPGNQNKAVFIVVNACSSKDYTNNIVGVCFVGQDITGQKVVMDKFINIQGDYKAIVHSPNPLIPPIFASDDNTCCLEWNNAMEKLSGWSRADVIGKLLVGEVFGSFCQLKGSDAMTKFMIVLHNALGGHDTDKFPLSFLDRHGKYVHTFLTANKRVNMDGQIIGAFCFLQIVNPELQQALTVQRQQDSSSLARMKELAYICQEVKNPLSGIRFTNSLLESTCLTDEQKQLLETSVACEKQMLKIVRDIALESIEDGSLELEKQEFLLENVINAVVSQVMLLLRDRKLQLIRDIPEEIKALAVYGDQLRIQQVLADFLMNVVRYAPSPDGWVEIHVFPRIKQISEGLTLLHAEFRMVCPGEGLPPELIQDMFHNSRWVTQEGLGLSMSRKIIKLMNGEVQYVREAERCYFLVLLELPVTRRSSKAIN

SEQ ID NO: 12843 - protein, 1137 aa, Oryza sativa (indica cultivar-group)
MSSSRSNNRATCSRSSSARSKHSARVVAQTPMDAQLHAEFEGSQRHFDYSSSVGAANRSGATTSNVSAYLQNMQRGRFVQPFGCLLAVHPETFALLAYSENAAEMLDLTPHAVPTIDQREALAVGTDVRTLFRSHSFVALQKAATFGDVNLLNPILVHARTSGKPFYAIMHRIDVGLVIDLEPVNPVDLPVTATGAIKSYKLAARAIARLQSLPSGNLSLLCDVLVREVSELTGYDRVMAYKFHEDEHGEVIAECKRSDLEPYLGLHYPATDIPQASRFLFMKNKVRMICDCSATPVKIIQDDSLTQPISICGSTLRAPHGCHAQYMASMGSVASLVMSVTINEDEDDDGDTGSDQQPKGRKLWGLMVCHHTSPRFVPFPLRYACEFLLQVFGIQINKEVELAAQAKERHILRTQTLLCDMLLRDAPVGIFTQSPNVMDLVKCDGAALYYQNQLWVLGSTPSEAEIKNIVAWLQEYHDGSTGLSTDSLVEAGYPGAAALGDVVCGMAAIKISSKDFIFWFRSHTAKEIKWGGAKHEPIDADDNGRKMHPRSSFKAFLEVVKWRSVPWEDVEMDAIHSLQLILRGSLQDEDANKNNNAKSIVTAPSDDMKKIQGLLELRTVTNEMVRLIETATAPILAVDITGSINGWNNKAAELTGLPVMEAIGKPLVDLVIDDSVEVVKQILNSALQGIEEQNLQIKLKTFNHQENNGPVILMVNACCSRDLSEKVVGVCFVAQDMTGQNIIMDKYTRIQGDYVAIVKNPSELIPPIFMINDLGSCLEWNEAMQKITGIKREDAVDKLLIGEVFTHHEYGCRVKDHGTLTKLSILMNTVISGQDPEKLLFGFFNTDGKYIESLMTATKRTDAEGKITGALCFLHVASPELQHALQVQKMSEQAAMNSFKELTYIRQELRNPLNGMQFTRNLLEPSDLTEEQRKLLASNVLCQEQLKKILHDTDLESIEQCYTEMSTVDFNLEEALNTVLMQAMPQSKEKQISIDRDWPAEVSCMHLCGDNLRLQQVLADFLACTLQFTQPAEGPIVLQVIPRMENIGSGMQIAHLEFRLVHPAPGVPEALIQEMFRHSPGASREGLGLYISQKLVKTMSGTVQYLREAESSSFIVLVEFPVAQLSTKRCKASTSKF

SEQ ID NO: 12844 - protein, 1131 aa, Lycopersicon esculentum
MASGSRTKHSYHNSSQGQAQSSGTSNMNYKDSISKAIAQYTADARLHAVFEQSGESGKSFDYSQSVKTTTQSVPERQITAYLTKIQRGGHIQPFGCMIAVDEASFRIIAYSENACEMLSLTPQSVPSLDKSEILTVGTDVRTLFTPSSSVLLERAFGAREITLLNPIWIHSKNSGKPFYAILHRVDVGIVIDLEPARTEDPALSIAGAVQSQKLAVRAISHLQSLPGGDIKLLCDTVVESVRELTGYDRVMVYKFHEDEHGEVVAESKRSDLEPYIGLHYPATDIPQASRFLFKQNRVRMIVDCHATPVRVTQDESLMQPLCLVGSTLRAPHGCHAQYMANMGSIASLTLAVIINGNDEEAVGGGRNSMRLWGLVVGHHTSVRSIPFPLRYACEFLMQAFGLQLNMELQLASQLSEKHVLRTQTLLCDMLLRDSPPGIVTQSPSIMDLVKCDGAALYYQRKYYPLGVTPTEAQIKDIVEWLLAYHGDSTGLSTDSLADAGYPGAASLGDAVCGMAVAYITSKDFLFWFRSHTAKEIKWGGAKHHPEDKDDGQRMHPRSSFKAFLEVVKSRSSPWENAEMDAIHSLQLILRDSFKDAEASNSKAIVHALGEMELQGIDELSSVAREMVRLIETATAPIFGVDVNGRINGWNEKVVELTGLSAEEAKGKSLVHDLLYKESQESAEKLLYNALRGVEGKNVEIKLRTFGAEQVEKAVFLVVNACSSRDYTNSIVGVSFVGQDVTGEKIVMDKFIHIQGDYKAIVHSPNPLIPPIFASDENTSCSEWNTAMEKLSGWSREEIVGKMLVGEIFGSCCRLKGPDAMTKFMIVLHNAIGGQDTDKFPFSFFDRNGKYVQALLTANKRVNMEGDTIGAFCFIQIASPELQQALRVQRQQEKKCYSQMKELAYICQEVKSPLNGIRFTNSLLEATNLTEYQKQYLETSAACERQMSKIIRDVDLENIEDGSLTLEKEDFFLGSVIDAVVSQVMLLLREKGVQLIRDIPEEIKTLTVHGDQVRIQQVLADFLLNMVRYAPSPDGWVEIQLRPSMMPISDGATVVHIELRIICPGEGLPPELVQDMFHSSRWVTQEGLGLSMCRKMLKLMNGEIQYIRESERCYFMIILDLPMTRKGPKSVG

SEQ ID NO: 12845 - protein, 1121 aa, Lycopersicon esculentum
MASGSGSRGKHDRNHQPKNQSQFSGTSNTNALSKAVAQYTTDARLHAAFEQSGESGKNFDYSQSVRNSTESVTEHQITAYLNKMQRGGHIQPFGCTIAVEEASFCVIAYSENACEMLDIMPQSVPSLEKNEILKIGTDVRTLFSSSSSGLLEGAFGAREITLLNPIWVHSKNSGKPFYAILHRIDVGIVIDLEPARTEDPALSIAGAVQSQKLAVRAISLLQSLPGGDIDLLCDTVVKSVRELTGYDRVMVYKFHDDEHGEVVAESRRSDLEPYIGLHYPATDIPQASRFLFKQNRVRMIVDCTAIPVRVIQDESLMQPLCLVGSTLRAPHGCHPQYMVNMGNVASLTLAVVINGNDDEVVGGRNAMRLWGLVVGHHSSARFIPFPLRYACEFLMQAFGLQLNMELQLASQLAEKRVLRTQTVLCDMLLRDSPTGIVTQNPSIVDLVKCDGAALYYQGRYYPLGITPTAAQIKGIVEWLLTCHVDSTGLSTDSLADAGYPEAASLGAAVCGMAVAYVTSKYFLFWFRSHTASEIKWGGAKHHPEDKDDWQKMHPRSSFKAFLEVVKNRSLPWENAEMDAIHSLQLILRDSFKDASNSKSIVRVQLREEGLQGMDELRSVAREMVRLVETATAPIFAVDVEGRINAWNAKVAELTELSVEEAIGKSLVHDLVHEESQTTAQNLLRKALRGEEDKNIEIKLRTFGAEQLKKTVFVEVNACSNKDYTNNIVGVSFIGQDITAQKVVLDKFVRIQGDYKAIMHSPNPLIPPIFVSDENTCCFEWNTAMEKLSGWNKEEIIGKMLVGEIFGTFCRLKGPDDMTNFMIMLHKAIGGQEIDKFPFSFSDRNGKFVQALLTANKRVNVDGQIIGAFCFLQIASPELQKTLMQRQQEKTSNIHMKELAYICRELKNPLNGIRFTNSLLEATELTENQKQFLETSAACERQMSKIIRDIDLDNIEDGSLELEKGEFFLASVIDAVVSQVMLLLRERGVQLIRDIPDEIKTLRVYGDQVRIQQVFADFLQIMASYAPPREGWVEVHLRPSIKQISDGVTIVHIEFRIVCPGEGLPPELIQDMFHNSLWVTQQGLGLSMCRRILQLMNGQVQYIRESERCFFLIILQLPMLIQ

SEQ ID NO: 12846 - protein, 1137 aa, Lycopersicon esculentum
MESQSSENRRGGGGRTSLNQNKQNNNKDSGLNTSSAASNMKNNASKAALAQYNADAKLMAEFEQSSVSGKSFDYSKSVLFPPHEANEEEITSYLSRIQRGGLVQPFGCMVAIEEPTFKIIGYSENCYDMLGFKPTKMKLGLIGVDARNLFTPSSGDSLAKVMASREISLLNPIWVHSRTTHKPFYAILHRIDVGIVIDLEPANSSDPALLLAGAVQSQKLAVRSISRLQSLPGGDIGVLCDTAVEDVQKLTGYDRVMVYKFHDDNHGEIVSEIRRSDLEPYLGLHYPATDIPQAARFLFKQNRVRMICDCNAQPVKVVQSEELKQPICLVNSTLRSPHECHSKYMANMGSISSLVMAILINSGDSMKLWGLIVCHHTSPRYVPFPLRYACEFFTQAFGLQLNMELQLASQLAEKKTLQMQTLLCDMLLRDVPFGVVTQSPSIMDLVKCDGAALYCGGKCWLLGVTPTEAQVKDIAQWLLVAHKDSTGLSTDCLADAGYPGAALLGDAVCGMATARITSKDFLFWFRSHTAKEVKWGGAKHHPDDKDDGGKMHPRSSFNAFLEVVKSRSLPWEIPEINAIHSLQIIMRESIQENENSSLKTLTTSQQNDADGPSMDELSSVAMEMVRLIETATAPIFGVDPSGLINGWNEKIADLTGLHASEAVGMSLINDITHEDSRGTVEKVLHRALLGEEEKNVEIKLRRFGKDPPGSVIYLVINACTSRDHKNGVVGVSFVAQDVTPEKFIMDKFIQLRGDYEAIVQSLSPLIPPIFASDENACCSEWNAAMERLTGWTKYEVMGRTLPGEVFGGLCRLTGQDALTKFMILFYQAISGHDTKKLPFGFFNRRGEFLEVFLTANKRTDEHGNVCGCFCFLQPMTIDPEASDERQDSKDSLWKYKEYVYVLQQMKNPLNGIQFTHKLLEATGVSDNQKQLLETSEACEKQILSVIDNMDFGGIEDGKVQLNMEEFVLGNVVDAIVSQVMIFLKEKNLQLLHDIPDQIKTLPLYGDQIKLQRVLSDFLLSVVHHAPSPDGWVEIKVLPGLKLIQDGNELIHLQLRMTHPGQGLPAALIDDMSGERNRWTTQEGIALNVAQKLLNVMNGHVRYVRGEDKCYFLIDVELQTLKPTQHGPKLEVTQEIEI

SEQ ID NO: 12847 - protein, 1135 aa, Nicotiana plumbaginifolia
MASGSRTKHSHQSGQGQGQVQAQSSGTSNVNYKDSISKAIAQYTADARLHAVFEQSGESGKSFDYSQSVKTTTQSVVPEQQITAYLTKIQRGGHIQPFGCMIAVDEASFGVIAYSENACEMLSLTPQSVPSLERPEILTVGTDVRTLFTPSSSVLLERAFGAREITLLNPIWIHSKNSGKPFYAILHRVDVGIVIDLEPAKTEDPALSIAGAVQSQKLAVRAISHLQSLPGGDVKILCDTVVESVRELTGYDRVMVYKFHEDEHGEVVAESKRPDLEPYIGLHYPATDIPQASRFLFKQNRVRMIVDCHATPVRVVQDESLMQPLCLVGSTLRAPHGCHAQYMANMGSIASLTLAVIINGNDEEAVGGRSSMRLWGLVVGHHTSARCIPFPLRYACEFLMQAFGLQLNMELQLASQLSEKHVLRTQTLLCDMLLRDSPTGIVTQSPSIMDLVKCDGAALYCQGKYYPLGVTPTEAQIKDIVEWLLTYHGDSTGLSTDSLADAGYPGAALLGDAVCGMAVAYITSKDFLFWFRSHTAKEIKWGGAKHHPEDKDDGQRMHPRSSFKAFLEVVKSRSLPWENAEMDAIHSLQLILRDSFKDAEASNSMAVVHAQLGEMELQGIDELSSVAREMVRLIETATAPIFAVDVDGRINGWNAKVAELTDLSVEEAMGKSLVHDLVHEESQETAENLLFNALRGEEDKNVEMKLRTFGSEQPKKAVFVVVNACSSKDYTNNIVGVCFVGQDVTGQKVVMDKFIHIQGDYKAIVHSPNPLIPPIFVSDENTCCSEWNTAMENLTGWSRGEIIGKMLVGETFGSCCRLKGPDAMTKFMIVLHNAIGGQDTDKFPFSFSDRNGKYVQALLTANKRVNMEGQIIGAFCFIQIASPELQQALRVQRQQDKKCYSQMKELAYLCQEIKSPLNGIRFTNSLLEATDLTEDQKQYLETSTACERQMSKIIRDVDLENIEDGSLTLDKEEFFLGSVIDAVVSQVMLLLRERSVQLIRDIPEEIKTLTVHGDQVRIQQVLADFLLNMVRYAPSPDGWVEIQLQPNMKQISDEVTVVHIEFRIVCPGEGLPPELVQDMFHSNRWVTKEGLGLSMCRKILKLMNGEIQYIRESERCYFLIILDLPMTGRGSKSVG

SEQ ID NO: 12848 - protein, 1132 aa, Nicotiana tabacum
MASGSRTKHSHQSGQGQVQAQSSGTSNVNYKDSISKAIAQYTADARLHAVFEQSGESGKSFDYSQSIKTTTQSVVPEQQITAYLTKIQRGGHIQPFGCMIAVDEASFRVIAYSENACEMLSLTPQSVPSLERPEILTVGTDVRTLFTPSSSVLLERAFGAREITLLNPIWIHSKNSGKPFYAILHRVDVGIVIDLEPARTEDPALSIAGAVQSQKLAVRAISHLQSLPGGDVKLLCDTVVESVRELTGYDRVMVYKFHEDEHGEVVAESKIPDLEPYIGLHYPATDIPQASRFLFKQNRVRMIVDCHATPVRVVQDESLMQPLCLVGSTLRAPHGCHAQYMANMGSIASLTLAVIINGNDEEAVGGRSSMRLWGLVVGHHTSARCIPFPLRYACEFLMQAFGLQLNMELQLASQLSEKHVLRTQTLLCDMLLRDSPTGIVIQSPSIMDLVKCDGAALYCQGKYYPLGVTPTEAQIKDIVEWLLTYHGDSTGLSTDSLADAGYPGAALLGDAVCGMAVAYITSKDFLFWFRSHTAKEIKWGGAKHHPEDKDDGQRMHPRSSFKAFLEVVKSRSLPWENAEMDAIHSLLILRDSFKDAEASNSKAVVHAQLGEMELQGIDELSSVAREMVRLIETATAPIFAVDVEGRINGWNAKVAELTDLSVEEAMGKSLVHDLVHKESQETAEKLLFNALRGEEDKNVEIKLRTFGPEQLKKAVFVVVNACSSKDYTNNIVGVCFVGQDVTGQKVVMDKFIHIQGDYKAIVHSPNPLIPPIFASDENTCCSEWNTAMEKLTGWSRGEIIGKMLVGEIFGSCCRLKGPDAMTKFMIVLHNAIGVQDTDKFPFSFFDRNGKYVQALLTANKRVNMEGQIIGAFCFIQIASPELQQALRVQRQQEKKCYSQMKELAYLCQEIKSPLNGIRFTNSLLEATDLTENQKQYLETSAACERQMSKIIRDVDLENIEDGSLTLEKEEFFLGSVIDAVVSQVMLLLRERSVQLIRDIPEEIKTLTVHGDQVRIQQVLADFLLNMVRYAPSPDGWVEIQLQPNMKQISDEVTVVHIEFRIVCPGEGLPPELVQDMFHSSRWVTKEGLGLSMCRKILKLMNGDIQYIRESERCYFLIILDLPMTRRGSKSLG

SEQ ID NO: 12849 - protein, 1130 aa, Solanum tuberosum
MASGSRTKHSHHSSSQAQSSGTSNVNYKDSISKAIAQYTADARLHAVFEQSGESGKFFDYSQSVKTTTQSVPERQITAYLTKIQRGGHIQPFGCMIAVDEASFRVIAYSENACEMLSLTPQSVPSLEKCEILTIGTDVRTLFTPSSSVLLERAFGAREITLLNPIWIHSKNSGKPFYAILHRVDVGIVIDLEPARTEDPALSIAGAVQSQKLAVRAISHLQSLPGGDIKLLCDTVVESVRELTGYDRVMVYKFHEDEHGEVVAESKRSDLEPYIGLHYPATDIPQASRFLFKQNRVRMIVDCHATPVRVTQDESLMQPLCLVGSTLRAPHGCHAQYMANMGSIASLTLAVIINGNDEEAVGGGRNSMRLWGLVVGHHTSVRSIPFPLRYACEFLMQAFGLQLNMELQLASQLSEKHVLRTQTLLCDMLLRDSPPGIVTQSPSIMDLVKCDGAALYYQGKYYPLGVTPTEAQIKDIVEWLLAYHGDSTGLSTDSLPDAGYPGAASLGDAVCGMAVAYITSKDFLFWFRSHTAKEIKWGGAKHHPEDKDDGQRMHPRSSFKAFLEVVKSRSSPWENAEMDAIHSLQLILRDSFKDAEASNSKAIVHAHLGEMELQGIDELSSVAREMVRLIETATAPIFAVDVEGRINGWNAKVAELTGVSVEEAMGKSLVHDLVYKESQETAEKLLYNALRGEEDKNVEIKLRTFGAEQLEKAVFVVVNACASKDYTNNIVGVCFVGQDVTGEKVVMDKFINIQGDYKAIVHSPNPLIPPIFASDENTCCSEWNTAMEKLTGWSRGEIVGKMLVGEIFGSCCRLKGPDAMTKFMIVLHNAIGGQDTDKFPFSFFDRNGKYVQALLTANKRVNMEGDTIGAFCFIQIASPELQQALRVQRQQEKKCYSQMKELAYICQEIKSPLNGIRFTNSLLEATNLTENQKQYLETSAACERQMSKIIRDIDLENIEDGSLTLEKEDFFLGSVIDAVVSQVMLLLREKGVQLIRDIPEEIKTLTVHGDQVRIQQVLADFLLNMVRYAPSPDGWVEIQLRPSMMPISDGVTVVHIELRIICPGEGLPPELVQDMFHSSRWVTQEGLGLSMCRKMLKLMNGEIQYIRESERCYFLIILDLPMTRKGPKSVG

SEQ ID NO: 12850 - protein, 1129 aa, Solanum tuberosum
MASGSRTKHSHHSSSQAQSSGTSNVNYKDSISKAIAQYTADARLHAVFEQSGESGKFFDYSQSVKTTTQSVPERQITAYLTKIQRGGHIQPFGCMIAVDEASFRVIAYSENACEMLSLTPQSVPSLEKCEILTIGTDVRTLFTPSSSVLLERAFGAREITLLNPIWIHSKNSGKPFYAILHRVDVGIVIDLEPARTEDPALSIAGAVQSQKLRSEGLFLICNHFLVGTLKLLCDTVVESVRELTGYDRVMVYKFHEDEHGEVVAESKRSDLEPYIGLHYPATDIPQASRFLFKQNRVRMIVDCHATPVRVTQDESLMQPLCLVGSTLRAPHGCHAQYMANMGSIASLTLAVIINGNDEEAVGGGRNSMRLWGLVVGHHTSVRSIPFPLRYACEFLMQAFGLQLNMELQLASQLSEKHVLRTQTLLCDMLLRDSPPGIVTQSPSIMDLVKCDGAALYYQGKYYPLGVTPTEAQIKDIVEWLLAYHGDSTGLSTDSLPDAGYPGAASLGDAVCGMAVAYITSKDFLFWFRSHTAKEIKWGGAKHHPEDKDDGQRMHPRSSFKAFLEVVKSRSSPWENAEMDAIHSLQLILRDSFKDAEASNSKAIVHAHLGEMELQGIDELSSVAREMVRLIETATAPIFAVDVEGRINGWNAKVAELTGVSVEEAMGKSLVHDLVYKESQETAEKLLYNALRGEEDKNVEIKLRTFGAEQLEKAVFVVVNACARDYTNNIVGVCFVGQDVTGEKVVMDKFINIQGDYKAIVHSPNPLIPPIFASDENTCCSEWNTAMEKLTGWSRGEIVGKMLVGEIFGSCCRLKGPDAMTKFMIVLHNAIGGQDTDKFPFSFFDRNGKYVQALLTRNKRVNMEGDTIGAFCFIQIASPELQQALRVQRQQEKKCYSQMKELAYICQEIKSPLNGIRFTNSLLEATNLTENQKQYLETSAACERQMSKIIRDIDLENIEDGSLTLEKEDFFLGSVIDAVVSQVMLLLREKGVQLIRDIPEEIKTLTVHGDQVRIQQVLADFLLNMVRYAPSPDGWVEIQLRPSMMPISDGVTVVHIELGLYAPGRLPPELVQDMFHSSRWVTQEGLGLSMCRKMLKLMNGEIQYIRESERCYFLIILDLPMTRKGPKSVG

SEQ ID NO: 12851 - protein, 1178 aa, Sorghum bicolor; identical to SEQ ID NO: 365

SEQ ID NO: 12852 - protein, 1039 aa, Sorghum bicolor
FRLLAFSENAADLLDLSPHHSVPSLDSAAPPPVSLGADARLLFSPSSAVLLERAFAAREISLLNPLWIHSRVSSKPFYAILHRIDVGVVIDLEPARTEDPALSIAGAVQSQKLAVRAISRLQALPGGDIKLLCDTVVEHVRELTGYDRVMVYRFHEDEHGEVVAESRRDNLEPYLGLHYPATDIPQASRFLFRQNRVRMIADCHATPVRVIQDPGMSQPLCLVGSTLRAPHGCHAQYMANMGSIASLVMAVIISSGGDDEQTGRGGISSAMKLWGLVVCHHTSPRCIPFPLRYACEFLMQAFGLQLNMELQLAHQLSEKHILRTQTLLCDMLLRDSPTGIVTQSPSIMDLVKCDGAALYYHGKYYPLGVTPTESQIKDIIEWLTVCHGDSTGLSTDSLADAGYLGAAALGDAVCGMAVAYITPSDYLFWFRSHTAKEIKWGGAKHHPEDKDDGQRMHPRSSFKAFLEVVKSRSLPWENAEMDAIHSLQLILRDSFRDAAEGTSNSKAIVNGQVQLGELELRGINELSSVAREMVRLIETATVPIFAVDTDGCINGWNAKIAELTGLSVEEAMGKSLVNDLIFKESEEIVEKLLSRALRGEEDKNVEIKLKTFGSEQSNGAIFVIVNACSSRDYTQNIVGVCFVGQDVTGQKVVMDKFINIQGDYKAIVHNPNPLIPPIFASDENTSCSEWNTAMEKLTGWSRGEVVGKFLIGEVFGSFCRLKGPDALTKFMVVIHNAIGGQDYEKFPFSFFDKNGKYVQALLTANTRSKMDGKSIGAFCFLQIASAEIQQAFEIQRQQEKKCYARMKELAYICQEIKNPLSGIRFTNSLLQMTDLNDDQRQFLETCSACEEQMSKIVKDATLQSIEDGSLVLEKSEFSFGDVMNAVVSQAMLLLRERDLQLIRDIPDEIKDASAYGDQFRIQQVLADFLLSMVRSAPSENGWVEIQVRPNVKQNSDGTDTELFIFRFTYPGEGLPADIVQDMFSNSQWSTQEGVGLSTCRKILKLMGGEVQYIRESERSFFLIVLELPQPRPAADREIS

SEQ ID NO: 12853 - protein, 1139 aa, Triticum aestivum
MSSSRSNNRPACSRGSSARSKHSERVVAQTPVDARLHAEFEGSQRHFDYSSSVSALNRSGASTSSAVSAYIQNMQRGRYIQPFGCLLAIHPESFALLAYSENAAEILDLTPHAVPTIDQRDALAVGADVRTLFRSQSAVALHKAAVFGEVNLLNPILVHARTSGKPFYAILHRIDVGLVIDLEPVNPADVPVTAAGALKSYKLAAKAISRLQSLPSGNLSLLCDVLVREVSELTGYDRVMAYKFHEDEHGEVIAECRRSDLEPYLGLHYPATDIPQASRFLFMKNKVRMICDCAASPVKLIQDDNLSQPISLCGSTMRAPHGCHAQYMANMGSIASLVMSITINEDDDEDGDTGSDQQPKGRKLWGLVVCHHTSPRFVPFPLRYACEFLLQVFGIQLNKEVELASQAKERHILRTQTLLCDMLLRDAPVGIFTQSPNVMDLVKCDGAALCYQNQIMVLGSTPSEGEIKKIVAWLLECHDGSTGLSTGLTLEAGYPGASALGEVVCGMAAIKISSKGFIFWFRSHTAKEIKWGGAKHEPGDADDNGRRMHPRSSFRAFLEVVKWRSVPWEDVEMDAIHSLQLILRGSLQDEDANDNNARSIVEAPSDDIKKIQGLLELKIVTNEMVRLIETATAPILAVDIVGNINGWNNKVAEITGLPTTEAIGMLLVDLVEGDSVEVVKQMLNSALQGTEEQNLEIKLKTMHQQESKGPVVLMVNACCSRDLSDKVVGVCFVAQDLTGHKMVMDKYTRIQGDYVAIVKNPNELIPPIFMINDLGSCLEWNEAMQKITGIKREDAIDKLVIGELFTLHDYGCRVKDQVTLTKLSILMNTVISGQEPEKLAFGFFNTDGKYMESLLTANKRTDAEGKITGALCFLHVASPELQHALQVQKMSEQAATHSFKELTYIRQELKNPLNGMQFTRKLLEPSDLTEEQRQLFASNVLCQEQLKKILHDNDLEGIEQCYMEMNTVEFNLEEALNTVLMQGMSVSKEKQISLDRDWPVEVSSMYLYGDNLRLQQVLADYLACTLQFTRPAEGPIVLQVIPKKEHIGSGMQIAHLEFRLVHPAPGVPEALIQEMFRHGPGVSREGLGLHISQKLVKTMSGTVQYLREAESSSFIVLVEFPVAQLNSKRSRPSTSKSNF

SEQ ID NO: 12854 - protein, 394 aa, Triticum aestivum
EPARTEDPALSIAGAVQSQKLAVRAISRLQALPGGDVKLLCDTVVEHVRELTGYDRVMVYKFHDDEHGEVLAESRRGDLEPYLGLHYPATDIPQASRFLFRQNRVRMIADCHAAAVRVIQDPAMPQPLCLVGSTLRSPHGCHAQYMANMGSIASLVMAVIISSGGEDEHNMTRGVIPSAMKLWGLVVCHHTSPRCIPFPLRYACEFLMQAFGLQLNMELQLAHQLSEKHILRTQTLLCDMLLRDSPTGIVTQSPSIMDLVKCDGAALFYHGKYYPLGVTPTEAQIKDIIEWLTVCHGDSTGLSTDSLADAGYPGATALGDAVCGMAVAYITPSDYLFWFRSHTAKEIKWGGAKHHPEDKDDGQRMHPRSSFKAFLEVVKSRSLPWENAEMDAIH

SEQ ID NO: 12855 - protein, 394 aa, Triticum aestivum; identical to SEQ ID NO: 12854

SEQ ID NO: 12856 - protein, 236 aa, Triticum aestivum
  unsure (1)..(236): unsure at all Xaa locations
XVGQDITGQKVVMDKFVNIQGDYKAIVHNPNPLIPPIFASDENICCSEWNTAMEKLTGWSRGEVVGKLLVGEVFGNCCRLKGPDALTKFMIVLHNAIGGQDSERSPFSFFDKNGKYVQALLTANTRSKMDGETIGAFCFLQIASPELQQAFEIQRQQEKKCYARMKELAYICQEIKNPLSGIRFTNSLLEMTDLKDDQRQFLETSAACEKQMSKIVKDASLQSIEDGSLVLAPXVF

SEQ ID NO: 12857 - protein, 140 aa, Triticum monococcum
QFTRKLLEPSDLTEEQRQLFASNVLCQEQLKKILHDNDLEGIEQCYMEMNTVEFNLEEALNTVLMQGMSVSKEKQISLDRDWPVEVSSMYLYGDNLRLQQVLADYLACTLQFTRPAEGPIVLQVIPKKEHIGSGMQIAHL

SEQ ID NO: 12858 - protein, 713 aa, Zea mays
  unsure (1)..(713): unsure at all Xaa locations
EPASTEDPALSIAGAVQSQKLAVRAISRLQALPGGDVKLLCDTVVEHVRELTGYDRVMVYRFHEDEHGEVVAESRRDNLEPYLGLHYPATDIPQASRFLFRQNRVRMIADCHATPVRVIQDPGLSQPLCLVGSTLRAPHGCHAQYMANMGSIASLVMAVIISSGGDDEQTGRGGISSAMKLWGLVVCHHTSPRCIPFPLRYACEFLMQAFGLQLNMELXLAHQLSEKHILRTQTLLCDMLLRDSPTGIVTQSPSIMDLVKCDGAALYYHGKYYPLGVTPTESQIKDIIEWLTVFHGDSTGLSTDSLADAGYLGAAALGEAVCGMAVAYITPSDYLFWFRSHTAKEIKWGGAKHHPEDKDDGQRMHPRSSFKAFLEVVKSRSLPWENAEMDAIHSLQLILRDSFRDAAEGTSNSKAIVNGQRHLGVLELRGINELSSVAREMVRLIETATVPIFAVDTDGCINGWNAKIAELTGLSVEEAMGKSLVNDLIFKESEATVEKLLSRALRGEEDKNVEIKLKTFGSEQSKGPIFVVVNACSSRDYTQNIVGVCFVGQDVTGQKVVMDKFVNIQGDYKAIVHNPNPLIPPIFASDENTSCSEWNTAMEKLTGWSRGEVVGKFLIGEVFGNCCRLKGPDALTKFMVIIHNAIGGQDYEKFPFSFFDKNGKYVQALLTANTRSKMDGKSIGAFCFLQIASTEIQQAFEIQRQQEKKCYAR

SEQ ID NO: 12859 - protein, 1126 aa, Marchantia paleacea var. diptera
MSTTKVTYSSGSSAKSKHSVRIVQTTADAKLQAVFEESGESGDSFDYTKSINASKSTGESVPAQAVTAYLQRMQRGGLTQTFGCMLAVEELTFRVLAYSENAPEMLDLMPQAVPCVGQQDVLGIGTDARTLFNSASAVALEKAAGALDVSMFNPISVQCKSSGKPFYAIVHRIDAGLVIDIEPVRPSDPSVSAAGALQSHKLAAKAISRLQSLPGGDIGLLCDTVVEEVRELTGYDRVMAYKFHEDEHGEVVAEIRRSDLEPYLGLHYPATDIPQASRFLFMKNRVRMICDCCAQPVQVIQDKELRQPLSLAGSTLRAPHGCHAQYMGNMGSIASLVMAVIINVNDEEYSSRGYHHKGRKLWGLVVCHHTTPRSVPFPLRSACEFLMQVFGLQLNMEVELAAQLREKRILRTQTLLCDMLLRDAPIGIVSQSPNIMDLVKCDGAALYYGKRYWVLGTTPTELQIKDIADWLLEYHKDSTGLSTDSLADAGYPGAASLGDAVCGMAAARITSKDFLFWFRSHTAKEIKWGGAKHDPDDKDDGRKMHPRSSFKAFLEVVKRRSLPWEDVEMDAIHSLQLILRGSFQDIDDSDTKTMIHARLNDLKLQGMDELSTVANEMVRLIETATAPILAVDSSGFINGWNAKVAELTGLPVSEAMGRSLVKDLALEESVETVERLLYLALQGEEEQNVEIKLQTYGAQKDKGAVILIVNACSSRDVTENVVGVCFVGQDVTGQKVVMDKFTRIQGDYKAIVQNPNPLIPPIFGSDEFGYCSEWNPAMEKLAGWKREEVIGKMLVGEIFGTQMMCCRLKGQDAMTKFMIVLNSAMDGQDSEKFPFAFFDRQGKFVEALLTANKRTDSEGAFTGVFCFLQIASMELLQALTVQRATEKVAFSKLKELAYIRQEIKNPLYGIMFTRNLVEDTNLTEEQKQFIETSALCERQLRRILDDMDLESIEDGYLELDTAEFIMGTVMDAVISQGMITSREKGLQLIWDTPRDTKNLCLFGDQVRLQQVLADFLLNAIRFTPSSEGWVGIKGVSSRHRQGGGVHVVHFEFRVTHPGAGLPEELVQEMFDRGRGMTQEGLGLNMCRKLLKLMSGDVQYIREAGKCYFLVNVELPIAQRDDAGSVK

SEQ ID NO: 12860 - protein, 965 aa, Nostoc sp. PCC 7120
MSELLYTFFISVPYWHPHDWLSGVIKTITAIISLYTAFICVKLIAKAGKFPSQVQLEVTNQKLQQAILNSANYTIISTTPDGIILTFNAAAQRWLGYTAEEVIGKKTPEMIHDKNEVVKVAQELSQELGVTIEPGFEAFVAKARLGQVEEREWTYIRKDGSRFPVLLSVTPLYDAEKNITGFLGIGSDITARKAAEAALRESEYRYATLAQTAPVGIFRNDAFGRCIFANERACNLIGSPLKDILGEGWIQSLHPDDRLRIVREWNQAVQQNLPFKAEYRFRHPNNVINWVIYQAIPERGSNGEVTGYIGTMTDINDRKRAEEELLHLSQALESAVEGISQLDTQGHYIKVNPAYAKITGYKPEEMIGMEWALTVHPDDKEKMMAAYHQMLKNGKVEIEARAMRKDGSAFYKQVVMVKAYNQQQECIGHYCFMKDISDRREVERLKDEFVSVVSHELRTPLTSISGALDLLASGVVPAGSEDAQRMLNIAANNTDRLVRLINDILDIERIESGKIQIAPQACNAADLMTQSVEVMEELAEQAGIQLSMSPLSAHLWADSDRIIQVFTNLISNAIKFSPTGATVWVTAKILEKGELEKSQTPIPLYPQTPIPLYPHTPIILFAVKDQGRGIPADKLESIFERFGQVDASDSRKKGGTGLGLAICRSILQHHGGQIWAESTSGEGSTFSFTLPIFPEEQNKEEEFLHLSHAAPQQPTESISPLILHCDDDLSVRAVVQVILEKQGYRVMTVASGKEAVEKAKVNQPDAIILNLMMPEIDGWETLALLKQQQETKDVPVIILSGVIPDHSKELPHDVSDWIIKPPDVKLLCQALEKATTKQQVIKVLVVEDDPDLAQVLIAMFNRHGISTFYAQTGREAIQISQNIIPDFLVLDLGLPECDGFAVVDWLRQYQRLYHVPLVVYTARDLDESDRQRLKLGQTLFLTKGRINPQEFEQRVITLLNRIICN

SEQ ID NO: 12861 - protein, 1550 aa, Nostoc sp. PCC 7120
MKAQLPDNEVQRIAALLEYKILDTPPEAAFDDITRLASYICGTPIALISLIDQNRQWFKATFGLERRETPRDEAFCAHTILESEAFIVPDATADERFATNPLVISDPKIRFYAGVPLTNPEGYSLGTLCVIDYIPRNLSFEQIEALQILGRQVIKQLELRRNLANLVLVNNQHKQAQKIRHPFFKKIAGGFGLASVFLVLLGLASYQAEIELIHNGNQVQTTQESINNLEQLLSQMKDAETGQRGYILTGKDPYLQTYQTALANIDQKFDELRNATVDPVRQQRLVILKPLITAKITELNQTIKLRQNLGFQAALQVIQSDQGQTLMDDIRKVMREMETENKVRLQQQLQAVKASEQKVIFILAIAIVSGFIILAVVYYLIYCEVIARQSMENILNEERNFISAVLDTVSALVIVLDSQGRIVRFNQACEVITGYSFDEVRGRHFWNLFLLPEDVESSKEFFAKFPADPTVPSVQESENYWVTKDGSRRLIAWSRTILQNHEGSVEYIIGTGIDITERKRADKHLTIQYAITRVLAESTTITEATPQILQAICETLGWNVCEIWMVNQQANFLSFFDLWHHTSLEMQEFRTQSQPITFASGIGLPGRIWASGQPIWLTDIVNDGSFLRNQLAAQVGLRGAFGFPIRSGQKILGVITCFSHQVQPHDPDLAKIMDSIGEQVGQFIHRKQAEEELQRQNLRSQLFTEITLKIRQSLQIEEILQITVKEVQKILQTDRVLIYQLLPDGSGSLIIEAVVAGWAAIKGQNITDFYLQTEYQQQYCLQQYRLRHLEAIANLDLGEIQQSHLELLRKFGVKANLVIPILVKDELCGLLIVHQCATSRQWTSFETHLLRQIADQVGIAVAQAQLLEVETRQRQELEVARSQAELASHAKSAFLANMSHEIRTPMNAVLGMTGLMLETLLNQEQRDFMETIRISGDALLTLINEILDLSKLEAGEMALENLNFNLSTCVEEVLDLLAPQAHSKGLEIAALIYRHVPIQLQGDASRLRQILMNLIGNAIKFTSFGEVVMRVELRSETPTTAIIHFAVTDSGLGITLEDQHKLFTPFTQVDASTTRKYGGTGLGLAICKQLVTLMGGEIGVESQLGKGSKFWFEIPFAKQLQPVSFVEDCGLLNNRRLLVVDDHATNRKIIYHQVSRWGMQVDQADRAVAALSMIVEACQQNKPYDVILIDMQMPEMDGMALGKQIKANSAIPPTPLIMLTSTNQRDEVQQAIKIGFAAYLVKPVKSSRLLDTIMSVLKTPSQLEAEKLEVKSQELEKNNLDHSRNHNFTATQAQNSVSTKTRILLAEDNLVNQKVALKQLQSLGYTADVAANGKEVLQLLKQIPYDLILMDCQMPILDGLEATKEIHRWAESSFASCRRPVIIAMTANAMKEDKQMCLDAGMDDYLSKPVMKEQLATALEYWCQLILNSRQAVEFDLNSLPLDWEHLHQLSENDTEFELHLLQIFVEDVRARLELAKEAIANTDFQQMAQQVHQLKGASTNIGATAMYLAAEKLEQLAQNQERRGSMELITEIEEGVNQIQAFLTRSQIV

SEQ ID NO: 12862 - protein, 873 aa, Rhodopseudomonas palustris
MSGLWQSMTTAWMSRTDRSALLDFWLGGRGAGTLIANTDIDEQEMRRIRAAQINSVTRLTPVTMSINVANAALILFTFWDNDARPQLLAWTAMIVFAAGSAVQSWLRNRFEPRLEASAHAIRRMTLHALLLGLIWGAMPVMVFVKADPGDQLIVACVAAGMISGGAFTLSTVPRAGLAYTWSLAAGSALSLALCDGMAYRITAAFLVLYAVFMSRNLISHGEMFFDNLRAKFELERQTEIISLLLKDFQANASDWLWQTDAHGRLVHVPERFVEVAKLPPSLLIGAPLADVIGMLCPEDGRCAMGVAAKMAQREPMNDLVVHVVIGGTPRLWSLTAKPMFDAAGEFAGYRGVGRDVTERWRAEQAEAENRAKSSFLAMMSHEIRTPMNGVLGLANSLLETKLDPEQQQAVTTIRDSGDDLLRILNDILDLSKLEAGRLEFEQADFSPTTLVESVRAIIEPEVRGKGIELKVDIDPRLPPSLNGDAARIRQVLLNLAANAVKFTEQGSIAIVLTCVKRNDSHATVEWQVTDTGIGISPDRVGSLFTDFAQADVSINRRFGGTGLGLAISRRIVEQMGGDIAVTSREGEGSTFRFSLDLPWSNAWIADHRLDRLGSDDLRTRIAMLGRPLRVLIAEDDSTNQMVVMKMLQEFAAEITVVSDGTDAVQAAGEGEFDVVLMDVRMPNMDGLAATRAIRGKGGALAKLPIIALTANAFPDDVKVCRDAGMNDFLAKPLRKPALVAAVLRALRGASTPVTMPSPPMLVDLDTLAELTAEIGQDQVNEMVALFFAETERRIALFRRFAEHMDRHDLEVEAHSLKGGARTLGFHPIAEIARSIEREAGSISPEALDLFTGQLNKALIELRRQCEGSLKLAS

SEQ ID NO: 12863 - protein, 1261 aa, Synechocystis sp. PCC 6803
MFWQPVSPLNADQLNYQGSYDPKLVLLSVAIAIFTAYMAFLMASSALSLPGRWSRKIALALSGTVMGLGIWAMHFIGMLGFELPCPISYDPLITFISVIPAIAASIYALNFLSFQAPTAKNLMVGAIWFGLGIGTMHYSGMAALELHGNIYYELPLFVLSLVIAVMLAFVALLFRFHSAKIFHTTHGPALGSSALVMGLSTSGMHYTAMTATHFICRPWGEFFIQGIDIQEVAIAVTISITLLTGGVMLFVLREISIQNQQQKILVATESWYRQIIEYAPEGIMVLDAQGNIILANTSIEKLFGYSQTELIGQSIALLGLAELLQQSLHLLQEGEDVGPTCPLDQEEFEILGTRYDGSEFPIEVSLTSLPSLSQREMNIFASVRDISARQEAQQQILRQREHLQSVLDSAPVGVAITVNGITQFANPHIGELVDLKVGDSPQKIYVDLGDRQQMLEELTQFGRSQSRVYKMYNPRGEIRDILATFLATDYEGQKGILGWLADITPIKAAEAEMKRAKELAEEASRIKADFLANMSHEIRTPMNAVIGMTHLALKTDLTPRQREYLHKIRFSGQHLLGVINDILDFSKIEAGKLPMESIDFDLDKVLDNVATLISEKATNKGLELLFDIDRNLPRHFIGDPLRLGQILINYANNAVKFTEQGDITIVVRLQEYRDQDVVLYLAVKDTGIGIKPEHIANLFNSFQQADSSTTRNFGGTGLGLAICKRIAELMGGEVGVESEYGQGSTFWAKVCLQKSNVIPHRLVLSKDLEGKRVLVVDDNDHARLVMKDLLEQMKFVVETVESGPEALNFLAEADRENHPHSIVFIDWQMPNMDGLEVARRLKAMGLNHQPSIFIVTAYGREELFVKAKSLGIDDVLVKPISPSVLFDSLARVLGDPTALAQEMRQSSGIGAEDLALEKLRRIRGARILLVEDNEINQEVAAELLRDVGFNVDVAANGLIALERLNNNAYALVLMDMQMPEMDGIEATIAIRQNPRYAQLPIVAMTANVMQGDRERCLQAGMNDHLGKPIEPEELWNKLLHWIPVDSPLAPETIEESAINTSDPEISIPHIPGLNSDDGLRRVLGKKSLYLKMLHKFVASQSSFLPEITQALGEKDYGFAERLAHTLKGVAGNIGAQELQQEAAELEKAIKEQWPQPEVENLLTNLGDRLDNLIAQLTSNLPPEPATVAITLDQGQLEEICDHLAQLLGEDDAEAADLLQNHGDLLRQAFPDHYSAIAAGINNFDFEAALAALTTARQFSQP

SEQ ID NO: 12864 - protein, 655 aa, Fremyella diplosiphon
MNIAACDLLGLPRQQLKGQALSNFITAEFTRQPKSVGFPSGKSLMGELLVVSAAQTPREMEYTLTPNVLPHCHLLLLRDISQRRESMQAELRQQQQRVELFSEVTLKIRQSLQLKEILHTTVTEVQRILQADRVLIYHVLPDGTGKTISESVLPDYPTLMDLEFPQEVFPQEYQQLYAQGRVRAIADVHDPTAGLAECLVEFVDQFHIKAKLIVPIVQNLNANSQNQLWGLLIAHQCDSVRQWVDFELELMQQLADQISIALSQAQLLGRLEEVVAARTAELQEEINVRMQAEAALRQSEEQLRLITNALPVLIAYVDEQQQYRFNNQAYQDWLGQSPQKIYGSHLRQVWGEDCYQRMEVYVKTALSGQAVNYENDIVLRDGSWRAVDVTYIPHLDDENMVKGFFALSSDISDRKAIERMKDEFISIISHELRTPLTSLHSALKILATGRLGTLSTEGQQMLGIADDSTERLVRLVNNVLDLQRIESGKVIMECQACNAANLMIQAAEAMQAMAQQQEVTLVKQPQDISVWADADYILQALTNLLSNAIKFSSPGGTVWLTVEQEKNSSNNPKEVVFRVRDEGQGIPADQLERIFERFQQVDSSDSRKKGGTGLGLTICRKIIEQHNGRIWAESTPGCGSTFAFTLPTLEYANIQ

SEQ ID NO: 12865 - protein, 424 aa, Adiantum capillus-veneris
DLEPYLGLHYPATDIPQASRFLFMKNRVRMICDCRAIPVKVIQDRELRQPLSLAGSTLRAPHGCHSQYMANMGSAASLVMAVLVNDNEEGSSSRSHKPKPRKLWGLVVCHHTNPRAVAFSLRSACEFLMQVFGLQLNMEVELAAQMREKHILRTQTLLCDMLLRDAPIGIVSESPNIMDLVKCDGAALYYGKKFWLLGTTPTEPQIRDLAEWLLDVHRDSTGLSTDSLADAGYPGAAALGDAVCGMAAAKITSRDFLFWFRSHTAKEIKWGGAKHDPEDRDDGRKMHPRSSFKAFLEVVKRRSLPWEDVEMDAIHSLQLILRGSFQDIDDSDTKTMIHARLNDLKLQGMDELSTVANEMVRLIETATAPIFAVDAGGFINGWNAKIAELTGLSVEEAMNRSLVGDLVVEDSAEIVERLLCLALQ

SEQ ID NO: 12866 - protein, 933 aa, Escherichia coli O157:H7 EDL933
MFRALALVLWLLIAFSSVFYIVNALHQRESEIRQEFNLSSDQAQRFIQRTSDVMKELKYIAENRLSAENGVLSPRGRETQADVPAFEPLFADSDCSAMSNTWRGSLESLAWFMRYWRDNFSAAYDLNRVFLIGSDNLCMANFGLRDMPVERDTALKALHERINKYRNAPQDDSGSNLYWISEGPRPGVGYFYALTPVYLANRLQALLGVEQTIRMENFFLPGTLPMGVTILDENGHTLISLTGPESKIKADPRWMQERSWFGYTEGFRELVLKKNLPPSSLSIVYSVPVDKVLERIRMLILNAILLNVLAGAALFTLARMYERRIFIPAESDALRLEEHEQFNRKIVASAPVGICILRTADGVNILSNELAHTYLNMLTHEDRQRLTQIICGQQVNFVDVLTSNNTNLQISFVHSRYRNENVAICVLVDVSSRVKMEESLQEMAQAAEQASQSKSMFLATVSHELRTPLYGIIGNLDLLQTKELPKGVDRLVTAMNNSSSLLLKIISDILDFSKIESEQLMIEPREFSPREVMNHITANYLPLVVRKQLGLYCFIEPDVPVALNGDPMRLQQVISNLLSNAIKFTDTGCIVLHVRADGDYLSIRVRDTGVGIPAKEVVRLFDPFFQVGTGVQRNFQGTGLGLAICEKLISMMDGDISVDSEPGMGSQFTVRIPLYGAQYPQKKGVEGLSGKRCWLAVRNASLCQFLETSLQRSGIVVTTYEGQEPTPEDVLITDEVVSKKWQGRAVVTFCRRHIGIPLEKAPGEWVHSVAAPHELPALLARIYLIEMESDDPANALPSTDKAVSDNDDMMILVVDDHPINRRLLADQLGSLGYQCKTANDGVDALNVLSKNHIDIVLSDVNMPNMDGYRLTQRIRQLGLTLPVIGVTANALAEEKQRCLESGMDSCLSKPVTLDVIKQTLTVYAERVRKSRES

SEQ ID NO: 12867 - protein, 1209 aa, Xylella fastidiosa Dixon
MRCLKRVRGGLLTALLVFVSLLTATAAVPEMPRFRVLDATSGLPSNVVRAMLQDAAGYLWLATSDGLARYDGTAFKVWRHDPNDPGSLPGDSVLALYIDVQDRIWVLSENAGLAVLDAQRRRFIQIPVGSVAKTDALHTLTGHGDAIWLSDLHASVIRIDSAGALTRYALADVSPTLKDTPVVALTFDANGRLWVGTPDGLLYFEAGRLHLAPPPLDKASIHSIAAVGSRLWVGSTDGVYLQDAEGRWRAPNWGPMFAFGNLLLSVADAGDGEFWLGSERGLWRTRQERPPVQIPLSDMHHGVSTVSSLWRDTSGGLWVPVYGRGLGYLRQDWKRMAVVRPSDGGESSYCNVAPAAYSGGLWQLNRIGELMHLNTSTGELVHTGWQRHELRGVNITTTLEDSRGRLWLANMQNGLSRLDLKNGQWREWAAHGDDAVPLYGPISWIVEMPDSSLWLEALGVLQQRDLESGRVLNQIVPGSHGLDGSRVEQIGLGPDGRLWLAAGSGVYAWESQRRMFVPIPDLTGTRAYSFVPVGGNEVWVHRLRGLEQWRHSSHGWKRVALVGPQHGLPAMESLGMQHDAQGRIWLSTRRGLWRIDNTDELQVRNFGLRDGLGTQEFAEACLWMAPDGVLVGGTTDGYLMLFDTAMPDPAPFVPQLRMETVSVIRAGRRIDFPVDRPFELLPNDRQLIVGARLLSFGDPLSNRYSYWLKGFDTGWIDQGSSGTREFSSLPPADYTLLIQGTDPMGNLSRIHLVTFRVLPPWWRSAWGMSVLTGSGLLLLWGVSWNYHRRLRRRARLQLEQHQREVAERASLAKTQFLATLGHEVRTPMTGVLGMSELLLETPLDTRQHGYATSIQAAGKHLLRLVNDALDLAKIEAGKLSLERRDFDFHALLEQVVAMIRPMVERKGLRFVYRLDPEVPQYVHGDADRLQQILLNLLINATKFTEHGEVVLQVAPGQEQACLGVRIDVVDTGPGLSEEQCQRLFRRFEQVNGASTAARYGGSGLGLAICRELATVMEGEIHVDSELGKGTCFRVLLPLPWVLAVQPAVAVMDMEPSPCSNPLHLLLIEDDPTVAEVIVELLRVRGHRVTHALHGLEALVEVTLTRFDACLCDLDLPGLDGAGLIVQLRAQGQSFPIVVVTARTDADAQRQAFQVGCDAFLRKPVTGEMLEQVLTQVLSAPRQEVDVHTPKKRNGMGRPRISDSIKRDLG

SEQ ID NO: 12868 - protein, 1190 aa, Xylella fastidiosa Ann-1
MRCLKRVRGGLLTALLVFVSLLTATAAVPEMPRFRVLDATSGLPSNVVRAMLQDAAGYLWLATSDGLARYDGTAFKVWRHDPNDPGSLPGDSVLALYIDVQDRIWVLSENAGLAVLDAQRRRFIQIPVGSVAKTDALHTLTGHGDAIWLSDLHASVIRIDSAGALTRYALADVSPTLKDTPVVALTFDANGRLWVGTPDGLLYFEAGRLHLAPPPLDKASIHSIAAVGSRLWVGSTDGVYLQDAEGRWRVPNWGPMFAFGNLLLSVADAGDGEFWLGSERGLWRTRQERPPVQIPLSDMHHGVSTVSSLWRDTSGGLWVPVYGRGLGYLRQDWKRMAVVRPSDSGESAYCNVAPAAYSGGLWQLNRIGELMHLNTSTGELVHTGWQRHELRGVNITTTLEDSRGRLWLANMQNGLSRLDLKNGQWREWAAHGDDAVPLYGPISWIVEMPDSSLWLEALGVLQQRDLESGHVLNQIVPGSHGVDGSRVEQIGLGPDGRLWLAAGSGVYAWESQRRMFVPIPDLTGTRAYSFVPVGGNEVWVHRLRGLEQWRHSSHGWKRIALVGPQHGLPAMESLGMQHDAQGRIWLSTRRGLWRIDNTDELQVRNFGLRDGLGTQEFAEACLWMAPDGVLVGGTTDGYLMLFDTAMPDPAPFVPQLRMETVSVIRAGRRIDLPVDQPFELLPNDRQLIVGARLLSFGDPLSNRYSYWLKGFDTGWIDQGSSGTREFSSLPPADYTLLIQGTDPMGNLSRIHLVTFRVLPPWWRSAWGMSVLTGSGLLLLWGVAWNYHRRLRRRARLQLEQHQREVAERASLAKTQFLATLGHEVRTPMTGVLGMSELLLETPLDTRQHGYATSIQAAGKHLLRLVNDALDLAKIEAGKLSLERRDFDFHALLEQVVAMIRPMVERKGLRFVYRLDPEVPQYVHGDADRLQQILLNLLINATKFTEHGEVVLQVAPGQEQACLGVRIDVADTGPGLSEEQCQRLFRRFEQVNGASTVARYGGSGLGLAICRELATVMEGEIHVDSELGKGTCFRVLLPLPWVLAVQPEVAVMDMEPSPCSNPLHLLLIEDDPTVAEVIVELLRVRGHRVTHALHGLEALVEVTLTRFDVCLCDLDLPGLDGAGLIVQLRAQGQSFPIVVVTARTDADAQRQAFHVGCDAFLRKPVTGEMLEQVLTQVLSAPRQDADVDTPT

SEQ ID NO: 12869 - protein, 1202 aa, Magnetococcus sp. MC-1
MSMHRLLLRQLRRSMGLVDESAVDALLQELDALPAEQISPASVKALHGLKTLLQRVEQTYEHNERDLLLRNRSLHLSSEELSDANERLRRETARQEQLLSTLRQTANHLLEADQKPTLGEDEASLEQLSDLMSRLALERSEFRRHLERQKFALDQHAIVSITDTKGVILYANDRFCQISGYTQDEILGQAHNLVNSGYHDSGFFEVMWRTIARGEVWNGEVCNKAKDGRLYWVSATIVPFLDERGKPIQYIAIRTDITRQKALEEKIEDNRRFLQSISDNIGEGVFALDVQGFCTFLNPEAERLLGWTQDELAGRSFHDTVHYQDAEGMPMNEADCPVHDAVDRGVDYRSDEDVFIHRDGGIFPVNISVVPVREDGVVTGAVGVFQNITESKQIQRQLKQSEERLQIALDASNTGFWDWDPLQDRAYFSDQWLSMVGYQQGDILNNSTGWLDLLHGEDLPHVERELEAHLNGQRKNFEVEFRMRHKQGHWVWILSSGRVIERDEEKRALRMAGIHKDISDRKRVEDELKKAMLDAESANRSKSEFLANMSHEIRTPMNGVVGMMELLSNTELTPEQQSHMRTARNSAESLLTIINDILDFSKIEAGKLELEEIAFDLAELVEDVTALLAQRVDSEKLELLHNAPADLPMQVAGDPTRLRQVLVNLVGNAVKFTPEGEVEVRMTVERQDADTVTVLTEVRDTGIGIDEAVRPRLFRMFTQADGSTTRRFGGTGLGLAISKQLVELMGGEVGFSSVMGQGSTFWFRITFPIVAKAQAVAGGVDSLQGLRALVVDDNATNRNLLGRYLSNWGVTHLECASGKQALEKIADAAKFGLSFDLAILDLLMPGMDGLALAERITQMVQDKQIKPLRMVLLTSAHARREELEQAGVVAALSKPIRQAQLRALLGQVMRGERVVGGLVERISQNNMSATFDAAVLLVEDHPINQQVARGMLAGLGCRVEIANDGHEGVRLFARHRYDLVLMDIQMPGMDGYETTDAIRQMERSERWPRTPIVALTANAMEQDRDRCLAADMDDYLSKPISLDRLKAAMSKWLKTIAKSEEPEEVLGGAVGQPESPLGAVATGGEDDSVVDLRTLAALKSSMAVIEGGFLQILQSYLQSTPKALESIEQGMIDGDAARVRGAAHNLKSTSLSLGAITLGKVAQEIETRGKEVKLDNMAPLLARAKACYALVAARLEAEQANL

SEQ ID NO: 12870 - protein, 927 aa, Magnetococcus sp. MC-1
MSLIEPKILIVDDRPANSMALRVSLSKLDVQIIEAPSGNDALGLMVEHDFALMLLDVNMPGMDGYEVAKIARSWEQTKDIPIIFMTAIHHDDAHRATGYQLGAADYIDKPVDTTILLSKVKVFVDLYRSRQKLLEANRQLRESISLRRGVEEQLRMTQFAIDRLGDMVFLISPQGKIVYVNEKACQKLQYEKEQLLQLSIEQIGCGHIETSWKEHWLKLKSYQTLTFQSHLRTKNSIQFPVEIQSNYVKTSSHEYNYAFIRDITDRVHQEERLRLLSRAVEYGPASIVITDAEGHIQYVNPKFEKITGYGAEEVIGNKPSLLKSGQTEPAIYDALWDSISRGHEWRGELINKRKDGSLYWEMAHISPVLSKTSGKITHFVGIKEDITSLKETEAHLELTQKKAEAASLAKSEFLATMSHEIRTPMNAILGMTELLGETQLSIEQRGFLSVCRSAGENLLQIINDILDISKVESGGLELQHVPFNLRRIVYDAGEVIRFRSHEKGLHQLIFIDESVPEWLLGDPARIRQILINFLGNAIKFTEAGTIATVVSTTAGKGSQVEIVFRVIDTGIGIPESKQSVVFDAFKQLDSSTQRRYGGTGLGLTISKKLADLMGGQLGLKSQEGHGSTFTLSLRLSRSTGPSKSSAQPAPIFAGMHILIWHTHPIKRMNIEETLIRYGATLHHCSEVDPFLRCAQANHAATPIDLLFIHFDHADVDVLSEIKRLRAVSPWEKIPVLIYGRCHDRSLPAKMLQQGVNFLPEPVFPDVLLDELCRITQKSQQPEVDSKPSRASLRVLLVDDSEDNLLLASTFLKSTPHIVQTATNGKQAVERFTQTSPRFDLILMDIQMPEMDGFQATAAIRAWEKAHKKPPCPIIALTAFAMSDDESKCLSAGFTGYVSKPISKARLLEAMEACTAAKAPTQAEGQVD

SEQ ID NO: 12871 - protein, 837 aa, Magnetococcus sp. MC-1
MKRCFLVNSNDTAQSQPADLDTPATEASLYAQCYQNLLNVGQQGLCLLGRDRLIVHTNKTMADWLRVSPEALYQTPFSQWVDLNDREKLEAFFIDVDQDGPSAITLNLVPDLGRNGRSVRVMGAGLSDVGGVAGMGLALVDLSDQRAMLQQLNHELTTYRNIANFTHDWESWFDAQGRVQWINPAVQRVTGYSIAACMEMATYPVDLFHAQDRSTLERLMQEGRAGAVAHDVSLRIKHREGDLRWVSLSLQPMLTNAGEKLGFRTSIRDISERREAEQALEAAKRSAETASKAKSRFLSTMSHEIRTPMTAILGVAELMSGTHLDRVQREHVSIIRRSGDALLELIDDILVISQNEGAQEGEKQVVFDVDHLLESVMDMASYRATEKGIKLLSHVAALVPVRVMGDPVRLRQVLINLVGNAIKFSEKGEVVIQVRPGPRNGPERSDYRFSVSDNGIGIPMEKREAIFDAFSQVDETESRRFGGTGLGLTICRRLVNLMGGQLELLFSEPGVGSTFAFDIPLQPAMEQANPANLEYDHTTLKERRVVVFSRGKNLRTMVQEMLTPEGVHCTAVSNHDELVQLMEVVHDVERDGQGPLCDMLLLDAEKPFANMDVVSYASELKKRKIFRNLHFVILGLDPGQKERFALCQAGINYVSPPLKRRVILKTLAELFVEPGYRHLDDACRNLMHATHKRELKEGGALRILLAEDDPDSSYVIQNFLKDTLCHLEVVTDGQQALQRFQEGMTDPLGAAMEFDLVIMDTQMPVMDGYTAVHRIRSWERIQQRAPVKILAISAHSGQEGRLTSLRNGCDDHLNKPLTQRDLLAHIDALCHRLPKTG

SEQ ID NO: 12872 - protein, 1100 aa, Magnetococcus sp. MC-1
MSCCHAHYGGSRLISKLNMTTKRWIMSRLVKWLLVLVLLPVVADAQQGERPWPVTVAVLQDFPPLYSLDTHGKPQGLAIDLLQQVAQQAQLKITYKVVQNWGQAMQLVRQGEADFVPGIGITEVRRAEFLFSHPMESVPVSCFVRKQNRSIQGLQDLPGYSVGVIAQSAAHTRLSQIPNMRLKLYQSIDEAFFQLLAGELDAFVTSRPVMEKKARKIAPQEMIKVVGEPLMDLKRGYLLSTQNRALLQRIDPIIQHLTRSARYGEIYARWYGTAAPFWSVEQVFWIMSALLVAVLVVGGLYRVFAIARYNRELQRSIAAQQQAEQRLQRSEERFALAMRGSNDGLWDWDIPTDRVTFSPRWLEMLGYQGAPQDADMRHWQAHIHPDDQPRVEQALGRFLSGDQQHYHSEYRMRHKDGHTIAVLSRAFVLRDATGRAIRMVGTHADITALKEQARRLRESETRFRAYFEQSVVGMVMASLDRHFIDANHAFCHMLGYSRGELLKMNFPQITYPDDLERDLVQFEQLRSGQVSAFEMEKRYLHRDGHPVWGLLSATTVKDELGQASYLIAQVQNIDTQKKALEQLRQSESMMRGYFELGLIGMATTTAQHGWVQINQRLCEILGYPEMALRQKSWAEITHPQDRQADEVAIERLRKGLSEGYALEKRFIRQDGAFIYASISAGCLRKEGGEIGHFLTLVQDITARKRMELALQEQKEQAEAANRAKSTFLAVMSHEIRTPMNAILGMAELLRESDLTSRQHWCVETLNRSGESLLSLINDILDLSKIEAERLTLEHVVFDLVQLVGDVCSLFGYEAQSKGLALKHHIAPTLPRYVVGDPIRLRQIMMNLVGNAVKFTKQGHVSVELNPLADGRLSFVIRDTGIGVSVEQQRNIFKPFTQADSSITREHGGTGLGLTICMRLVALMGGEMQLESTLGEGSCFHFELELPAAPPGAESVVGTPRTLADVASALRLESAAHHNDPILVVDDAEDNRMLVNVFLKKTRYTLVMAENGLEAVNAFKQQPFALVLMDIQMPLMDGYEATRQIRQWEQQKGSGRTPIIALTAHALSEESQQILEAGCDIHLTKPIRKSKLLEVLAEVLA

SEQ ID NO: 12873 - protein, 1128 aa, Magnetococcus sp. MC-1
MDFYAHFFMSPAQRGVAVYEGIYDPLLVTLSVLIAVFAAYTAFQLSSRLRDSENAKVLLAWRAGGALALGMGIWAMHFVGMLAFRLECGVAYDLWITFISILPGFGAAWLALGVLGRATLSWPLLVSRGVVMGAGIGTLHYTGMAALQMDAILRYDPWLFMLSVVVAILLAVVALSVKSFLQYRTALGPGHLSSLIGGVIMGGSISGMHYTAMEAAYFIPQGETGVAVYNSPLPLAISVAVATLTLLLIALGSALASRRIAHSRRWMNSILQNMSQGFVMMDLQGRILEANPALLSWVALSPSQVQGEPFQKLLSVQDHQPLQLALQQLLEGQPVRCALSLCCLDAPPIPVQMHGNTHRDEEGQIMGIYAILTDIRAEQAAAKALRDARDAAEQASQAKGEFLANMSHEIRTPMNAILGMTHLCLQTDLNERQRHFLEKVYAAGSALLRILNDILDFSKIEAGSLEIEKTSLKMDEVLASLADLMSIRADEKKIELLFHRDANLPEILVGDPLRLGQVLINLVGNALKFTEQGEVVVRIEVIQSAERQVKVRFSVKDTGIGLTNEQMSNIFQSFKQADSSTTRRYGGTGLGLAISHRLVQLMGGVLKVESTPGQGSCFSFTLDLGVTQPTSLLSRLQLPSGLQVLVVDDNVLSQHILHDILQGFGCQVQVASSGEEALLLLAQLEGPFDFILMDWQMPGLNGIETAQRIYQKFAKVEMPTIIMVTAHGREEVMQKAREAKLDGFLMKPVNPSMLLEVILQLQRKRHGTGPLLESRSEQKNFRIEVPNLQGKHILLAEDNDLNVEVVQEMLSPSGVTLSCVSNGLRAVEAVQKRSYDLVLMDLQMPVMDGREATKQILGLGLDQPPPIIALTANALSGDRERCMALGMVDHIAKPLVPELFYATIKRHLGDVTTRVVRSVAPAPELPSGAPPGVDLEQAWLGLNRNTLLLNKLLHGVCDQWPEQMRLLEGWLADPQSHHLAINQAHGLRGLASQLRMEKVATLAGRLEQGLKQGEANMEACLAPLQQAVMVVVNWLKENLDTPPPEPPRRDATALDMDKAALKTQVAEIMIHLDQDLAEGLRQLREVLNRMPSGEPEALLREALNHAEGFDVPEAKAALMALQAMLQKG

SEQ ID NO: 12874 - protein, 969 aa, Magnetococcus sp. MC-1
MSVHSHDDVGHFDRKLAVSFGAVVLLVMLTVSAVSWYAFDAIMKDQEARLARIIGSVVGEAVGRVSFSGKHHTRLLVKDLIAKNPQFSHIGVINLEDQIIAHSNDQLNDRPMLWPQGMSLQKALTEPNQVYHFSLFGRPTVRELFLPYHSGFNNRLAGIIHIGIRQDATTRALKSGFLSLLSMIALLTMGAMILVHRLSKRYSRPVKRLANQMAALLEHAPMLIAIQKGQQQPHVTSRLWHQFYRTHPLPDQPPLHPLLPTKQEDLTKINSSAQELNVTLDGHEYHFLFTRFILSEELQEHAQPQICTIALDISDHKLVERQLSESENRFHSLVSNLPGAVYRCNLDSAWSMLFISDGIERISGYPKESFIHNLERSFASIIHKDDLIMVEQKVFEGVNLNRSYHMEYRIIHQDGATRWVYEEGRAHFGKHGQALWLDGVIFDITDRKQMEHTLHQNRTRLQAAVVASRAGTFYYTIENDQNSWDARMLEIYGLEASQFDNNYAAWVRCIHPEDQHSTEQAFFRALSASYHTQTYDIEHRIVRPDGSIHHLRTQAWIQRDSQGKAEQVSGLVFDITEQKEVETTLRLAREQAESANRAKSDFLAAMSHEIRTPMNAVIGMGEVLLETKLDQEQRHYIETLQHAGEALLDLINAILDLSKIESGRMELVEQDFDLHKMVVETCQLFQVQCRKQGIELNLNWEESNPTYIHGDQARIRQILFNLIGNAVKFTDEGSVTVEIRSIEQEKTLLFKITDSGIGIPADKQETIFQKFSQADSSLSRRHGGSGLGLTICRHLVEHMKGRIWVDSEEGQGSCFSFTLPCRPTAPKAEIISNPHDAQQKQSKKARILLVEDSKDNQILIRTYLKREPHSLVVAWDGEEALTRFNEDGPFDLIFMDMQMPIMDGYAATAHIRALEQARHLTATPIVALTAHALQGDEQRSLQAGCNAHLTKPIRKAHLLAAIRDHANPS

SEQ ID NO: 12875 - protein, 1691 aa, Magnetococcus sp. MC-1
MVDSNDKLVNILLVEDSKSFAALLQGQIQKRLGFRVVWADSLAQTRQHLEQAKHPFLLAILDLHLPDGPHGEVVDLVLQHNLPAIVLTGDKQVEMRTQLFKKGVLDYFVKDNRSVIDAVIHSVLRVARNRHLTMMVVDDSRSARAVLGQFLQRYGFQVRLAQDGAEAWALLQETPVDLVVTDYEMPNLNGVALTAKLRSRYSRDEMGIMGLSSAGQSELAVDFIKAGANDYINKPYEPEELISRVYQMAESVERYGELNQMVARHKAVLDNAQDAIITTDQQGDVLSYNPAAERLFGYPRQNVMGVSLTERLIPESLQNKQAPSLTNAMHGALEMVPNKGRLEAIGKRIDGELIDLQVALSAMPQQGGELHYTAFIQDITDKKQLLKSLEETLSAAESASKAKSAFIANMSHEIRTPMNAVLGFTDLALRGDLSPKVRDYLEKTKNASHSLMGIINDILDFSKMDVGRLELDPVKFDLHFLLERLADLFSKQAADHAVDLVFLAPLNFNQVLYGDAMRLEQIFINLIRNAVKFTKNGFITVRAQPELLEGHRVRLTCSVSDSGIGIDPEQLPHLFAPFVQADSSTTRRFGGTGLGLSIVKRLVSLMDGSVWAESEPGKGSQFHFEILVDLYAEDRRNRSLLPDVLWGERVLVVDDNPDSREHLQALLSALSLSPSLCATPAQARALLLSEQGGPQPFRYLLVDWGLPGKDGVVAVIEMRAMLKAELPEGLHPRIILLSAFGQDEIKNQAERAGVDYCLDKPISRDRLVTALSGGWHDQEQHKDRRKVQQLAAESEIGRLVGGAYLLLVEDNPINQQVAAELLERVGLVVDIAENGQQALDRLARFEYDLVLMDLHMPVMDGSEAMQRIRAQEAWRSLPVLALSTGTGEEEQLDLQDLGFQGFLHKPIRPERLYGALKRWITRPTLDASWRIVARGDEVPLLRGVDPEIGINRLAGNQELYVVLLSRFFQLYAEVLPSMQQQLQRGQWAVLGRQIHGLRNRAAALGAVELAKAVVALELAMADGHEAMIEAAFQSFSHRLEQVLQGIASHQVEQKGVALSSNLLHDDLPELVVDLHQVGPLLDQLAGRLKYHSIDAAALLQALGELLKETPLATAYWTVCKQVDRYNFYEALQSFLLIAKALKYPIIDQNVRCPASVKERILIVDDQPDNVDVLKDILEDYERMAALSGPEALMLAQCDPAPDMVLLDIMMPEMNGYEVCRRLKAMEATQEIPVIFVSAKKEVVDEAEGFLIGGVDYITKPYHGEVVRRRIHSQLELKRHRERLEKQVRMRTAELELATREAELRKDEAEAGNRAKSEFLAIMSHEIRTPLNAILGTHELLSESALSSEQQRLMEISRNAGELLLNLVNETLDLAKIEAGKLDLEYTIFDLPRLVEEITQIKRVAAEHKGVRLESEMALEVPRFVMGDPDRLRQILVNLLSNAIKFTNSGTVSLQMSRGVADRTFFKVSDTGVGIAAHSMEKIFHPFTQADTSTTRKFGGTGLGLTICKHLCEAMGGDIQVESQVGVGSTFSVNLPLPRAESSMDEPSAPEEVIVEQVQAPLRILAVDDAEDNRKLVQAFLAKSGHHLDLCEDGAQALDRFKREHYDLVLMDLLMPVLDGYGATRKIRQWEQQQHRLPTPIIALTALSVRRDLDKALACGCDFYLTKPFRKHQLLDAIYRIHGMLAGSIHQG

SEQ ID NO: 12876 - protein, 707 aa, Magnetococcus sp. MC-1
MEELLSSMLDYPELRYAMVVDVNGKVLSHSDKSKAGKFLADPLSLKLIDAPNTLQVLLQSKQVIDVAMPILTNQQLVGWARVSLSQNKSGQELLHVTYKGFLYTLFAIVVGIVFAYFMARGLTKDLYHLLHVANTTRLGQLNHRVQIKRHDEIGLLSNGFNQMLGVLEQEEQQLRLIQQSLTQSNQALRQSEEKFRRLVESLSSEYFLYSHNTEGVFEYVSPSIRTVLGYDPQEFMTHYATYFTENPINMQAVNHTEASIRGEQQASYVIEIFNKQGQAVRLDVLEYPIFDKDGRVIAVEGLAHDVTERHRAEFELLTAKEQAEAANRTKSEFLAMMSHEIRTPMNSILGMAELLSESPLTPEQQGYLKIQRRAGHGLLELINDILDLSKLEAGRIELYIQPFNLPELLQSVVDLLENLARERGLALRLERMEEIPTLCQGDRARLRQIMVNLVGNAIKFTHDGSVKISVEKSSDDATNLLFHVIDSGIGIAEKDQSSVFQRFTQIDSSNSRFYGGSGLGLAITHHLVELMGGKIWLKSALGEGSCFTFTLPLPPVQIDEPALAATHDEEAPMVATESCCATKPLRILLAEDSPDNELLIRIFLRDSPHSLCCVKNGLEAYQQVQKENFDLILMDIQMPVMGGDEAIIKIRAWEQSQQCDPTIIIALTAHAMSEHQKHYLTLGFDAFLSKPINKKTLLNALAQYGQS

SEQ ID NO: 12877 - protein, 1070 aa, Magnetococcus sp. MC-1
MPMGGGMGIQRRVLGLIAFFLLVAFSAVEVRSYYQLKAYAEESLRTQAEIVQGLLMSIRRVYHHAFLDSHIPLSSDTVPLLPAHAINRISKEFPTWFKGGVSFNNVSDKPRNEQQRAKGIEQQAMAHFRQNPEEKRWFTQYQEENGEAYYHYATPIWIEPYCMQCHGAKEKAPAAIQKMYSTGFDYKIGDLRGVVSIKLPAAHINRLVKQQFLENSLIHLLIFGSAFFAISFFLRRDVGQPLEAISHAVRKFGQTRELPKFEEQPGEFQILLHTLTDMASTVVLRESEVQERQLQIELLLDSAGEGIYAIDTQGICIQCNPAAVALLGYASSTELVGRDIHTLCHRADEQGTHMPHSDCPGCKVIASGEPVHLAQEYLQRQDGSVFPVEMRIHPMHQGGRVVGAVVLFDDISRRLDAEQKLRLSERHFRTLVQALPGTFYKCAPDPLCTMYSLGDNIAELTGYAADSFIENHERSFSSVVHAEDWPRVREALDQALAQGVVYHLEYRVNHTDGKPRWVMDRGQAVYDEAGRAEVLYGVLLDMTERKQYEQRLESARQQADAGNRAKSEFLAVMSHEIRTPLNAIMGMGDLLGETALSPVQRHYLSISQHAGETLVELIEDILDLSRIEVGELELEPAPFEVEALVEEVCEVVTSSAHDKGLILLMRIDPLLPPVLIGDKKRLRQILFNLLFNAVKFTKHGEVMLDIRHDAARSAAGAVLLQVRDTGVGMAEEMIERVFEPFTQGDSTITRQYGGSGLGLTICKRLVSKMGGDIQLESALGRGTTATVQLVLPVGRHGMVAAVRQQVPLHGANLLLVDDNANNREIYTELLQQEGARVVGCATGETAMQQVSEANFDLAVLDFHMPSEDGLTLAGRIQEMVPNMPLLMLSSDQQPAAAARANSMGVTFLLKPVKRQLLRQTIAQLMQSGKGVKDAPVLGQGVESGPQKGLKILLAEDVPENALLIEAYLEETGHQISVVGDGQQAFERFQEEPFDLVLMDLQMPVMNGLQATRHIRAWEQAQGVKRTPILALTAHAMKEDESKSLEAGCDGHLTKPIRKQVFLQKLQGFLG

SEQ ID NO: 12878 - protein, 636 aa, Vigna radiata
MMESCDCIDTQYPPDELLVKYQYISDVLIALAYFSIPVELIYFVQKSAFFPYRWVLMQFGAFIVLCGATHFINLWTFSPHSKAVAVVMTIAKVSCAIVSCATALMLVHIIPDLLSVKTRELFLKNKAEELDREMGLILTQEETGRHVRMLTHEIRSTLDRHTILKTTLVELGRTLGLEECALWMPSRNGLNLQLSHTLTYHVQVGSTVQTNNPIVNEVFNSPRAMRIPPTCPLARIRPLVGRYVPPEVVAVRVPLLNLSNFQINDWPDISAKNYAIMVLILPTDSVRRWRDHELELVDVVADQVAVALSHAAILEESMRARDQLMEQNVALDLARREAEMAIHARNDFLAVMNHEMRTPMHAIIALSSLLLETELTPEQRVMIETVLKSSNVLATLINDVLDLSRLEDGSLELEMGKFNLHGVLGEIVELIKPIASVKKLPITLILAPDLPTHAIGDEKRLTQTLLNVVGNAVKFTKEGYVSIRASVAKPESLQDWRPPEFYPTSSDGHFYIRVQVKDSGCGIPPQDIPHLFTKFAQSRSGPARPSSGAGLGLAICKRFVNLMGGHIWIESEGPGKGSTATFIVKLGICGNPDPSDHQATTRSQAYSGSGGLARFKPFIKDEDDSGFSTRRNQRSF

SEQ ID NO: 12879 - protein, 1197 aa, Xylella fastidiosa 9a5c
MRGALLTALLVLVSLLTATAAVPEMPRFRVLDATSGLPSNVVRAMLQDAAGYLWLATSDGLARYDGTAFKVWRHDPNDSGSLPGDSVLALYIDVQDRIWVLSENAGLAVLDAQRRRFIQVPVGSVAKTDALHTLTGHGDAIWLSDLHASVIRIDSAGALTRYALADVSPTLKDTPVVALTFDANGRLWVGTPDGLLYFEAGRLHLAPPPLDKASIHSIAAVGSRLWVGSTDGVYLQDAEGRWRAPNWGPMFASGNLLLSVADAGDGEFWLGSERGLWRTRQERPPVQIPLSDMHHGVSTVSSLWRDTSGGLWVPVYGRGLGYLRQDWKRMAVVRPSDGGESAYCNVAPAAYSGGLWQLNRIGELMHLNTSTGELVHTGWQRHELRGMNITTTLEDSRGRLWLANMQNGLSRLDLKNGQWREWAAHEDDAVPLYGPISWIVEMPDSSLWLEALGVLQQRDLESGRVLNQIVPGSHGLDGSRVEQIGLGPDGRLWLAAGSGVYAWESQRRMFVPISDLTGTRAYSFVPVGGNEVWVHRLRGLEQWRHSSHGWKRVALVGPQHGLPAMESLGMQHDAQGRIWLSTRRGLWRIDNTDELQVRNFGLRDGLGTQEFAEACLWMAPDGVLVGGTTDGYLMLFDTAMPDPAPFVPQLRMETVSVIRAGRRIDLPVDQPFELLPNDRQLIVGARLLSFGDPLSNRYSYWLKGFDTGWIDQGSSGTREFSSLPPADYTLLIQGTDPMGNLSRIHLVTFRVLPPWWRSAWGMSVLTGSGLLLLWGVAWNYHRRLRRRACLQLEQHQREVAERASLAKTQFLATLGHEVRTPMTGVLGMSELLLETPLDTRQHGYATSIQAAGKHLLRLVNDALDLAKIEAGKLSLERRDFDFHALLEQVVAMIRPMVERKGLRFVYRLDPEVPQYVHGDTDRLQQILLNLLINATKFTEHGEVVLQVAPGQEQACLGVRIDVADTGPGLSEEQCQRLFRRFEQVNGASTAARYGGSGLGLAICRELATVMEGEIHVDSELGKGTCFRVLLPLPWVLAVQHAVAVMDAEPSPCSNPLHLLLIEDDPTVAEVIVELLRVRGHRVTHALHGLEALVEVTLTRFDACLCDLDLPGLDGAGLIVQLRAQGQFFPIVVVTARTDADAQRQALQVGCDAFLRKPVTGEMLEQVLTQVLSAPRQEADVDTPKKGMEWEGPGSVTR

SEQ ID NO: 12880 - protein, 1190 aa, Xylella fastidiosa Temecula1
MRCLKRVRGGLLTALLVFVSLLTATAAVPEMPRFRVLDATSGLPSNVVRAMLQDAAGYLWLATSDGLARYDGTAFKVWRHDPNDPGSLPGDSVLALYIDVQDRIWVLSENAGLAVLDAQRRRFIQIPVGSVAKTDALHTLTGHGDAIWLSDLHASVIRIDSAGALTRYALADVSPTLKDTPVVALTFDANGRLWVGTPDGLLYFEAGRLHLAPPPLDKTSIHSIAAVGSRLWVGSTDGVYLQDAEGRWRAPNWGPMFAFGNLLLSVADAGDGEFWLGSERGLWRTRQERPPVQIPLSDMHHGVSTVSSLWRDTSGGLWVPVYGRGLGYLRQDWKRMAVVRPSDGGESAYCNVAPAAYSGGLWQLNRIGELMHLNTSTGELVHTGWQRHELRGVNITATLEDSRGRLWLANMQNGLSRLDLKNGQWREWAAHGDDAVPLYGPISWIVEMPDSSLWLEALGVLQQRDLESGRVLNQIVPGSHGLDGSRVEQIGLGPDGRLWLAAGSGVYAWESQRRMFVPIPDLTGTRAYSFVPVGGNEVWVHRLRGLEQWRHSSHGWKRVALVGPQHGLPAMESLGMQHDAQGRIWLSTRRGLWRIDNTDELQVRNFGLRDGLGTQEFAEACLWMAPDGVLVGGTTDGYLMLFDTAMPDPAPFVPQLRMETVSVIRAGHRIDLPVDQPFELLPNDRQLIVGARLLSFGDPLSNRYSYWLKGFDTGWIDQGSSGTREFSSLPPADYTLLIQGTDPMGNLSRIHLVTFRVLPPWWRSAWGMSVLTGSGLLLLWGVAWNYHRRLRRRARLQLEQHQREVAERASLAKTQFLATLGHEVRTPMTGVLGMSELLLETPLDTRQHGYATSIQAAGKHLLRLVNDALDLAKIEAGKLSLERRDFDFHALLEQVVAMIRPMVERKGLRFVYRLDPEVPQYVHGDADRLQQILLNLLINATKFTEHGEVVLQVAPGQEQACLGVRIDVADTGPGLSEEQCQRLFRRFEQVNGASTAARYGGSGLGLAICRELATVMEGEIHVDSELGKGTCFRVLLPLPWVLAVQPAVAVMDMEPSPCSNPLHLLLIEDDPTVAEVIVELLRARGHRVTHALHGLEALVEVTLTRFDACLCDLDLPGLDGAGLIVQLRAQGQSFPIVVVTARTDADAQRQAFHVGCDAFLRKPVTGEMLEQVLTQVLSAPRQDADVDTPT

SEQ ID NO: 12881 - protein, 241 aa, Magnetospirillum magnetotacticum
MMRSEGILNTGEKGLATAIKLTGEACSREPIHAPGTIQPHGVILALSIPSFGILAVSENLKDACPSVDGEAVAEWLPPAVMDGIRELIRSESHHEVTVMAELPDLGWREIHCFRGDDVIFVEFEVDCPESPVPQASILALKSAHVLGQFQSARSLTELGNALVWAVRDATGFERVLLYQFDDEGHGDVIAESLDETWEQSLMGLHFPASDIPSQARRLYLHVTARWVPVRDCDPVAIVPNF

SEQ ID NO: 12882 - protein, 1456 aa, Methanosarcina acetivorans C2A
MEEKLRTSGIDIIGDIPWGTHFCQFYQTKEDLMDVLVPYLKAGLENNEFCMWVTSQPLDVKDAKEALRRAVPDLDTYLEKGQIEIIPYTHWYVQEGSFDSERVLNGWIEKLNKALANGYDGLRLTGNTFWLEKKDWNDFVDYEEEVDRVIGNYRMIALCTYCLEKCNSTEIVDVVINHQFALIKREEKWEQIESSKRKRAEETALQAAKDWKYTFDAVPDLIAILDTEYRIVRANRAMAAKLGVTPEECVGLTCYHAIHGTDEPPSFCPHRQLLKDELEHTTEVCEDCLGGCFLVSVSPLYDSKGNLIGSVHVARDITERKQTEETLFEAYENIQVQSEELHAQAEELQAQNEELHAQAEELMKTNEALIESKKRFELLSEANAFLLSSKEPETTILTIAENVMRYLKCDVFFNYVFDRENGKLHLNACGGISAEAAKEIEWLDKGVAICGCVARDGCRIVAEDVQYNWDKRADLVRSMGIQAYACHPLHVGETTIGTLSFGTKSRKDFKEDELALMKTVADQVSVAIERKRAEEALSEAYENLQVQSEELQAQSEELNEAYELLRKSEKRFRTLAENSPDVIARFDRQNRHLYVNPAATEPYGRSPEEIIGKTNSELGMDPELVTFWEGHYQTVFASGKTEKMEFHYISPSGKEYYFSTRIVPEFVDGEVTSVLAISRDITDIKEAEIELKEARDNLKKLVEKRTLKLRKAYKLLKESEKGLAEAQKMSHLGNWNWNIVSNKLFWSDEIYRIFGFRPQEFCATYDSFLSYVHPEDRVLVDDAVKEAFNGKTYSIDHRIIRADGKERIVHEQGEVVFDRENVPVQMKGTVQDVTERKLAEKTLELASKYNRSLIEASLDPLVTIGADGKITDVNSSTETITGYSRDELIGTDFSDYFTEPEKAKEGYRHVFQKGLVRDYPLEVLHRDRHITHVLYNASVYRDEIGEVIGVFAAARDITELKKAEEKIKTLVSAVESSDDAVITMSLDGMITSWNKGAERVYGYPAEEILGKKMSVLEPANLKGEIKQLIERIKQGEGINHYETVRLKKDSTLVDISVALSPVFDDSGKIIALSAIARDITERKKAEEALRLSNIYNRSLLEASLDPLVTIGPDGKITDVNKATEQITGYSRGELIGTDFTNYFTEPEKAKEGYQQVFRKGAVLDYALEIQHRNGSVTPVLYNASIYRDESGQVIGVFAAARDVTELKKAEKILELKLEELARSKADLEQFAYVSSHDLQEPLRMIASYLQLLQRRYQGELDERADKYIYFAVDGASRMQSLINDLLEFSRVTTKAREFEPTDCESILNYVLSDLEVSIKENEATVSYDSLPEIMADGTQLTQVFQNLISNAIKFRSKEAPKIHVSAEKEDDKWRFSVQDNGIGINPKYSEKIFEVFKRLHKREEYPGTGIGLSICKKIIERHGGDIWVKSEPGRGSTFYFTLPASFEKIALNKIKE

SEQ ID NO: 12883 - protein, 820 aa, Leptospira interrogans serovar lai str. 56601
MRFLLLYIIFLFHYSLMAESLSPVSGKISQLQKDSSLSFFVYYFSSDSDENFRERIFAKDSSLSFQNIPAEVFSLGFTSNTVWFYIPLKNDTEKDYRGEFEIFNSYLEEVDIFYRYGSKDSIHEILAGTSRVYEKSFPALNFYLRPGEEIQIVCKIKSGTPMRIPIVLESEENFNFTKLFRAILFGLTLGFGIAMGLYNFSLYMFFRTRSYLYYFIMILFSTVYLASWDGLISPLFKPNYGRYYLPFILVLFYTSALFLFLFSMEFLYPEKKERYVKIIIFLYVVVNLLLIPLSIFYPTHLNRISYYLGLVNNLIIVYFCIVRIRGGFKSAKNFLIIHLVFPVAGILTNLSTFGAISIDYLSLHLLKLAFISQSVLFSVMLVQRIKELEFRLKDGLQSEIHKNIVLLKKEIQQRRETEWELIQAKEVAEKASKVKSNFLANMSHEIRTPMNGVLGMVQLLGTTKLNDEQKEYVEVLSVSAKSLLQIINDILDFSKIEAGKVILEREVFSIRSVLDEIHDLLYPLAKQKEINFRLEGKLEIQEYVYGDPLRLRQILWNLAGNGIKFTSRGEVVLKVTQKNISKSSVSIEFTVMDSGIGIPLEKQKQVFEAFSQNDTSTARKFGGSGLGLSITKQLVELQGGVLKLESKDGEGSKFTFTIDYDIPSALEIEKILEAEKTKDLEKSFQDVVAKSTRILVAEDNETNCLLIERALKKLGYDPTVVHNGREVIERMQLEAFDIILMDIHMPEVDGIEATKWIRSKNQNSEFPIIIALTADAIESSKEKYISKGMNDCLTKPLDLPILKSTLDLWSNRVDVSHWKL

SEQ ID NO: 12884 - protein, 1194 aa, Xanthomonas campestris pv. campestris str. ATCC 33913
MRLFPSVLHWVVALLLLGLCVTVSPALATRAPVMPVPNQVTVADGLPSDVIGELAEDKQGYLWLASDDGLARFDGRNYRIWRMEEGLTGNAIWTICVDQDNRVWMGFENGGAGFLEAKTRTFKPLENAQFPELRQITVWSLAQTPNGDIWLGTAANGLYRRRPDGSMQQFLNVPGDSASLPADAVNALRVAPNGTLWIATPGGLVRWDGKQFTRVALPGSSQTVGRLRLERDGNTLWVTDGAGELFRLDAEGRFSPHPWQNMPANQRVYNVLLRDRRGRYWLDTNAGMALSETGTDVVRVPIYSFTAHSLVNRNWIDSYEDREGGLWFAALEGGLWHLLPHWDTFAVLAHRPKEPHSLANTSVLATVASASGGVWLVGSKGVLERLDPATGRLQTHLEHIDPLHPPDSVFEDTRGVVWIGVEGTLVRYDPRTRQVKRLPIRADVAPDAEGAADRPLWMAEDGQGQLWVSVLEYGLQLRDAQGSLVRTIVNGTHGLEPLTILDIGTGPDGQVWLSNNAGLRRWDPRADRFVPVPGAPSQATYVFRFAEGGVVWLGVVGEIRRYLWDGTQLKLLDTIGKDQEFPMVAPNGLVVHAGGVAWVSSQRGLIRIDPGSKLVRVYGVHDGLPNPLMINRTLVQATGGQIVGAAPDGVVVFDPTAMHPNTRRPPLLIERVGVRRGERGLDITGQEPLTILDDDRDLHIVARMPTFTHPDSSSYRFRLSGYDPDWIDVGPSGERLFSRLPPGDYTLEVQGRTADGIWSASQTLTFQVLPPWWRSPWGLVLLTLLALCVVVAVVLLYRRRLRRLNAWQLAVHKQELAEQASLAKTRFLATLGHEVRTPMTGVLGMSELLLKTQLDHKQRSYTESIRRAGSHLLRLVNDALDLARIESGRLELDLQPFSVRQLVAEVEALMAPLAQERGLRFSLEVGLLGDITASGDPTRIRQILLNLLSNAIKFTERGVVGLKLSTLGSYQGLRFEVADTGPGINADQKARLFQRFEQGDGAKTTSRYGGSGLGLAICQELAMAMGGHIEVISRLGAGTRFVVDLPLRWVASNAVLAGEVARDSANVAPLRILLVEDEPTIAEVIVGLLRAQGHSVVHAPHGLAALTEAADNAFDLALLDLDLPGLDGFALARQLRVFGYDMPLIAVTARSDEAAEPTAQQAGFDSFLRKPLTGDMLADTIAEALRRVRPREEL

SEQ ID NO: 12885 - protein, 1584 aa, Methanosarcina mazei Goe1
MDTKMKQFPTNISNPVLSVGMDGTVLYSNEAGEPLLHEWGVRVGEKLPSSIGYIAQRVISRNNPEKIEVKVGKSVYLIVFHPLSMQECVNISGFDISGQKEFEEKPLESKEKYQDLFNLIEQAVQIGEIVFDENGRSIDNIILDVNLAYEKHSGLRREQVIGRGFKEIFPIVEQRWLDRYGEVVRTGMGMHFEEYNASLDRWFEVFASPMGSNRFIAVFSDITRHKQTEEDLLRSEQHYRLLHETMLQGVVYQDASGKIISMNPAAERILGKTPAEFLGSSSVGEEYLTIREDGSMFPGLEHPAMVSLRTGQKVQGVVMGVYNPRENFYRWININAVPIFRTGEDRPFQVYTLFDDITERKQEEHRIRRYNRILKGINRIFSNVVQAKTEEEVGNACLSVALEVTGSEFGFINEMGTDGLLHDVAKSELGWERCFMYDKTGHRRPPSFFAVHGLYGSVINNEKGFFTNDPPSHPDSIGIPDGHPPLTSFLGVQLVQDGKTIGLIAVANREGGYSSEQQEDLEAIAPAVVQALQRKKAEEALRLSNIYNRSLIESSLDPLVTIGRDGKITDVNCATEQVTGYPRNDLIKTDFSDYFTEPENARAGYKQVFTDGEVRDYPLEIQHKDGHITPVLYNASVYRDENGEVIGVFAAARDITERKRAEHQLSNELARATGLYELYTRSSNLSDRELYDFALNQAVKITDSTIGFFHLVSEDEKEIILTTWNQEALKSCMAGSEGHYPIEKAGNWVDCVRLKRPVVYNDFPSSPNQKGLPAGHATVNRFMSVPVTENGKVRVIFGVGNKVDEYDDRDVMQLQLVANELHKIMKLRRIENEVRESEAFLRDIMENVSDAIFVKDREARMILANTAFYRLMDKPPEEVLGKTVDDFHPPEIARKLVEDDKRVMEVGKGTTLEERIFTSYGWRILQTVKAPYYDGQGNIIGLIGAARDITERKKAEEALKKAYDNLDILVKERTAELEKAYTSLKESEKGLAEAQRMAHIGNWEWDIVNGGVYWSDELYQIFGRNPQESGATYHELLNYIHPDDRDFVDSAIKKGLNEKPSGIDYRVLLANGEERNVHAESEVIFDENDVPVRAKGIVQDITERKKSEEKIRNLANIVESSSDAIGTISLEGVITSWNKGAEQVYGYSAEEILGKTESILTLPHLSEETKKLTDRVIKGERINNYETSRLRKDGTIINVSLTLSPVFDASGKLTAVSVIARDITERKRVEEKLREIEEKYRNIVETANEGILIIDDEAIITYANKKMADMLGYTLEEGLGRPVWDFADEESKTILKQSLEKRRQGINGSYELKLICKDGSSLWALINAKSIFDKDGKFMGTVSMLTDITKRKKAEEALERMDKARIKEIHHRIKNNLQIISSLLDLQAEKFEDENVIESFREGQNRVISMSLIHEELYKGEGTDTLDFSAYFKKLAENLFKTYNLSSKNISLSMDLEEDTFFDMDTAVPLGIIVNELVSNSLKHAFNEDEEGKIRIKLCREEKNSEMGMSLFSLTVSDDGKGLPDDMELKCVESLGLQLVNILVDQLDGELQLKREQGTEFTIKFKVIEKDNPAHAGLKSQKNG

SEQ ID NO: 12886 - protein, 901 aa, Methanosarcina mazei Goe1
MKTDLEQFPAKNPNPVLSVANNCTVLYSNKAGEPLLHEWGVVVGEKLPSYLRDLVKSVITLNRPEKMELKIEKKVYLVAFHPSSEEKCVNIYGFDITDQKELEERLRIKEKQNDILYRIGKVALEFESLQIFLDESVKLIANILEVEYCKILELMPDGNFLLRAGSGWKHGLVGKAIIGGEKESQAGYTLFSGMPVVVEDFAGESRFKKPEILRMHEVNSGVSVTIGSIGKIFGVLGVHSRKKRKFTSDDTYFLSSVAFLIAQVIERKKAEEALKEAHDSLEETVTERTSELEKSYISLKESESRLAEAQRMAHIGSWDWNLITGEVCWSDELYHIFGRSPQESGATYDEFLSYVHPDDRDRVDNALKKGLNGESVAGNYRIILGDGEERIVRTEAEVVFDEKNNPVQVKGTVQDITEIKKVEEQLKILANIVESSNDAIGTISLDGNITGWNQEAENVYGYSVGEVLGKPVSIVTPPHLDKETIKLIEEIMHGKKVQHYETLRLRKDGTTIYVSITLSPVFDSYGKLIAISFISRDITERKKIEEKLRESEEKYRNIVETANEGISIVDAEERITFVNKKIEDMFGYSSEELIGGSMWDLLSDESKTIIKQMLEKGWKNVNESFEIKFIHKDGYPVWTYTNSKSLFDKDGKFFGTMNLHTDITKRKEAEEALRNFEIARKKEIHHRIKNNLQVICSLLDLQAEKFRSRESAEDTEVLNAFIESQNRVMSIALIHEELHEGRGTDTLNFSPYLEKLVENLFQTYILENVNTSLDIKLEENIFFDMDTAIPLGIIVNELVSNSLKYAFSGRDYGEIQIKLYREDSAEHENKEQRVIKESYGGTNVILIVSDNGIGIPEDFNLEDSSSLGLQLVKILVDQLEGQIELNRDSGTEFTIRFTVQI

SEQ ID NO: 12887 - protein, 1353 aa, Thermosynechococcus elongatus BP-1
MPAAPLPANEPERQRALEQYQVLDTPPEPIFDEITNLAAAICETPIALISLVDRQRQWFKSKVGIDACETPRNVAFCAHVILQDQLVIVPDARLDPRFADNPFVTGPPYIRFYAGMPLVTPQGYGIGTLCVVDYQPRQLNPVQQQTLRTLARQVINELEIRHHLEVTQQQLAYIQQMSSLQEAVFNSSNHAIIATRTDGIITLMNRAAQQWLGYPASELVGKATPERFHDPQEMERYAQILSAQLGEPIPAGFETLVARARRGLADEQEWTFVRRDGSCFPVSLSVTPMHDRQGQLIGFLESAVDITDKKQIEAALRLRERAIIASTNGIVITDYRQPDNPVIYVNPAFERMTGYRATEVIGKNCRFLQGSDRHQPGATAIRNAIKKGQSCRVVLRNYRKNGQLFWNELAISPIYNEFGEITHYIGIQSDVTERQRAQLFLQQQVKRTLLLNRITEEIRQQIEREHICRTAVQQVGVTLNVSRCLLFVYQENAPTPMELVAEYCGPGVPSVNECDLDLTQMRAPFLASVFASDEVFSCDDVQNDDRLAPLHAYCEALRVKSALIVRTAYRNQANGLLILHQCDRQRRWTDAIQSLLKSVAAQVGIGLAQVQLLEQETRQRQQLQQQMQRALLLNQITEQIRQSLDTETVFATTVTQIGQAFGVNRCLIHRYDPGPPPHIPDVAEYLQPGYASMRGISIPVENNPHALAVLSGDTAVVSNDVTQDPLLANAMHLCHQFQIQSMLAIRTSYKGVPNGIIGLHQCDRQRQWTPEEIELLEAVAAQVGIAIAQAELLRHEQQQRQLLAQQNQELEQARLQAELANRAKSEFLATMSHEIRTPMNAVLGFTNLLLDTPLNEQQRDFLQTLHQAGEALLTIINDILDFSKIESGKLVLEQQPFDVRECVEDVLSLLASKAQEKELELLYTCTPETPAQIKGDVTRLRQILVNLVGNGIKFTHEGQVAVHVGVLKREGKDFLQFQVQDTGIGIPRDRLDRLFKPFSQVDASTTREYGGTGLGLVISKRLCELMGGDMSVESTEGQGTTFTFTILAEGQKPYVPPKVHPALEGKRVLVIDDNAASRENLCTLLHNWGMVPIGYSDPRLVLEAAPPWDLAVIDLNMPQMTGLQLAERLQSEPNFNQQPMILLTPLSWLETASRKELITAHVPKPIRPLTLRQTLIRTLSSESATQPALTKTGIDLNLGNRFPLRILLAEDNAVNQKVALHILKRMGYRADVAANGLEVLEALQQRPYDVILMDVQMPKMDGLETTERICAQWPPSQRPWIIAMTANALAGDRERCFAAGMDDYISKPIKIEALAAALNRCRCLNPKSTYPQLCDQINIDSDQGHQSATESMT

SEQ ID NO: 12888 - protein, 1035 aa, Thermosynechococcus elongatus BP-1
MRIFMFRFPLLSFIQLFLPTTAVIAALLTPLYVGQRQALFKDFRVGQEGKLEEIQLTIANDIDDAVTDPKGLGSFHLWHELIDSPSQGELAEEVQELVDQWHRLKEHYDQLYVLDTRGRIRFQWTSTPQSDPPSTVKAINSYWPILRELTPDQVFVSPVEVTATKSSGLPFPVLYIGVPLYHQSAPKGVLVVRYQLNHLFNNLLSRCNIQMGWCLVADDQGYWLLGEDIREQWGFDFPERRQFTVRHQYPLLWQQMQHQLRGGLFGPDGLFVFQSFSLLQENWISAERSAHSSRRQSNVRWWLIGFLPSSALEQYLDHLNRDFLVSFTALCILAAVAVLLITRDRQRKRSLQKLLETSNARFRSVSEMAPVGIFTLDAQGQPTFLNQRLLQLLQVHNLEEAQQQWIERLHPEDRDRVLKAWAACQQKRVPFHERFRIVHNDSSSHWINARIIPLQESSATDSFVGTWEDISQMMQQQELLEVARQAAEEASRAKSEFLATMSHEIRTPMNAIIGLTGLLLDTPLNPQQQEFVNTIRLSGDALLGVINDILDFSKIESGKLELESYPFNLRTCVEEVLDLLASRAAEREVELAAHIDSGVPCAVIGDMGRLRQVLVNLIGNAIKFTQKGNVTLYVKAKPMPMSQYEFMPSYYSYLFAIQDTGIGISAAGMNRLFKPFSQVDASTTRQYGGTGLGLVICQRLVERMGGQIWVESKKTGESLVVGGTPLAVYESIPIAESGSVFYFTARFLLNPNPAPEPTDDTCYLENRRVLIVDDNATNRQILALQIKKWKMQPLVAESGPSALALLQQQGWVDLAILDLQMPEMDGVTLARQIRAAYGELPLILLTSLGNTLTESEKALFSSLISKPVKQSTLYNALNSLFCEKQKTVSPKPAAAPSFEHLKAELPPLRILVAEDNKVNQMVALRILEKLGYRGDIAANGLEVLDAVQRQPYDVILMDMQMPEMDGITATREVTQLFQGLKKPRPRIIAMTANAMESDRQLCLDAGMDDYVSKPIRLEELVRALRQCQPLQTPTT

SEQ ID NO: 12889 - protein, 765 aa, Microbulbifer degradans 2-40
MLLLFQRVRNLPLTAKAYITIVIAAAVAVAWVSAVEWSIATNKHQQHIATATKNARQQLNQAIQTGNQLVLEHCLTNLVAQSIIKRATLIGPSSRQEKTSLNYATSEGFSTLREPLDAGWVLEMQVSTGMTAFLERLVIDLVGILLITGALLLYVRLALVSKLLQLNFAARTLNLENLNRSLLPKKSRQPQKRAADSQDELDSLLQALERIRLSMLEDREQRRTVELALMREKEEKIETRRLVQEAEAANRAKSQFIATMSHEIRTPMNGVIGMVEMLRDTTLDDSQRHYLGIIERSGDSLMNIINDILDYSKIEAGKMSLEHMQFDLEELLEDCVQMFSASTDKRNIELICSISPNTPKQLMGDPTRLKQVLVNLIGNAFKFTSEGHIYVEARQVNASDADLPMIHFSVEDSGIGIESNQQEKLFDAFCQADGSTTRKFGGTGLGLTICKQLAEMMGGEIGVYSREKAGSTFWFSAVFTHVEKAINEQPPQSLAGKKLLVVNQSKIVEKVIASHAADWNIACRIVHSGEKALEVISGQHHYDFIILSQDLQDMPGLDVADKVRTLAAYSSTPIFLVTKVRKSQLPEDRLHTITALLPYPLSIHKIENLLQTKPTHTVVEEQKTNTQATTVSEGPLHVLVAEDNPVNRMVIEGLLAKFDIAPKFAEDGLQALNAVTESPTPYDLIIMDCEMPEMDGFEATRSIRTWESNNNQPATTIIALTAHVEAEHRQRVFDSGMNYYLSKPVTMEKLSEALTTAGLAPQIAS

SEQ ID NO: 12890 - protein, 789 aa, Pseudomonas fluorescens PfO-1
MPHANALLEKLANSSQRLNKGLLILGALALLLLGISYLGVQRMVEEQRDTLQFHFARLMENVREQEAFLGDISRAGASGEYLPVTVASPMVQKLLPEEGPNIYQGRGLPFSLPFSVKIDPQRIAPDQYPKVFALGSYLAAYYSAFWAASHYQSPQVILLNGPDNFDIAVPATGRLRGAGPTQVGRFVKLMTQMNMQRHSQTSEQVLWAPYPFEQDNDGTPSLLAYVRMNLSKPTLRIEGANTWVVLGSLLKLSQVNNIERLMEWSIYDNFTLITPNGTVLIGALKPNQMLDDGANLTRDGLVFKLTSAGDQRWTAIYVISVQSFLDYALWPLLCLLALVLALLGSGRALNRWYTDRVILPAQSAHASIAESEAFCRAVIDTAPTGLCVISRRNHQVLLENQLAQQWHDSGELISLLDQQAATGHGHAELEIDSRHLHVAFVATRYQGQDAWLCALHDVTRHVEDSAALEVARQAADSANQAKSRFLATISHEIRTPLYGVLGTLELLGLTALAPRQQEYLETIQRSSASLFKLISDVLDVSKIEAGQMNLELQPFCPLELTEDVVRSYGAFARGKGLQLYACIDAALPDHLLGDAQRIRQILNNLLSNAIKFTDNGRVVVRVRVLQNSGGQARVQWQVSDSGVGISQAQQQQLFDPFYQVNEADSHAGAGLGLAICKWLCELMHGQLNVVSEPGLGSCFNLQLMLECASDSLADCPAFGADSPAVYVRAPVAELAQHLMAWLNRFGLDCRLVTNELPPPSALLVDLAPLASATAFAGQRIVAMPLPQPV

SEQ ID NO: 12891 - protein, 1118 aa, Desulfovibrio desulfuricans G20
MHTRHAQQPAGHTAPRNFRHAHYHGLVPDLSQHRKNSACRPRSATAGTMKINLSISSIRLRVILVTLLVALVPVCTMTVAGLLVSMQQTASALSLQSRTALDKVSAAISRTTREAENVSRLVAGFNTLQGNPEPDSLRDMLFSRQHFWDKGFVEVFDAQGRILARSVPLRTANRQWMTPPEDPLVMQGILLHTASDIVRTPAGLAARAVAPVYRPSSLQAIGAVVTTFPLDRSMLQHIKEQTQADITLHYPDLRVESTLHDASKLPVTHDWDNTYDVMRNAEGPAQYEAQIAGSTYALSSIPLRNNAGVTQAVLSVALNRNMLRQYLHDAVQTLVLTLVLALVMAAGLGMWTAEKLTRPLHEMVQAIRRMAGGNLSVRVTEGGSDELGELAQSFNKMAGRLEEQRAHLLDALHEHEETTLRLANANKGLEYANRELLSAREEYRKIFEGSVQGIYQTTLEGRFIKANRALARMLGYGSAEELIGTVTDIGSQLYVNPADRQRLKSLLSTRSSLSDFETRFYRRDGSQVPVSISVRLVYDENDLPQYLEGALTDITERERRREAEQQREAAEAASKAKSEFLARMSHEVRTPLNAVVGMADLLWESDLTPDQRLYVDIFRKSGQTLLALLNDILDYSRLEAGRLTLERLPFSLRDTLTMTVNMHAAQAESRQLSLSLHVDETLPDNYCGDSLRLRQILGNLLSNSIKFTREGSVEVHVGPAPGQQELTAGEPVMVRICVRDTGIGIPENVQQTIFESFTQADSSITRQFGGTGLGLSICRMLTTMMGGRIWLESTQGQGTAVYVEMRLDLHDRSAAETQPEECAMPVQAAPLRILCVEDSANNRLLFRMYLKNTGHEVDEAENGEEGLRLFMLNSYDIIFMDLEMPVMDGYMATTAIRDYEQRHRMPAVPVVALTAHALEDFKQRCLAMGFTDYLTKPFRKQQLLAMLERNTGAPAPQYQADGAKRPAPEEHTAGQNAEKLAEQTAEEQAARKQTSGKQPPAAAQHTTEHMTDRQADKSATTVTTDRQAEQTSGQPPAGAAGDTATTGQSGEGTAAADAAQEVTMLENQRTGHTVIPQTGRQQTDRQQTEGTSDNDDTEPHREARKTQREPSQSPAHKT

SEQ ID NO: 12892 - protein, 925 aa, Pseudomonas aeruginosa PAO1
MFKDLGIKGRVLLLTLLPTSLLAMVLGGYFTWVQLSDMRAQLIERGQLIAEQLAPLAATALARKDTAVLNRIANEALDQPDVRAVTFLDARQERLAHAGPSMLTVAPAGDASHLSMSTELDTTHFLLPVLGRHHSLSGATEPDDERVLGWVELELSHHGTLLRGYRSLFTSLLLIAAGLGVTALLALRMSRAINAPLELISQGVAQLKEGRMETRLPPMGSNELDELASGINRMAETLQSAQEEMQHNIDQATEDVRQNLETIEIQNIELDLARKEALEASRIKSEFLANMSHEIRTPLNGILGFTNLLQKSELSPRQQDYLTTIQKSAESLLGIINEILDFSKIEAGKLVLENLPFNLRDLIQDALTMLAPAAHEKQLELVSLVYRDTPIQLQGDPQRLKQILTNLVGNAIKFTQGGTVAVRAMLEDESDDRAQLRISVQDTGIGLSEEDQQALFKAFSQADNSLSRQAGGTGLGLVISKRLIEQMGGEIGVDSTPGEGAEFWISLSLPKSRDDNEEPGASWAAGQRVALLEPQELTRRSLHHQLTDFGLEVSEFADLDSLQESLRNPPPGQLPISLAVLGVSAAIHPPEELSQSFWEFERLGCKTLVLCPTTEQAQYHATLPDEQVEAKPACTRKLQRKLQELLQVRPTRSDKPHAMVSGRPPRLLCVDDNPANLLLVQTLLSDLGAQVTAVDSGYAALEVVQRERFDLVFMDVQMPGMDGRQATEAIRRWEAEREVSPVPVIALTAHALSNEKRALLQAGMDDYLTKPIDEQQLAQVVLKWTGLSLGQSLASMSRAPQLGQLSVLDPEEGLRLAAGKADLAADMLAMLLASLAADRQAIRQARDNDDRTALLERVHRLHGATRYCGVPQLRAACQTSETLLKQNDPAAAAALDELDKAIEALADTASATTHLSSTSLDSSEL

SEQ ID NO: 12893 - protein, 1072 aa, Vibrio vulnificus CMCP6
MTESISLTLTNNESSRFLIRQRLLSILQAFGYDACRCDIHMLRLGEFVRITLADIQRFTLSFELDDDSLKVILASSELDPQTCSFPACVHTFQREKAIGVSIPSLIPLSDEILNQLTQFLAKPSRDELMSELKAKNQELAVHQAGLEKEIELRTADLKASEELSRTIIDGAPSSVAIVDESLSISLWNSTAQNVYGYSSEEATGENILTLLNMSLPDALSHVLSAPLALQNQPDVEGGFFEVETTTKEGHMVPIDLGVSIFELNGACHAALFLRDVTSRKAVEKELNDAKAKAEEAVEVKSMFLANMSHEIRTPMNAIIGMSHLALKTDLTPKQHDYVSKIHSSATLLLGIINDILDFSKIEAGKLSIETTEFYLDDVFHNVSMVTGQKAFEKGLELIFDLPRETPRCLLGDPLRLGQIIINLVNNSVKFTEKGEITVSVHHIRNVEDLVELEFRISDTGIGMTDKQMKSLFTAFTQADGSTTRKYGGTGLGLSICRRLVELMGGQIRVESEAGKGSHFIFNVLVKADPANSSAPSIVPQSLEKIRILVVDDNEHALEIMQEMLSTLPGKVALANSGQQAVDCIRKASEQREKFDLIFMDWNMPEMDGIETSRLIRESFASEYQPQIVIVTAYDKEDVLDATNDLDIAGFLSKPVGQSYLFDLLVELFGRDRNPTTQIRKKELPTHDSKNDLKGLKVLLTEDNEINQQIAVELMEGNGLLVTVANNGQEALEHLEAMEKGESHFDIVFMDLQMPVMDGYEASHRIRANSSYDTIPLIAMTAHAMVEERERCLNLGMNDHISKPIDPEILFNTIRKWCPRTLNEKDESPVDVEQSQTQQLDSSIESAATPKSTERAAAEKRTLETLESLDYKNGLLRVAGNQTLYRRLLSQLMDKEISAPERLTIALDKQDTEQAIIIAHSLKGSASNLGAIRLSDIASRLEMAIQHGKERAEIDKLNKELDGYLEHFFQDLALALGRPKPSSDKRLELKDEELMIIHTLDSLLDSLDAYAIEFLDEHYVLLNTLLKSEDFEACCRCVNDCDFESASKSLRKAVSIYPLDLGKLSGEKNGRES

SEQ ID NO: 12894 - protein, 1320 aa, Vibrio vulnificus CMCP6
MLLFLAMGICSIAMLSVTQKVAELRTQSRDYQQDLYRFYRLSQELKQSSDHLTKFARAYVVTGDDYWEALFNKVLDIRDGKLPLPAGNEYEYWDLAASSAEYVPPFTSETGVPLLQRLRDSGISATEFLELKSALMLSDNLVNLEREAFLAVKGFKLEPDGKEFYTGKPDLPYAQSLLYGKVYFEEKAKIMKAIGSAHQAIVHRIEGNIEQTDTQELQYQYVYRVLVAILLASIVVSFTLLWRLYISPLSKLLRTVVNQVKAQDYAFTITQTAYAELQKFIDSLNVVFHHISEQLSQNTLVKDFNIVLRTSQSTQSLCHEVTQFLLHQFPVQQVSIAIYRDDKLIRIAGAGYDDTISREISDQSSTQLSVLLSDKPYSMKSLQGKYTTHVNGGVLELNEIYYFPLCVNKQPVALLELGTVDTLTPLQYQWLSQMLDDLSVSIQLSQNVELQRKAEQKVLEQSQLNQEILNATPNPMYCLSAQGKYLTVNAKFSELTGLAMHEIVGRTPIEVFSQQDASHHFTQVHQELSQEQCSKNYELSLLDSQGGCRDMLVCEASFNNSQGRVSGIVGILLDLTERKQMESELRDAKDTADAMSRAKGDFLANMSHEIRTPMNAILGMAHLALNTELDPSQRKYLTRINESAKNLLGIINDILDFSKIEAGKLSVESIDFSLDEVFENLTNVISFKAQEKGIEFLLDIDPRVPVGLVGDPLRLGQVLVNLCGNAVKFTEKGEILVSVMPESQSSDDVTLRFSVKDTGIGIDKEKIADLFNAFSQADTSITREFGGTGLGLSISKQLVELMGGQLSVSSAVGMGSTFTFTIHCGLQEAKMRDIAKPISGLAGKRALIVDDNDSARNILMTLLSAMQFDAKAVSNGFEALDELRQGAFDMVFVDWNMPGMNGLELLQTAHQERLLAETKNFLVTAYGREISMDENSSKLVDSLIVKPVNPSNLLDAIMDSYGIEHVTRSSTTVTFEKPVFDGQTLLLVEDNEVNQEVAIGLLNGTNLNIITADNGKLAIEALEHHPIDLVLMDMQMPVMDGITATKAIRERAEWATLPIVAMTANAMQSDVERCHEAGMNDHVAKPINVHNLYQVLSQYLSASNAASHTSSSHSTSSSQSTPDRTASADEDDLPTLSGINLKEAIFNTGGNKESYLSILSRFLEMQLEELPMFKEVVEKEDWDMAARMAHTLKGAAANLGVTPLAQLAIKMEKSIDHRSKTVIGELELAGVALDKLHAQLSEWQKRHVNVSEQECEEAAELYKRLVELVEQYDVAAVDVIKQAKDCDVWTDEQKQQLINAIESFEFEQAKEMLAAFPKPE

SEQ ID NO: 12895 - protein, 642 aa, Vibrio vulnificus CMCP6
MNGKRQIGIDKQLMIAVILLSLAFTLVSTGFNVYWDYKQELKKRQAELNWVEQSYLQSLTESLWVEDRQHLESQVQGMMTLPFIDAIDIANENEVIVKTGDVGHSKRVLERRWPMEYQLADNHYLLANLTVRSNLDEVYQGLWRKFALLLVGESIKTFLLMVGVIYIALSLIVKPISLLSRAVSDFKDGETPSRLRLPARAFDDEISLLAEKYNSSVERLRSNYAELKSAKEQAEVANVKKSEFLATMSHEIRTPMNGIIGVASLLKEMELSSEQKQYVEMINHSSESLLDIINDILDFSKIEAGKMAISLEPFCLSDLVEQMCAIYTLKAHAKNLQFVVELAEDVPHTMSGDSKHLKQVLNNLLGNAVKFTERGYVKLVVAKELDAQHIPHIRFQVFDSGIGIAKEKQELVFERFQQADGSTTRKYGGTGLGLAICRRLVSLMGGELELKSEVGLGSCFEFSVPCVDGEGVFAKDRKDNVRHLQELGVTEVDSEPSSAHQSSQVAALPRALLVEDTFINQKVAKLMLEKIGLAVDIAEDGEQALVLCQQQQYGIIFMDCQMPVLDGFETTEILRASDGWTRDVPIIALTANVVVEDKQRCFDVGMNDFLAKPVTQQRMSDMVKRYLPFDDSSTGSHRHQQP

SEQ ID NO: 12896 - protein, 928 aa, Vibrio vulnificus CMCP6
MTRYGLRARVITLTLAPTLIIGLLLSSFFSFNRYQDLERQVITTGNSIIEPIAIASEPHLLSESREAVRRLVSYAHRKNSNLVRSIAVFDSKHELFVTSNFHPNFESLTYPKDQPIPLLGNAEIRSDTMILRVPVLSEGHYLSDLAEPGEATRAIGYIAVELDLSSLRLQQYQEVFSAFLVLILGLGLASVFASRLMQDVTQPITHMKNVVDRIRRGQLDVRIEGKMHGELDSLKNGINAMAISLSEYHVEMQHSIDQATSDLRETLEQLEIQNVELDIAKKRAQEAARVKSEFLANMSHELRTPLNGVIGFTRQMLKTQLTNSQTDYLQTIEKSANNLLNIINDILDFSKLEAGKLALENIPFDFRESLEEVISLQATSAHEKGLEITLKIDPRIPEGVVGDPLRIQQVLTNLVGNSIKFTERGNIDVSVEMRAQSGDSIDLQFMVKDTGIGISERQQAQLFQAFSQADASISRRYGGTGLGLVITQKLVSQMGGEISLTSRLHQGSTFWFTLRLHSTQMPMSDSIEAEYLQGKELLLVEPNMQAAAVTQQVLTQEGINVTYRSLLPDNAKGYDFVLLSLAVNQVYELETIENWLSRALHISANTILAIPSTELALADQLTERFGIQCLTKPLGRRKLLQSLAAKQTLQPLLPAPENAQAERSSLSVLAVDDNPANLKLITALLAERVVSVTSCSSGQDAVDIATSRQFDLIFMDIQMPKMDGVTACKLIKQTELNANTPVIAVTAHAMSGERDRLLKAGMDDYLTKPIEEHILQQVLIHWNPNTCDSQVEKISPSYIATEESSVQQNIARSSDIIIDWQAALKQSANKEDLAKDMLRMLVEFIPEVESVVELALEQEDYPRDELIHVIHKLHGSSSYCGVPRLKALCATIEQSLRSDADLMDVEPELFELQDEMLKVSTTAQLYLA

SEQ ID NO: 12897 - protein, 632 aa, Vibrio parahaemolyticus RIMD 2210633
MDVKERTQRRFSIGNQLMLAVLTLSLIFTLVISAISLYRDFQEELSHLDTDLKQVESSYLSSFSASLWVEDRELLLTQALGAMRLPSVDYLRIATKDEVIIELGTEITQDVVERRWPMQFSVGEKTFELAELTVQSDLSAVYQDLWQQFFFLLTTEAIKILLLMVGVLWVAFRLLVNPLQLLSGAVSDFSGGNAPSTVTLPKRWCFDEVSLLAQKYNRSVQKVREHQAELEAERDKAEVANRKKSEFLATMSHEIRTPMNGIIGVASLLSDTKLDPQQKEFVEIIDNSSQSLMTIIDDILDFSKVEAGKVELASETYHFRQLLDDVISLHTVKAQQKNLQLLSDIDPKLPAEVQGDEGRLKQVLNNLLSNAVKFTERGHVKLLVSLHEQNNDIAQVRFRVVDSGIGIAKEHQQAVFERFQQADGSTTRKYGGTGLGLAICAQLVHIMGGDIKLTSELGLGSCFDFTIPLTVVSGLPTYTDPLNVLDFPRTEANEATNKNPDKPWVLIVEDTEVNQRVVRIMLEQLGLKVSVASHGEEAFQLCREHAFDLIFMDCQMPVMDGFIATEQIRDMNEWGAHVPIIALTANVVKEDQQRCFEAGMNEFVAKPVTKARLQQIFEQYLPKALKNIATPK

SEQ ID NO: 12898 - protein, 1303 aa, Ceratodon purpureus
MSATKKTYSSTTSAKSKHSVRVAQTTADAALEAVYEMSGDSGDSFDYSKSVGQSAESVPAGAVTAYLQRMQREGLIQNFGCMVAVEEPNFCVIAYSENASEFLDLIPQAVPSMGEMDVLGIGTDIRTLFTPSSSAALEKAAATQDISLLNPITVHCRRSGKPLYAIAHRIDIGIVIDFEAVKMIDVPVSAAAGALQSHKLAARAITRLQALPGGDIELLCDTIVEEVRELTGYDRVMAFKFHEDEHGEVVAEIRRMDLEPYMGLHYPATDIPQASRFLLMKNRVRLIADCYASPVKLIQDPDIRQPVSLAGSTLRAPHGCHAQYMGNMGSIASLVMAVIINDNEEYSRGAIQRGRKLWGLVVCQHTSPRTVPFPLRSVCEFLMQVFGMQLNLHVELAAQLREKHILRTQTLLCDMLLRDAPIGIVSQTPNIMDLVKCDGAALYYGKRVWLLGTTPTENQIKEIADWLLEHHNDSTGLSTDSLADANYPGAHLLGDAVCGMAAAKITAKDFLFWFRSHTATEVKWGGAKHDPDEKDDGRKMHPRSSFKAFLEVVNKRSPPWEDVEMDAIHSLQLILRGSFRDIADSDTKTMIHARLNDLKLQGVEERNALANEMSRVLETAAAPILAVDSRGMINAWNAKIAQVTGLPVEEAMHCSLTKDLVLDESVVVVERLLSLALQGEEEQNVEIKLKTFGTQTTERAVILIVNACCSRDASDFVVGVFFVGQDVTEQRMFMDRFTRIQGGEKTTVQDPHPLMRPSFDGDEFGRTFKRNSALGGLKDHATGSVERLDLYLRRAEECMEVMETIPSPKFNNKQCQYLAGKLKAVLQSASLFLRISHHEHHELGASIDMGRHVEIFKLLLALAKEIESFIQGCCKDEWIKAAMTLTNVSEYVSSMGFNLELCKIAFCKSCAASGSLTLDQIEVICKDEAEVVKRNASIDVDTLFAKVIYDLTEKTLSSDQNDLAIYLLQRLKRAKPILPSFSSRPSWWNFYDDWSFSEKFFQWIQITGSLGSGSSATVEKAVWLGTPVAKKTFYGRNNEDFKREVEILAELCHPNITSMFCSPLYRRKCSIIMELMDGDLLALMQRRLDRNEDHDSPPFSILEVVDIILQTSEGMNYLHEKGIIHRDLKSMNILVKSVKVTKSEIGYVHVKVADFGLSKTKDSSTRYSNQTWNRGTNRWMAPEVINLGYESTEGEISFDGKVPKYPLKSDVYSFGMVCYEVLTGDVPFPEEKNPNNVKRMVLEGVRPDLPAHCPIELKALITDCWNQDPLKRPSFAVICQKLKYLKYLLMTGKLSSHSYLTSK

SEQ ID NO: 12899 - protein, 1307 aa, Ceratodon purpureus
MSATKKTYSSTTSAKSKHSVRVAQTTADAALEAVYEMSGDSGDSFDYSKSVGQSAESVPAGAVTAYLQRMQREGLIQNFGCMVAVEEPNFCVIAYSENASEFLDLIPQAVPSMGEMDVLGIGTDIRTLFTPSSSAALEKAAATQDISLLNPITVHCRRSGKPLYAIAHRIDIGIVIDFEAVKMIDVPVSAAAGALQSHKLAARAITRLQALPGGDIELLCDTIVEEVRELTGYDRVMAFKFHEDEHGEVVAEIRRMDLEPYMGLHYPATDIPQASRFLLMKNRVRLIADCYASPVKLIQDPDIRQPVSLAGSTLRAPHGCHAQYMGNMGSIASLVMAVIINDNEEYSRGAIQRGRKLWGLVVCQHTSPRTVPFPLRSVCEFLMQVFGMQLNLHVELAAQLREKHILRTQTLLCDMLLRDAPIGIVSQTPNIMDLVKCDGAALYYGKRVWLLGTTPTENQIKEIADWLLEHHNDSTGLSTDSLADANYPGAHLLGDAVCGMAAAKITAKDFLFWFRSHTATEVKWGGAKHDPDEKDDGRKMHPRSSFKAFLEVVNKRSPPWEDVEMDAIHSLQLILRGSFRDIADSDTKTMIHARLNDLKLQGVEERNALANEMSRVLETAAAPILAVDSRGMINAWNAKIAQVTGLPVEEAMHCSLTKDLVLDESVVVVERLLSLALQGEEEQNVEIKLKTFGTQTTERAVILIVNACCSRDASDFVVGVFFVGQDVTEQRMFMDRFTRIQGGEKTTVQDPHPLMRPSFDGDEFGRTFKRNSALGGLKDHATGSVERLDLYLRRAEECMEVMETIPSPKFNNKQCQYLAGKLKAVLQSASLFLRISHHEHHELGASIDMGRHVEIFKLLLALAKEIESFIQGCCKDEWIKAAMTLTNVSEYVSSMGFNLELCKIAFCKSCAASGSLTLDQIEVICKDEAEVVKRNASIDVDTLFAKVIYDLTEKTLSSDQNDLAIYLLQRLKRAKPILPSFSSRPSWWNFYDDWSFSEKFFQWIQITGSLGSGSSATVEKAVWLGTPVAKKTFYGRNNEDFKREVEILAELCHPNITSMFCSPLYRRKCSIIMELMDGDLLALMQRRLDRNEDHDSPPFSILEVVDIILQTSEGMNYLHEKGIIHRDLKSMNILVKSVKVTKSEIGYVHVKVADFGLSKTKDSSTRYSNQTWNRGTNRWMAPEVINLGYESTEGEISFDGKVPKYPLKSDVYSFGMVCYEVLTGDVPFPEEKNPNNVKRMVLEGVRPDLPAHCPIELKALITDCWNQDPLKRPSFAVICQKLKYLKYLLMTGFSSYQDSYPSTEEPS

SEQ ID NO: 12900 - protein, 1299 aa, Ceratodon purpureus
SSTTSAKSKHSVRVAQTTADAALEAVYEMSGDSGDSFDYSKSVGQSAESVPAGAVTAYLQRMQRGGLIQNFGCMVAVEEPNFCVIAYSENASEFLDLIPQAVPSMGEMDVLGIGTDIRTLFTPSSSAALEKAAATQDISLLNPITVHCRRSGKPLYAIAHRIDIGIVIDFEAVKMIDVPVSAAAGALQSHKLAARAITRLQALPGGDIELLCDTIVEEVRELTGYDRVMAFKFHEDEHGEVVAEIRRMDLEPYMGLHYPATDIPQASRFLLMKNRVRLIADCYASPVKLIQDLDIRQPVSLAGSTLRAPHGCHAQYMGNMGSIASLVMAVIINDNEEYSRGAIQRGRKLWGLVVCQHTSPRTVPFPLRSVCEFLMQVFGMQLNLHVELGAQLREKHILRTQTLLCDMLLRDAPIGIVSQTPNIMDLVKCDGAALYYGKRVWLLGTTPTENQIKEIADWLLEHHNDSTGLSTDSLADANYPGAHLLGDAVCGMAAAKITAKDFLFWFRSHTATEVKWGGAKHDPDEKDDGRKMHPRSSFKAFLEVVNKRSPPWEDVEMDAIHSLQLILRGSFRDIADSDTKTMIHARLNDLKLQGVEERNALANEMSRVLETAAAPILAVDSRGMINAWNAKIAQVTGLPVEEAMHCSLTKDLVLDESVVVVERLLSLALQGEEEQNVEIKLKTFGTQTTERAVILIVNACCSRDASDTVVGVFFVGQDVTEQRMFMDRFTRIQGGEKTTVQDPHPLMRPSFDGDEFGRTFKRNSALGGLKDHATGSVERLDLYLRRAEECMEVMETIPSPKFNNKQCQYLAGKLKAVLQSASLFLRISHHEHHELGASIDMGRHVEIFKLLLALAKEIESFIQGCCKDEWIKAAMTLTNVSEYVSSMGFNLELCKIAFCKSCAASGSLTLDQIEVICKDEAEVVKRNATIDVDTLFAKVIYDLTEKTLSSDQNDLAIYLLQRLKRAKPILPSFSSRPSWWNFYDDWSFSEKFFQWIQITGSLGSGSSATVEKAVWLGTPVAKKTFYGRDNEDFKREVEILAELCHPNITSMFCSPLYRRKCSIIMELMDGDLLALMQRRLDGNEDHDSPPFSTLEVVDIILQTGEGMNYLHEKGIIHRDLKSMNILVKSVKVTKSEIGYVHVKVADFGLSKTKDSSTRYSNQTWNRGTNRWMAPEVINLGYESTEGEISFDGKVPKYPLKSDVYSFGMVCYEVLTGDVPFPEEKNPNNVKRMVLEGVRPDLPAHCPIELKALITDCWNQDPLKRPSFAVICQKLKYLKYLLMTGFSSYQDSYPSTEELS

SEQ ID NO: 12901 - protein, 577 aa, Ceratodon purpureus
MSAPKKTYSSTTSAKSKHSVRVAQTTADAALEAVYEMSGDSGDSFDYSKSVGQSAESVPAGAVTAYLQRMQRGGLIQTFGCMVAVEEPNFCVIAYSENASEFLDLMPQAVPSMGEMDVLGIGTDIRTLFTPSSGAALEKAAATQDISLLNPITVHCRRSGKPLYAIAHRIDIGIVIDFEAVKMNDVSVSAAGALQSHKLAAKAITRLQALPGGDIGLLCDTVVEEVRELTGYDRVMAYKFHEDEHGEVVAEIRRMDLEPYLGLHYPATDIPQASRFLFMKNRVRVIADCCASPVKLIQDPDIKQPVSLAGSTLRAPHGCHAQYMGNMGSIASLVMAVIINDNEEDSRGAIQRGRKLWGLVVCHHTSPRTVPFPLRSACEFLMQVFGMQLNMEVELAAQLREKHILRTQTLLCDMLLRDAPIGIVSQTPNIMDLVKCDGAALYYGKRFWLLGTTPTENQIKDIAEWLLEYHKDSTGLSTDSLADANYPGAHLLGDAVCGMAAAKITAKDFLFWFRSHTAKEVKWGGAKHDPAEKDDGRKMHPRSSFKAFLEVVKRRSLPWEDVEMDAIHSLQLILRGS

SEQ ID NO: 12902 - protein, 1254 aa, Azotobacter vinelandii
MKIPRRKPSHRLAAAYIALGGLFYGLSSLPANAAERLDIMHWWVSSGERASIEVLRERIRAQGLEWREQAVAGSGTARYINELRKRVAGGRPPSASQMIGFDIQEWARAGHLESLDEAAARNEWDEVVPFGIQALSKYQGHWYAAPINTHSTNWLWMNQRLLEKLGSPPAPDTWDDLVLLLERARTAGMLPLAVGREAWEHTLLFESVAVSTGGAEFYRRAFVELDAEALPLPLAIRIFERMRVLSRFVDPGFRRRRWDQATDLVRKGEALLQVQGTWVDGEFALHGMQPGRDFQCFRFPDTQGVVLFNSDQYVLLKNGPGSQAARRILLDTLMDPDFQAAVNRRSGAIPARVDVPKDGFDACGQRAIDDMRGANMRRTMMGSIAMGQRQPARRQDRHLQRGEPPSRRRTRRRPGGRSAAAGAFRRTLMSVLTPFANLRLTTKILLLVGLLGSIALAISIYSMANMRSVDRGYRGLIERQAQSALLLSDAALLLSDSSKLVYAVLTEQEEHKMRAVNGVVSGLQKEFDATLARIRPLIPGRAAALDAIAAQAPAVFEHARAIVEAAARWRGDRALRIIHEGFEPALRALQADMEALRGASIAEFGHASVELNRTTNRTIVAAAIAVVGGLLLVLALSGYLSITQISRPIAALTRIMERLTDRRYDDAIPGTGRRDEVGTMAQALQVFKDSMQRADRLSIEVAKSEQARLLSEQIAREKTAFLALMSHEIRTPLNAMLGMTQLALKSELSPPQRMRIETILRAGRHLLSIINDILDLSKIDSGKLVLEKTDFELEHLLADVVGMLADKAADKGLPLHVRVADGAPRMLVGDPMRISQILLNYLDNAIKFTQRGEIALEIEVRPDGTEYWLLTGSVRDTGIGMDAQQVANLFQAFRQADASITRRFGGTGLGLAICRRLAESMDGSTGASSTPGAGSTFWFSARLGRSALSEPAPLSMVRPEENAGPDGPAPAAPSCAPGQDARALHGRRVLLVDDNALNRTVATGLLESGGLLVDAVDDGQAALDTLRAAPDGRYAAVLMDMQMPVMDGLTATRLLRTEPRFAGLPILAMTANATREDIAATVQAGMNAHIAKPIDEGALWDILLHWISREAVEAGSERNIPAPTAAETDDAPPMEIFTPAPLRELRQRLAPARFEALLAMFEEDCRARCLRIGEAAWAGHVDALRQEAHDLVSTAGSFGLLALLALGLELRRAAQAHDMRATRHVAARIERATGEGLRALRATFPPPRPADAER

SEQ ID NO: 12903 - protein, 1969 aa, Dictyostelium discoideum
MEKSEQTNSFESSNNNNNNIDSNINNNLENNNNKNNNNNNNNNNNNNNNNNNIENSIDKNNKEDNSLVGVNSHRKHRTRLKSKKGNKHETKKEIDYKDLLIKLPHNAVSNFNSLENESSDNLTPPPPINSSPLPLPLSLPLPLSLPLPLPLPLPLPLPLPPNKENIEINMEDIIIPENKIKNKNNNNNIDINNNNNNNNEKQTSIIEMEDLDKLKQPKINEGSTGKKGKSHFFSFLQRGDKTNSSILKSSEQPTHKKTKTNINTPPDYPIHYFGHHKRFSSSSDEGSDNSKSQHSSVNTPTLSRHNIDSLPESQQSQKQSQQQSQQPQQQNKTKQIQQTILNNNNDNLNEVTPIKKSSLPTLEVSPIQSNIINNQTTEKHNSGGFTALTSASAMNHQNQRRYREHHQINHQQQQQQHHRHYHHHINSGGSSGSSDKFDYVSATGLSTKNGFNPKSLDVDHFPISDKRNNINIQAPSTPVQSRNYPLFTTQSPKNANSASKSKNKLKNLKRKIASSITGNNPSGISSSAFNHSFSSWNNNNSVYTGGNSGGGSGGGGSGGGGGGGGGGGGIGTPSSFLDDNNNLNNGENFKNSNSYNNNNGSNRSISHDEWLRQFYHKHLERYEKTKAVDYLIIKPWNFISWILRPSRIANYQSKILYRRAYILNFLNLVLFVVYLLSTILSSNEWFIFAPGILLSVIYFFLGKINNKMYLIAFLTISTAVAINITSIIYDLTHTRPTDKLIFSWDLLVMIMVPLLFPSIVYSIVILISVAVTYIGLGIYVQSSHNFYLLDAYDSFGELLRSIIIVFVILMFYTILSSVDLKEIERKESRIQSLFRISNEALVVHKDGLITDANPAFESMFQIKLQDLLYPIQSGIWEFLPALEGMFEPGASKLFDNPDMGVIETTGIDSSGRTFQVEVRTNKATYDGEPVDVISIIDITGRKQLMEADYALRKAEAANEAKVIFLTTVSHELRTPINGVLASADILERTTLDSTQKEFLNCIKLSGNYLLDLINDILDYSKIEAGKMEIIKYDFSILKMLDNSIRIVSKNIYEKGLDLFIFIDPNVPVIVNGDQRRIKQILLNFLSNSIKFTNHGQIIIRVKLVTDDSTHSLIKFDVEDSGIGIKTEHLNPLFASFSQIDSGNSRKYRGTGLGLSISKRLCKMMGGDVKVKSEFGVGSTFSFTIPCGIPNTTTRFSLQSLGSAIYMGEDIQGINKPIGKKKYGASGVVGIVIDSNKYTRKSISQYFAILKISCVDFENKKEFENYLSTLATVDQTTNPQVYLVITSIIDINQLTTNGLPRDRIYHWILMESPNEERKLPLEFENRFVKPAQFADIVRCLYKIDSINFFIEQMAGSPYKASKDLQSGGSSNESGDGGRSLSGGGGGVGSNGNGNGGGGLDSNISPSELSSSEHQLISTPLSDVNEFEDINLINQSLSGLGPSAKVLNSTYFNGLSQSSKIYNNNNRNGVGIGNHHHDHYYQHRHHHSLPPEEIDYDESPFLFLNKPIRKVYHSQPSTPVTNGIALMDSSSKCPSIPSSSSASASALSPNSRHSNELGNGKTTQSFVFSPTSRKFSLNDSFNPSISTIVLPQVSYSPSMQGGNFPINMESVYKKIESHNNNFKRSESKPSTPTFLSNQPSPATSNSPQLLQSPTTSTTGSINLSPHRSPNIRLPLEVRSGSLSSLKPLREDEELESISDDHTSHLKGSSHSINQQIPSTIQQQQQQQQQQQQQQQQQQQQQQQQQQQQQQQQQQQQQKPQQQQQKPTTTTTTTSTQLPQNIEKTTTTTTTSTTKPTATSSSSSSSKTTKTQQQQHHPTTTTTTKSEKIEKTAAATTSEKIEKILLVEDNFVNVKIFSKLLKDSGYIFDVAHNGVEAVECVKKGAYDLILMDCQMPEMDGFEATTAIRELEKSNLIESPPSKKHSHVVIVALTANSGYKDKQKCLSVGMNDFLQKPIKTSDILIQMIKNHLN

SEQ ID NO: 12904 - protein, 1171 aa, Oryza sativa; identical to SEQ ID NO: 364

SEQ ID NO: 12905 - protein, 1171 aa, Oryza sativa; identical to SEQ ID NO: 364

SEQ ID NO: 12906 - protein, 1171 aa, Oryza sativa; identical to SEQ ID NO: 364

SEQ ID NO: 12907 - protein, 1298 aa, Neurospora crassa
MTDGPTLAAIAALVKSLAVDPATTQTSGLRPSTHVRLPGPYTREKGDLERELSALVVRIEQLETAAIAASPPAMPDTPNAPTDALFSNGTLSPSSETPDARYPAPLPRNGFIDEALEGLREHVDDQSKLLDSQRQELAGVNAQLIEQKQLQEKALAIIEQERVATLERELWKHQKANEAFQKALREIGEIVTAVARGDLSKKVRMNSVEMDPEITTFKRTINTMMDQLQVFSSEVSRVAREVGTEGILGGQAQIEGVDGTWKELTDNVNVMAQNLTDQVREIASVTTAVAHGDLTKKIERPAKGEILQLQQTINTMVDQLRTFASEVTRVARDVGTEGILGGQADVEGVQGMWNELTVNVNAMANNLTTQVRDIIKVTTAVAKGDLTQKVQAECRGEIFELKKTINSMVDQLQQFAREVTKIAREVGTEGRLGGQATVHDVQGTWRDLTENVNGMAMNLTTQVREIAKVTTAVAKGDLTKKIGVEVQGEILDLKNTINTMVDRLGTFAFEVSKVAREVGTDGTLGGQAQVDNVEGKWKDLTENVNTMASNLTSQVRGISTVTQAIANGDMSRKIEVEAKGEILILKETINNMVDRLSIFCNEVQRVAKDVGVDGIMGGQADVAGLKGRWKEITTDVNTMANNLTAQVRAFGDITNAATDGDFTKLVEVEASGEMDELKKKINQMVYNLRDSIQRNTQAREAAELANKTKSEFLANMSHEIRTPMNGIIGMTQLTLDTDLTQYQREMLNIVNSLANSLLTIIDDILDLSKIEARRMVIEEIPYTLRGTVFNALKTLAVKANEKFLDLTYRVDHSVPDHVVGDSFRLRQIILNLVGNAIKFTEHGEVSLTIQKASSVQCSTEEYAIEFVVSDTGIGIPADKLDLIFDTFQQADGSMTRKFGGTGLGLSISKRLVNLMGGDVWVKSEYGKGSKFFFTCVVRLANDDISLIAKQLNPYKSHQVLFIDKGRTGHGPEIAKMLHGLGLVPIVVDSERNPALEKARAAGQAPYDVIIVDSIEDARRLRSVDDFKYLPIVLLAPVVHVSLKSCLDLGITSYMTTPCQLIDLGNGMVPALENRATPSLADNTKSFEILLAEDNTVNQRLAVKILEKYHHVVTVVGNGEEAVEAVKRKKFDVILMDVQMPIMGGFEATAKIREYERSLGSQRTPIIALTAHAMMGDREKCIQAQMDEYLSKPLQQNHLIQTILKCATLGGQLLEKNRERELTRAADAVTGGRRDNGMYSASQAAQHAALRPPLATRGLTAADSLVSGLESPSIVTADKEDPLSRARASLSEPNIHKAS

SEQ ID NO: 12908 - protein, 1298 aa, Neurospora crassa
MTDGPTLAAIAALVKSLAVDPATTQTSGLRPSTHVRLPGPYTREKGDLERELSALVVRIEQLETAAIAASPPAMPDTPNAPTDALFSNGTLSPSSETPDARYPAPLPRNGFIDEALEGLREHVDDQSKLLDSQRQELAGVNAQLIEQKQLQEKALAIIEQERVATLERELWKHQKANEAFQKALREIGEIVTAVARGDLSKKVRMNSVEMDPEITTFKRTINTMMDQLQVFSSEVSRVAREVGTEGILGGQAQIEGVDGTWKELTDNVNVMAQNLTDQVREIASVTTAVAHGDLTKKIERPAKGEILQLQQTINTMVDQLRTFASEVTRVARDVGTEGILGGQADVEGVQGMWNELTVNVNAMANNLTTQVRDIIKVTTAVAKGDLTQKVQAECRGEIFELKKTINSMVDQLQQFAREVTKIAREVGTEGRLGGQATVHDVQGTWRDLTENVNGMAMNLTTQVREIAKVTTAVAKGDLTKKIGVEVQGEILDLKNTINTMVDRLGTFAFEVSKVAREVGTDGTLGGQAQVDNVEGKWKDLTENVNTMASNLTSQVRGISTVTQAIANGDMSRKIEVEAKGEILILKETINNMVDRLSIFCNEVQRVAKDVGVDGIMGGQADVAGLKGRWKEITTDVNTMANNLTAQVRAFGDITNAATDGDFTKLVEVEASGEMDELKKKINQMVYNLRDSIQRNTQAREAAELANKTKSEFLANMSHEIRTPMNGIIGMTQLTLDTDLTQYQREMLNIVNSLANSLLTIIDDILDLSKIEARRMVIEEIPYTLRGTVFNALKTLAVKETEKFLDLTYRVDHSVPDHVVGDSFRLRQIILNLVGNAIKFTEHGEVSLTIQKASSVQCSTEEYAIEFVVSDTGIGIPADKLDLIFDTFQQADGSMTRKFGGTGLGLSISKRLVNLMGGDVWVKSEYGKGSKFFFTCVVRLANDDISLIAKQLNPYKSHQVLFIDKGRTGHGPEIAKMLHGLGLVPIVVDSERNPALEKARAAGQAPYDVIIVDSIEDARRLRSVDDFKYLPIVLLAPVVHVSLKSCLDLGITSYMTTPCQLIDLGNGMVPALENRATPSLADNTKSFEILLAEDNTVNQRLAVKILEKYHHVVTVVGNGEEAVEAVKRKKFDVILMDVQMPIMGGFEATAKIREYERSLGSQRTPIIALTAHAMMGDREKCIQAQMDEYLSKPLQQNHLIQTILKCATLGGQLLEKNRERELTRAADAVTGGRRDNGMYSASQAAQHAALRPPLATRGLTAADSLVSGLESPSIVTADKEDPLSRARASLSEPNIHKAS

SEQ ID NO: 12909 - protein, 1281 aa, Neurospora crassa
MTDGPTLAAIAALVKSLAVDPATTQTSGLRPSTHVRLPGPYTREKGDLERELSALVVRIEQLETAAIAASPPAMPDTPNAPTDALFSNGTLSPSSETPDARYPAPLPRNGFIDEALEGLREHVDDQSKLLDSQRQELAGVNAQLIEQKQLQEKALAIIEQERVATLERELWKHQKANEAFQKALREIGEIVTAVARGDLSKKVRMNSVEMDPEITTFKRTINTMMDQLQVFSSEVSRVAREVGTEGILGGQAQIEGVDGTWKELTDNVNVMAQNLTDQVREIASVTTAVAHGDLTKKIERPAKGEILQLQQTINTMVDQLRTFASEVTRVARDVGTEGILGGQADVEGVQGMWNELTVNVNAMANNLTTQVRDIIKVTTAVAKGDLTQKVQAECRGEIFELKKTINSMVDQLQQFAREVTKIAREVGTEGRLGGQATVHDVQGTWRDLTENVNGMAMNLTTQVREIAKVTTAVAKGDLTKKIGVEVQGEILDLKNTINTMVDRLGTFAFEVSKVAREVGTDGTLGGQAQVDNVEGKWKDLTENVNTMASNLTSQVRGISTVTQAIANGDMSRKIEVEAKGEILILKETINNMVDRLSIFCNEVQRVAKDVGVDGIMGGQADVAGLKGRWKEITTDVNTMANNLTAQVRAFGDITNAATDGDFTKLVEVEASGEMDELKKKINQMVYNLRDSIQRNTQAREAAELANKTKSEFLANMSHEIRTPMNGIIGMTQLTLDTDLTQYQREMLNIVNSLANSLLTIIDDILDLSKIEARRMVIEEIPYTLRGTVFNALKTLAVKETEKFLDLTYRVDHSVPDHVVGDSFRLRQIILNLVGNAIKFTEHGEVSLTIQKASSVQCSTEEYAIEFVVSDTGIGIPADKLDLIFDTFQQADGSMTRKFGGTGLGLSISKRLVNLMGGDVWVKSEYGKGSKFFFTCVVRLANDDISLIAKQLNPYKSHQVLFIDKGRTGHGPEIAKMLHGLGLVPIVVDSERNPALEKARAAGQAPYDVIIVDSIEDARRLRSVDDFKYLPIVLLAPVVHVSLKSCLDLGITSYMTTPCQLIDLGNGMVPALENRATPSLADNTKSFEILLAEDNTVNQRLAVKILEKYHHVVTVVGNGEEAVEAVKRKKFDVILMDVQMPIMGGFEATAKIREYERSLGSQRTPIIALTAHAMMGDREKCIQAQMDEYLSKPLQQNHLIQTILKCATLGGQLLEKNRERELTRAADAVTGGRRDNGMYSASQAAQHAALRPPLATRGLTAADSLVSGLESPSIVTADKEDP

SEQ ID NO: 12910 - protein, 1559 aa, Nostoc punctiforme
MKAPLPDNEIQRIESLLEYKILDTHSEAAFDDLTHLASYICGTPIALISLIDSDRQWFKSKVGMEALETPRDLAFCAHAILQPEVFVVPDATQDERFATNPLVTSDPDIRFYAGVPLTNPEGYALGTLCVIDRVPRNLSPEQVEALRIIGRQVIKQLEMRRNLASLVLVTHTRKQAHKRRKQFFKTVAGGFGLASAILVLIGVISYQNTRILIDASNQVQKTQGKINKLEELLSEMKDAETGQRGYILTGQESYLEPYQAVVVNIDQKIVELKDLIADQPSQQNQFAALESLIAAKFAILKQTIYLRQNQGFEAALQVIQTNHGKYIMDDIRKVIHEIENEDKRLLQQQSQAAKASANNTVLTLAIAICLGFITLAIVYYFIYREVKERKLTEETLNQERNFISAVLDTASALVIVLDTQGQIVRFNQACEQTTGYSFDEVRGRHFWNLFLIPEQVEPVKAVFEQLRTGEAPKEYENYWVAKDGSLRLISWANAILQDHEGCVEYIVATGIDISDAYDELRLRKRAEQHLKAQYSTTRVLAESTTISEAMPQILQGICESLEWDLSEIWMVNQRVNLLSLLNSWYKMSSEMQEFEILSQQIIFAPGIGLPGRVWVSSEPVWIVDVVKDKDFIRSQMAVQAELHGAFGFPIHSGKKILGVITCFSHEIQQPDPDLAKVMNSIGEQVGQFIERKQAEEELQRQNLRSQLFTEITLKIRQSLKIQEILQVSVTEVQKILHSDRVLIYQPLTDGSGSTVVEAVVSGWLTIKEKKLTDSYFQAEYTQQYYLQQYRQKRNLELADLDIVEIQKRHIELLQQFGVKSNLVIPILVKEELCGLLIVHQCGSSRQWSSFETHLLRQIADQVGIALAQAQMLYAETQQRRELEVARHQAELASKTKSAFLANMSHEIRTPMNAVLGMTGLMLETPLNSEQQDFIETIRISGDALLSLINEILDLSKLEAGEMALETLDFDLSTCLEEVLELLAPSAHNKGLEIAALIYPNVPTQLQGDAGRLRQILMNLISNAIKFTSNGEVVVRAELRSLSSTTATIYFAITDTGLGITFEDQCRLFTPFTQVDASNTRKYGGTGLGLAICKQLVSLMGGEIGVESRLGKGSKFWFEVTFAQQLYPISSESERELLINRRLLVVDDNATNRKIIHHQATRWGMLVDQAASATIALKAIEETAKQKNLYDIAVIDMHMPEVDGMTLGEQIKANSAIAGLPLIMLTSTNQRDEIQRALKIGFAAYLVKPVKPSRLLDTIMTILGTQIKEETEVRSQEFKLKDYENNSNDHSSSSRLLARDFHKLRILLAEDNLVNQKVALKQLQSLGYSADVAGNGKEVLQLLEKIPYDLILMDCQMPVLDGLETTKEIHRWQESSFVSSRRPVVIAMTANAMKEDQQMCLDAGMDDYLSKPVIKEKLAAALQRWGSVIFQAKEIYVLEQKKGSKTDVGSVDLPIDWERLHQLSENNPEFELELLEIFVEDMQPRLEIIKIAIADNDYEQLALQTHQIKGASANVGATTMHLAAQKLEQLAHNQERRGTTHLISELEDFVKCIQEFLITR

SEQ ID NO: 12911 - protein, 927 aa, Vibrio cholerae
MTQRYGLRARVMTLTLAPTLIIGLLLSALFSFNRYHDLETQVINSGASIIEPLAIASEDALRMQSRESVRRIISYAHRKNSKLVRSIAVFDANHELFVTSNFHPNFEKLMYPKDKPIPFLSSSVIDENTLILRTPIISERTVLDNGDANPATPVMGYIAIELDLSSLRLQQYQEIFSAGLVLVIGILLSGVFASRLMYDVTRPITHMKNMVDRIRRGHLDVRIEGKMHGELDTLKKGINAMAVSLSEYHVEMQHSIDQATSDLRETLEQLEIQNVELDIAKKRAQEAARVKSEFLANMSHELRTPLNGVIGFTRQMLKTQLTNSQADYLQTIEKSANNLLTIINDILDFSKLEAGKLALENIPFEFQEVLEEVVNLQATSAHEKGLEITLKIDPKIPRGVVGDPLRIQQVLTNLVGNSIKFTERGNIDVSVEMRALRDDVIDLQFMVRDTGIGISERQQAQLFQAFSQADASISRRYGGTGLGLVITQKLVSHMGGEISLTSRLHQGSTFWFTLRLHTTELPLNDGYNADSLNHRHLLLIEPNMQAAAIVQQTLVQSGLEVTYRSAIPEEQHVYDYVLLNLAPSKETNPTLVELWVQRALAMTHNVIVGVPSTELALADQLMQRYPVKCISKPLSRKKLLQTLAAQQPQLANTSLPKPQADKLPLCVMAVDDNPANLKLITALLQERVEYVVSCTSGQEAIEQAQSRQFDIILMDIQMPHMDGVTACKAIKQLKGYRDTPVIAVTAHAMAGERDRLLKAGMDDYLTKPIEEHILQQVLVHWSPHTRSKQVAKVTPPDGAAVISNALPSSPPAEEAIIDWPVALRQSANKEDLAKEMLGMLVDYLREVETVVNTALEDEEYPASDLLHHIHKLHGSCSYSGVPRLRKICASLEQALRNGASIDELEPELFELQDEMAKVLEASRDYLN

SEQ ID NO: 12912 - protein, 918 aa, Salmonella typhimurium LT2
MTNYSLRARMMILILAPTVLIGLLLSIFFVVHRYNDLQRQLEDAGASIIEPLAVSSEYGMNLQNRESIGQLISVLHRRHSDIVRAISVYDDHNRLFVTSNFHLDPSQMQLPAGAPFPRRLSVDRHGDIMILRTPIISESYSPDESAIADAKNTKNMLGYVALELDLKSVRLQQYKEIFISSVMMLFCIGIALIFGWRLMRDVTGPIRNMVNTVDRIRRGQLDSRVEGFMLGELDMLKNGINSMAMSLAAYHEEMQHNIDQATSDLRETLEQMEIQNVELDLAKKRAQEAARIKSEFLANMSHELRTPLNGVIGFTRLTLKTELNPTQRDHLNTIERSANNLLAIINDVLDFSKLEAGKLILESIPFPLRNTLDEVVTLLAHSSHDKGLELTLNIKNDVPDNVIGDPLRLQQVITNLVGNAIKFTESGNIDILVEKRALSNTKVQIEVQIRDTGIGIPERDQSRLFQAFRQADASISRRHGGTGLGLVITQKLVNEMGGDISFHSQPNRGSTFWFHINLDLNPNVIIDGPSTACLAGKRLAYVEPNATAAQCTLDLLSDTPVEVVYSPTFSALPLAHYDIMILSVPVTFREPLTMQHERLAKAASMTDFLLLALPCHAQINAEKLKQGGAAACLLKPLTSTRLLPALTEYCQLNHHPEPLLMDTSKITMTVMAVDDNPANLKLIGALLEDKVQHVELCDSGHQAVDRAKQMQFDLILMDIQMPDMDGIRACELIHQLPHQQQTPVIAVTAHAMAGQKEKLLSAGMNDYLAKPIEEEKLHNLLLRYKPGANVAARLMAPEPAEFIFNPNATLDWQLALRQAAGKPDLARDMLQMLIDFLPEVRNKIEEQLVGENPNGLVDLVHKLHGSCGYSGVPRMKNLCQLIEQQLRSGVHEEELEPEFLELLDEMDNVAREAKKILG

SEQ ID NO: 12913 - protein, 1136 aa, Picea abies
MSTTRPRAATHSASSGSVSRSSKHSARVITQTPVDAKLQAEFEGSVHSFDYTKSIDISGDSSSVPSETVKAYLQRLQKEMLIQPFGCVLAVEEGSCAVVGYSENAPEMLDVVGGAHAVPSIGGQQQEGGGGGGGLLRIGMDARTLFKPASAAALQKAATFADMHLVNPIFVRCNRSGKPFYAILNRIDAGLVIDFEPVMPSDVPVSAAGALQSYKLAAKAISRLQSLPGGDIRLLCDTVVQEVRELTGYDRVMAYRFHEDEHGEVVAEMRRPDLEPYLGLHYPATDIPQASRFLFMKNRVRMICDCCAPPVNVIQDKRLRQPLSLCGSTLRAPHGCHAQYMANMGSIASLVMSVTTNENGDDSEGGGQQQPQNRRKLWGLVVCHHTSPRVIPFPLRYACEFLMQVFGIQLNKEVELAAQLREKHILRVQPVLCDMLLRDAPVGIVSQTPNIMDLVKCDGAALLYGKRLWLLGTTPTEAQILDIADWLLEHHRDSTGLSTDSLAEAGYPGAASLGDAVCGIAAARITSKDFLFWFRSHTAKEIIWGGAKHDPNDKDDGRRMHPRSSFKAFLEVVKRRSLPWEDVEMDAIHSLQLILRDSFHDIDDSDSKTMIHARLNDLRLQGIDELSAVTNEMVRLIETATVPILAIDSNGLVNGWNTKAAELTGLLADEVIGRPLIDLVQHDSVEIVKKMLYLALQGEEEQNVEIKLKTFGIQEEKGPVVLIVNACSSRDLEENVVGVCFVAQDVTWQRIAMDKFTHLQGDYRAIVQNPNPLIPPIFGADEYGYCSEWNPAMEKLTGWKREEVIGKMLVGEVFGIHRMSCQLKGQDGLTKLRIVLNNAMAGKETEKFPFSFFDRHGKNTEALLSANKRTDAEGIITGVFCFLHVTSTELQQALQVQRMAEQAAMDRLKELAYIRQEIRNPLYGIIFTRKLMESTDLSEEQKQIVQTSALCQRQLVKVLDDADLESIEDGYLELDTIEFTLGTVLDAVVSQGMILSREKGLQLIRDSPEEIKTMCLYGDQLRLQQILSNFLINALRFSTSEGWVGNKVVPTKRHLGSGVNVMHMEFRITHSGQGIPEELIKEMFVHNQDMFQEGLGLYMCQQLVKIMNGDVQYLREAGRSSFIINVEFPLAQTDKQ

SEQ ID NO: 12914 - protein, 314 aa, Picea abies
YLGLHYPATDIPQASRFLFMKNRVRMICDCCAPPVNVIQDKRLRQPLSLCGSTLRAPHGCHAQYMANMGSIASLVMSVTTNENGDDSEGGGQQQPQNRRKLWGLVVCHHTSPRVIPFPLRYACEFLMQVFGIQLNKEVELAAQLREKHILRVQPVLCDMLLRDAPVGIVSQTPNIMDLVKCDGAALLYGKRLWLLGTTPTEAQKLDIADWLLEHHRDSTGLSTDSLAEAGYPGAASPGDAVCGIAAARITSKDFLFWFRSHTAKEIIWGGAKHDPNDKDDGRRMHPRSSFKAFLEVVKRRSLPWEDVEMDAIHS

SEQ ID NO: 12915 - protein, 1111 aa, Arabidopsis thaliana
MSSNTSRSCSTRSRQNSRVSSQVLVDAKLHGNFEESERLFDYSASINLNMPSSSCEIPSSAVSTYLQKIQRGMLIQPFGCLIVVDEKNLKVIAFSENTQEMLGLIPHTVPSMEQREALTIGTDVKSLFLSPGCSALEKAVDFGEISILNPITLHCRSSSKPFYAILHRIEEGLVIDLEPVSPDEVPVTAAGALRSYKLAAKSISRLQALPSGNMLLLCDALVKEVSELTGYDRVMVYKFHEDGHGEVIAECCREDMEPYLGLHYSATDIPQASRFLFMRNKVRMICDCSAVPVKVVQDKSLSQPISLSGSTLRAPHGCHAQYMSNMGSVASLVMSVTINGSDSDEMNRDLQTGRHLWGLVVCHHASPRFVPFPLRYACEFLTQVFGVQINKEAESAVLLKEKRILQTQSVLCDMLFRNAPIGIVTQSPNIMDLVKCDGAALYYRDNLWSLGVTPTETQIRDLIDWVLKSHGGNTGFTTESLMESGYPDASVLGESICGMAAVYISEKDFLFWFRSSTAKQIKWGGARHDPNDRDGKRMHPRSSFKAFMEIVRWKSVPWDDMEMDAINSLQLIIKGSLQEEHSKTVVDVPLVDNRVQKVDELCVIVNEMVRLIDTAAVPIFAVDASGVINGWNSKAAEVTGLAVEQAIGKPVSDLVEDDSVETVKNMLALALEGSEERGAEIRIRAFGPKRKSSPVELVVNTCCSRDMTNNVLGVCFIGQDVTGQKTLTENYSRVKGDYARIMWSPSTLIPPIFITNENGVCSEWNNAMQKLSGIKREEVVNKILLGEVFTTDDYGCCLKDHDTLTKLRIGFNAVISGQKNIEKLLFGFYHRDGSFIEALLSANKRTDIEGKVTGVLCFLQVPSPELQYALQVQQISEHAIACALNKLAYLRHEVKDPEKAISFLQDLLHSSGLSEDQKRLLRTSVLCREQLAKVISDSDIEGIEEGYVELDCSEFGLQESLEAVVKQVMELSIERKVQISCDYPQEVSSMRLYGDNLRLQQILSETLLSSIRFTPALRGLCVSFKVIARIEAIGKRMKRVELEFRIIHPAPGLPEDLVREMFQPLRKGTSREGLGLHITQKLVKLMERGTLRYLRESEMSAFVILTEFPLI

SEQ ID NO: 12916 - protein, 1111 aa, Arabidopsis thaliana
MSSNTSRSYSTRSRQNSRVSSQVLVDAKLHGNFEESERLFDYSASINLNMPSSSCEIPSSAVSTYLQKIQRGMLIQPFGCLIVVDEKNLKVIAFSENTQEMLGLIPHTVPSMEQREALTIGTDVKSLFLSPGCSALQKAVDFGEISILNPITLHCRSSSKPFYAILHRIEEGLVIDLEPVSPDEVPVTAAGALRSYKLAAKSISRLQALPSGNMLLLCDALVKEVSELTSYDRVMVYKFHEDGHGEVIAECCREDMEPYLGLHYSATDIPQASRFLFMRNKVRMICDCSAVPVKVVQDKSLSQPISLSGSTLRAPHGCHAQYMSNMGSVASLVMSVTINGSDSDEMNRDLQTGRHLWGLVVCHHASPRFVPFPLRYACEFLTQVFGVQINKEAESAVLLKEKRILQTQSVLCDMLFRNAPIGIVTQSPNIMDLVKCDGAALYYRDKLWSLGVTPTETQIRDLIDWVLKSHGGNTGFTTESLMESGYPDASVLGESICGMAAVYITEKDFLFWFRSSTAKQIKWGGARHDPNDRDGKRMHPRSSFKAFMEIVRWKSVPWDDMEMDAINSLQLIIKGSLQEEHSKTVVDVPLVDNRVQKVDELCVIVNEMVRLIDTAAVPIFAVDASGVINGWNSKAAEVTGLAVEQAIGKPVSDLVEDDSVETVKNMLALALEGSEERGAEIRIRAFGPKRKSSPVELVVNTCCSRDMTNNVLGVCFIGQDVTGQKKLTENYSRVQGDYARIMWSPSTLIPPIFMTNENGVCSEWNNAMQKLSGIKREEVVNKILLGEVFTTDDYGCCLKDHDTLTKLRIGFNAVISGQKNIKKLLFGFYHRDGSFIEALLSANKRTDIEGKVTGVLCFLQVPSPELQYALQVQQISEHAIACALNKLAYLRHEVKDPEKAISFLQDLLHSSGLSEDQKRLLRTSVLCREQLAKVISDSDIEGIEEGYVELDCSEFGLQESLEAVVKQVMELSIERKVQISCDYPQEVSSMRLYGDNLRLQQILSETLLSSIRFTPAWKGLCVSFKVIARIEAIGKRMKRVELEFRIIHPAPGLPEDLVREMFQPLRKGTSREGLGLHITQKLVKLMERGTLRYLRESEMSAFVILTEFPLI

SEQ ID NO: 12917 - protein, 1118 aa, Lycopersicon esculentum
MSSSSTTNKTNCSRGSSARSRRSARVIAQTPVDAKLHVEFEESEQQFDYSSSVNLSNSTSNVPSSTVSDYLQKMQRGSLIQPFGCMIAIDAQNFAVIAYSENAPEMLDLTPHAVPSIEQQEALTFGTDVRKLFRSSGASALEKAVSFGELSLLNPILVHCKNSGKPFYAILHRIEVGLVIDLEPVDPHEVPVTTAGAIKSYKLAAKAIRKLQSLPSGDISLLCDVLVREVSHLTGYDRVMVYKFHEDEHGEVVAECRTPELEPYLGLHYPATDIPQASRFLFMKNKVRMICDCLAPPIRVIQDPRLAQSLSLGGSTLRAPHGCHAQYMTNMGTVASMAMSVMINEQDDELDSDQQVGRKLWGLVVCHHTCPRFLSFPLRYASEFLLQVFSVQVNKEVEMAAQLKEKQILQIQTVLCDMLLRDAPMGIVTQSPNVMDLVKCDGAALYYRNKLWLHGVTPAESQIRDIAEWLNESHGDSTGLNTDSLMEAGFPGASVLGDAVCGMAAVKITSKDFLFWFRSHTAKEIKWGGAKHLPGDKDDGRKMHPRSSFKAFLEVVKRRSLPWEDVEMDAIHSLQLILRGSLQDEAADCSKMIVNVPAVDTIIDRVDTLHINDMVRLVETASMPVLAVDTSGRINGWNSKVSELTGLPVENVIGVPLVDLVIGGTTNTIKRVLSLALQGKEEKNVEIKLRTLGPQEKVGSISIVVNACCSRDFKQNIVGVCFTGKDVTGLKLIKDKYSRVQGDYVGIIHSPSPLIPPIFVMDEQGRCVEWNDAMHKLTGSKREEVIDQMLLGEVFTVNSFGCRVKDQDTLTQLTILLNRVIAGGEGEKLFFGLFNKQDKYIEALISANKKVDDDGRVTGVLCFLHVPSPELQYAMHVQKLSEQAAKNSLKKLAYVRLELKNPLNGINCIQNLLKSSDLSKDQRQLLKTSTMCQKQLAKIIDDTDIESIEECYTEMNSCEFNLGEVVTVVINQVMILSQERKVQVTWDSPVEVSQLYLIGDNLRLQQVLSDFLTTAILFTPFEDSSVHFRVIPRKERIGTKMYIMHLEFRITHPSPGIPDDLIQHMFHYSRSISREGFGLYISQKLVKIMDGTVQYLREADRSSFIILVEFPLMEKKNN

SEQ ID NO: 12918 - protein, 1135 aa, Sorghum bicolor; identical to SEQ ID NO: 367

SEQ ID NO: 12919 - protein, 1135 aa, Zea mays
MSLPSNNRRTCSRSSSARSKHSARVVAQTPVDAQLHAEFEGSQRHFDYSSSVGAANRPSASTSTVSTYLQNMQRGRYIQPFGCLLAVHPDTFALLAYSENAPEMLDLTPHAVPTIDQRDALGIGVDVRTLFRSQSSIALHKAAAFGEVNLLNPILVHARTSGKPFYAILHRIDVGLVIDLEPVNPADVPVTAAGALKSYKLAAKAISRLQSLPSGNLSLLCDVLVREVSELTGYDRVMAYKFYEDEHGEVISECRRSDLEPYLGLHYPATDIPQASRFLFMKNKVRMICDCCATPVKVIQDDSLAQPLSLCGSTLRASHGCHAQYMANMGSVASLAMSVTINEDEEEDGDTGSDQQPKGRKLWGLVVCHHTSPRFVPFPLRYACEFLLQVFGIQLNKEVELAAQAKERHILRTQTLLCDMLLRDAPVGIFTRSPNVMDLVKCDGAALYYQNQLLVLGSTPSESEIKSIATWLQDNHDGSTGLSTDSLVEAGYPGAVALREVVCGMAAIKISSKDFIFWFRSHTTKEIKWGGAKHEPVDADDDGRRMHPRSSFKAFLEVVKWRSVPWEDVEMDAIHSLQLILRGSLPDEDANRNNVRSIVKAPSDDMKKIQGLLELRTVTNEMVRLIETATAPVLAVDIAGNINGWNNKAAELTGLPVMEAIGRPLIDLVVTDSIEVVKQILDSALQGIEEQNMEIKLKTFHEHECNGPVILKVNSCCSRDLSEKVIGVCFVAQDLTRQKMIMDKYTRIQGDYVAIVKNPTELIPPIFMINDLGSCLEWNKAMQKITGIKREDAINKLLIGEVFTLHDYGCRVKDHATLTKLSILMNAVISGQDPEKLFFGFFDTDGKYIESLLTVNKRTDAEGKITGALCFLHVASPELQHALQVQKMSEQAATNSFKELTYIRQELRNPLNGMQFTCNLLKPSELTEEQRQLLSSNVLCQDQLKKILHDTDLESIEQCYMEMNTVEFNLEQALNTVLMQGIPLGKEKQISIERNWPVEVSCMYLYGDNLRLQQILADYLACALQFTQTAEGPIVLQVMSKKENIGSGMQIAHLEFRIVHPAPGVPEALIQEMFQHNPGVSREGLGLYISQKLVKTMSGTVQYLREADTSSFIILMEFPVAQLSSKRSKPSTSKF

SEQ ID NO: 12920 - protein, 1014 aa, Synechocystis sp. PCC 6803
MSPSQPHPPIATFEPESFLILVVDDVKENIYVISELLEGEGYSTTFVTSGPEALQRVTQAQPDLILLDLMMPGMDGLEVCDRLKQDPQTRDIPVIFLTASNEKQDLLQAFAKGAVDYVTKPFSPPELLARVKTHLELKQTRDNLHHTLLEQARTAEALACTSTRLGILVQNMQAGVLMTDAQGTIVVVNPEFARLFNLGFPADLLLGKNLTAIAPRINGLISHGQGVTHNFLAIESPEPLLKVELALEDGRFFERDYVPIMLGDSSQGHFWLYRDISQRKQVEMIQGQSLEMERRMRQQLAEQNQELVAATTAAEAANRSKSEFLATMSHEIRTPMNAIIGMTGLLLDTDLTTQQKYFAQTIRNSGETLLTLINDILDFSKIEAGKLDLEVYPFDLGQCLEEALDVVVPSARQKSLTLIRRFLTPIPPNLQGDVTRLRQILVNLLSNAVKFTEAGQVKVTVEVVDHDAAKGEYQICFAVQDTGIGIAPNQQQALFQAFSQGNSSITRRFGGTGLGLAICVRLTALMGGTIWAESNGCVVGNPPELWQIGQPTIEGSTFYFTVNLTVLPSCAYSVHNLRHSLFIGRSVLVADYDEGRGTRMRNLLASWRLQAEQITFSSPAKLGEDLKSRLTQKNYGALILHCPYPEGRGKQFTDFDLGKITTWAPTEQDIPVLVATDIYLSPGERYSGDKPPVQAWIKSPINPDELENTLVDVLGQTEPPTLVSTEAISGPLFPYSSSNLTILLAEDNLINQQVAKLLLKKLGYPVDVVNNGQEALSALAKGDYDVVLMDVEMPEMDGLTATEHIRRSQGRSERPWIIAVTAYSMEGDRERCLASGMNDYVSKPIRLEALQQALQVAATALQSTSQDRMATVSCVSAFEAKPSPSSPCPEDPAGTTLPPIDQDIICSLRDLDRENGQLILREIIDIYCQTAPELLQRIKLAIANQDWGNLSSAAHTLGSSSANLGAVLLAQQAKTLENLTRQRDSRAMDPGHFPTLAASYERVQGELKTMLDRL

SEQ ID NO: 12921 - protein, 939 aa, Marinomonas mediterranea
MLALNSVSLRSKLFFAIYTPCLILSIIASFAFTLSRFDTIDRNFKEGVEKSVSQMTVSAEHALSHSDEGMLNDTLRTLLKHDHINTVQLYNAEEKLITELGKTSEGNTLPFTNANESDENPHFFATIAPIKHPVTRLEHQSNTNFITSSYSVPQVSGWLKVEASKEASIVSKYRYLSATLGTFFIFNLLAIFALLNVTASLLRPIEKISDTVNKITQGHFGATKGLNLPTQYSTVVSDLNDISSRLENHRAEILSNVDQATEDIRRNMDSLEEKSAQLHIANKEATESNRLKSQFLANISHEIRTPLNAIMGYIQILQKDQLDKQQRLYMDTIAQSTTNLLTIISDILDFSKIEAGKLSLDLTDINIRDIVDEVYQILSSANLVNASKELDLIPEFDLDVPTWVIGDPVRIRQVLTNLIGNAIKFTHEGSVRTTVKILEKSNSSLKLSFQIIDTGVGIPENKLDNLFKPFSQVDTSTTRKFGGTGLGLVITKKLVKQMGGNVEVSSEHGIGSNFRFTIVLKPSQKEQKVEDPISKSLLVFEPSLNYRNYLKTYLNHVGANCTFTSSLEQTVTLLNSQTSLDAVLLNIDSHTEKLEEIQELVAYITQQFRLPCILLTKRPHDISKSSILHTLCSEILMTPISHNRLNKSLRSLEEPKLLSEDRLYADETTTTELTTELELEAVEPPEETSPLSGIQILAVDDTQINLQLLGHWLEPHGLQVDLAYSGKQAIEMAKETQYDLILMDIQMPEMDGMEATQRLRKLTNYVHTPIVALTAHALGSEQKQIVSSGMNAYLTKPVNEDILLETITQWCQSKKSYQDLADEKVVALFDIDKALSIANGKSVIAKDMFDMLLNTLEADKKLILHHFEEKDLAKLIHVVHRLHGGSKYTGAIELSKHAGFLETHLKELQFDDVEGVLEDFTDSIDALIDIAPLIKWPQE

SEQ ID NO: 12922 - protein, 1788 aa, Magnetococcus sp. MC-1
MSHRWMIWASLWLWLALLGTATAAEGVMLNEAERAWLAEHPVVRVGMDPAFAPYSFIEDGRYQGIVPEMLQALAAETGLVFETVAGLSWSEILAGAKARHLDLVASLVQTPERDRFLQYTQIYLPTPLVVMARNDDSSMSSAADLVGKRVALVRDYATSAKLLQEHPESIPYMVESVAQGLLAVSVGQADAFVGAIGVSDYTARQKGLSNLKVVAPYGGLQYGQRFGVRKDWPLLVSILEKGLASMTEKQKIALFDRWLPVQNQLHPAPVAKIPVKLQLAPHEQAWLSNHPKIRIGVMRGWPPIDFADAQGRPQGIGTDTVHLLDEMLGGGVLEIVSDTWPTLYQQVIDKKLDGLMGITPTEARRPFFEFTAPYMTIPHAIFARSDAPYATGLKSLQGKTVVVEKHFFVADLLRHTFPSIKILERRDTREALYAVSKGDAYAYVGNRAVATYIIDQEIISNVQEMGIVRLSRSDNAIGVRKDWPILRDVLQKGLSQITMAQKREMAAKWVKGSVQAPLELPLTKGEQRWLSEHPQVRLGVRENWAPYDYQDRAGFQQGIAADYVALLDRYLTVTMKMQHIRDDSEWVRIKDTLDVLTTLTPQSAKSTGMLPTSSYLRLPLVMMMRRASPLVEGIEDLKGRTISVVQGVVDTYALAKRYPWVMWRNMATTEQALQALAQGEVTAHLDTIPAVRVATERLALDSLQVVTPTDLQLQLSFGVRPDWPELVSIINKVMQAVPPAEKRVIVQSWMRPRTQTAMDWIYLWKVVGTLLLLAAVVLGVVLVWNRRLSQEIEQRKRVEEELSKLYRAVEQTPVSVVITDLEGRVEYVNPTFCHNSGFAEDEVLGRTNGLIPSDHTSGAEYQALWQQITAGGEWSGEFLNRTKSGGLVWERVSISAVRSADGQITHYLGIKEDISQMKEDQERLAHAKESADLANRAKSSFLANMSHEIRTPINAIVGMCHLAQRMTVEPKLRDYLGHIQVAADTLLGIINDILDVSKIEAGKLHFEDIPFKLDELISRVMRLQGLKAQDKNVELVIDLEPQVPQTVVGDPLRISQILTNLVNNAVKFTEQGEVVLSVKLQGVFDGRVTLYFEVRDSGIGMEDAQLQRLFTPFQQGDDSMTRRYGGTGLGLSICQNLVKMMGGHLQVESRLSEGSRFYFTVSLPIHQAPALERVDQTSLNLRVLVVDDNQTVREVLQRMLKSFGYWVDLAAEGPTGVALVESALQQGQPYDLILMDWHMPQMDGLQASEQIRHLQGVRAQRTPVMIMAAAYGQEDSHTAVSEPGFAGFLEKPTTPANLFGAIMIGLHGAPQEAPSGDAGWGYTVPDLSGYRVLLVEDHPINQALAREMLSLAKLQVITADHGQHALDLLQEASVDLIFMDIQMPVMDGFSATQAIRADPRWQHIPIIAMTAHAMADDRQKCLDGGMNDHLGKPIDPPLLFAKITQWLGPQQRGRASHDAARSGRAPVLMGRRILMALGGGSLGDEIEQMLQQSGALVEQLATGREDLNRWQPEVVLVDRQGYESLSSSPLPRCYTVLVEHEGHATVERPVWADDWLLVPVEGLTLMATLQHALRDQCAGTTEGGADADAVVLPQEDRHFYLRWALAQGAGNRVLLRRLLQLFVEDHARDLELLGAMIARGAMAEVAALAHRLAGVAGGMGAMKLYALAKRMERHGEQARPLAISRLYPLLAEEMEAVLERLQTLGGAAVESPSQAQGALLDRGEMLEKLVELKRLIDGGQTDAVERAEELQGGVLEERFKKDLDQVKHLLQDYEFEAASKHLDAAILK

SEQ ID NO: 12923 - protein, 803 aa, Magnetococcus sp. MC-1
MGASRFVQAINPTGAIPRQPSMRATHPKPKILIVDDKPANLMALRRLLKNTHAELIEAESGNEALGLMLEHELALMLLDVDMPGMDGFEVSRMASGLDRTSNVPIILITAAYKDYSHRIKGYQAGAIDYIEKPIDDRILNAKVAIFLNLYNAHRESEQLRQDLTLNQERLELALEGANEGLWDWNILSNQVYYSPRWITMLGYATNEVNQDFSTWKTLIHPDDFESALACLERHFTTPEEPYRAEFRMRTKQGGWCWILARGKVVARTADGQPHRMVGAHQDISQRKQLEADLLAAKTEAEQANQAKSRFLANMSHEIRTPMNTILGMGEILLNAPNLTPKQHRYLSISQRAGDTLLGLINDILDLSKIEAGELHLEHTLFALHDELKSLITMLRPMARDKGLSMQCVIDPQLPTHVHGDPQRFRQIVLNLLSNALKFTDQGSITLHAKPIETGRLQFTVSDTGIGMPEQVITKIFRPFVQAEANTTRRFGGTGLGLSICRQLVTMMHGEIYANSQVGEGSQFIFEIELPAANSETVKQERLSPPTKQNIPMRLLLVDDMEDNRLLVKAFLEGTPHQIVEAEDGLDALEKSQQSQFDLILMDGMMPKMDGLEATRRIRARESEHNLTPVTIVALTANAMPQDVADSLAAGSDYHMAKPIRRAKLLQLLASIANERRLFSHEEVKQTTTLTSVETIAADILDALANDVGSGYRQSILRFYSTLPARVAQLTAHIGSEADSVLIEAQGLQQDASYFGAHKLAHLCTQIAQMARTKQPREMIASLCPLLQQALQTIERRLTNEGYF

SEQ ID NO: 12924 - protein, 1220 aa, Magnetococcus sp. MC-1
MAVVQRLKRDVKQLETMLGVYESPGIDEALTPLKRMLALNQAYVENFKSHRALLNNFLDYFPNAWSESLAQLRMQQGDAVLHPLLDEVMAAFITMAHGTPLRDRAGVHALLEQVMASALTLDTRQRRGIITMVRYAQAILHYEDDLKEILQGIEQTDLNAQLGVLEERYMQLYSQHQQKSSHYRLLLFMGTLLLAGLVVWSFLRQRRNGLSLEAAIKQLAFQKFAMDQHAIVSIADATGNITYVNEKFCLVSGYAESELLGNNHRVLSSGHHGATFFQEMWHTIEQGNVWHGELKNRAKEGGFFWVASTIVPFLDSQGKPYQYISIRTDITQRKRVEEQHEKQKIFLQGITDAMGEGLFAVDREGACIFINKQAERMLGWSAEEIHLKKMQGLIHASTRIADAYQWPALRSMDEAAPARSEDEHFINRSGQMFPVSMVAVPLEEGERIVGSVVVFQDISVRKQQEQVLQGAVRAADQANRAKSDFLANMSHEIRTPMNAILGMSHLAIRTSNDPRQRAYLQKIHGAAQSLLHIINDILDFAKVEAGKMEMEMVPFNLDEVLDTLATLTSVKADEKGLALIFRRHLDLPQRVVGDALRLNQILLNLTGNAVKFTEQGSVVVNVEKVQQQGDQIVLRFSVQDTGIGMDESQIQQLFVAFEQADSSITRRYGGRGLGLAICKQLVNLMAGELSVQSTPEVGSCFTFTVPFTVVQEQVVDAIVPQGIRGRVVLLADGSALARRVVAEMLKHMGCDVLEAEQVEQLLTALQAKIGPDMVLLDSSMVDAQGAHAYAAIRQADAGGACPVLVMHTHGDREQVLAWMAKDKQLGHVQKPLTPSRLLEGMVQLLVDEGRVTGLSGETDVIARYKPLLTGANILLVEDNGVNQEVAFELLSMVGVEVTVADNGSQALSFLEQASFDLVLMDIQMPVMDGYAATQAIRQNMSLTLPIIAMTATVMEADQARALAVGMNGHVSKPIEPHKLYEMLLRWLPSKGEPSRAVARLRLPGDETEPDVTLPEQLPGINIPLGVQRLVGNKSLYLTLLQRFYQDQKEIMVQIREGLARKDFNTCMMQAHTLKGVAVSLGALPLAACAGVLETACKQRDERATTQALIPLAQSLSEVMAGLQPLTVEAQTALPERPVGGDSRTAQLYSLLQALVEPLEMRQPKACQPIVAQLQESSLPGSYETPITMLLSHIQRYRMKEAEQLVQTLLQRLAGECTDES

SEQ ID NO: 12925 - protein, 1390 aa, Magnetococcus sp. MC-1
MSMSGKIITLVCVIAILAAGSVGYATMERLQKELTLHAQQQVRHTTQQVSHKLEQGIALLMADVRTLAADPALLDLAELARGVPHEHGDVHAHKQRMAQIFTNLLQQRADYQQIRLIGLDEDGRELIRIKRQPDNTLTQVAPADLQTQGQRSYFKRTIILPKNQVYLSEINLSRENQVIVSPHMPVIRASMPLFDHLGETFGLLVINLDLSRLLADLQHQTPGQSMHLFNHHGYLLASSPPQAELQNFGFEFNQPPLMLTLYPVLAQQLNHSAESAFTLVAQDAPSGTHELLGVQTLYHNPNRPDQRLVITVSMPYQKIFTTLYSSRDESLLIGGGMLLMALLLAVLLTRSLTHPLRAMIRAVEDTAHDQGRHALPVGVGGEMGILAKAFAQMLQRTAEQNAAQADHRANQLLEATDVGVFGIDDQGLVSFINPAAERMLGYSREALLGKNIHSMVHHAYADGTPYPEHACRMSAALREQREYHVTDEVLWKQDGSPFYVTYSSIPLWQGDQRSGAVITFWDTTEQRQDEQKLIAAQQEAELIAAEERALEALFKLTLQESATTHYLEEVLEALIHSVPWLKLKPVGGLFLTDESAPQPQLKLVVNHNLDPELKQRCAKVPFGTCLCGLAAQSGTLQFASCMDHRHVITFEGITAHGHYNVPIMDGAQVLGVMVLYLAHGHEQKERETAFLARAGHIISMGLMRRRAAKELSCAKQRAERANHAKSDFLATMSHEIRNPMNAIIALSHLALEQSHDQRQRDYLSKIHTAGQSLLRIINDILDFSKIEAGKLEIEQTDFQLDDVLSNLATLTAVKAQEKQIELIFDKAPALPHALRGDPLRLSQILLNVVGNAIKFTEQGEVEMSITRHTQRGELLELCFTVRDTGIGMNEAQIAELFRPYQQAESSTSRRFGGSGLGLSISHQLVTLMNGTIQVSSTPGVGSQFVITLPFAVLPDRPESLVIPKLLTGQVVVASANQRMCDVVAENLGRFGLTCASVGAMSTLHQWLENNPLPRFMVLDADMLPVSMAQDLELLLNPMLHRFVEGGVLMLHGYQTQQAVMDLAAKDARVGAVQKPVTSSSLYDGAVQLLGVGSLSDAQHAPVQSNASPTTWPQLTGRHMLVAEDNAINQQIIQELLSKVGVNVTLVNNGFEAVEKANPLHHDAILMDLHMPLMDGFEATTQIRQRFGNTLPIFAMTASSTPEDQKQVQQSGMNGHLTKPIDPVLLYTNLSQWLGEQPPKPPSVSSPQPAQPQPADSLQSVPGQPGQRSPAGPPNIPGINYTLGLQQLGGDAELYHQILLAFEQDQRETSAKLIQLLEAGDLAALEPLVHTLKGLLGSVGAERLRARVIALETSLKMAQPKENIAALIQTMQAELAPMLAAIAQLHIKAGR

SEQ ID NO: 12926 - protein, 917 aa, Pseudomonas putida KT2440
MLDRLGIRSRVLLLALLPAGLMALVLGSYFTWLQQNDLRTQLLQRGKMIAEQLAPLAAPAMARLAPAQLERIAAQTLEQADVRAVAFLAPDRTRLAHAGPSMLNLPPSGGTGTQLLQRSGNDATRYLMPVFGHHRDLATDAVPAEAERLLGWVEIELSHDGTLLRGYRNLFTSLLLILACLALSGLLALRMSRTINDPIERIKHAVNQLKDGHLEERLPTMGSHELDELAHGINRMAETLQNAHEELQHSIDQATEDVRQNLETIEIQNIELDMARKEALEASRIKSEFLANMSHEIRTPLNGILGFTHLLQKSEMTPRQLDYLNTIEKSADNLLGIINEILDFSKIEAGKLVLDSIPFNLRDLIQDTLTILAPAAHAKQLELLSLIYRDTPASLVGDPLRLKQILTNLVSNAIKFTREGTIVVRAMLEDEHEDCAQLRISVQDTGIGLSPQDVRTLFQAFSQADNSLARQPGGTGLGLVISKRLIEQMGGEIGVDSTPGEGSQFWISLNLPKAHDDAEALPPQPLLGRRAAIVDGHELARQALEHQLEDCGLSVSLFASYDQLLQGVQAASQAGLPFEFAVLGANLGNLSPEQLGHYHQQLERYHCQCVVLCPTTEQALYHPYLPNGHGQLLSKPTCTRKLRRLLLELVQPRRPLAEGSNPNGQRRPKILCVDDNAANLLLVKTLLEDLGAEVLAVNNGYAAVQAVQEELFDLVLMDVQMPGMDGRACTEQIRLWENTQSGNPLPIVALTAHAMANEKRALLHSGMDDYLTKPISERQLAQVVMKWTGLSLGTPQQAQAELLTNGDELKVLDPEEGLRLAAGKADLAADMLSMLLASLDTDREAIRAARAADDRNGLIEQVHRLNGASRYCGVPQLRAACQRSETLLKQDNPQAQQALDELDSAISRLAAQARLSA

SEQ ID NO: 12927 - protein, 228 aa, Magnetospirillum magnetotacticum
MIDRDCVPVPLVADRSAGNAPIDLTFAQNRTLSPIHLEYQRNLGVDGSMSISIMVENRLWGLMIGHHRRPHYVAPETRAAATVLTDGFAMRVQEIEGKALWSEQQRHLDIQGQLVRGLTRSDDFVNSLTQGNPTLLDLFGAVGAGIVSDDVVCLVGTTPSAEAVQALAGWLRESLGPNERTFVTDTLVMHHAPAAAYTEMASGLLAAFVGHSRQHLLMWFSRSASTGR

SEQ ID NO: 12928 - protein, 1447 aa, Methanosarcina acetivorans C2A
MITSKSVAADELESRLKGRIAELEKSNGELRARLLEYKHSEEAMSKSEEKLGYISPQGKEYRFNTRIVPEFVDGEVASVLAISHDITDIKEAKTRLKETRDNLEELVEDRTTQLEKAYRSLKESEKDLAEAQKIAHPGNRNWNIVTDELYWSDEIYRIFGCTPQEFGATYDTFLSYMHPEDQDYVNYVNNAVNGALNGKPYSTDHRIALAGGEEWIVHEQGEVIFGKGKLRTSGIDIIGDIPWGTHFCQFYQTKEDLMDVLVPYLKAGLENNEFCMWVTSQPLDMKDAKEALRRAVPDLDTYLGKGQIEIIPYTHWYVQEGSFDSERVLNGWIEKLNKALANGYDGLRLTGNTFWLEKKDWNDFVDYEEEVDRVIGNYRMIALCTYCLEKCNSTEIVDVVINHQFALIKREEKWEQIESSKRKRAEETALQAAKDWKYTFDAVPDLIAIIDTEYKVVRANRAMAAKLGVTPEECVGLTCYRAIHGTNEPPSFCPHRQLLKDGIEHTTEVCEDCLGGYFLVSTSPLHDSEGKLIGSVHVAHDISERKQAEEALIRSENEFRTLAENSPDLIARFDRQNRHLYINPVSVEIYDHPQEKVIGKTHSELGRDPEQIKFWEEHHEKVFAIGKPETMEFEYTSPQGKKYYFNTRIVPEFVDGEVTSVLAISRDIADIKEAEIRLKETLDNLEELVEDRTTQLEKAYRSLKESEKGLAEAQKIAHLGNWNWNIVTDELYWSDEIYRIFGCTPQEFVATYDTFLSYVHPDDSESVENAVKGALDGKPYSIDHRIILAGGEERIVHEQGEVIFGEGNVPFRMNGVVQDITERKKVEKALELANAYNRSLIEASLDPLVTIGPDGKITDVNKATELVTGHLRSELIGTDFSDYFTEPEKAKEGYKQVFREGLVRDYALEIQHRDGHITPVLYNASVYRDKDWEVIGIFAAARDVTEYKRAEKALKLANAYNRSLIEASIDPLVTIGPDGKITDVNNSTESITGYSRNELIGTDFLDYFTEPEKAREGYQHVFQNGLVRNYPLEILHKCGHLTPVLYNASVYRDETGKVIGVFAAARDITELKKAEEKIQTLANVVESSNDAIITESLDGIITSWNKGAEQVYGYLAEEVMGKNMSILESDNLKGEIKQLVDRVKQGKKVQNHETLRLKKDGTILNISVTLSPVFDVSGKLVAISNIAGDITEKKISENLLHEKQMAEIANRTKNDFLANMSHELRTPLNSIIGFSDMLYEQAYGELNRKQLRAIGNISSSGKHLLNLINGILDLSKIEANKMELNYREFDLATKLELIRNVLYPVADKKNIDIEIDMDTELTKICADEEKFTRIMYNLVDNAIKFSYENSLVKIGARKNGNLVEITVTDAGIGIKAEDQHKLFKPFSQVNSFPSKKFQGTGLGLSLVKQIVNLHGGYVWFRSEQGEGSTFAFAIPIASKMKVLACYH

SEQ ID NO: 12929 - protein, 929 aa, Shigella flexneri 2a str. 301
MALVLWLLIAFSSVFYIVNALHQRESEIRQEFNLSSDQAQRFIQRTSDVMKELKYIAENRLSAENGVLSPRGRETQADVPAFEPLFADSDCSAMSNTWRGSLESLAWFMRYWRDNFSAAYDLNRVFLIGSDNLCMANFGLRDMPVERDTALKALHERINKYRNAPQDDSGSNLYWISEGPRPCVGYFYALTPVYLANRLQALLGVEQTIRMENFFLPGTLPMGVTILDENGHTLISLTGPESKIKGDPRWMQERSWFGYTEGFRELVLKKNLPPSSLSIVYSVPVDKVLERIRMLILNAILLNVLAGAALFTLARMYERRIFIPAESDALRLEEHEQFNRKIVASAPVGICILRTADGVNILSNELAHTYLNMLTHEDRQRLTQIICGQQVNFVDVLTSNNTNLQISFVHSRYRNENVAICVLVDVSSRVKMEESLQEMAQAAEQASQSKSMFLATVSHELRTPLYGIIGNLDLLQTKELPKGVDRLVTAMNNSSSLLLKIISDILDFSKIESEQLKIEPREFSPREVMNHITANYLPLVVRKQLGLYCFIEPDVPVALNGDPMRLQQVISNLLSNAIKFTDTGCIVLHVRADGDYLSIRVRDTGVGIPAKEVVRLFDPFFQVGTGVQRNFQGTGLGLAICEKLISMMDGDISVDSEPGMGSQFTVRIPLYGAQYPHNKGVKGLSGKRCCLTVPNASLCQFLETSLQRSGIVVTTYEGQEPTPEDVLITDEVVSKKWQGRAVVTFCRRHIGIPLEKAPGEWVHSVAAPHELPALLARIYLIEMESDDPANALPSTDKAVSDNDDMMILVVDDHPINRRLLADQLGSLGYQCKTANDGVDALNVLSKNHIDIVLSDVNMPNMDGYRLTQRIRQLGLTLPVIGVTANALAEEKQRCLESGMDSCLSKPVTLDVIKQTLTVYAERVRKSRDS

SEQ ID NO: 12930 - protein, 949 aa, Shigella flexneri 2a str. 2457T
MKYLASFRTTLKASRYMFRALALVLWLLIAFSSVFYIVNALHQRESEIRQEFNLSSDQAQRFIQRTSDVMKELKYIAENRLSAENGVLSPRGRETQADVPAFEPLFADSDCSAMSNTWRGSLESLAWFMRYWRDNFSAAYDLNRVFLIGSDNLCMANFGLRDMPVERDTALKALHERINKYRNAPQDDSGSNLYWISEGPRPCVGYFYALTPVYLANRLQALLGVEQTIRMENFFLPGTLPMGVTILDENGHTLISLTGPESKIKGDPRWMQERSWFGYTEGFRELVLKKNLPPSSLSIVYSVPVDKVLERIRMLILNAILLNVLAGAALFTLARMYERRIFIPAESDALRLEEHEQFNRKIVASAPVGICILRTADGVNILSNELAHTYLNMLTHEDRQRLTQIICGQQVNFVDVLTSNNTNLQISFVHSRYRNENVAICVLVDVSSRVKMEESLQEMAQAAEQASQSKSMFLATVSHELRTPLYGIIGNLDLLQTKELPKGVDRLVTAMNNSSSLLLKIISDILDFSKIESEQLKIEPREFSPREVMNHITANYLPLVVRKQLGLYCFIEPDVPVALNGDPMRLQQVISNLLSNAIKFTDTGCIVLHVRADGDYLSIRVRDTGVGIPAKEVVRLFDPFFQVGTGVQRNFQGTGLGLAICEKLISMMDGDISVDSEPGMGSQFTVRIPLYGAQYPQKKGVEGLSGKRCWLAVRNASLCQFLETSLQRSGIVVTTYEGQEPTPEDVLITDEVVSKKWQGRAVVTFCRRHIGIPLEKAPGEWVHSVAAPHELPALLARIYLIEMESDDPANALPSTDKAVSDNDDMMILVVDDHPINRRLLADQLGSLGYQCKTANDGVDALNVLSKNHIDIVLSDVNMPNMDGYRLTQRIRQLGLTLPVIGVTANALAEEKQRCLESGMDSCLSKPVTLDVIKQTLTVYAERVRKSRDS

SEQ ID NO: 12931 - protein, 949 aa, Escherichia coli CFT073
MKYLASFRTTLKASRYMFRALALVLWLLIAFSSVFYIVNALHQRESEIRQEFNLSSDQAQRFIQRTSDVMKELKYIAENRLSAENGVLSPRGRETQTDVPAFEPLFADSDCSAMSNTWRGSLESLAWFMRYWRDNFSAAYDLNRVFLIGSDNLCMANFGLRDMPVERDTALKALHERINKYRNAPQDDSGSNLYWISEGPRPGVGYFYALTPVYLANRLQALLGVEQTIRMENFFLPGTLPMGVTILDENGHTLISLTGPESKIKGDPRWMQERSWFGYTEGFRELVLKKNLPPSSLSIVYSVPVDKVLERIRMLILNAILLNVLAGAALFTLARMYERRIFIPAESDALRLEEHEQFNRKIVASAPVGICILRTADGVNILSNELAHTYLNMLTHEDRQRLTQIICGQQVNFVDVLTSNNTNLQISFVHSRYRNENVAICVLVDVSSRVKMEESLQEMAQAAEQASQSKSMFLATVSHELRTPLYGIIGNLDLLQTKELPKGVDRLVTAMNNSSSLLLKIISDILDFSKIESEQLKIEPREFSPREVMNHITANYLPLVVRKQLGLYCFIEPDVPVALNGDPMRLQQVISNLLSNAIKFTDTGCIVLHVRADGDYLSIRVRDTGVGIPAKEVVRLFDPFFQVGTGVQRNFQGTGLGLAICEKLISMMDGDISVDSEPGMGSQFTVRIPLYGAQYPQKKGVEGLSGKRCWLAVRNASLCQFLETSLQRSGIVVTTYEGQEPTPEDVLITDEVVNKKWQGRAVVTFCRRHIGIPLEKAPGEWVHSVAAPHELPALLARIYLIEMESDDPANALPSTDKAVSDNDDMMILVVDDHPINRRLLADQLGSLGYQCKTANDGVDALNVLNKNHIDIVLSDVNMPNMDGYRLTQRIRQLGLTLPVIGVTANALAEEKQRCLESGMDSCLSKPVTLDVIKQTLTVYAERVRKSRES

SEQ ID NO: 12932 - protein, 932 aa, Clostridium thermocellum ATCC 27405
MPSDELDFCAFFDIEEHLYWQGDAMKSKRMIKQSTLSAIILAIFFFIAVMLIWSILYMNSCIRAEQNAERRRTEFKQLGIDLADASDYLTDEARKFAVTRKIVHLERYWEEINVTRTRDKVISRLQELDSPKEELELLAKAKKYSDALVETERRSMRLVLEALGVDESDMVPEVASFKLSEGDQRLSREDKLLKAIEIMYDARYDSDKKNIMDPIAKFQRIMNQRLESELEAARRGTAGATVLQIILAFVIILAIAVLIRILFTQVTYPIRDYILKLKDFSFDDEEFRLVPKGTVELNMLAENFNELYRSFHNELVRRKKAEETMKAARDEADKANRAKSEFLASMSHEIRTPINSIIGYQYLLKNSVLSPKQREYVENIGLAAKNLLAIINQILDFSKIEAGRMVLEEVDFNIDDVLNELMIIVGMEAKRKGIELRIKVDEDVPRFLKGDITRLKQVVMNLVSNGIKFTHEGYISIRVELVEKNEENACIKFSVTDTGIGISDEQKKLLFQAFTQGDASTSRKYGGTGLGLAICKRLVELMKGEINVESEVGKGSTFSFSLRLKIASCNENRNGKSKSVDTEEQYKNVKILLVEDSSVNLQMTKEILENMGIDTDTAQSGEEAVKKAESNEYELILMDIRMPGMDGYEATRRIRKLERGSMPIVALTADAVEGVAQKAKEAGMNGYLTKPLEPEKLLEVIRSMTNGGGKFKEEKSKSCAKAAEAENPYYEHKYETLDFDGAVNRLGGKRDKYIGILKSFVELHKDDGVKIRELAASGKRDELRRFLHSLKGSAANIGALRLKDLLARLEESCIPQNCEKNAKWMNDLEKEFERLIEEIMQYIRAFDSYKGSSPENHENNNVREDLEMLCKLLLTGDSEAKSFFEEKLAYLGNVLRPEDYHDLKKKISCYEFQKALAIVDKLKQDFSGKLTK

SEQ ID NO: 12933 - protein, 917 aa, Pseudomonas syringae pv. syringae B728a
MLTKLGIKGRVLLLTILPASLMAAMLGGYFTWMQLSELQSQLLQRGEMIAQDLAPLAANALGRKDKVLLSRIATQTLEQTDVRAVSFLDTDRTVLAHAGPTMISPSPIGSGSQLLSSTGTDATRYLLPVFGSQRHLTSPIIPAEADTLLGWVELEISHNGTLLRGYRSLFASLLLILTGLAFTATLAVRMSRTINGPMSQIKQAVSQLKDGNLETRLPPLGSRELDELASGINRMAATLQNAQEELQLSIDQATEDVRQNLETIEIQNIELDLARKEALEASRIKSEFLANMSHEIRTPLNGILGFTHLLQKSELTPRQFDYLGTIEKSADNLLSIINEILDFSKIEAGKLVLDNIPFNLRDLLQDTLTILAPAAHAKQLELVSLVYRDTPLALSGDPLRLRQILTNLVSNAIKFTREGTIVARAMLEDETEEHAQLRISVQDTGIGLSSQDVRALFQAFSQADNSLSRQPGGTGLGLVISKRLIEQMGGEIGVDSTPGEGSEFWISLKLPKAREDKEESLNIPLGGLRAAVLEHHDLARQALEHQLEDCGLQTIVFNNLENLLNGVTAAHETPAAIDLAVLGVTALEISPERLRQHIWDLENLNCKVMVLCPTTEHALFQLAVHDVYTQLQAKPACTRKLQKALSELIAPRAVRADIGPPLSSRAPRVLCVDDNPANLLLVQTLLEDMGAEVVAVEGGYAAVNAVQQEAFDLVLMDVQMPGMDGRQATEAIRAWEAERNQSSLPIVALTAHAMANEKRSLLQSGMDDYLTKPISERQLAQVVLKWTGLALRNPAPERQNEALEVHVGPLVLDHEEGLRLAAGKADLAADMLAMLLASLDADREAIRVARANQDVHALIERIHRLHGATRYCGVPQLRSACQRAETLLKQNAPHTEEALNDLDKAIIRLEAEARVMA

SEQ ID NO: 12934 - protein, 1060 aa, Pseudomonas fluorescens PfO-1
MYQPQDQLSQIISRQNATSRQASFQNSECRPGRSDTFIDGTQNVTLAPHRAHFALGVADRLEFAANLADVHIKAAIVGRITALKNVLIKEGLAQHFLVVAIEGFQQAVFAAGQAGGLVEVEHLALLVVETQPADRHHRSDGRRATIEGDPAQDRFNAHMQLSHAEGFGQIVVGAKAEPADTVGLGTEGRHQQHRGGMALTQLGQDIQSVEPRQQNVHQHHIERLAPGDTQAFAAVLAPGDLKAAAAQMFMDIGTEDGVVFDGKNAGLANGDRSHDYLQIILSWAIIQDCPAPGNPSLTCRTDDRSPSEGRRHHFSQDCPQANRYTAPIPRAGRTCESTISGMQEKGVLKKLGIKGRVLLLTLLPTSLMALVLGGYFTWTQQSDLQTQLMQRGEMIAEQLAPLVAPAMGHGDAELLERIATQSLEQPDVRAVTFLAPDRSPLAHAGPTMLNQAPSGDSAHLLRRSGNDATRYLLPVFGKHRNLAGELIPQESDRLLGWVELELSHNGMLLRGYRSLFASLLLIGAGLAGAALLALRMGRTINRPLSQIKQAVAQLKDGHLETRLPPLGSQELDELASGINRMAGTLQNAREELQHSVDQATEDVRQNLETIEIQNIELDLARKEALEASRIKSEFLANMSHEIRTPLNGILGFTHLLQKSELTPRQLDYLGTIEKSADSLLGIINEILDFSKIEAGKLVLDHIPFNLRDLLQDTLTILAPAAHAKQLELVSLVYRDTPLSLVGDPLRLKQILTNLVSNAIKFTREGTIVARAMLEEENDDSVQLRISIQDTGIGLSNQDVRALFQAFSQADNSLSRQPGGTGLGLVISKRLIEQMGGEIGVDSTPGEGSEFWISLNLPKTRDDAEDLPAAPLLGRRVAVLENHELARQALQHQLEDCGLDVTPFNTLESLTNGVTGAHQTDQAIDLAVLGITSNDMPPERLNQHIWDLEHLGCRVLVLCPTTELTLYHLSVPNPHSQLQSKPACTRKLRRALSDMVNPRQSRSEPGEPLSSRAPKVLCVDDNPANLLLVQTLLEDMGAKVLAVESGYAAVKAVQSESFDLV

SEQ ID NO: 12935 - protein, 620 aa, Desulfovibrio desulfuricans G20
MNSINHSYAGGKYGMPRGMACPCIHEEQRLLKNKASGLSGEFRPASCPVAYVWCRTLLSDFKQKAETHMASRQEMTESGAIAACGEGADSRSLEAEILRLRQREKELLHERQMLKDILKAIPDMLTVHDRDGNVMFSNCKPNEDCWQHHGGTKHGLRCYQCHFHGDRNCEDCYIPDVFDSGEQRVVEMYNPDMKSFRSITVFPVRDGQGDVTMVAEYVRDVTATRNLERELRVAKEAAEAADRAKSEFLASMSHEIRTPMNGVLGMLDLAMTTSLDEEQREYLEAVQNSAEALLSLINDILDFSKIEAGMVELDQQVFRLSKRLSSLHTMFVHRAAERNLEFAINISPDVPDGLSGDPLRLRQIVVNLLDNAFKFTDQGQVVLSVEVLERGAENVLLQFSVQDTGPGILERHQERIFDSFAQADASFTRRHQGSGLGLAICKRLTGLMGGDIKVRSTPGEGSTFVFSARFGVAVLDEEPVRVRSRTAEPAPVRGRILVAEDHPMNLMFIEKFLKKQGYESVSVTDGSEVVPALTRSRFDLVLMDIAMPAMDGMEATRAVRAATGMKTPSDVPIIAMTAHAMKGDREQFLEAGMDDYIGKPINSDNLRSMIIRHLQARRKS

SEQ ID NO: 12936 - protein, 651 aa, Pseudomonas aeruginosa PAO1
MSQRHGWDIRTRMLAISLGPALLLTLLLTAYFTYSRLQDLRQELTHTGQLIADQLAPAAEYGVIAGNTPVLQKLLQATLDTPHVRFIEVRDRNDNILVYVEQLSGALQNAAPIDIFHSTIQRQRIALASDPLLDGASEGDGQSGEDYLGRVVVGMSNDAFSQRQQEILLKAALLAAFALILTFLVARRLAQRLSAPISTMGQAVEAIQSGDYKTSLPILDDGEIGDLARHINNLASGLDRASREQEQAIGQLISAREEAEQANRAKSDFLAMMSHELRTPMNGVLGMLQLLETTEQTREQAEYTALATESTEHLLKVINDILDFSRIERGALELECIPFNLLELVQGSALVFQHSAQQRGLALELQIQAGLENIEVCGDPTRIRQILVNLLGNALKFTEEGAIHLSLEWQALDHDVLWLTCAVHDSGIGISPERLEHMFDAFQQADSSISRRYGGTGLGLAIARTLAERMGGTLQAESKEGSGSTFTLEIPLPFQQSPAHRQQAAGDAAPVAAGQEILLVEDNPVNQTVIEAMLRSLGYRVTLVADGIQAVRSAERQRYDAILMDCRLPVLDGYSATREIRAQENGRRVPIIALTANALQGDRENCLQAGMNDYLAKPFKRAELQRILQRWIGSQPELPVTSNETGRGEPE

SEQ ID NO: 12937 - protein, 957 aa, Yersinia pestis CO92
MLFHHGIRLKYLSSFRTTLKISRYLFRVLAVMLWSLGALLTTFYILNVLNEKKADIRQEYNNNFGLAQNYIRHSAEIIRDIKYMAENRLDKNASDTDATSGMVMNKKAVPQYYPLNSDSGCTTASTSNQASVNTLSNLIWYWKENFTAAYDLNRVFFIGTDTLCMVDFDIRNAPSLQENLLKSLYEHTLKYRDTKNQDKDSNIYWVVPGARPDIGVLYVLSPVYLGNRLEAMIGFEQSVRLEDFISSRTLPIRVTLLNQDNEPVLQMASGDRYPAILDDYPDSPSYFGYADDYKDLILKKALPPSPLSIAYLLPVKTIIEAFKLLIFNALLLNVLSAVVIFTLAWLFERKMFHPAEDNALRLEEHEQFNRKIVASAPVGISILRISDGTNILSNELAHNYISLLTNEDRERITRIICERQANFVDVMTSNNNNLQISFVHSRYRNEDVAICVLVDVSARVKMEESLQEMATAAEQASQSKSMFLATVSHELRTPLYGIIGNLDLLQTKELPQGVDRLVTAMNNSSGLLLKIISDILDFSKIESEQLKIEPSEFSTVEVITHITANYLPLVVKKRLGLYCFIEPDVPRLIEGDPVRLQQVISNLLNNAIKFTDTGCIILQVRVRDCYLEFRVRDTGVGIDSREINQLFDPFFQVGTGVQRHFQGTGLGLAICEKLVNLMDGDVEVISELGMGSIFAIRIPLYHHQNTVLSANDRWQGKVLWLDIRNARLESYLLDLLGYFGATIRRYCGEQTQPEDVLICDYPSQLSPPLLAWIQLSIEHIGLPQETRPAYWSLSTSTLLEIVPLLDWILRGQQPVDNSSLQLHAPKTNQDNNADLQILVVDDHPINRRLLADQLTTLGYRVITANDGLDALVALNTNTVDMVLTDVNMPNMDGYRLTERLRQLNHNFPIIGVTANALAEGKQRCIEAGMDNCLSKPVTLDTLRQMLLYYSDQVRRSR

SEQ ID NO: 12938 - protein, 773 aa, Vibrio vulnificus CMCP6
MVEPPVRSNIERNLDLRTELLASQIKSPFNRAVGVLNSLVGVAQSQQKGTNQPQILGRIIASSDQVIASGGVWPEPQQIDGSLRYVSLFFNKGEDGRIEQIHSYNNPESSGYHTESWYLSVVNLPENSVAWSNVYTDPYTQVQMITASQPYFIDGEFAGVATVDISLETLFDFVKGHTEKYQLGVSISDPGGKLLLEHAFHLTRDRYISEIEVADIGWRVRVINSQLTVSDEVFGQVMRVEAGILPFLLICVLVGYYTLNRYVIKPIISIAKKVDVSKTGGIIDIHYDSEDEIKHLIETINEKTVYLEAEKVKAQASTNAKTAFLATLSHEIRTPMNGVLGTAQILLKTPLNEEQRKHLKTLYDSGDHMMTLLNEILDYSKIEQGHMEFDNNPFPFDSIIGSVNSVYYTLCAEKGLQFKVYTTVPTGRWYCADKARLRQVLFNLLNNAVKFTARGLVEVYFEEHTREQANYLSIKVKDTGIGIPESAQKRIFRPFEQAESSTTRRFGGTGLGLAIVKQIAEQMGGSVAVSSQVGLGTCFTVELALECTSPETESPEPRYKLNYQGLRALIVEDNRTNAIIIETFLRNKGFSCERVENGEQAIACVTQHPFDLILMDNHMPVMDGIEAITAIRAMDSPCRHTLIFGCTADVFKETRERMLGVGADHIIAKPIVEAELDDALFQHAKLLYQFRAEDVQAQVEEQSIESLLVGFYIAIENGELTQAHNAISQIRGQHKDAIEPALAQSLARIEQQLSENKQPDQEEINLLTVLLAD

SEQ ID NO: 12939 - protein, 917 aa, Pseudomonas syringae pv. tomato str. DC3000
MLTKLGIKGRELLLTILPASLMAAMLGGYFTWMQLSELQSQLLLRGEMIAQDLAPLSASALGRKDKVLLSRIATQTLEQPDVRAVSFLDVDRSPLAHAGPTMISPTPIGNSSQLLNSTGTDATRYLLPVFGNQRHLTSPIIPAEADTLMGWVDVEISHNGTLLRGYRSLFASLLLIFTGLAITAVVAVRLSRTINGPMSQIKQAVSQLKDGNLETRLPPLGSRELDELASGINRMAATLQNAQEELQMSIDQATEDVRQNLETIEIQNIELDLARKEALEASRIKSEFLANMSHEIRTPLNGILGFTHLLQKSELTPRQFDYLATIEKSADNLLSIINEILDFSKIEAGKLVLDNIPFNLRDLLQDTLTILAPAAHAKHLELVSLVYRDTPLALSGDPLRLRQILTNLVSNAIKFTREGTIVARAMLEDETEEHAQLRISVQDTGIGLSSQDVRALFQAFSQADNSLSRQPGGTGLGLVISKRLIEQMGGEIGVDSTPGEGSEFWISLKLPKAREDKEESLNLPLEGLRAAVLEHHDLARQALEHQLEDCGLHTVVFTNLENLLNGVTAAHETPAAIDLAVLGVTTLEISPERLRQHIWDLENLNCKVMVLCPTTEYALFQLAVHDVYTQLQAKPACTRKLQKALSELIAPRAIRADIAPPLSSRAPRVLCVDDNPANLLLVQTLLEDMGAEVMAVEGGYAAVNAVQQEAFDLVLMDVQMPGMDGRQATEAIRAWEAERGQSSLPIVALTAHAMANEKRSLLQSGMDDYLTKPISERQLAQVVLKWSGLALRNPAPERQNESLEAHVGPLVLDPEEGLRLAAGKADLAADMLAMLLASLDADREAIRVARASQDVQALIERIHRLHGATRYCGVPQLRTACQRAETLLKQDAPHTGDALDDLDKAIVRLETEARVTA

SEQ ID NO: 12940 - protein, 566 aa, Vibrio parahaemolyticus RIMD 2210633
MTGNSSLERKLKREIASRKAAELLLEQKSYELYESTQKLSVALKKLELRSESDLRKFEFEEKIDATLIRFGRTFLSSTFDETMIASFLEQLTSNSVITASYLYLDPVQLTSLRRHHFGHLDLKSDKPIARTPNWQNEALHLPIIIDERVVGELIFSVSLEQIEQAFISKQMELVSDLVHGVISRHLSLEREVELRKRAEESEKATKEFVAMINHELRTPLNGVLGSADLLSKTQLGEDQRQYLGNLIQSGDLLRVIINDLLDFSKMNAGMMEIIDKVFAWDDLEKAITGVFAAKAAEKRIHFSIDKKLGIPEFLIGDLERITQILVNLIGNAIKFTHLGGVVLRVEWVNGTAFFEVEDTGIGIPLAAQSSLFDPFVQVDRSAKRSFEGSGLGLAICKNLVDLMQGEISFESEERKGTTFKVSIPLKEGQAQGAASGELAVVERSDLAGRSILVVDDIRMNQVIVTQMLKKLDITPDLKANGLEALEAVKNKDYELIFMDCRMPEMDGYEATAHLRQKGFDRPIIALTAGTTIEERQKCIDSGMDDILTKPYTATDIEQIMCKWLEQ

SEQ ID NO: 12941 - protein, 917 aa, Pseudomonas fluorescens
MLKKLGIKGRVLLLTLLPTSLMALVLGGYFTWMQLSDLQTQLLQRGEMIAEQLASLVAPAMGNHNTQMLERIATQALEQQDVRAVSLLAPDRSLLAHAGPSMLNPPPAGNSSHMMQRSGSDATRYQLPVFGRHRNLAGDLIPDESDRLLGWVELDLSHSGMLLRGYRNLFASLLLIPAGLAVTALLAVRMGRTINNPLTQIKQAVAQLKDGNLETRLPPLGSQELDELASGINRMASTLQNAQEELQHSIDQATEDVRQNLETIEIQNIELDLARKEALEASRIKSEFLANMSHEIRTPLNGILGFTHLLQKSELTPRQLDYLGTIEKSADSLLGIINEILDFSKIEAGKLVLDSIPFNLRDLLQDTLTILAPAAHAKQLELVSLVYRDTPLSLVGDPLRLKQILTNLVSNAIKFTREGTIVARAMLEEEHEDSVQLRISIQDTGIGLSNQDVRALFQAFSQADNSLSRQPGGTGLGLVISKRLIEQMGGEIGVDSTPGEGSEFWISLNLPKTRDDAEDLPGPPLLGRRVAVLENHELARQALQHQLEDCGLEVTPFNTLEALTNGITGVHQSEQAIDLAVLGITTNDMSPERLSQHIWDLEHLGCKVLVLCPTTEQTLFHLSVPNPHSQLQAKPACTRKLRRALSDLVTPRRARSEPEETLSSRAPRVLCVDDNPANLLLIQTLLEDMGAKVLAVDNGYAALNAIQTEPFDLVMMDVQMPGMDGRKSTEAIRQWESERHGTPLPIVALTAHAMANEKRALLQSGMDDYLTKPISERQLAQVVLKWTGLALRNQGPERASERPELGLELQVLDQDEGLRLAAGKADLAADMLAMLLASLDADREAIKAARAANDQNALIERVHRLHGATRYCGVPQLRAACQRSETLLKQEDAKAFAALDELDHAIGRLAAEARTNA

SEQ ID NO: 12942 - protein, 917 aa, Pseudomonas fluorescens
MLKKLGIKGRVLLLTLLPTSLMALVLGGYFTWMQLSDLQTQLLQRGEMIAEQLASLVAPAMGNHNTQMLERIATQALEQQDVRAVSLLAPDRSLLAHAGPSMLNPPPAGNSSHMMQRSGSDATRYQLPVFGRHRNLAGDLIPDESDRLLGWVELELSHSGMLLRGYRSLFASLLLIAAGLAGTALLAVRMGRTINNPLTQIKQAVAQLKDGNLETRLPPLGSQELDELASGINRMASTLQNAQEELQHSIDQATEDVRQNLETIEIQNIELDLARKEALEASRIKSEFLANMSHEIRTPLNGILGFTHLLQKSELTPRQLDYLGTIEKSADSLLGIINEILDFSKIEAGKLVLDSIPFNLRDLLQDTLTILAPAAHAKQLELVSLVYRDTPLSLVGDPLRLKQILTNLVSNAIKFTREGTIVARAMLEEEHEDSVQLRISIQDTGIGLSNQDVRALFQAFSQADNSLSRQPGGTGLGLVISKRLIEQMGGEIGVDSTPGEGSEFWISLNLPKTRDDAEDLPGPPLLGRRVAVLENHELARQALQHQLEDCGLEVTPFNTLEALTNGITGVHQSEQAIDLAVLGITTNDMSPERLSQHIWDLEHLGCKVLVLCPTTEQTLFHLSVPNPHSQLQAKPACTRKLRRALSDLVTPRRARSEPEETLSSRAPRVLCVDDNPANLLLIQTLLEDMGAKVLAVDNGYAALNAIQTEPFDLVMMDVQMPGMDGRQSTEAIRQWESERHGTPLPIVALTAHAMANEKRALLQSGMDDYLTKPISERQLAQVVLKWTGLALRNQGPERASERPELGLELQVLDQDEGLRLAAGKADLAADMLAMLLASLDADREAIKAARAANDQNALIERVHRLHGATRYCGVPQLRAACQRSETLLKQEDAKAFAALDELDHAIGRLAAEARTNA

SEQ ID NO: 12943 - protein, 929 aa, Pseudomonas syringae
YRRTDTCCRRKSVLTKLGIKGRVLLLTILPASLMAAMLGGYFTWMQLSELQSQLLQRGEMIAQDLAPLAANALGRKDKVLLSRIATQTLEQTDVRAVSFLDTDRTVLAHAGPTMISPSPIGSGSQLLSSTGTDATRYLLPVFGSQRHLTSPIIPAEADTLLGWVELEISHNGTLLRGYRSLFASLLLILTGLAFTATLAVRMSRTINGPMSQIKQAVSQLKDGNLETRLPPLGSRELDELASGINRMAATLQNAQEELQLSIDQATEDVRQNLETIEIQNIELDLARKEALEASRIKSEFLANMSHEIRTPLNGILGFTHLLQKSELTPRQFDYLGTIEKSADNLLSIINEILDFSKIEAGKLVLDNIPFNLRDLLQDTLTILAPAAHAKQLELVSLVYRDTPLALSGDPLRLRQILTNLVSNAIKFTREGTIVARAMLEDETEEHAQLRISVQDTGIGLSSQDVRALFQAFSQADNSLSRQPGGTGLGLVISKRLIEQMGGEIGVDSTPGEGSEFWISLKLPKAREDKEESLNIPLGGLRAAVLEHHDLARQALEHQLEDCGLQTIVFNNLENLLNGVTAAHETPAAIDLAVLGVTALEISPERLRQHIWDLENLNCKVMVLCPTTEHALFQLAVHDVYTQLQAKPACTRKLQKALSELIAPRAVRADIGPPLSSRAPRVLCVDDNPANLLLVQTLLEDMGAEVVAVEGGYAAVNAVQQEAFDLVLMDVQMPGMDGRQATEAIRAWEAERNQSSLPIVALTAHAMANEKRSLLQSGMDDYLTKPISERQLAQVVLKWTGLALRNPAPERQNEALEVHVGPLVLDHEEGLRLAAGKADLAADMLAMLLASLDADREAIRVARANQDVHALIERIHRLHGATRYCGVPQLRSACQRAETLLKQNAPHTEEALNDLDKAIIRLEAEARVMA

SEQ ID NO: 12944 - protein, 907 aa, Pseudomonas syringae pv. syringae
MLLLTILPASLMAAMLGGYFTWMQLSELQSQLLQRGEMIAQDLAPLAANALGRKDKVLLSRIATQTLEQTDVRAVSFLDTDRTVLAHAGPTMISPSPIGSGSQLLSSTGTDATRYLLPVFGSQRHLTSPIIPAEADTLLGWVELEISHNGTLLRGYRSLFASLLLILTGLAFTATLAVRMSRTINGPMSQIKQAVSQLKDGNLETRLPPLGSRELDELASGINRMAATLQNAQEELQLSIDQATEDVRQNLETIEIQNIELDLARKEALEASRIKSEFLANMSHEIRTPLNGILGFTHLLQKSELTPRQFDYLGTIEKSADNLLSIINEILDFSKIEAGKLVLDNIPFNLRDLLQDTLTILAPAAHAKQLELVSLVYRDTPLALSGDPLRLRQILTNLVSNAIKFTREGTIVARAMLEDETEEHAQLRISVQDTGIGLSSQDVRALFQAFSQADNSLSRQPGGTGLGLVISKRLIEQMGGEIGVDSTPGEGSEFWISLKLPKAREDKEESLNIPLGGLRAAVLEHHDLARQALEHQLEDCGLQTIVFNNLENLLNGVTAAHETPAAIDLAVLGVTALEISPERLRQHIWDLENLNCKVMVLCPTTEHALFQLAVHDVYTQLQAKPACTRKLQKALSELIAPRAVRADIGPPLSSRAPRVLCVDDNPANLLLVQTLLEDMGAEVVAVEGGYAAVNAVQQEAFDLVLMDVQMPGMDGRQATEAIRAWEAERNQSSLPIVALTAHAMANEKRSLLQSGMDDYLTKPISERQLAQVVLKWTGLALRNPAPERQNEALEVHVGPLVLDHEEGLRLAAGKADLAADMLAMLLASLDADREAIRVARANQDVHALIERIHRLHGATRYCGVPQLRSACQRAETLLKQNAPHTEEALNDLDKAIIRLEAEARVMA

SEQ ID NO: 12945 - protein, 896 aa, Pseudomonas viridiflava
MAAVLGGYFTWMQLYELQSQLLQRGEMIAQDLAPLSANALGRKDKILLTRIATQTLEQSDVRAVSFLDTDRSVLAHAGPTMISPSPIGSSTQLLNSSGNDATRYLLPVFGHQRHLTSPIIPAEADTLLGWVELEISHNGTLLRGYRSLFASLLLIFTGLAFTAILAVRMSRTINGPLSQIKQAVSQLKDGNLETRLPPLGSRELDELASGINRMAATLQNAQEELQMSIDQATEDVRQNLETIEIQNIELDLARKEALEASRIKSEFLANMSHEIRTPLNGILGFTHLLQKSELTPRQYDYLGTIEKSADNLLSIINEILDFSKIEAGKLVLDNIPFNLRDLLQDTLTILAPAAHAKQLELVSLVYRDTPLALSGDPLRLRQILTNLVSNAIKFTRQGTIVARAMLEDETEEHAQLRISVQDTGIGLSSQDVRALFQAFSQADNSISRQPGGTGLGLVISKRLIEQMGGEIGVDSTPGEGSEFWISLNLPKAREDREETANQALEGLRAAVLEHHDLARQALEHQLEDCGLQTVVFTNLENLLNGVTAAHETPQAIDLVVLGVTALEISPERLRQHIWDLENLNCKVMVLCPTTEHALFQMSVHDVYTQLQAKPACNRKLQKALSELVAPRAVRTDVALPLSSRAPRVLCVDDNPANLLLVQTLLEDMGAEVVAVDGGYAAVSAVQQEAFDLVLMDVQMPGMDGCQATEAIRAWETERNQTSLPIVALTAHAMANEKRSLLQSGMDDYLTKPISERQLAQVVLKWTGLALRNPIPERQTESSNAHVGPLVLDHEEGLRLAAGKPDLAADMLAMLLASLDADREAIRAARANDDIQGLIERVHRLHGATRYCGVPQLRTACQRAETLLKQNAPHTEDALDDLDKAITRLEAEARVTA

SEQ ID NO: 12946 - protein, 917 aa, Pseudomonas chlororaphis
MLKKLGIKGRVLLLTLLPTSLMALVLGGYFTWMQQSDLQTQLLQRGEMIAEQLAPLVAPALAHKNIALLERIATQSLEQQDVRAVTFLAPDRTPLAHAGPSMLNQAPTGNGSQMLQRTGSDATRYLLPVFGRHRNLAGDLIPDESDRLLGWVELELSHNSMLLRGYRSLFASLLLIIAGLICTGLLALRMGRTINNPLSQIKHAVTQLKDGNLETRLPLLGSQELDELASGINRMAGTLQNAQEELQHSIDQATEDVRQNLETIEIQNIELDLARKEALEASRIKSEFLANMSHEIRTPLNGILGFTHLLQKSELTPRQLDYLGTIEKSADSLLGIINEILDFSKIEAGKLVLDSIPFNLRDLLQDTLTILAPAAHAKQLELVSLVYRDTPLSLVGDPLRLKQILTNLVSNAIKFTREGTIVARAMLEEEHEDSVQLRISIQDTGIGLSNQDVRALFQAFSQADNSLSRQPGGTGLGLVISKRLIEQMGGEIGVDSTPGEGSEFWISLRLPKTRDDAEDLPAPPLLGRRIAVLENHELARQALQHQLEDCGLEVTPFNTLEALTNGVTGVHQTEQAIDLAVLGITSNDMPPERLNQHIWDLEHLGCKVLVLCPTTEQTLFHLSVPNPHSQLQAKPACTRKLRRALADLVNPKVVRNEPSEPIASRPPRVLCVDDNPANLLLVQTLLEDMGAKVLAVDSGYAAVKAVQNESFDLVMMDVQMPGMDGRQSTEAIRQWESERNCTPLPVIALTAHAMANEKRALLQSGMDDYLTKPISERQLAQVVLKWTGLALRNQGPERTGEPSGNGLELQVLDHDEGLRLAAGKADLAADMLAMLLASLEADREAIRAARAANDHNALIERVHRLHGATRYCGVPQLRAACQRSETLLKQEDVKAFAALDELERAINRLATEARINA

SEQ ID NO: 12947 - protein, 917 aa, Pseudomonas chlororaphis
MLKKLGIKGRVLLLTLLPTSLMALVLGGYFTWMQQSDLQTQLLQRGEMIAEQLAPLVAPALAHQNTALLERIATQSLEQQDVRAVSFLAPDRTPLAHAGPSMLNQAPTGNGSQMLQRTGSDATRYLLPVVGRHRNLAGDLIPDESDRLLGWVELELSHNSMLLRGYRSLFASLLLITAGLICTGLLALRMGRTINNPLSQIKQAVTQLKDGNLETRLPLLGSQELDELASGINRMAGTLQNAQEELQHSIDQATEDVRQNLETIEIQNIELDLARKEALEASRIKSEFLANMSHEIRTPLNGILGFTHLLQKSELTPRQLDYLGTIEKSADSLLGIINEILDFSKIEAGKLVLDSIPFNLRDLLQDTLTILAPAAHAKQLELVSLVYRDTPLSLVGDPLRLKQILTNLVSNAIKFTREGTIVARAMLEEEHEDSVQLRISIQDTGIGLSNQDVRALFQAFSQADNSLSRQPGGTGLGLVISKRLIEQMGGEIGVDSTPGEGSEFWISLRLPKTRDDAEDLPAPPLLGRRVAVLENHELARQALQHQLEDCGLEVTPFNTLEALTNGVTGVHQTEQAIDLAVLGITTNDMPPERLNQHIWDLEHLGCKVLVLCPTTEQTLFHLSVPNPHSQLQAKPACTRKLRRALADLVNPKAVRSEPSEPIASRPPRVLCVDDNPANLLLVQTLLEDMGAKVLAVDSGYAAVKAVQNESFDLVMMDVQMPGMDGRQSTEAIRQWESERNCTPLPVIALTAHAMANEKRALLQSGMDDYLTKPISERQLAQVVLKWTGLALRNQGPERTGEPSGNGHELQVLDHDEGLRLAAGKADLAADMLAMLLASLEADREAIRAARAANDHNALIERVHRLHGATRYCGVPQLRAACQRSETLLKQEDIKAFAALDELERAINRLATEARINA

SEQ ID NO: 12948 - protein, 917 aa, Pseudomonas chlororaphis
MLKKLGIKGRVLLLTLLPTSLMALVLGGYFTWMQQSDLQTQLLQRGEMIAEQLAPLVAPALAHQNTALLERIATQSLEQQDVRAVTFLAPDRTPLAHAGPSMLNQAPTGNGSQMLQRTGSDATRYLLPVFGRHRNLAGDLIPDESDRLLGWVELELSHNSMLLRGYRSLFASLMLITAGLICTGLLALRMGRTINNPLSQIKQAVTQLKDGNLETRLPLLGSQELDELASGINRMAGTLQNAQEELQHSIDQATEDVRQNLETIEIQNIELDLARKEALEASRIKSEFLANMSHEIRTPLNGILGFTHLLQKSELTPRQLDYLGTIEKSADSLLGIINEILDFSKIEAGKLVLDSIPFNLRDLLQDTLTILAPAAHAKQLELVSLVYRDTPLSLVGDPLRLKQILTNLVSNAIKFTREGTIVARAMLEEEHEDSVQLRISIQDTGIGLSNQDVRALFQAFSQADNSLSRQPGGTGLGLVISKRLIEQMGGEIGVDSTPGEGSEFWISLRLPKTRDDAEDLPAPPLLGRRVAVLENHELARQALQHQLEDCGLEVTPFNTLEALTNGVTGVHQTEQAIDLAVLGITTNDMPPERLNQHIWDLEHLGCKVLVLCPTTEQTLFHLSVPNPHSQLQAKPACTRKLRRALADLVNPKAVRSEPSEPIASRPPRVLCVDDNPANLLLVQTLLEDMGAKVLAVDSGYAAVKAVQNESFDLVMMDVQMPGMDGRQSTEAIRQWESERNCTPLPVIALTAHAMANEKRALLQSGMDDYLTKPISERQLAQVVLKWTGLALRNQGPERTGEPSGNGLELQVLDHDEGLRLAAGKADLAADMLAMLLASLEADREAIRAARAANDHNALIERVHRLHGATRYCGVPQLRAACQRSETLLKQEDIKAFAALDELERAINRLATEARINA

SEQ ID NO: 12949 - protein, 917 aa, Pseudomonas chlororaphis
MLKKLGIKGRVLLLTLLPTSLMALVLGGYFTWMQQSDLQTQLLQRGEMIAEQLAPLVAPALAHQNTALLERIATQSLEQQDVRAVSFLAPDRTPLAHAGPSMLNQAPTGNGSQMLQRTGSDATRYLLPVFGRHRNLAGDLIPDESDRLLGWVELELSHNSMLLRGYRSLFASLLLITAGLICTGLLALRMGRTINNPLSQIKQAVTQLKDGNLETRLPLLGSQELDELASGINRMAGTLQNAQEELQHSIDQATEDVRQNLETIEIQNIELDLARKEALEASRIKSEFLANMSHEIRTPLNGILGFTHLLQKSELTPRQLDYLGTIEKSADSLLGIINEILDFSKIEAGKLVLDSIPFNLRDLLQDTLTILAPAAHAKQLELVSLVYRDTPLSLVGDPLRLKQILTNLVSNAIKFTREGTIVARAMLEEEHEDSVQLRISIHDTGIGLSNQDVRALFQAFSQADNSLSRQPGGTGLGLVISKRLIEQMGGEIGVDSTPGEGSEFWISLRLPKTRDDAEDLPAPPLLGRRVAVLENHELARQALQHQLEDCGLEVTPFNTLEALTNGVTGVHQTEQAIDLAVLGITTNDMPPERLNQHIWDLEHLGCKVLVLCPTTEQTLFHLSVPNPHSQLQAKPACTRKLRRALADLVNPKAVRSEPSEPIASRPPRVLCVDDNPANLLLVQTLLEDMGAKVLAVDSGYAAVKAVQNESFDLVMMDVQMPGMDGRQSTEAIRQWESERNCTPLPVIALTGHAMANEKRALLQSGMDDYLTKPISERQLAQVVLKWTGLALRNQGPERTGEPSGNGHELQVLDHDEGLRLAAGKADLAADMLAMLLASLEADREAIRAARAANDHNALIERVHRLHGATRYCGVPQLRAACQRSETLLKQEDIKAFAALDELERAINRLATEARINA

SEQ ID NO: 12950 - protein, 570 aa, Malus x domestica
RTLALEECALWMPTRTGLELQLSYTLRQQNPVGYTVPIHLPVVNQVFSSNCAVKISPNSPVARLRQLAGKHIPGEVVAVRVPLLHLSNFQINDWPELSTKRYALMVLMLPSDSARQWHVHELELVEVVADQVAVALSHAAILEESMRARDLLMEQNIALDLARREAETAIRARNDFLAVMNHEMRTPMHAIIALSSLLQETELTAEQRLMVETILRSSNLLATLINDVLDLSRLEDGSLQLEIATFNLHSVFREVHNMIKPVASIKRLSVTLNIAADLPMYAIGDEKRLMQTILNVVGNAVKFSKEGSISITAFVAKSESLRDFRAPDFFPVQSDNHFYLRVQVKDSGSGINPQDIPKLFTKFAQTQALATRNSGGSGLGLAICKRFVNLMEGHIWIESEGLGKGCTATFIVKLEFPERSNESKLPFAPKLQANHVQTNFPGLKVLVMDDNGVSRSVTKGLLAHLGCDVTAVSLIDELLHVISQEHKVVFMDVSMPGIDGYELAVRIHEKFTKRHERPVLVALTGSIDKTTKENCMRVGVDGVILKPVSVDKMRSVLSELLEHRVLFEAM

SEQ ID NO: 12951 - protein, 1391 aa, Mesorhizobium loti
MAEADEAIGARGKRGPDKPVHRGDAPPCADRDSPDALRQLLEAGSDWIWETDAELRFSWLSPTYQAATGIDPADVLGRFRFDFLNQDLKGSRSAAAHLEDLQARRPFRDFVYELKAGGADCRWVLTSGFPRFDNEGKFAGYRGIGRNVTTLAGAFETVEQNPLSGSDPDRHLADLERTMDAMHMGVVLLDAKLDTLIVNKAYRDLSSIPDGAVTVGAPFSRLMELNRRNGIYGDIDEQQWQRYLASRIEEIRAGSVAPREFVHASGRTMMFSVTALSGGKRLLTYYEVTELKRRDAEIESANAKIAETFVNLRTMVDEMPIGVLVLDADMRAEVINSAFYDFWRIDPGRAGIGSAFRELMEASRAIDPYGADELAWQRHTTEREAEIRAGVAGSKQLPHNDGRTLVASLAPLPGGKRLISYVDVTDMKGRETEAQDARKHLASVLESLPAGVIIYDRDDKFVFANRKLQDTLPALKPFWQPGCSFREALEFGQSIGYFRSSGDAGIDRLYEVEPEHWLDSMLARYRLPNSSYERLNADGRWYQVYDMRTDDGTFIGVRVDITDIKSREAALRDSMRQIDLFRHVMDELPVAAFIKAQDLSIEFVNKAWCALTGIAKEDVIGRTDRELFGTQDAEGYSHDDTQVVVTGKGIEVEEPVTHRDGTVRQLMTRKSRLVATDGSVHLVGSSTDITDVKAREKALEESMRENEVFRSLIDNVPVSIYAKRSDLRQFYVNKGWCDLTGLSREDAIGKTDIEIFGEDGEAFVAGDLAVLRTGETQEVEETVRLADGSVRHQFARKGAMIASDGSLYLIGSTTDITELKMREAELSEARQRAVLADRAKSEFLANMSHEIRTPMNGVLGMAELLAKSNLDPKQKTFTDIIVKSGNALLTIINDILDFSKIDAGQMVLDPAPFNLAEAIEDVATLVSTRAKEKDLELIVRVEPRLESLFVGDVGRIRQIVTNLLGNAVKFTDEGHVLVDVTGERVPTGTRLTISVTDTGIGIPEEKLKLVFEKFSQVDTSSTRRHEGTGLGLAITSRLVELMGGTIGVESAEGKGSTFWFTVTLPRAGQQNGQRIMPVDVTGARVLIVDDNAVNRAILTEQMTSWTFDSCAAESGAEGLKVLIAAAAYGVPVDCVVLDYQMPEMSGAEMARIVRNTGGLADTPIIMLTSVDQSLANTSYRDLGIDAQLIKPARSSVLLETLVATIQRHRHATDSHAVQPLAAERPDVPQPPPLALSEQRAQLQPPPVRPRLPATGGDGHRLDILVAEDNEVNQMVFTQILGETGYGFEIVGNGRKALDAFGKLNPCMILMDVSMPEMSGLEATAAIRQLEQQTGTHVPIVGVTAHALKGDRERCLEAGMDDYLPKPISPRALLEKVERWLGAGRQVQRNAG

SEQ ID NO: 12952 - protein, 1213 aa, Dictyostelium discoideum
MIELNNHSKINKNENNTNTRNNSSNNNNNNNNINKTNTNKYFEYNQNSIIYSSIPNSFLSHHPNSVGSQCLSLNSFLPPKPPILLSIFNSDTIGNNNNNNYSSSSSRNNSSGCSSSNNNNNNNNNNNNNNNNNNNNNNNNCNIEQYKNNQKQPKQQQQQKDQTIATQHRISLSSSSSSSSLSSSSSSSSVKQSFQIVKRLFGSLSEYMFPQKDEILYETDPYYLYQDDTQSNDSNEFYDDTDIGSDIDEANLTNTYNIQNCNKTLYNKQQQQAHFVNMNKNVNSNNGTGNSNQSNNVNKNQQNNNNNNNNNSHNNNNGNQNSSSSSSNSGASGSGGNGNNNNNNNNNNNNNNNNNNNSNSNSNNNSKSNNNNKKEGKDGATMNGSHPLIPFRKKPAQVPSPCFRMNSPNSDNDQYLDQLALENSSKKSLVAYNTDNLDQWKHFHLNENFDILQNDLFDIQQQQQQQQQQDNTLQYSSPINKRQEQEQQHIPFQFTTEQQQQLQQQQQQHLQNKTKQHPILLQRQQQQKQKQQQQQQIQQEQIGNNNSNNNNNINNNNNINNNYNNVNDLMNKFEIDQKQHDSQQNLVEEKRTPSFHEHNIIFNSFNFICSIVLDGSNIKSTEKYKAKLIIGFCFTILSFIPSWIIFFWVSGINKPAVMAIIAMPMSISSLVILKRTGSIHYPCHILCFTLCFALTINSYYTGGHQSTIRLLMSPVPPISALVLGRKASIQWSLMVLSIYLLFFVANLYGHEYVQGIPSIIIRSHMNFIIDVTIIIMTLIFTLCYQYFIDEAHRETKLKNAQLTIAKDAAIEAYQARQEFLATMSHEIRTPLNGLIGMATLLRDSHNLPPEEKTMAKAVKSCGDILLRLVNDILDLSKLEANQMGLEHIPFRMRELTQQICHVLSGQANEKNIHLSCEVSDKIPSILLGDSGRILQILMNLTGNALKFTQSGYVKIIIDLIEEESELVSLKKGEYNISFRVKDTGIGVPVESHQKIFEAFVQADPSDSRKYGGSGLGLYLCAKLVRLMKGEIGVYNNPDCDGSTFWFILPLEEGTDQSMQQMNNGARHKAFPQDCVKVLIAEDNIINQRVAVKFLEKIGIKAEVAGNGNEVLEILERQHYDLIFMDFQMPILDGLRCSKTIREFEQNHKWNRICPSIFICGLTANTMSTDKKRCFDHGMNHFISKPFQLEQLRSAIEMAIEHKQRNLMNLNIRN

SEQ ID NO: 12953 - protein, 1137 aa, Oryza sativa; identical to SEQ ID NO: 12843

SEQ ID NO: 12954 - protein, 1137 aa, Oryza sativa; identical to SEQ ID NO: 366

SEQ ID NO: 12955 - protein, 1137 aa, Oryza sativa; identical to SEQ ID NO: 366

SEQ ID NO: 12956 - protein, 1139 aa, Oryza sativa
  unsure (1)..(1139): unsure at all Xaa locations
MPMATVRRDIELSLIYADSRRKHLPRVEKDGLLREEEEPEFPASRSPTPRTNPRLASPSSSPSPPRLAASXVVNMQRGRFVQPFGCLLAVHPETFALLAYSENAAEMLDLTPHAVPTIDQREALAVGTDVRTLFRSHSFVALQKAATFGDVNLLNPILVHARTSGKPFYAIMHRIDVGLVIDLEPVNPVDLPVTATGAIKSYKLAARAIARLQSLPSGNLSLLCDVLVREVSELTGYDRVMAYKFHEDEHGEVIAECKRSDLEPYLGLHYPATDIPQASRFLFMKNKVRMICDCSATPVKIIQDDSLTQPISICGSTLRAPHGCHAQYMASMGSVASLVMSVTINEDEDDDGDTGSDQQPKGRKLWGLMVCHHTSPRFVPFPLRYACEFLLQVFGIQINKEVELAAQAKERHILRTQTLLCDMLLRDAPVGIFTQSPNVMDLVKCDGAALYYQNQLWVLGSTPSEAEIKNIVAWLQEYHDGSTGLSTDSLVEAGYPGAAALGDVVCGMAAIKISSKDFIFWFRSHTAKEIKWGGAKHEPIDADDNGRKMHPRSSFKAFLEVVKWRSVPWEDVEMDAIHSLQLILRGSLQDEDANKNNNAKSIVTAPSDDMKKIQGLLELRTVTNEMVRLIETATAPILAVDITGSINGWNNKAAELTGLPVMEAIGKPLVDLVIDDSVEVVKQILNSALQGIEEQNLQIKLKTFNHQENNGPVILMVNACCSRDLSEKVVGVCFVAQDMTGQNIIMDKYTRIQGDYVAIVKNPSELIPPIFMINDLGSCLEWNEAMQKITGIKREDAVDKLLIGEVFTHHEYGCRVKDHGTLTKLSILMNTVISGQDPEKLLFGFFNTDGKYIESLMTATKRTDAEGKITGALCFLHVASPELQHALQVQKMSEQAAMNSFKELTYIRQELRNPLNGMQFTRNLLEPSDLTEEQRKLLASNVLCQEQLKKILHDTDLESIEQCYTEMSTVDFNLEEALNTVLMQAMPQSKEKQISIDRDWPAEVSCMHLCGDNLRLQQVLADFLACMLQFTQPAEGPIVLQVIPRMENIGSGMQIAHLEFRLVHPAPGVPEALIQEMFRHSPGASREGLGLYISQKLVKTMSGTVQYLRESESSSFIVLVEFPVAQLSTKRCKASTSKF

SEQ ID NO: 12957 - protein, 1049 aa, Oryza sativa
  unsure (1)..(1049): unsure at all Xaa locations
MSSSRSNNRATCSRSSSARSKHSARVVAXTPMDAQLHAEFEGNVSAYLQNMQRGRFVQPFGCLLAVHPETFALLAYSENAAEMLDLTPHAVPTIDQREALAVGTDVRTLFRSHSFVALQKAATFGDVNLLNPILVHARTSGKPFYAIMHRIDVGLVIDLEPVNPVDLPVTATGAIKSYKLAARAIARLQSLPSGNLSLLCDVLVREVSELTGYDRVMAYKFHEDEHGEVIAECKRSDLEPYLGLHYPATDIPQASRFLFMKNKVRMICDCSATPVKIIQDDSLTQPISICGSTLRAPHGCHAQYMASMGSVASLVMSVTINEDEDDDGDTGSDQQPKGRKLWGLMINKEVELAAQAKERHILRTQTLLCDMLLRDAPVGIFTQSPNEYHDGSTGLSTDSLVEAGYPGAAALGDVVCGMAAIKISSKDFIFWFRSHTAKEIKWGGAKHEPIDADDNGRKMHPRSSFKAFLEVVKWRSVPWEDVEMDAIHSLQLILRGSLQDEDANKNNNAKSIVTAPSDDMKKIQGLLELRTVTNEMVRLIETATAPILAVDITGSINGWNNKAAELTGLPVMEAIGKPLVDLVIDDSVEVVKQILNSALQGIEEQNLQIKLKTFNHQENNGPVILMVNACCSRDLSEKVVGVCFVAQDMTGQNIIMDKYTRIQGDYVAIVKNPSELIPPIFMINDLGSCLEWNEAMQKITGIKREDAVDKLLIGEVFTHHEYGCRVKDHGTLTKLSILMNTVISGQDPEKLLFGFFNTDGKYIESLMTATKRTDAEGKITGALCFLHVASPELQHALQVQKMSEQAAMNSFKELTYIRQELRNPLNGMQFTRNLLEPSDLTEEQRKLLASNVLCQEQLKKILHDTDLESIEQCYTEMSTVDFNLEEALNTVLMQAMPQSKEKQISIDRDWPAEVSCMHLCGDNLRLQQVLADFLACMLQFTQPAEGPIVLQVIPRMENIGSGMQIAHLEFRLVHPAPGVPEALIQEMFRHSPGASREGLGLYISQKLVKTMSGTVQYLRESESSSFIVLVEFPVAQLSTKRCKASTSKF

SEQ ID NO: 12958 - protein, 2476 aa, Neurospora crassa
MESVAIPPQDDQQQLDPPARIFERLRQIAGFAWDETKPPYHSTYDNWHVFGTRFVSPFSTTGTPAPASPAPYPNTSPSSLAKLAPGHRAAPQDRPNVSASHSDAGSDRSTISLPTVAHHATDAPVVEELVVARISYHVLREERAYHITKSLVSTVDPNAEHISRPIDLIRLNPLPGDRGTIVVAIYAYSGENYLFKVLDMGPAFFYAKKHNDRWEAHREEHPVLEEPISLQHFLDFAIGAAQCLEMLHHSQSIVHGEIRPDAFHYNLELNRIKITSLGSGLRSFEHGLTSTGWSTLSKEVGARHKLQYISPEQTGRMPAEPDTRTDIYSLGVLFWSLLTQQPVFQGDTPLDIVQGVLGRRIPNVSQIRMDVPDAIGRIIQKCISKNVSDRYFSASGLRHDLVKVQELLGSGDSQSLRDFQVGSRDVSSSFRLPTIMIGRDRERSELVKVIERVSKSHGMNHKGGVNWGSDGSVLSNDVVDNAEVSSEGASSADGLNRQSGSWALALTPDPRNRVSLPPSALGTSSVTTSGETTSSGTSTGTSTISGGNRQSRQWDKPAFETSSLNENVSSDASRGSGLLSEPTSTISRQLGSKFRKQRQGNCEVVIIEGTGGLGKSYLVQSILADARRRGYCATAKFETARRTAFGPLLQLLSSLFRQVWGERNTETPFHQALKHHVRPVWPTLHKVLGLPEFLLGPPDNTPQRSNSTSSQSGQPALKRRGSSPELGGNNMYRHSSKVSSATQTSQEFLRAGASTQTSRLTNTFLDVLRMFTHYKFICFCLDDLHFADDESQELISQIIGARMKMVIIITYRPEEIGPEKVLQILSPPKSEELPRGAGAPIMTKIKLTPLSEDDIIHFVSSTLCLPKEDVTPLALVIQSKTAGNPFYMREMLNAGYRKKCIWYDYMAGEWKYDLDKLFDQFQGEQNYDVLDTAFITRRLSELPPASRSILAWAALLGQTFSFDLICRLMTGEFHFEEDKDKRQQEEDCSYIIPADESVAGLEAAIQACIIVPSDRDDHFRFVHDRYIQAAAALQECNARKMHFAIAQTLLKYHANDRTYRDNAASHICECVDIICQQVSRRRSYRALLSRCAQEASVSGARPTAAKFYGNAVALLQPDPWNDDAGDSSYEETLQLYIQAAECYLYMGLHAAANDLLQTILAKARTAVDKAPAWVLQSRIFAQRGNSEQALDSLRLCLKALGVGFDDNPSFEKCDAQFERLSVRIQTMDRSELVNPPKTEDLTLASLGAVLTETVSAGWWSNCLYFYQLALSMMELHLEKGSFPQSGMAFLFLGTIALSRFNMVQFTVDLAGIFLELLEKYRDPYSMARGYMIYANFVGHVQFPLGAIANQLEASVEFAAAMGDRISAILSFGLAAQLKFFASENISDLEAFCQYGCEEVPNWHLDTRGGVILIAIRQVCRALQGKTQVTDPYEVMSDEQHKASTYKSWLTAKASGDRTLMFYESIEIIPLFLYGHYERAIEIGEVCCKNSKMIWSARNTKLAQWFYALSLAAVILREQQDPRRMAEDEEKFQSRVEETIEKIDELNKGLKDWQAVNNVNYLAWSKLLDAQIAEIRGQYGDAIQQYEEALDHAAEYNFLFEEALGNYLMASVFIRHKGRRSARSTLRDSIALYRQLGATGIADLIETGHSILLHGPMRNPRTADAGVQTDFTGDAASVQYRTVEEEGLEDGEETAQAAVAALKGERMTAWRGSMQPEAGVGLPALDMIDLHAILVSSQVISSVLRVDELLKTMCDVILQTCSGSATLAALVVYEDEKQKDNSPLCVAASGDPDKGAEAHIPGIPLSGTDLVAENVILYCSRFREVVFLRDLVSDERFGNVSESWLRRNPNSKAVIAIPILHGSENPLLGVLYLEGVPGSFTDRNVTVLQLLVNQIGISYSNALAMKAVEKVSAENVSMVALQKRALAKAVEAETKARNAEAEAIRNVKLAEEAAKAKSIFLANVSHELRTPLNGVIGNSELLRDSNLNKEQLEMADSIRVSADLLLTVINDILDFSRMEADKMKLYIIAFNPEEMVREVVRAASYSNKEKTSKKNVKIVHDINLPPMLIYGDPIRLHQVLGNLIGNSLKFTEHGSITIGAKVDSETTEKATLTFWVKDTGIGISPQQLDKLFLPFSQADESTARKYGGSGLGLSICKSLIESTMKGKIRLDSEENVGTTVWFTVTFDKAKPEVMAGDTQSTSPVQMEPPRDRQPRPLPGAVENGDISSDQVPRPYIDLTHIPRNQLRICIAEDNSINAKIAMQYMHKLGYPNVDTYDNGLKAVEGLREKARQGNPYHIILMDVQMPVLDGYEATKMLRNDPIDSVRNVLVIAMTASAIQGDREKCLAAGMNDYLAKPVRGELLKRKLDTYLGASASMSFSTQRFLERRFAQRPGSPQPINPGSSSTKKDVDTPLSSPVPPPLADNTAASASTVKIGVGSAAASLREVAASNRRKQQQQQQQQQEVGQAFVLSIFVLQ

SEQ ID NO: 12959 - protein, 508 aa, Escherichia coli
ILNAILLNVLAGAALFTLARMYERRIFIPAESDALRLEEHEQFNRKIVASAPVGICILRTADGVNILSNELAHTYLNMLTHEDRQRLTQIICGQQVNFVDVLTSNNTNLQISFVHSRYRNENVAICVLVDVSSRVKMEESLQEMAQAAEQASQSKSMFLATVSHELRTPLYGIIGNLDLLQTKELPKGVDRLVTAMNNSSSLLLKIISDILDFSKIESEQLKIEPREFSPREVMNHITANYLPLVVRKQLGLYCFIEPDVPVALNGDPMRLQQVISNLLSNAIKFTDTGCIVLHVRADGDYLSIRVRDTGVGIPAKEVVRLFDPFFQVGTGVQRNFQGTGLGLAICEKLISMMDGDISVDSEPGMGSQFTVRIPLYGAQYPQKKGVEGLSGKRCWLAVRNASLCQFLETSLQRSGIVVTTYEGQEPTPEDVLITDEVVSKKWQGRAVVTFCRRHIGIPLEKAPGEWVHSVAAPHELPALLARIYLIEMESDDLDWPPESPDNQYHLNK

SEQ ID NO: 12960 - protein, 807 aa, Escherichia coli
MFRALALVLWLLIAFSSVFYIVNALHQRESEIRQEFNLSSDQAQRFIQRTSDVMKELKYIAENRLSAENGVLSPRGRETQADVPAFEPLFADSDCSAMSNTWRGSLESLAWFMRYWRDNFSAAYDLNRVFLIGSDNLCMANFGLRDMPVERDTALKALHERINKYRNAPQDDSGSNLYWISEGPRPGVGYFYALTPVYLANRLQALLGVEQTIRMENFFLPGTLPMGVTILDENGHTLISLTGPESKIKGDPRWMQERSWFGYTEGFRELVLKKNLPPSSLSIVYSVPVDKVLERIRMLILNAILLNVLAGAALFTLARMYERRIFIPAESDALRLEEHEQFNRKIVASAPVGICILRTADGVNILSNELAHTYLNMLTHEDRQRLTQIICGQQVNFVDVLTSNNTNLQISFVHSRYRNENVAICVLVDVSSRVKMEESLQEMAQAAEQASQSKSMFLATVSHELRTPLYGIIGNLDLLQTKELPKGVDRLVTAMNNSSSLLLKIISDILDFSKIESEQLKIEPREFSPREVMNHITANYLPLVVRKQLGLYCFIEPDVPVALNGDPMRLQQVISNLLSNAIKFTDTGCIVLHVRADGDYLSIRVRDTGVGIPAKEVVRLFDPFFQVGTGVQRNFQGTGLGLAICEKLISMMDGDISVDSEPGMGSQFTVRIPLYGAQYPQKKGVEGLSGKRCWLAVRNASLCQFLETSLQRSGIVVTTYEGQEPTPEDVLITDEVVSKKWQGRAVVTFCRRHIGIPLEKAPGEWVHSVAAPHELPALLARIYLIEMESDDLDWPPESPDNQYHLNK

SEQ ID NO: 12961 - protein, 949 aa, Escherichia coli
MKYLASFRTTLKASRYMFRALALVLWLLIAFSSVFYIVNALHQRESEIRQEFNLSSDQAQRFIQRTSDVMKELKYIAENRLSAENGVLSPRGRETQADVPAFEPLFADSDCSAMSNTWRGSLESLAWFMRYWRDNFSAAYDLNRVFLIGSDNLCMANFGLRDMPVERDTALKALHERINKYRNAPQDDSGSNLYWISEGPRPGVGYFYALTPVYLANRLQALLGVEQTIRMENFFLPGTLPMGVTILDENGHTLISLTGPESKIKGDPRWMQERSWFGYTEGFRELVLKKNLPPSSLSIVYSVPVDKVLERIRMLILNAILLNVLAGAALFTLARMYERRIFIPAESDALRLEEHEQFNRKIVASAPVGICILRTADGVNILSNELAHTYLNMLTHEDRQRLTQIICGQQVNFVDVLTSNNTNLQISFVHSRYRNENVAICVLVDVSSRVKMEESLQEMAQAAEQASQSKSMFLATVSHELRTPLYGIIGNLDLLQTKELPKGVDRLVTAMNNSSSLLLKIISDILDFSKIESEQLKIEPREFSPREVMNHITANYLPLVVRKQLGLYCFIEPDVPVALNGDPMRLQQVISNLLSNAIKFTDTGCIVLHVRADGDYLSIRVRDTGVGIPAKEVVRLFDPFFQVGTGVQRNFQGTGLGLAICEKLISMMDGDISVDSEPGMGSQFTVRIPLYGAQYPQKKGVEGLSGKRCWLAVRNASLCQFLETSLQRSGIVVTTYEGQEPTPEDVLITDEVVSKKWQGRAVVTFCRRHIGIPLEKAPGEWVHSVAAPHELPALLARIYLIEMESDDPANALPSTDKAVSDNDDMMILVVDDHPINRRLLADQLGSLGYQCKTANDGVDALNVLSKNHIDIVLSDVNMPNMDGYRLTQRIRQLGLTLPVIGVTANALAEEKQRCLESGMDSCLSKPVTLDVIKQTLTLYAERVRKSRDS

SEQ ID NO: 12962 - protein, 933 aa, Escherichia coli
MFRALALVLWLLIAFSSVFYIVNALHQRESEIRQEFNLSSDQAQRFIQRTSDVMKELKYIAENRLSAENGVLSPRGRETQADVPAFEPLFADSDCSAMSNTWRGSLESLAWFIGYWRDNFSAAYDLNRVFLIGSDNLCMANFGLRDMPVERDTALKALHERINKYRNAPQDDSGSNLYWISEGPRPGVGYFYALTPVYLANRLQALLGVEQTIRMENFFLPGTLPMGVTILDENGHTLISLTGPESKIKGDPRWMQERSWFGYTEGFRELVLKKNLPPSSLSIVYSVPVDKVLERIRMLILNAILLNVLAGAALFTLARMYERRIFIPAESDALRLEEHEQFNRKIVASAPVGICILRTADGVNILSNELAHTYLNMLTHEDRQRLTQIICGQQVNFVDVLTSNNTNLQISFVHSRYRNENVAICVLVDVSSRVKMEESLQEMAQAAEQASQSKSMFLATVSHELRTPLYGIIGNLDLLQTKELPKGVDRLVTAMNNSSSLLLKIISDILDFSKIESEQLKIEPREFSPREVMNHITANYLPLVVRKQLGLYCFIEPDVPVALNGDPMRLQQVISNLLSNAIKFTDTGCIVLHVRADGDYLSIRVRDTGVGIPAKEVVRLFDPFFQVGTGVQRNFQGTGLGLAICEKLISMMDGDISVDSEPGMGSQFTVRIPLYGAQYPQKKGVEGLSGKRCWLAVRNASLCQFLETSLQRSGIVVTTYEGQEPTPEDVLITDEVVSKKWQGRAVVTFCRRHIGIPLEKAPGEWVHSVAAPHELPALLARIYLIEMESDDPANALPSTDKAVSDNDDMMILVVDDHPINRRLLADQLGSLGYQCKTANDGVDALNVLSKNHIDIVLSDVNMPNMDGYRLTQRIRQLGLTLPVIGVTANALAEEKQRCLESGMDSCLSKPVTLDVIKQSLTLYAERVRKSRDS

SEQ ID NO: 12963 - protein, 933 aa, Escherichia coli
MFRALALVLWLLIAFSSVFYIVNALHQRESEIRQEFNLSSDQAQRFIQRTSDVMKELKYIAENRLSAENGVLSPRGRETQADVPAFEPLFADSDCSAMSNTWRGSLESLAWFIGYWRDNFSAAYDLNRVFLIGSDNLCMANFGLRDMPVERDTALKALHERINKYRNAPQDDSGSNLYWISEGPRPGVGYFYALTPVYLANRLQALLGVEQTIRMENFFLPGTLPMGVTILDENGHTLISLTGPESKIKGDPRWMQERSWFGYTEGFRELVLKKNLPPSSLSIVYSVPVDKVLERIRMVILNAILLNVLAGAALFTLARMYERRIFIPAESDALRLEEHEQFNRKIVASAPVGICILRTADGVNILSNELAHTYLNMLTHEDRQRLTQIICGQQVNFVDVLTSNNTNLQISFVHSRYRNENVAICVLVDVSSRVKMEESLQEMAQAAEQASQSKSMFLATVSHELRTPLYGIIGNLDLLQTKELPKGVDRLVTAMNNSSSLLLKIISDILDFSKIESEQLKIEPREFSPREVMNHITANYLPLVVRKQLGLYCFIEPDVPVALNGDPMRLQQVISNLLSNAIKFTDTGCIVLHVRADGDYLSIRVRDTGVGIPAKEVVRLFDPFFQVGTGVQRNFQGTGLGLAICEKLISMMDGDISVDSEPGMGSQFTVRIPLYGAQYPQKKGVEGLSGKRCWLAVRNASLCQFLETSLQRSGIVVTTYEGQEPTPEDVLITDEVVSKKWQGRAVVTFCRRHIGIPLEEAPGEWVHSVAAPHELPALLARIYLIEMESDDPANALPSTDKAVSDNDDMMILVVDDHPINRRLLADQLGSLGYQCKTANDGVDALNVLSKNHIDIVLSDVNMPNMDGYRLTQRTRQLGLTLPVIGVTANALAEEKQRCLESGMDSCLSKPVTLDVIKQTLTVYAERVRKSRES

SEQ ID NO: 12964 - protein, 629 aa, Nostoc punctiforme
MMQTFFNYPFQSNGFIPHGHCYLWQTGLVWLHIISDATIALAYYSIPFLLIYFISKRKDVPFNGVFLLFGAFIIACGTGHLMDIWTLWYPDYWIAGGLKALTAIISIYTAFALFYLMPQALALPSPDQLEAINRILSTEIVERKRIEKELRQAEEVAQNSSQAKSEFLANMSHELRTPLNGILGYTQILQRTESLSEKGRKGLSVIYQCGSHLLTLINDVLDLSKIEARKLELYPVDFYLPAFIDSVTEICRIRAEQKVIAFNIEIDPNLPTGIHGDEKRLRQVLINLLSNAMKFTHQGSVTFKTQVINQESNANGKTNYKIRFEVVDTGTGITPEQAEKIFQPFEQVGSQKRQSEGTGLGLAISQKIVLLMGGQIKVQSEFGKGSTFWFEANLSESKDWAKVSRVVEQGTIIAYQGKRRTILIADDKWENRSVIVNLLEPVGFTVVEASNGQEAWVQSLAHKPDMIITDLVMPILDGFELIRRLRQSGAFKEIPIVASSASVFAVDQHKSIDVGADAFLPKPVEAENLLEMLRQFLQLEWIFDAKVDAIKKNSQDSSNQHNEMIHPSKDVLQELLELSQDGDIQNILELAEKLSASDEKLNMFSQQLMQLASNFQLKRLETFIEKYIN

SEQ ID NO: 12965 - protein, 736 aa, Vibrio cholerae
MVMAIRSSLKKKSILALTIYLAFFLAIVGTLSYWGLEVPFRKELKNNLALRAELLATQIREPLNNSIGVLQSLTSIGKSAADKEEQERMLRSLFSVVGGVIISGGLWPEPNLSATDPSLRYDSLFFNKATDGQVDQLSSWNNPKAGGYDRESWYLAAEREAEGLYFWSPVYVDPYTRVEMITVSTPYYRNGQFAGVATVDLSLESLIQFVAATAEQYNLGVNLKDAFGVEVVSHNFRTYDNALVSYYSFGEFNWQIEVVNANQHVDEIIFDLIINIEKGLMPILLLCVMVGYFLISHYWIRPIVLIAKKVSESREGEIIDIRYKSQDEIRHLIDTFNQKTIYLEAEKVKAQASTKAKSAFLATLSHEIRTPMNGVLGTAQILLKDELTSKQRQHLTSLYESGEHMMSLLNEILDYSKIEQGKFELDHSAFPLKSIIGSIKSIYSSLCVEKGLKFQLNSEITDGRWYYGDKARLRQIIFNLLSNAVKFTEAGFVAIGLSEESCDEENYLIIKVQDTGIGIAQESLGRIFRPFEQAESHTTRRFGGTGLGLAIVKQIAELMNGTVLVQSEVGQGSCFKVRVKLAITEPVTEDVKPTKAKTYPGLRVLIVEDNRTNIMILEAFMRNKGFECHSVMDGVQAITALQESSFDLVLMDNHMPLKDGIQATREIRQLPLPQAKILLFGCTADVFKDTRDKMLSAGADDIIAKPIAEHELDMALEQHSERLYQFHREPSLPSVE

SEQ ID NO: 12966 - protein, 933 aa, Escherichia coli K12
MFRALALVLWLLIAFSSVFYIVNALHQRESEIRQEFNLSSDQAQRFIQRTSDVMKELKYIAENRLSAENGVLSPRGRETQADVPAFEPLFADSDCSAMSNTWRGSLESLAWFMRYWRDNFSAAYDLNRVFLIGSDNLCMANFGLRDMPVERDTALKALHERINKYRNAPQDDSGSNLYWISEGPRPGVGYFYALTPVYLANRLQALLGVEQTIRMENFFLPGTLPMGVTILDENGHTLISLTGPESKIKGDPRWMQERSWFGYTEGFRELVLKKNLPPSSLSIVYSVPVDKVLERIRMLILNAILLNVLAGAALFTLARMYERRIFIPAESDALRLEEHEQFNRKIVASAPVGICILRTADGVNILSNELAHTYLNMLTHEDRQRLTQIICGQQVNFVDVLTSNNTNLQISFVHSRYRNENVAICVLVDVSSRVKMEESLQEMAQAAEQASQSKSMFLATVSHELRTPLYGIIGNLDLLQTKELPKGVDRLVTAMNNSSSLLLKIISDILDFSKIESEQLKIEPREFSPREVMNHITANYLPLVVRKQLGLYCFIEPDVPVALNGDPMRLQQVISNLLSNAIKFTDTGCIVLHVRADGDYLSIRVRDTGVGIPAKEVVRLFDPFFQVGTGVQRNFQGTGLGLAICEKLISMMDGDISVDSEPGMGSQFTVRIPLYGAQYPQKKGVEGLSGKRCWLAVRNASLCQFLETSLQRSGIVVTTYEGQEPTPEDVLITDEVVSKKWQGRAVVTFCRRHIGIPLEKAPGEWVHSVAAPHELPALLARIYLIEMESDDPANALPSTDKAVSDNDDMMILVVDDHPINRRLLADQLGSLGYQCKTANDGVDALNVLSKNHIDIVLSDVNMPNMDGYRLTQRIRQLGLTLPVIGVTANALAEEKQRCLESGMDSCLSKPVTLDVIKQTLTLYAERVRKSRDS

SEQ ID NO: 12967 - protein, 948 aa, Salmonella enterica subsp. enterica serovar Typhi
MKYLASFRTTLKVSRYLFRALALLIWLLIAFVSVFYIVNALHQRESEIRQEFNLSSDQAQRFIQRTSDVMKELKYIAENRLTAENGVMSSRARDDKMVVPDFEPLFADSDCAAMGSAWRGSLESLAWFMRYWRDNFSAAYDLNRVFLIGSDNLCMANFGLREMPVERDDALKALHERIMKYRNAPQEESGNNLFWISQGARQGVGYFYALTPVYLANRLQALLGVEQSIRMENFFTPGSLPMGVTIIDENGHSLISLTGPDGIIKAEPRWMQERSWFGYTPGFRELVLKKSLPPSSLSIVYSVPVDLVLERIRILILNAILLNVLVGAGLFTLARMYERRIFIPAESDAQRLEEHEQFNRKIVASAPVGICILRTIDGVNILSNELAHTYLNMLTHEDRQRLTQIICGQQVNFVDVLTSNNTNLQISFVHSRYRNENVAICVLVDVSTRVKMEESLQEMAQAAEQASQSKSMFLATVSHELRTPLYGIIGNLDLLQTKELPKGVDRLVTAMNNSSSLLLKIISDILDFSKIESEQLKIEPREFSPREVMNHITANYLPLVVRKQLGLYCFIEPDVPVSLNGDPMRLQQVISNLLSNAIKFTDIGCIVLHVRCDGDYLSIRVRDTGVGIPAKEVVRLFDPFFQVGTGVQRNFQGTGLGLAICEKLISMMDGDISVDSEPGMGSQFTLRIPLYGAQYPVKKSVEGLAGTCCWLAVRNTSLCQFIETSLARSGVHTQRYEGQEPAADDILIVDDALEHTWQGRAAVVFCRRHIGIPLERAPGEWVHSVASVHELPALLARIYSIELDSEALSSALPTTDKTADSNDDMMILVVDDHPINRRLLADQLGSLGYQCKTANDGVDALNVLSKNAIDIVLSDVNMPNMDGYRLTQRIRQLGLTLPVVGVTANALAEEKQRCLESGMDSCLSKPVTLDALKQTLAVYAERVRKTRA

SEQ ID NO: 12968 - protein, 856 aa, Cytophaga hutchinsonii
MNLSIRTLNIIFSISLLLLASAFIYSYLNIQGLRSANHWVNHTNKVIISLESIYSDIKNAESGVRGYALTKDASYLEQQDQSRTNIKNQLILLDSLLADNPEQHIYIDTLQKTVNDRFFLFNGLINLTNNNADQAEVLPLMQKGKASTEHIYNLVKKMKNNEGILLLQRNEKAEALDKTTPITIVFSGIFGFMVLVISYYFILADLKQRRKIANEVKIKNTLLEYAQQITQMGTFEYNVFTNTLFWSNEMYNIFELDRSVIPEINFIDSLIKEESEITHNRRKKNFQPGASYSDELKIRTVNGNEKVLISNGYVVNEENGLVVHGAIIDITPLKKAELTAREQQELMRVAKEKAESASQFKTRFLSNMSHEIRTPINAILGFTAILSKQELTEQQKKLLKNISISGELLLKLIGNILDISKIEEGKVIIESKSFHLKESIRSVLSPFQHSASEKGLQFHLIIDKSIPDYLLGDFPRISQVLVNLIGNALKFTSHGNITVSVLLTKKQDGLSFVEFVINDTGIGIQANKQDEIFESFTQANESISVKYGGSGLGLSIVQEVVHLMGGNIQVQSPAHYNERGKGYGSKFFFTLPFKLGEKGADPQAKKTAVQPFPRVLHILVADDNEMNRTLATYTLQSLGCTFEIVENGLQAIQKAAANTYDIILMDMQMPVCDGLQATRQIRLNKNTTPIVGLTANVFQEDINRCLDAGMDGHLGKPYTEEDLYHIIDKWVFKNEKNIAASVPSFSNYEFIEKLSKNDPVIFREMLEMFLNQNAQLLKIIHTAINAEDLETLSFNVHQYKSCARMLNIEKQISLIKQIEEKIEARVSLETIRTDIMQLIETGALVSKEIEQKLLIV

SEQ ID NO: 12969 - protein, 948 aa, Salmonella typhimurium LT2
MKYLASFRTTLKVSRYLFRALALLIWLLIAFVSVFYIVNALHQRESEIRQEFNLSSDQAQRFIQRTSDVMKELKYIAENRLTAENGVMSSRARDDKMVVPDFEPLFADSDCAAMGSAWRGSLESLAWFMRYWRDNFSAAYDLNRVFLIGSDNLCMANFGLREMPVERDDALKALHERIMKYRNAPQEESGNNLFWISQGARQGVGYFYALTPVYLANRLQALLGVEQSIRMENFFTPGSLPMGVTIIDENGHSLISLTGPDGIIKAEPRWMQERSWFGYTPGFRELVLKKSLPPSSLSIVYSVPVDLVLERIRILILNAILLNVLVGAGLFTLARMYERRIFIPAESDAQRLEEHEQFNRKIVASAPVGICILRTIDGVNILSNELAHTYLNMLTHEDRQRLTQIICGQQVNFVDVLTSNNTNLQISFVHSRYRNENVAICVLVDVSTRVKMEESLQEMAQAAEQASQSKSMFLATVSHELRTPLYGIIGNLDLLQTKELPKGVERLVTAMNNSSSLLLKIISDILDFSKIESEQLKIEPREFSPREVMNHITANYLPLVVRKQLGLYCFIEPDVPVSLNGDPMRLQQVISNLLSNAIKFTDIGCIVLHVRCDGDYLSIRVRDTGVGIPAKEVVRLFDPFFQVGTGVQRNFQGTGLGLAICEKLISMMDGDISVDSEPGMGSQFTLRIPLYGAQYPVKKSVEGLAGTCCWLAVRNTSLCQFIETSLARSGVHTQRYEGQEPAADDILIVDDALEHTWQGRAAVVFCRRHIGIPLERAPGEWVHSVASVHELPALLARIYSIELDSEALSSALPTTDKTADSNDDMMILVVDDHPINRRLLADQLGSLGYQCKTANDGVDALNVLSKNAIDIVLSDVNMPNMDGYRLTQRIRQLGLTLPVVGVTANALAEEKQRCLESGMDSCLSKPVTLDVLKQTLAVYAERVRKTRA

SEQ ID NO: 12970 - protein, 211 aa, Fritillaria liliacea
PAFAPVPVARDEPAAKPAKAKAPKEKKASVAKKPALHPTYLEMISEAIASLKERTGSSQYAIAKFVEDKHKSHLPANFKKLLLVQLRKLTAAGKLTKVKNSYKISAKPTPAAKPKSAAVKPKSTASKLKSAAKKVKKAAVKPKPKSAAVKPKAPAVNMKSKPAALKPNTVTKSKTVALKGKTAGRPAKAAKTSVKAAPGKKAAPVALKKAK

SEQ ID NO: 12971 - protein, 214 aa, Fritillaria liliacea
PAFAPVPVARDEPVAKPAKVTKAKAPKEKKASIAKKPALHPTYLEMISEAIASLKERTGSSQYAIAKFVEDKHKSHLPANFKKLLLVQLRKLTAAGKLTKVKNSYKISAKPTAAVKPRSAAVKPKSAVAKLKSAAKKVKKAAVKPKPKSAAVKPKAPAVKPKSKPAALKPNTVTKSKTVALKGKTAGRPAKAAKTSVKAAPGKKAAPVALKKAK

SEQ ID NO: 12972 - protein, 214 aa, Fritillaria liliacea
PAFAPVPVARDEPVAKPAKVTKAKAPKEKKASIAKKPALHPTYLEMISEAIASLKERTGSSQYAIAKFVEDKHKSHLPANFKKLLLVQLRKLTAAGKLTKVKNSYKISAKPTAAVKPRSAAVKPKSAVAKLKSAVKKVKKAAVKPKPKSAAVKPKAPAVKPKSKPAALKPNTVTKSKTVALKGKTAGRPAKAAKTSVKAAPGKKAAPVALKKAK

SEQ ID NO: 12973 - protein, 211 aa, Fritillaria liliacea
  unsure (1)..(211): unsure at all Xaa locations
PAFAPVPVARDEPAAKPAKAKAPKEKKASVAKKPALHPTYLEMISEAIASLKERTGSSQYAIAKFVEDKHKSHLPANFKKLLLVQLRKLTAAGKLTKVKNSYKISAKPTPAAKPKSAAVKPKSTXSKLKSAAKKVKKAAVKPKPKSAAVKPKAPAVNMKSKPAALKPNTVTKSKTVALKGKTAGRPAKAAKTSVKAAPGKKAAPVALKKAK

SEQ ID NO: 12974 - protein, 214 aa, Fritillaria liliacea
PAFAPVPVARDEPVAKPAKVTKAKAPKEKKASIAKKPALHPTYLEMISGAIASLKERTGSSQYAIAKFVEDKHKSHLPANFKKLLLVQLRKLTAAGKLTKVKTSYKISAKPTAAVKPRSAAVKPKSAVAKLKSAAKKVKKAAVKPKPKSAAVKPKAPAVKPKSKPAALKPNTVTKSKTVALKGKTAGRPAKAAKTSVKAAPGKKAAPVALKKAK

SEQ ID NO: 12975 - protein, 199 aa, Fritillaria liliacea
PAFAPVPVARDEPAAKPAKAKAPKEKKASVAKKPALHPTYLEMISEAIASLKERTGSSQYAIAKFVEDKHKSHLPANFKKLLLVQLRKLTAAGKLTKVKNSYKISAKPTPAAKPKSAAVKPKSTASKLKSAAKKVKKAAVKPKPKSAAVKPKAPAVNMKSKPAALKPNTVTKSKTVALKGKTAGRPAKAAKTSVKAAPG

SEQ ID NO: 12976 - protein, 170 aa, Fritillaria liliacea
EMISEAIASLKERTGSSQYAIAKFVEDKHKSHLPANFKKLLLVQLRKLTAAGKLTKVKNSYKISAKPTPAAKPKSAAVKPKSTASKLKSAAKKVKKAAVKPKPKSAAVKPKAPAVNMKSKPAALKPNTVTKSKTVALKGKTAGRPAKAAKTSVKAAPGKKAAPVALKKAK

SEQ ID NO: 12977 - protein, 170 aa, Fritillaria liliacea
EMISEAIASLKERTGSSQYAIAKFVEDKHKSHLPANFKKLLLVQLRKLTAAGKLTKVKNSYKISAKPTPAAKPKSAAVKPKSTASKLKSAAKKVKKAAVKPKPKSAAVNPKAPAVNMKSKPAALKPNTVTKSKTVALKGKTAGRPAKAAKTSVKAAPGKKAAPVALKKAK

SEQ ID NO: 12978 - protein, 158 aa, Fritillaria liliacea
EMISEAIASLKERTGSSQYAIAKFVEDKHKSHLPANFKKLLLVQLRKLTAAGKLTKVKNSYKISAKPTAAVKPRSAAVKPKSAVAKLKSAAKKVKKAAVKPKPKSAAVKPKAPAVKPKSKPAALKPNTVTKSKTVALKGKTAGRPAKAAKTSVKAAPG

SEQ ID NO: 12979 - protein, 158 aa, Fritillaria liliacea
EMISEAIASLKERTGSSQYAIAKFVEDKHKSHLPANFKKLLLVQLRKLTAAGKLTKVKNSYKISAKPTPAAKPKSAAVKPKSTASKLKSAAKKVKKAAVKPKPKSAAVKPKAPAVNMKSKPAALKPNTVTKSKTVALKGKTAGRPAKAAKTSVKAAPG

SEQ ID NO: 12980 - protein, 170 aa, Fritillaria liliacea
EMISEAIASLKERTGSSQYAIAKFVEDKHKSHLPANFKKLLLVQLRKLTAAGKLTKVKNSYKISAKPTPAAKPKSAAVKPKSTASKLKSAAKKVKKAAVKPKPKSAAVKLKAPAVNMKSKPAALKPNTVTKSKTVALKGKTAGRPAKAAKTSVKAAPGKKVAPVALKKAK

SEQ ID NO: 12981 - protein, 158 aa, Fritillaria liliacea
EMISEAIAPLKERTGSSQYAIAKFVEDKHKSHLPANFKKLLLVQLRKLTAAGKLTKVKNSYKISAKPTPAAKPKSAAVKPKSTASKLKSAAKKVKKAAVKPKPKSAAVKPKAPAVNMKSKPAALKPNTVAKSKTVALKGKTAGRPAKAAKTSVKAAPG

SEQ ID NO: 12982 - protein, 249 aa, Anopheles gambiae str. PEST
MADSAATEVPAAAAAAPAATAKSPKKPKAAAGPKKPKQPAAHPPVNEMLLAAVKALNERNGSSLQAIKKYVAANYKADVTKLATFLKKALKTAVANGKLVQTKGTGASGSFKLSAAAKKPAVEKKKKAAAPKKSASAADKKKKTAAKKPAGEKKAAAKKTTKKADGAAAKKPKAAAAKKPKAADGAKKAAKKPAAPKQKSTKPSKAAAAKPKAPKPKKAAAPAKKAAAPKKAAAPKKAAAPKKAAAAKK

SEQ ID NO: 12983 - protein, 249 aa, Anopheles gambiae str. PEST
MADSAATEVPAAAAAAPAATAKSPKKPKAAAGPKKPKQPAAHPPVNEMLLAAVKALNERNGSSLQAIKKYVAANYKADVTKLATFLKKALKTAVANGKLVQTKGTGASGSFKLSAAAKKPAVEKKKKAAAPKKSASAADKKKKTAAKKPAGEKKAAAKKTTKKADGAAAKKPKAAAAKKPKAADGAKKAAKKPAAPKQKSTKPSKAAAAKPKAPKPKKAAAPAKKAAAPKKAAAPKKAAGPKKAAAAKK

SEQ ID NO: 12984 - protein, 295 aa, Pisum sativum subsp. abyssinicum
SEEPTTVAVEQPIVEEPEAVDTLPPVVNESEEPTAKPKKAPKEPKAKKAPAKPRTHPTYEEMVKEAIVALKERNGSSQYAIAKFIEEKHKQLPSNFKKLLLVQIKKLVASGKLVKVKASYKLPAKSSAAKPAKKPAAAKSKAKPKAKAATKSKAKPAAKAKPAAKAKPAAKAKPAAKAKPAAKAKPAAKAKPAAKPVKTAAAKPAAKAKPAAKPKAAAKAKPAAKAKPAAKAKPAAKPAKAARTSTRTSPAAAAAAPKPAAKKAAPVKKTPVKAAAKAKTAKSPAKKAAAKRGKK

SEQ ID NO: 12985 - protein, 232 aa, Chlamydomonas reinhardtii
MADVAAPAPAKSPAAKKAAKAKKVATHPPYITMVSEAILALKERDGSSIPAIKKWIDAKYGKDIHDKNYPKTLSLTLKTFVKSGKLIKVKNSFKLSEEVKKAAKKAATPKKAAAPKKEGAVKKTKAPKKEGEKKPKSAKKAEKKPKKEGEKKKAAKPAKAEKKPKAAKPAKKTPTKKAAAKPKAEKKPKAAAKPKAEKKPKAAKPKAEKKAKAAKPAAKKSAEKKPKAAKKA

SEQ ID NO: 12986 - protein, 241 aa, Volvox carteri
MASDAPEVKAPKAKTQKKPKTAPTHPPYIQMVTDAILSLKERDGSSLPALKKFIEAKYGKDIHDKKFPKTLSLALKTFVKNGKLVKVKNSYKLSDAQKSKAKAAAKPKAAPKKAAAPKKAAAPKKAKAPKKEGEKKAVKPKSEKKAAKPKTEKKPKAAKKPKAAKKPAAKKPAAKKPAAKKATPKKAAAPKKAAAPKKAKAATPKKAKAATPKKAKAAAKPKAAAKPKAAAKPKAKAAKKA

SEQ ID NO: 12987 - protein, 316 aa, Myxococcus xanthus
MPEGSASLQLAVGDRVVYPNQGVCRVSAIDVKEVAGQKLTFVTMRREEDGAVVMVPEGKVLAIGVRKVASAEDVEAIFTFLRSDSDKADLDWKQRARTNLDRMTQGGIMGLAEVVKGLQVLSELRPLPTKERELYDNARHLLVTEVAAALGTAEVNAEDAIDIVLFPPGRERPKRTAAEFQREEGDLDLDSDLLGLDSDLDLPSDEEPSEPSEEESSEEGESEEAASSEESAPKKRGRPPKAKTEAPEGAEPPAPKKRGRPPKPKPEATAEGAEPPAPKKRGRPPKPKPPEVEGAAPAAPKKRGRPPKVKPPEGES

SEQ ID NO: 12988 - protein, 202 aa, Chaetopterus variopedatus
MADSAPATAAPATPTKAKKAAAPKKPKVPAAHPPVAQMVNAAIAALKDRKGSSLAAIKKYIAANYKCNIDRCTPFIRKYLKQAVAAGKLVQTKGTGAAGSFKLSAAAKAEKPKKPAKKPAAKKATKPKAAAKPKKPKTPKKKAAAKPKKEKKEKKAKTPKKAKAAVKKTPKKAAAKPKTVKKAAKPKTPKKAAKKPAAKKSK

SEQ ID NO: 12989 - protein, 177 aa, Oikopleura dioica
MPASPKKTTKVVAKKADRPSYNVMVAAAIVALKERSGSSRQAIEKYIIANYDGVDKESHFLKKALKSGVEKGTLVQTKGIGASGSFKIKKAEKPAAKPKVEKLAAKKPAAKKPAAKKPAAKKPAAKKTTATKKPVAKKVVKKTVVKKTATKKAASPKKKVVAKKPVVKKAAKKTGKK

SEQ ID NO: 12990 - protein, 204 aa, Arabidopsis thaliana
MAFDLHHGSASDTHSSELPSFSLPPYPQMIMEAIESLNDKNGCNKTTIAKHIESTQQTLPPSHTTLLSYHLNQMKKTGQLIMVKNNYMKPDPDAPPKRGRGRPPKQKTQAESDAAAAAVVAATVVSTDPPRSRGRPPKPKDPSEPPQEKVITGSGRPRGRPPKRPRTDSETVAAPEPAAQATGERRGRGRPPKVKPTVVAPVGC

SEQ ID NO: 12991 - protein, 204 aa, Arabidopsis thaliana
MAFDLHHGSASDTHSSELPSFSLPPYPQMIMEAIESLNDKNGCNKTTIAKHIESTQQTLPPSHMTLLSYHLNQMKKTGQLIMVKNNYMKPDPDAPPKRGRGRPPKQKTQAESDAAAAAVVAATVVSTDPPRSRGRPPKPKDPSEPPQEKVITGSGRPRGRPPKRPRTDSETVAAPEPAAQATGERRGRGRPPKVKPTVVAPVGC

SEQ ID NO: 12992 - protein, 176 aa, Arabidopsis thaliana
MIMEAIESLNDKNGCNKTTIAKHIESTQQTLPPSHMTLLSYHLNQMKKTGQLIMVKNNYMKPDPDAPPKRGRGRPPKQKTQAESDAAAAAVVAATVVSTDPPRSRGRPPKPKDPSEPPQEKVITGSGRPRGRPPKRPRTDSETVAAPEPAAQATGERRGRGRPPKVKPTVVAPVGC

SEQ ID NO: 12993 - protein, 203 aa, Brassica napus
MATETELEPQQSPMAEEQQPSPFSLPPYPQMIMEAIEASNDANGCNKTAIAKHIESTQTSLPPSHMTLLSYHLNQMKQSGQIAMVKNNYMKPDPQAPPKRGRGRPPKAKPQGESSHVAVPAPSVSSPRPRGRPPKAKGPSSEVETKVAAPSGSGRPRGRPPKKQKTESEAVKADVEPAEAPAGERRGRGRPPKAKPAMVPVGC

SEQ ID NO: 12994 - protein, 178 aa, Canavalia gladiata
MATEEVNKPPSLPPYPEMVMKALDALNEPSGSNKSAISKYIESTYGELPDGHATLLAHHLNKMKDSGELVFLKNNYMKPDPNAPPKRGRGRPPKPKVPLPPGTVLSPPRPRGRPPKDPNAPPKSPKTKVSTGSGRPRGRPKKIARSPAAVAPTPVPSGRPRGRPPKVKPQLTEVSVES

SEQ ID NO: 12995 - protein, 178 aa, Canavalia gladiata
MATEEVNKPPSLPPYTEMITKALDSLNEPNGSNKSAISKYIESTCGELPDGHSTLLAHHLNKMKESGELVFLKNNYMKPDPTSPPKRGRGRPPKPKVPLPPGTVLSPPRPRGRPPKDPNAPTKSPKAKVSTGSGRPRGRPKKIARSAAVVAPTPGPSGRPRGRPPKVKPQLTEVSVES

SEQ ID NO: 12996 - protein, 188 aa, Cicer arietinum
MSTTAAQPKSKKTASTKKPLSHPTYAEMITEAIVSLKERTGSSQHAITKFIEEKHKDLSPTFRKLILLHLKKSVAAGKLVKVKGSFKLAPAKSSVAKPKAATAPAATKKAKAVTKPAAKAATKPKAKAVAKPKSSGKAQSCNEAENGAKPKAKTVKTTPVKKAVAKTTKKVPVKKPKSVKTPVKKAKK

SEQ ID NO: 12997 - protein, 176 aa, Glycine max
MATEEVNKPQSLPPYPEMIVKALEALNEPNGSNKSAISKYIETTYGELPDATVLGSHLNKMKDSGELSFKQNNYMKADPNAPPKRGRGRPPKPKAPLPPGTVVSPPRPRGRPPKDPNAPPKSPKAKATPGSGRPRGRPKKVPRSPAVAAPTAVSSGRPRGRPPKVKPQLTEVSVES

SEQ ID NO: 12998 - protein, 176 aa, Glycine max; identical to SEQ ID NO: 12997

SEQ ID NO: 12999 - protein, 176 aa, Glycine max
MATEEVNKPQSLPPYPEMIVKTLEALNEPNGSNKSAISKYIETTYGELPDATVLGSHLNKMKDSGELSFKQNNYMKADPNAPPKRGRGRPPKPKTPLPPGTVVSPPRPRGRPPKDPNAPPKSPKAKATPGSGRPRGRPKKVPRSPAVAAPTAVSSGRPRGRPPKVKPQLTEVSVES

SEQ ID NO: 13000 - protein, 176 aa, Glycine max; identical to SEQ ID NO: 12999

SEQ ID NO: 13001 - protein, 176 aa, Glycine max
MATEEVNKPQSLPPYPEMIVKALEALNEADGSNKSAISKYIETTYGELPDETVLGSHLNKMKESGELAFKQNNYMKADPNAPPKRGRGRPPKPKVPLPPGTVVSPPRPRGRPPKDPNAPPKSPKAKATPATGRPRGRPKKVARSPAVPSPTAVSTGRPRGRPPKVKPQLTEVSVES

SEQ ID NO: 13002 - protein, 177 aa, Glycine max
  unsure (1)..(177): unsure at all Xaa locations
MATEVINKPPSLPPYPEMIREAIEALNEENGSNKSSISKYIESTYGGLPQAHKVLLNVHLAKMRESGVLVFWKNNYTKRDPNAPPRRGRGRPPKPKEPLPPGTVLSPPRPRGRPSKDPNDLQKPLKASVVGSGRPRGRPRKMALSQASKAKPVTSNGRPRGRPPKVKAVFTEISVXL

SEQ ID NO: 13003 - protein, 177 aa, Glycine max
  unsure (1)..(177): unsure at all Xaa locations
MATEEVNKLQSLPPYPEMIVKALEALNEADGSSKSAISKYIETTYGELPDETVLGSHLNKMKESGELAFKQNNYMKADPNAPPKRGRGRPPKPKVPLPPGTVVXSPPRPRGRPPKDPNAPPKSPKAKATPATGRPRGRPKKVARSPAVPSPTAVSTGRPRGRPPKVKPQLTEVSVES

SEQ ID NO: 13004 - protein, 152 aa, Glycine max
ALNEADGSNKSAISKYIETTYGELPDETVLGSHLNKMKESGELAFKQNNYMKADPNAPPKRGRGRPPKPKVPLPPGTVVSPPRPRGRPPKDPNAPPKSPKAKATPATGRPRGRPKKVARSPAVPSPTAVSTGRPRGRPPKVKPQLTEVSVES

SEQ ID NO: 13005 - protein, 298 aa, Lathyrus aphaca
SEEPTTVAVEQPIVEEPEAVDTVPPVVNEAEEPTAKPKKAPKAPKEPKAKKAPAKPRTHPTYEEMVKEAIVALKEKSGSSQYAIAKFIEEKHKQLPSNFKKLLLVQLKKLVASGKLVKVKASYKLPAKSTAAKPAKKPAGSKPKAKPKAKAATKSKAKPAAKAKPAAKAKPAAKAKPAAKAKPAAKAKPAAKAKPAAKPAKAVAAKPAAKAKPAAKPKAAAKAKPAAKAKPAAKAKPAAKPAKAARTSTRTSPAAKAPAPKVAVKKAAPVKKTPVKAAAKAKTAKSPAKKAAAKRGKK

SEQ ID NO: 13006 - protein, 295 aa, Lathyrus sativus
SEEPTTVAVEQPIVEEPAAVDTLPPVVNEAEEPAAKPKKAPKEPKAKKAPAKPRTHPTYEEMVKEAIVALKEKSGSSQYAIAKFIEEKHKQLPSNFKKLLLVQIKKLVASGKLVKVKASYKLPAKSTAAKPAKKPAASKSKAKPKAKAATKSKAKPAAKAKPAAKAKPAAKAKPAAKAKPAAKAKPAAKAKPAAKPAKTVAAKPAAKAKPAAKPKAAAKAKPAAKAKPAAKAKPAAKPAKAARTSTRTSPAAKAAAPKPAVKKAAPVKKTPVKAAAKAKTAKSPAKKAAAKRGKK

SEQ ID NO: 13007 - protein, 306 aa, Lathyrus sativus
SEEPTTVAVEQPIVEEPAAVEQPIVEEPAAVDTLPPVVNEAEEPAAKPKKAPKEPKAKKAPAKPRTHPTYEEMVKEAIVALKEKSGSSQYAIAKFIEEKHKQLPSNFKKLLLVQIKKLVASGKLVKVKASYKLPAKSTAAKPAKKPAASKSKAKPKAKAATKSKAKPAAKAKPAAKAKPAAKAKPAAKAKPAAKAKPAAKAKPAAKPAKTVAAKPAAKAKPAAKPKAAAKAKPAAKAKPAAKAKPAAKPAKAARTSTRTSPAAKAAAPKPAVKKAAPVKKTPVKAAAKAKTAKSPAKKAAAKRGKK

SEQ ID NO: 13008 - protein, 293 aa, Lens culinaris
SEEPTTVAVEQPIAEEQAAVDTLPPVVNESEEPTAKPKKAAKEPKAKKAPAKPRTHPTYEEMVKDAIVSLKEKNGSSQYAIAKFIEEKQKQLPSNFKKLLLVQIKKLVASGKLVKVKASYKLPAKSSAPKPAKKPAASKPKAKPKAKPAAKSKAKPAAKAKPAAKAKPAAKAKPAAKAKPAAKAKPAAKAKPAAKTAAVAKAKPAAKAKPAAKAKPAAKAKPAAKAKPAAKAKPAAKPAKAARTSTRTSPGTRAAAPKPAAKKAAPAKKAPVKAAAKTAKSPAKKAAAKRGKK

SEQ ID NO: 13009 - protein, 293 aa, Lens culinaris
SEEPTTVAVEQPIVEEQAAVDTLPPVVNESEEPTAKPKKAAKEPKAKKAPAKPRTHPTYEEMVKDAIVSLKEKNGSSQYAIAKFIEEKQKQLPSNFKKLLLVQIKKLVASGKLVKVKASYKLPAKSSAPKPAKKPAASKPKAKPKAKPAAKSKAKPAAKAKPAAKAKPAAKAKPAAKAKPAAKSMPAAKAKPAAKTAAVAKAKPAAKAKPAAKAKPAAKAKPAAKAKPAAKAKPAAKPAKAARTSTRTSPGTRAAAPKPAAKKAAPAKKAPVKAAAKTAKSPAKKAAAKRGKK

SEQ ID NO: 13010 - protein, 281 aa, Lens culinaris
SEEPTTVAVEQPIVEEQAAVDTLPPVVNESEEPTAKPKKAAKEPKAKKAPAKPRTHPTYEEMVKDAIVSLKEKNGSSQYAIAKFIEEKQKQLPSNFKKLLLVQIKKLVASGKLVKVKASYKLPAKSSAPKPAKKPAASKPKAKPKAKPAAKSKAKPAAKAKPAAKAKPAAKAKPAAKAKPAAKAKPAAKAKPAAKAKPAAKAKPAAKAKPAAKAKPAAKAKPAAKPAKAARTSTRTSPGTRAAAPKPAAKKAAPAKKAPVKAAAKTAKSPAKKAAAKRGKK

SEQ ID NO: 13011 - protein, 197 aa, Pisum sativum
MATREVNKPLSLPPYPELILKAIDSLNEPNGSNKSAISNYIESVYGELPEGHSVVLLYHLNQMKESGDLVFAKNNYLRPDPNAPPKRGRGRPPKAKDPLASPPSGAVSTPRPRGRPPKDPNAPPKTPKASGSGRPRGRPKKIARTEDVDASTPSPVSVAAVNVDVVVPCVAAVPTSSGRPRGRPPKVKPQLTQVSVS

SEQ ID NO: 13012 - protein, 229 aa, Euphorbia esula
MADTPVSAPVVPEVTERKSKRGTKAAAVKVPKEKKKVIAAKKPKSKGTSSHPSFFEMISDAISTLKERTGSSQYAINKFVEDKHKQLPSNFRKLLLFHLKKLVASGKLVKVKNSFKLPSARAAPAPALAKKPTIPKPKVAAKPKTAKIGAKPKAKAKVAAKTKATTKTVAKKIPAAKPKAKTAGKPKTVAAKPAKVAKTAAVASPGKKKAVPVKKVKTVKSPAGKRTRK

SEQ ID NO: 13013 - protein, 302 aa, Apium graveolens
MAAVEDPIVPMEGVEEEVPVTVTEAPEEAAPPAEDPAPKKGKELKPKKAAAPRKPRSAPAHPPYLEMITDAITSLKERTGSSQQAIQKFLEAKHKDLPAVFRKMLSNNLKKLVAAGKLVKVKASYKLPSAKSSAPAKKKPAAAPAKKKAAAAPAKKKTAAAPKKKAAAAPKKKAPVAKAKPAAKPKAKAVVKPKAKAAVKPKAKPAAKPAAKAKPAAKAKPAAKPKAKAKPAKVARTSTRTTPGKKAPAKPAAAPVKKATPVKKATATPVKKAAPVKKAAPAKGKSVKTPVKRTSARKAGKK

SEQ ID NO: 13014 - protein, 287 aa, Lycopersicon esculentum
MATEEPVIVNEVVEEQAAPETVKDEANPPAKSGKAKKETKAKKPAAPRKRSATPTHPPYFEMIKDAIVTLKERTGSSQHAITKFIEEKQKSLPSNFKKLLLTQLKKFVASEKLVKVKNSYKLPSGSKPAAAAVPAKKKPAAAKSKPAAKPKAAVKPKAKPAAKAKPAAKAKPAAKAKPAAKAKPAAKAKPAAKAKPVAKAKPKAAAAAKPKAAVKPKAAPAKTKAAVKPNLKAKTTTAKVAKTATRTTPSRKAAPKATPAKKEPVKKAPAKNVKSPAKKATPKRGRK

SEQ ID NO: 13015 - protein, 271 aa, Lycopersicon esculentum
MATEEPVVAIEPVNEPMVVAEPATEENPPAETDEPKKEKEIKAKKSSAPRKRNPPTHPSYFEMIKEAIVTLKDKTGSSQYAITKFIEDKQKNLPSNFRKMLLAQLKKLVASGKLVKVKSSYKLPAPKAAAPALAKKKSIAKPKAAQAKKATKAKPKPKPKVAAPKAKTATKSKAKPKPVVAAKAKPAAKPKAVVAKPKAAVKPKAPVKAKAAVKPKAANEKPAKVARTSTRSTPSRKAAPKPAVKKAPVKSVKSKTVKSPAKKASARKAKK

SEQ ID NO: 13016 - protein, 279 aa, Nicotiana tabacum
MATEEPVVATEIVTEPAVVEAEPAKEDNPPAVESDEPKKEKETKAKKPAAPRKRNPPTHPSYFEMIKDAIVTLKDKTGSSQHAITKFIEDKQKNLPSNFRKLLLVQLKKLVASGKLVKVKSSYKLPAARSAAPKAAATAPVKKKPAAKPKATKAKPKPKPKTVAPKAKTATKPKAKPKPKAKLVAKAKPAVKPKAAAVAKPKAAEKPKTPVKTKAAAKPKEKPAKVARTATRSTPSRKAAPKPVAKKAPVKKAAPAAKSVKAKTAKSPAKRASARKGRK

SEQ ID NO: 13017 - protein, 282 aa, Nicotiana tabacum
MATEEPLVVTEIVTEAVVVEAEPAKEENSPAAEPDEPKKEKEIEAKKPAAPRKRNPPTHPSYFEMIKDAIVTLKDKTGSSQHAITKFIEDKQKNLPSNFRKLLLVQLKKLVASGKLVKVKSSYKLPAARSAAPKAAATAPAKKKPGAKPKATKAKPKPKPKTVAPKAKTATKPKAKQRQVKAKLVAKAKPAVKPKAAAVAMPKAAEKPKTPVKTKAAAKPKAKEKPAKVARTATRSTPSRKAAPKPVAKKVPVKKAAPAAKSVKAKTAKSPAKRASARKGRK

SEQ ID NO: 13018 - protein, 546 aa, Nicotiana tabacum
MDPSMDLPTTTESPTFNSAQVVNHAPTPTPPQPPPPAPSFSPTHPPYAEMITAAITALKERDGSSRIAIAKYIDRVYTNLPPNHSALLTHHLKRLKNSGYLAMVKHSYMLAGPPGSAPPPPSADADSNGVGTDVSSLSKRKPGRPPKLKPEAQPHAQPQVQAQVQFQDQFQAQLQAQLQAQLQAQQQQAAQFQPQFQLIQQQPQYLPQQQFQPDPLLQPQQQFQTQPQTQAYATPEGHNYAGLGAESVFVSLGLADGPVGVQNPAVGLAPAPGAEESTAKRRPGRPRKDGSTVVKPVEPKLPDQSGGSKRRPGRPPKSVTVNAAPGSAMGSGRRGRPRKNSVPGRRGRPRKNAAVAAANGGANVANIPSVGANVTNVPAGGVPGAITTPKRRGRPPRSSGPPAATVGVTDVPIAAAFDTENLPNAVGGGGVTNNGALPPLGKRRGRPPKSYGAAAAAPTVKRPRKLSGKPLGRPRKNVTSPAVSDPKLVVAYEELKGKLEHMQSRIKEAANALKPCLNAESPAIALAALQELEELAAAGGNPVQQN

SEQ ID NO: 13019 - protein, 170 aa, Avena sativa
MSTEEVAKSLLLPPYPEMILEAIESLNDKVGSNKSAISKYIEGKYGDMPPTHGSLLTAHLARMKETGELLFLKNNYFRTDAPDAPPKRGRGRPPKVKDPNAPPPPPKPSSGRPRGRPAKAKDPEAEAANPPKKPKAAPAPTPAPAADGSTPAKRGRGRPPKVRPAEPTAA

SEQ ID NO: 13020 - protein, 189 aa, Triticum aestivum
MANDGSPKSGDIPPYPEMIIAAIEALGDKNGSSKSAISSYIEEKYEGLPSAHASLLTANLASMKEAGKLAFVKNNYLKADAPSATPAKRGRGRPPKDPNAPPKPKAAPKDPNTPKRGRGRPPKAKDPMADAVKEAVAKATTGMPRGRGRPPGPSSAKKAKVATEAASPAPAAGSAPAKRGRGRPRKVAV

SEQ ID NO: 13021 - protein, 189 aa, Triticum aestivum
MANGGSPKSGDIPPYPEMILAAIEALGDKNGSSKSAISSYIEEKYEGLPSAHASLLTANLASMKEAGKLAFAKNNYLKADAPSATPAKRGRGRPPKDPNAPPKPKAAPKDPNTPKRGRGRPPKAKDSMADAVKEAVAKATTGMPRGRGRPPGPSSAKKAKVTTEAASPAPASGSAPAKRGRGRPRKVAA

SEQ ID NO: 13022 - protein, 164 aa, Triticum aestivum
MADEQVAKPASLPPYPEMILAAIAALNDKNGSNKSAISKHIEGKYGDLPKEHAALLTAHLVRMKESGQLLFLKNNYFRTDAPDAPPKRGRGRPRKPIDPNAPPKRGKPASPRPRGRPLKPKDPEAEAANPPKKAKTAPAPAVDGSAKRGRGRPPKARPAEPAAA

SEQ ID NO: 13023 - protein, 151 aa, Triticum aestivum
  unsure (1)..(151): unsure at all Xaa locations
IRSIPIQLSPLARSRRRPPLGKKNSPPPSPFPLPVPIAALNDKNGSNKSAISKYIEGKYGDLPKEHGALLTAHLVRMKESGQLFFLKNNYFRTDAPDAPPKRGRGRPRKPIDPNAPPPPPKSASPRPRGRPAKPKDPEAEAANPPKKAKNX

SEQ ID NO: 13024 - protein, 149 aa, Triticum aestivum
MANDGSPKSGDIPPYPEMILAAIEALGDKNGSSKSAISSYIEEKYEGLPSAHASLLTANLASMKEAGKLAFVKNNYLKADAPSATPAKRGREGSPCVLDVPPELMVAPTDSLSPTRGRGRPQKKKARGRCEACVLMPSGLCISLWLRRW

SEQ ID NO: 13025 - protein, 231 aa, Lilium longiflorum
MATTVAIETPAFTPVAVDPPAAKPAKAKKAKVPKEKKASVAKPALHPTYLEMISEAIASLKERTGSSQIAISKFVENKHKAHLPANFKKLLLVQLRKLTAAGKLTKVKNSYKISAKPTTATKPKKTSAKSTTVAKPKSAAAKPKSTAAKVKKAAVKPKPKSAAVKPKAEPAAPKPKAVSKPKAVAPKPKTAGPAKKAKTSAKPSPSKKAAPVASKKAKPVKKATAPKKAKK

SEQ ID NO: 13026 - protein, 213 aa, Ascobolus immersus
MAAATASAAATPAKKAAPKKPAAAPEHPSYKEMLTKAITELKERNGSSRQAIKKFIQSNFKVKDNFDVQFNQALRRGVEKGEFVQPKGPSGTVKLAKKEKAAAAPKKPAAKKAAAPKKDAAPKKAAAPKKAAAPKSAAAKKKLLDAKKAAAKKPAAKKAAAPKKVAAPVEKPAPVKTTTTKSGRVTKASTTSKPAPKKKAAAPKKAATPAKSS

SEQ ID NO: 13027 - protein, 236 aa, Fritillaria agrestis
MSAAVAIETPAFAPVPVARDEPVAKPGKVTKAKAPKEKKASVAKKPALHPTYLEMISEAIASLKERTGSSQYAIAKFVEDKHKSHLPANFKKLLLVQLQKLTAAGKLTKVKNSYKISAKPTPAAKPKSAAVKPKSAATKLKSAAKKVKKAAVKPKPKSAAVKPKAPAVNMKSKPAALKPNTVTKSKTVALKGKTAGRPAKAAKTSVKAAPGKKAAPVALKKAKAGKKVTTPKKAKK

SEQ ID NO: 13028 - protein, 245 aa, Pinus pinaster
MASTDPPADTVPAEPVANEDVKAAEEKPVKAPKEKKVKTPKEKKPKAAKGSKPPPAHPPYFQMISEAIVALKERGGSSPYAIAKFLSEKYKSDLPPVFKKKLNVQLRNLTNSGKLTKVKGSYKLAEKEKKADAPKPKTEKKPAAKKPKAPAAKAPAKAPSKASKPAAPKKAEKPVAPKKAAAPKKAAKPAAPKAAAPKAKKPAAAAKPAAPKRSSTRTAAKPAAPKAAKKPTPKKAGGAAKKAKK

SEQ ID NO: 13029 - protein, 669 aa, Arabidopsis thaliana
MEQGGGGGGNEVVEEASPISSRPPANNLEELMRFSAAADDGGLGGGGGGGGGGSASSSSGNRWPREETLALLRIRSDMDSTFRDATLKAPLWEHVSRKLLELGYKRSSKKCKEKFENVQKYYKRTKETRGGRHDGKAYKFFSQLEALNTTPPSSSLDVTPLSVANPILMPSSSSSPFPVFSQPQPQTQTQPPQTHNVSFTPTPPPLPLPSMGPIFTGVTFSSHSSSTASGMGSDDDDDDMDVDQANIAGSSSRKRKRGNRGGGGKMMELFEGLVRQVMQKQAAMQRSFLEALEKREQERLDREEAWKRQEMARLAREHEVMSQERAASASRDAAIISLIQKITGHTIQLPPSLSSQPPPPYQPPPAVTKRVAEPPLSTAQSQSQQPIMAIPQQQILPPPPPSHPHAHQPEQKQQQQPQQEMVMSSEQSSLPSSSRWPKAEILALINLRSGMEPRYQDNVPKGLLWEEISTSMKRMGYNRNAKRCKEKWENINKYYKKVKESNKKRPQDAKTCPYFHRLDLLYRNKVLGSGGGSSTSGLPQDQKQSPVTAMKPPQEGLVNVQQTHGSASTEEEEPIEESPQGTEKPEDLVMRELIQQQQQLQQQESMIGEYEKIEESHNYNNMEEEEDQEMDEEELDEDEKSAAFEIAFQSPANRGGNGHTEPPFLTMVQ

SEQ ID NO: 13030 - protein, 594 aa, Arabidopsis thaliana
MEQGGGGGGNEVVEEASPISSRPPANNLEELMRFSAAADDGGLGGGGGGGGGGSASSSSGNRWPREETLALLRIRSDMDSTFRDATLKAPLWEHVSRKLLELGYKRSSKKCKEKFENVQKYYKRTKETRGGRHDGKAYKFFSQLEALNTTPPSSSLDVTPLSVANPILMPSSSSSPFPVFSQPQPQTQTQPPQTHNVSFTPTPPPLPLPSMGPIFTGVTFSSHSSSTASGMGSDDDDDDMDVDQANIAGSSSRKRKRGNRGGGGKMMELFEGLVRQVMQKQAAMQRSFLEALEKREQERLDREEAWKRQEMARLAREHEVMSQERAASASRDAAIISLIQKITGHTIQLPPSLSSQPPPPYQPPPAVTKRVAEPPLSTAQSQSQQPIMAIPQQQILPPPPPSHPHAHQPEQKQQQQPQQEMVMSSEQSSLPSSSRWPKAEILALINLRSGMEPRYQDNVPKGLLWEEISTSMKRMGYNRNAKRCKEKWENINKYYKKVKESNKKRPQDAKTCPYFHRLDLLYRNKVLGSGGGSSTSGLPQDQKQSPVTAMKPPQEGLVNVQQTHGSASTEEEEPIEESPQGTEKVQTLLFLVKM

SEQ ID NO: 13031 - protein, 594 aa, Arabidopsis thaliana
MEQGGGGGGNEVVEEASPISSRPPANNLEELMRFSAAADDGGLGGGGGGGGGGSASSSSGNRWPREETLVLLRIRSDMDSTFRDATLKAPLWEHVSRKLLELGYKRSSKKCKEKFENVQKYYKRTKETRGGRHDGKAYKFFSQLEALNTTPPSSSLDVTPLSVANPILMPSSSSSPFPVFSQPQPQTQTQPPQTHNVSFTPTPPPLPLPSMGPIFTGVTFSSHSSSTASGMGSDDDDDDMDVDQANIAGSSSRKRKRGNRGGGGKMMELFEGLVRQVMQKQAAMQRSFLEALEKREQERLDREEAWKRQEMARLAREHEVMSQERAASASRDAAIISLIQKITGHTIQLPPSLSSQPPPPYQPPPAVTKRVAEPPLSTAQSQSQQPIMAIPQQQILPPPPPSHPHAHQPEQKQQQQPQQEMVMSSEQSSLPSSSRWPKAEILALINLRSGMEPRYQDNVPKGLLWEEISTSMKRMGYNRNAKRCKEKWENINKYYKKVKESNKKRPQDAKTCPYFHRLDLLYRNKVLGSGGGSSTSGLPQDQKQSPVTAMKPPQEGLVNVQQTHGSASTEEEEPIEESPQGTEKVQTLLFLVKM

SEQ ID NO: 13032 - protein, 730 aa, Arabidopsis thaliana
MEQGGGGGGNEVVEEASPISSRPPANNLEELMRFSAAADDGGLGGGGGGGGGGSASSSSGNRWPREETLALLRIRSDMDSTFRDATLKAPLWEHVSRSWFMSFWDVFDFENPKTLFTSKKKKKKSDRTVTIKIFQLITTTKNKIKLENLNYFHVFGNRKLLELGYKRSSKKCKEKFENVQKYYKRTKETRGGRHDGKAYKFFSQLEALNTTPPSSSLDVTPLSVANPILMPSSSSSPFPVFSQPQPQTQTQPPQTHNVSFTPTPPPLPLPSMGPIFTGVTFSSHSSSTASGMGSDDDDDDMDVDQANIAGSSSRKRKRGNRGGGGKMMELFEGLVRQVMQKQAAMQRSFLEALEKREQERLDREEAWKRQEMARLAREHEVMSQERAASASRDAAIISLIQKITGHTIQLPPSLSSQPPPPYQPPPAVTKRVAEPPLSTAQSQSQQPIMAIPQQQILPPPPPSHPHAHQPEQKQQQQPQQEMVMSSEQSSLPSSSRWPKAEILALINLRSGMEPRYQDNVPKGLLWEEISTSMKRMGYNRNAKRCKEKWENINKYYKKVKESNKKRPQDAKTCPYFHRLDLLYRNKVLGSGGGSSTSGLPQDQKQSPVTAMKPPQEGLVNVQQTHGSASTEEEEPIEESPQGTEKPEDLVMRELIQQQQQLQQQESMIGEYEKIEESHNYNNMEEEEDQEMDEEELDEDEKSAAFEIAFQSPANRGGNGHTEPPFLTMVQ

SEQ ID NO: 13033 - protein, 603 aa, Arabidopsis thaliana
MMQLGGGTPTTTAAATTVTTATAPPPQSNNNDSAATEAAAAAVGAFEVSEEMHDRGFGGNRWPRQETLALLKIRSDMGIAFRDASVKGPLWEEVSRKMAEHGYIRNAKKCKEKFENVYKYHKRTKEGRTGKSEGKTYRFFDQLEALESQSTTSLHHHQQQTPLRPQQNNNNNNNNNNNSSIFSTPPPVTTVMPTLPSSSIPPYTQQINVPSFPNISGDFLSDNSTSSSSSYSTSSDMEMGGGTATTRKKRKRKWKVFFERLMKQVVDKQEELQRKFLEAVEKREHERLVREESWRVQEIARINREHEILAQERSMSAAKDAAVMAFLQKLSEKQPNQPQPQPQPQQVRPSMQLNNNNQQQPPQRSPPPQPPAPLPQPIQAVVSTLDTTKTDNGGDQNMTPAASASSSRWPKVEIEALIKLRTNLDSKYQENGPKGPLWEEISAGMRRLGFNRNSKRCKEKWENINKYFKKVKESNKKRPEDSKTCPYFHQLDALYRERNKFHSNNNIAASSSSSGLVKPDNSVPLMVQPEQQWPPAVTTATTTPAAAQPDQQSQPSEQNFDDEEGTDEEYDDEDEEEENEEEEGGEFELVPSNNNNNKTTNNL

SEQ ID NO: 13034 - protein, 575 aa, Arabidopsis thaliana
MSGNSEGLLESSGGGVGGSVEEEKDMKMEETGEGAGSGGNRWPRPETLALLRIRSEMDKAFRDSTLKAPLWEEISRKMMELGYKRSSKKCKEKFENVYKYHKRTKEGRTGKSEGKTYRFFEELEAFETLSSYQPEPESQPAKSSAVITNAPATSSLIPWISSSNPSTEKSSSPLKHHHQVSVQPITTNPTFLAKQPSSTTPFPFYSSNNTTTVSQPPISNDLMNNVSSLNLFSSSTSSSTASDEEEDHHQVKSSRKKRKYWKGLFTKLTKELMEKQEKMQKRFLETLEYREKERISREEAWRVQEIGRINREHETLIHERSNAAAKDAAIISFLHKISGGQPQQPQQHNHKPSQRKQYQSDHSITFESKEPRAVLLDTTIKMGNYDNNHSVSPSSSRWPKTEVEALIRIRKNLEANYQENGTKGPLWEEISAGMRRLGYNRSAKRCKEKWENINKYFKKVKESNKKRPLDSKTCPYFHQLEALYNERNKSGAMPLPLPLMVTPQRQLLLSQETQTEFETDQREKVGDKEDEEEGESEEDEYDEEEEGEGDNETSEFEIVLNKTSSPMDINNNLFT

SEQ ID NO: 13035 - protein, 575 aa, Arabidopsis thaliana
MSGNSEGLLESSGGGVGGSVEEEKDMKMEETGEGAGSGGNRWPRPETLALLRIRSEMDKAFRDSTLKAPLWEEISRKMMELGYKRSSKKCKEKFENVYKYHKRTKEGRTGKSEGKTYRFFEELEAFETLSSYQPEPESQPAKSSAVITNAPATSSLIPWISSSNPSTEKSSSPLKHHHQVSVQPITTNPTFLAKQPSSTTPFPFYSSNNTTTVSQPPISNDLMNNVSSLNLFSSSTSSSTASDEEEDHHQVKSSRKKRKYWKGLFTKLTKELMEKQEKMQKRFLETLEYREKERISREEAWRVQEIGRINREHETLIHERSNAAAKDAAIISFLHKISGGQPQHPQQHNHKPSQRKQYQSDHSITFESKEPRAVLLDTTIKMGNYDNNHSVSPSSSRWPKTEVEALIRIRKNLEANYQENGTKGPLWEEISAGMRRLGYNRSAKRCKEKWENINKYFKKVKESNKKRPLDSKTCPYFHQLEALYNERNKSGAMPLPLPLMVTPQRLLLLSQETLTEFETDQREKVGDKEDEEEGESEEDEYDEEEEGEGDNETSEFEIVLNKTSSPMDINNNLFT

SEQ ID NO: 13036 - protein, 548 aa, Arabidopsis thaliana
MEETGEGAGSGGNRWPRPETLALLRIRSEMDKAFRDSTLKAPLWEEISRKMMELGYKRSSKKCKEKFENVYKYHKRTKEGRTGKSEGKTYRFFEELEAFETLSSYQPEPESQPAKSSAVITNAPATSSLIPWISSSNPSTEKSSSPLKHHHQVSVQPITTNPTFLAKQPSSTTPFPFYSSNNTTTVSQPPISNDLMNNVSSLNLFSSSTSSSTASDEEEDHHQVKSSRKKRKYWKGLFTKLTKELMEKQEKMQKRFLETLEYREKERISREEAWRVQEIGRINREHETLIHERSNAAAKDAAIISFLHKISGGQPQQPQQHNHKPSQRKQYQSDHSITFESKEPRAVLLDTTIKMGNYDNNHSVSPSSSRWPKTEVEALIRIRKNLEANYQENGTKGPLWEEISAGMRRLGYNRSAKRCKEKWENINKYFKKVKESNKKRPLDSKTCPYFHQLEALYNERNKSGAMPLPLPLMVTPQRQLLLSQETQTEFETDQREKVGDKEDEEEGESEEDEYDEEEEGEGDNETSEFEIVLNKTSSPMDINNNLFT

SEQ ID NO: 13037 - protein, 433 aa, Arabidopsis thaliana
EETLVLLRIRSDMDSTFRDATLKAPLWEHVSRKLLELGYKRSSKKCKEKFENVQKYYKRTKETRGGRHDGKAYKFFSQLEALNTTPPSSSLDVTPLSVANPILMPSSSSSPFPVFSQPQPQTQTQPPQTHNVSFTPTPPPLPLPSMGPIFTGVTFSSHSSSTASGMGSDDDDDDMDVDQANIAGSSSRKRKRGNRGGGGKMMELFEGLVRQVMQKQAAMQRSFLEALEKREQERLDREEAWKRQEMARLAREHEVMSQERAASASRDAAIISLIQKITGHTIQLPPSLSSQPPPPYQPPPAVTKRVAEPPLSTAQSQSQQPIMAIPQQQILPPPPPSHPHAHQPEQKQQQQPQQEMVMSSEQSSLPSSSRWPKAEILALINLRSGMEPRYQDNVPKGLLWEEISTSMKRMGYNRNAKRCKEKWENINKYYKKV

SEQ ID NO: 13038 - protein, 474 aa, Arabidopsis thaliana
MEQGGGGGGNEVVEEASPISSRPPANNLEELMRFSAAADDGGLGGGGGGGGGGSASSSSGNRWPREETLVLLRIRSDMDSTFRDATLKAPLWEHVSRKLLELGYKRSSKKCKEKFENVQKYYKRTKETRGGRHDGKAYKFFSQLEALNTTPPSSSLDVTPLSVANPILMPSSSSSPFPVFSQPQPQTQTQPPQTHNVSFTPTPPPLPLPSMGPIFTGVTFSSHSSSTASGMGSDDDDDDMDVDQANIAGSSSRKRKRGNRGGGGKMMELFEGLVRQVMQKQAAMQRSFLEALEKREQERLDREEAWKRQEMARLAREHEVMSQERAASASRDAAIISLIQKITGHTIQLPPSLSSQPPPPYQPPPAVTKRVAEPPLSTAQSQSQQPIMAIPQQQILPPPPPSHPHAHQPEQKQQQQPQQEMVMSSEQSSLPSSSRWPKAEILALINLRSGMEPRYQDNVPKGLLWEEISCKKLL

SEQ ID NO: 13039 - protein, 338 aa, Arabidopsis thaliana
MEQGGGGGGNEVVEEASPISSRPPANNLEELMRFSAAADDGGLGGGGGGGGGGSASSSSGNRWPREETLALLRIRSDMDSTFRDATLKAPLWEHVSRKLLELGYKRSSKKCKEKFENVQKYYKRTKETRGGRHDGKAYKFFSQLEALNTTPPSHPHAHQPEQKQQQQPQQEMVMSSEQSSLPSSSRWPKAEILALINLRSGMEPRYQDNVPKGLLWEEISTSMKRMGYNRNAKRCKEKWENINKYYKKVKESNKKRPQDAKTCPYFHRLDLLYRNKVLGSGGGSSTSGLPQDQKQSPVTAMKPPQEGLVNVQQTHGSASTEEEEPIEESPQGTEKKTL

SEQ ID NO: 13040 - protein, 500 aa, Glycine max
  unsure (1)..(500): unsure at all Xaa locations
MDVAFRDASVKGPLWEEVSRKLAELGYHRNAKKCKEKFENVYKYHKRTKEGRSGKSEGKTYRFFDQLQALENNPSIHAMQSPTPTPSKPPQTTALLATPVSIVVTTTTTPSTLVSNNATVPSTNTPPLPQAILNITPPSTLNITTPSFPSSNPTTYFPTQTPNPTTNNNPPNTITPASFPNFSADLLSNSSFSSTSSEETTTMGGGGMRRKRKRKWKDFFERLMKEVIEKQEGLQRRFLEAIEKREQERVVREEAWRMQEMQRINREREILAQERSIAAAKDAAVMTFLQKIAEHQQQEINLEPALNNNNNSITVVPQQPVPQTTTTPTPTPQQAQTTIVPEAPQPQQQIVVSNVENNKADNNGENLTMGASSSRWPKMEVQALINLRTSLETKYQENGPKGPLWEEISALMRKMGYNRNAKRCKKKCXNINKYFKKVKESSKKRPEDSKTCPYFHQLEALYREKNKREGQMKPDSMMAPLMVQPEQQWPPQTHVXCRQK

SEQ ID NO: 13041 - protein, 620 aa, Glycine max
  unsure (1)..(620): unsure at all Xaa locations
ARGCNCIGTQHLYSYMQLGDSSVLEISSHTQPEMAVTAAVLPPEEVAHDXAATTVVVVVVNSGEGNEGNNKMSFGGNRWPRQETLALLKIRSDMDTVFRDSSLKGPLWEEVSRKLAELGYQRSAKKCKEKFENVYKYNKRTKENKSGKSHGKAYKFFDQLQALENQFTVSYPPKPQPTSTLTTTNTLTSDHGNKVISYTTTTTTTTTTSTTDPRDSSPPQTNNNNNSVTHSLPNMNTSFSTTTASTSSSTASDEDLEERYRRKRKWKDYFRRLTRKVLLKQEEMQKKFLEAMDQRERERVAQQDNWRMQEMARINREHEILVQERSTAAAKDATVIALLQKMYGQQNPTQQVEVEPPPQQKQTIPQSLPPILMPNNNFEVKKINNGHSVTSTTTGTVATATTTTTSPVNSSSSRWPKAEVHALIRIRTSLETKYQENGPKAPLWEDISIAMQRLGYNRSAKRCKEKWENINKYFKRVRESSKERREDSKTCPYFHELEALYKEKSKSSKNPFGIFQNMKPNEMMLMMTEPLMVQPEQQWRPPPQSLEEGVGMENASEEYHENEENGGDDDDNIEEDGDSVEDAGPNPCEIATNNXTCFSGHRXSRQDKEFSEWRKIYVCA

SEQ ID NO: 13042 - protein, 640 aa, Glycine max
  unsure (1)..(640): unsure at all Xaa locations
MQLGDSSVLEISSHTQPEMAVTAAVSEEVAHDGSDNSGDGGGGEMIGMDLDASEGNEGNNKMSFGGNRWPRQETLALLKIRSDMDTVFRDSSLKGPLWEEVSRKLAELGYQRSAKKCKEKFENVYKYNKRTKDNKSGKSHGKTYKFFDQLQALENQFTTXSLTRQNHNLLLLWQQQTHXHCQQGQVIMVTKPPPXTTTTSTTNPRDSSRPQTNNNNNSVTHSLPNMNTSFSTTTASTSSSTASDEDLEERYRRKRKWKDYFRRLTRKVLLKQEEMQKKFLEAMDQRERERVAQQDNWRMQEMARINREHEILVQERSTAAAKDATVIALLQKMYGQQNPTQQVEVEPPPQQKQTIPQSLPPILMPNNNFEVKKINNGHSVTSTTTGTVATAATTTTTSPVNSSSSRWPKAEVHALIRIRTSLETKYQENGPKAPLWEDISIAMQRLGYNRSAKRCKEKWENINKYFKRVRESSKERREDSKTCPYFHELEALYKEKSKSSKNPFGIFQNMKPNEMMLMMTEPLMVQPEQQWRPPPQSLEEGVGMENASEEYHENEENGGDDDDNIEEDGDSVEDEXEQTRVRLRQIIKRASVDTVEVDKIRNFLNGEKLSVWLNLLLLISEKIVLYFFYHFFRLQIVIIS

SEQ ID NO: 13043 - protein, 593 aa, Glycine max
  unsure (1)..(593): unsure at all Xaa locations
GSCNCIGKQHLYSYMQLGDSSVLEISSHTEPEMAVVSPPEEAPHXXAATTVVVVVVANSGEGNEGNKMSFGGNRWPRQETLALLKIRLDMDAVFRDSSLKGPLWEEVSRKLAELGYQRSAKKCKEKFENVYKYNKRTKENKSGKSHGKAYKFFDQLQALENQFTVSYPPKPQPTSTLTTTNTLTSDHGNKVISYTNTTTTTTTTSTTDPRDSSPPQTNNNNTHSLPNMNAPFLTTTTSTSSSTASDEDLEERYRRKRKWKDYFRRLTRKVLLKQEEMQKKFLEAMDQRERERVAQQDNWRMQEMARINREHEILVQERSTASAKDAAVIALLQKMYGQQNPTQHVEVEPPQQQKQTMPQSQPPILMPNNNFEVKKMNNGHSATSTTTTTTSPVSSSSSSRWPKAEVHDLIRLRTSLEIKYQENGPKAXPLWEDISIAMQRLGYNRSAKRCKEKWENINKYFKKVRESSKERREDSKTCPYFHELEALYKEKGKSQNPFGMFQNMTPNETMMMXXPLMVQPEQQWRPPPQSLEEGIGKDNASEEYNQEKEEEVEENGGDXXDDNIEEDGDSVEDAGPNPCEIATNNXTCFSGHR

SEQ ID NO: 13044 - protein, 410 aa, Glycine max
  unsure (1)..(410): unsure at all Xaa locations
MLGDSAVLGAGGGGGGGRGGGVESGASADAVAATVTVTHDVATTTGGGGGRRKRKRKWKDFFERLMKEVIEKQEELQKKFLEAIEKREDDRIAREEAWRVQEMKRINREREILAQERSIAAAKDAAVMSFLQKIAEQQNXSVKYRPTSTSYNNHNLIQPQPPLQQQVTQPTPPVVVTQPVVLPVVSQVTNMEIVXSRYNSNNNNNGENXXLAPSSSRWPKVEVQALIKLRTSMDEKYQENGPKGPLWEEISASMKKLGYNRNAKRCKEKWENINKYFKKVKESNKRRPEDSKTCPYFHQLDALYRQKHRGEESPAAVEAKPESAVAPLMVQPEQQWPPQQQQQDRDITMEDMENEDDEYEEEREGEEELEDDEDEEDEEGGGGGGNYEIVANKTSGGGGASAASVGASTE

SEQ ID NO: 13045 - protein, 455 aa, Glycine max
  unsure (1)..(455): unsure at all Xaa locations
MPLPLPPVSNNNNNTTVPSTTSLPMPQSILNITPPSTLNITIPSFPPSNPTTYFPTQTPNPTSNNNNNPPSTITPPSFPNFPADLLSNSSSSSTSSEETPTTEARGRKRKRKWKDFFERLMKEVIEKQEELQRRFLEAIEKREQERVVREEAWRMQEMQRINREREILAQERSIAAAKDAAVMTFLQKIAEHQQQETINLEPALNNNSITVVPQQPVPQATPTSTPTPQQAQTTTVPEAPQQQQQIVVSNVEINKADNNGENLMMEASSSRWPKVEVQALINLRTSLETKYQESGPKGPLWEEISALMRKMGYNRNAKRCKEKWENINKYFKKVKESNKKRPEDSKTCPYFHQLEALYREKNKGEGQMKPESMMAPLMVQPEQQWPPQTTLVVPPEVTMGDTQXMTPMDRQYHEENEDDEDDKEIGDEDEDEDDEGGDNYEIVASKPATADASGE

SEQ ID NO: 13046 - protein, 355 aa, Glycine max
EETTTMGGGGMRRKRKRKWKDFFERLMKEVIEKQEGLQRRFLEAIEKREQERVVREEAWRMQEMQRINREREILAQERSIAAAKDAAVMTFLQKIAEHQQQEINLEPALNNNNNSITVVPQQPVPQTTTTPTPTPQQAQTTIVPEAPQPQQQIVVSNVENNKADNNGENLTMGASSSRWPKMEVQALINLRTSLETKYQENGPKGPLWEEISALMRKMGYNRNAKRCKEKWENINKYFKKVKESSKKRPEDSKTCPYFHQLEALYREKNKREGQMKPDSMMAPLMVQPEQQWPPQTHVVPPEVTMGDAQNDPMDRRHEEVEEDEADKEIGDEDEDEDDEGSDNYEIVASKPASGE

SEQ ID NO: 13047 - protein, 397 aa, Glycine max
  unsure (1)..(397): unsure at all Xaa locations
RGSSPSVATCPYYPPLSDLFSFFPEASVRSSCFLFSAAASSSSAPSDGALGAMLRKDTSWKDDSRGLPRRGXAKRDKRGKEKWENIDKSEKQEVARQEAWRIQDMARINREHELLVQERSTAAAKNAAVIAFLQQLSGQHQNSTATQASHNXXPQQPPPQKVTIVQPPPQQAPQPQAPLVLSNSDNMEIQKMNNGHSVVTATSSSRWPKTEVHALIRLRTSLETKYQENGPKAPLWEDISAGMLRLGYNRSAKRCKEKWENINKYFKKVKESNKQRREDSKTCPYFNELEALYKEKSKTQNPFGASFHNMKPHEMMEPLMVQPEQQWRPPSXVRTRCSEGDNNNERKEREEEEEDEEEEEEEEEDENEEGDLESVEDEGGNRYEIATNKLSSVDTVE

SEQ ID NO: 13048 - protein, 288 aa, Glycine max
  unsure (1)..(288): unsure at all Xaa locations
RLERTTKPXGQALTNINLVQPQPQLQPQPPVQQQVTPPNIVPAPMQQPLPVIVTQPVVLPVVSQVTNMEIMKADNNNNNNNNNNCENFLAPSSSRWPKVEVQALIKLRTSMDEKYQENGPKGPLWEEISASMKKLGYNRNAKRCKEKWENINKYFKKVKESNKRRPEDSKTCPYFHQLDALYRQKHRGEESPAAVEAKPESAVAPLMVQPEQQWPPQQQQQDRDITMEDMENEDDEYEEEREGEEELEDDEDEEDEEGGGGGGNYEIVANKTSGGGGASAASVGASTE

SEQ ID NO: 13049 - protein, 291 aa, Glycine max
  unsure (1)..(291): unsure at all Xaa locations
QERSIAAAKDAAVMSFLQKIAEQQNXSVKRXPTSTSYNHNXQLQPQPPVQQQVTPPNIVPAPMQQPLPVIVTQPVVLPVVSQVTNMEIMKADNNNNNNNMPPSSSRWPKVEVQALIKLRTSMDEKYQENGPKGPLWEEISASMKKLGYNRNAKRCKEKWENINKDFRKGKEXSSMRRPEDSMTCPYFHQLDALYRQKHKAEERAKAESAGAPLMVQPEQQWPPQQXXDDRDITMEDMENEXXDEYEEEREGEEEEEEDEEDEEGGGGNYEIVANKTSGGGGAAASVGASTE

SEQ ID NO: 13050 - protein, 269 aa, Glycine max
  unsure (1)..(269): unsure at all Xaa locations
GSSGSSGSSGSRKNLKEFTTLFALFIFLIFLLLSAAVSNCCGAVLAKRERERDPKETMLGDSALLGGGGGEGGACGGGSNNSGDDERGRIEEGERSFGGNRWPRQETLALLRIRSDMDVAFRDASVKGPLWEEVSRKMAELGYHRSSKKCKEKFENVYKYHKRTKEGRSGKQDGKTYRFFDQLQALENHSPTPHSPNPSSKPLQSAPSRVVATTTASSMSLPIPTPTTTVPMQPILSNTXTXXSSVPNITVPSTTIXPITIPQPILTTP

SEQ ID NO: 13051 - protein, 162 aa, Glycine max
MLGDSAVLGTGGGGSGDAVAAAPPAASGGAHDGGVDGGDGGGGGSNSGDDRVEEGERSFGGNRWPKQETLALLKIRSDMDVAFRDASVKGPLWEEVSRKLAELGYHRNAKKCKEKFENVYKYHKRTKEGRSGKSEGKTYRFFDQLQALENNPAIHGKQSPTP

SEQ ID NO: 13052 - protein, 256 aa, Glycine max
APPVVGGGAAASGGAHEGGANGGGGSNSGDDRVEEGDKSFGGNRWPRQETLALLKIRSDMDVAFRDASVKGPLWEEVSRKLAELGYHRNAKKCKEKFENVYKYHKRTKEGRSGKSEGKTYRFFDQLQALENNPSIHAMQSPTPTPSKPPQTTALLATPVSIVVTTTTTPSTLVSNNATVPSTNTPPLPQAILNITPPSTLNITTPSFPSSNPTTYFPTQTPNPTTNNNPPNTITPASFPNFSADLLSNSSFSSTSS

SEQ ID NO: 13053 - protein, 284 aa, Glycine max
  unsure (1)..(284): unsure at all Xaa locations
MELIGDTTTVMETSSGEAVAAHDGGEVIMMDANSGEEENNNKGEEGEEEEEGDNKINSNNNSFGGNRWPRQETLALLKIRSDMDAVFRDSSLKGPLWEEVARKLSELGYHRSAKKCKEKFENVYKYHKRTKESRSGKHEGKTYKFFDQLQALENQFTVSYSPKPQPTPTRPSDTTAISYVTTTVPSTNPTTPSPQPPTHATTTTPGTSPTVATNPKNPPQSNNNSNIPNYSLLNMNNLFSTTSTSSSTASDPQQKLVPISFNNHXSTTSTTTTTTSSTTTDDVK

SEQ ID NO: 13054 - protein, 682 aa, Pisum sativum
MLGDSAVLGTGGGGGSSGDAAGASASGGAYHDGGDTVGGGGGSISGDDERGGGSRNEEGGDRNFGGNRWPRQETIALLKIRSEMDVTFRDASVKGPLWDEVSRKMADLGYHRNSKKCKEKFENVYKYHKRTKEGRGGKSEGKTYRFFDQLQALENNPSIQSPRTQTQLNISTLPPTTPSSSSSLPISTTSTTLTTTNPLLLPPSLLNSTSPITIHTPSITTTAAATTVPLTTTITPPIPMSLPQVQNTVSQSNPTYFPPIPSTTTATNPTNTNNPLPQITITPPPSSFPNTSTDFFSNSSSSSTSSEETMTMEGGGNRRKRKRKWKDFFERLMKEVVEKQEELHKRFLEAIEKRELERGAREEAWRLQEMQRINREREILAQERSIAAAKDAAVMAFLQKIADQQQEQQQNIVVPVALNTNIVPQQQQALQEPTSTPTPAPASTPTPAPTPVPAPALTSAPAPMQTPTPMPLPMPIQSQQQVQTPTSAVQVQQTAPVISQALPLAQPQQAQVQVQQQATNMDIVKSDNNGESLMQASSSRWPKTEVEALIRLRTTLDMKYQENGPKGPLWEEISGLMKNLGYNRNAKRCKEKWENINKYFKKVKESNKKRPEDSKTCPYFHQLDALYREKNKGEGSSASRPEGTMMAPLMVRPEQQWPPQPQPPPVTRADVTMEDAENDRPP

SEQ ID NO: 13055 - protein, 725 aa, Oryza sativa (japonica cultivar-group)
MPPFSAAGGEGAPSPISSRPPPPEQAAAAAAEEQLNGSSLEHDGVLGGEEGDRGGSSAGNRWPRQETLALLKIRSEMDAAFREAALKGPLWEEVSRKLAEMGYKRSAKKCREKFENVDKYYKRTKDGRAGRGDGKTYRFFTELEALHGAAAATARPPPVSLAPAPVAVAPPATPAGLSALRVHASPPPPPVKQHAAPPPPVMDVAACVMTMDDVSFSSGSDTEETAEEGGKRKRRGGGGIGGGGGGGKAMRMFEGLMRQVMERQEAMQQRLLEAIERRDQERMIREEAWRRQEVARLAREQDALAQERAIAASRDAAVISFIQRVTGQSIAAVPPPPLQPTPVASAAPPPPPQHHHQQTPPPIQVQPHHIMPMTPQPQLQPPQPQSKEANTVVRAAPPPQEQHDTAASGGGGGASSSRWPKAEVHALIQLRTELETRYQDSGPKGPLWEDISAGMRRLGYSRSSKRCKEKWENINKYFKKVKESNKKRPEDSKTCPYYHQLDALYRTKAANAAAAASASPAPATTTVLAPVPLSQTPPHVDHGGSNGNGNGWASANNGGGGSSSGGMQTKASNNGTATAGGLPVVSVAGGNGNGNGVAATTDNKGSKQVPVAKETAGQRQPQPLAMNHNYGNDRMADDMDSDSMDDDDDDDEFDDDENDDDIGGGKMQVQYETSSHFQRPQLQNQNVVVGRPNASGGGGGGAPTTPAGPPPPAATSGTSFLACVQ

SEQ ID NO: 13056 - protein, 392 aa, Nicotiana tabacum
QSPSKYYLFLSYMSDKLPTSINLYEEQESMDQHSNHMIIEVATPNAHLQQPQQILLPGISGGDTTSSGGEDNNNNVKLAPKKRAETWVQEETRALISLRRELDSLFNTSKSNKHLWDQISLKMREKGFDRSPTMCTDKWRNLLKEFKKAKHNQEPNGSAKMSYHKEIEEILKARNKNYKNPTLKVDTFMQFSQKGLDDTSITFGPVEENGRPTLNLERQLDHDGHPLAITAADAVTASGSPWNWRETPGNGEQSNSAEGRVISVKWGDYTKRIGIDGTADAIKQAIKSAFRLRTERAFWLEDEQNIVRALDRDMPLGSYSLHVDEGLTIKVCMYEEADHSSVHTEDKTFYTANDFRDFLSHRGWTCLREYNGYRHVDMLDELCPGAVYRGVN

SEQ ID NO: 13057 - protein, 380 aa, Nicotiana tabacum
MSDKLPTSINLYEEQESMDQHSNHMIIEVATPNAHLQQPQQILLPGISGGDTTSSGGEDNNNNVKLAPKKRAETWVQEETRALISLRRELDSLFNTSKSNKHLWDQISLKMREKGFDRSPTMCTDKWRNLLKEFKKAKHNQEPNGSAKMSYHKEIEEILKARNKNYKNPTLKVDTFMQFSQKGLDDTSITFGPVEENGRPTLNLERQLDHDGHPLAITAADAVTASGSPWNWRETPGNGEQSNSAEGRVISVKWGDYTKRIGIDGTADAIKQAIKSAFRLRTERAFWLEDEQNIVRALDRDMPLGSYSLHVDEGLTIKVCMYEEADHSSVHTEDKTFYTANDFRDFLSHRGWTCLREYNGYRHVDMLDELCPGAVYRGVN

SEQ ID NO: 13058 - protein, 148 aa, Triticum aestivum
  unsure (1)..(148): unsure at all Xaa locations
FRXLSXFDLRKLAELGYKRSAKKCKEKFENVHKYYKRTKEGRAGRQDGKSYRFFQELEALHAATAAAQHQQQEHLPLVVSAAPPPQMHAXXSAPQPMSAMPPPPGPMQPAPISSAAPAPVVEPPHPLPVSLQGLSFPSXSXSESDDDX

SEQ ID NO: 13059 - protein, 584 aa, Zea mays
  unsure (1)..(584): unsure at all Xaa locations
FFRHFHRPAVARPXXAPVSPTPQQQLPASGAAPPLHAFPAPVSAPPPLSSIPLLTGPMQPAPISSAAPAPAPVDLPWAPATQQQGYSFSSMSDSESDDEPRDDDMTAETGGNQDRLGKRKRGDGGXAAAATRXCLSSRGSCSRSSTGRRKCSGRPWRPWRSGRRTHGXREEAWRPEAVARLNREAXEQRAQERAAAASXRDAAIIAFLQRISGQSVQPPRTAVVVPMPAPVSVHTTPPTQPYRQQQQPPPPSPPPQSKPISAAPLQQQPPQQQPKDTSQQDAGTPRSLPPASSQSLELVPVAATEHHVDSGLGGGDGGAASSSRWPKTEVHALIQLRMDLDMRYQETGPKGPLWEDISSGMRRLGYNRSSKRCKEKWENINKYYKKVKESNKKRPEDSKTCPYFHQLEAIYNRKHLSSLTTAATSSTAAAAAAPRPAYPDQLNPSRQEIEGKNINDDKRNNGGSGGGTQVPTSNGETATTTTTTPVAFDADTGMKKPEDIVRELNEHPRREFTTEDETDSDDMGDEYTDDGEEGEDDGKMQYRIQFQRPNPGGTNTAPAPAAATTAAPAVPTSAPTSTFLAMVQ

SEQ ID NO: 13060 - protein, 528 aa, Zea mays
  unsure (1)..(528): unsure at all Xaa locations
XKLAGLGYHRSAKKCKEKFENVDKYYRRTKDARAGRQDGKSYRFFSQLEALHASAPPPPPPPSGMTTVQASPHQPMEMAWTAGPTVLGPAAVAGLPDLSFSSMSESDSEYDSDDDSGAGEEGLSGGECDREMMAXSSRGXXSSSRRSKTPCSACSWRRWSGARQTHGXREEAWRRQEVARMNREREQLARERAAAASRDAALIAFLQRVGGGQGEPARLPPHGAGVVPAPPMPDCAPPSPSARXRRPXSLQQLVPAPPKAVEAGXGGSTASRWPKEEVEALIQMRNEKEEQYHDAGAKGPLWDDVAAAMRALGHDRGARRRTENXENINEDGKKVNGRNKSRREDSKPLLVVHQLDLIERLGHHSGAGDAGRRGAPCARETXGHLRRDDEAVHGQXQDSHAARVPGGTGAVRGRAHGARGGVTAPEGXPARTKRAGGNVDDTDVQHQQRFSADETDSDDEDMYMARNYTVYTEEGNDEDKMKXYKMGVQEPGAAGNVLAPPPPAAAAATAAAPTRSAAPTSSTFLAVE

SEQ ID NO: 13061 - protein, 186 aa, Zea mays
  unsure (1)..(186): unsure at all Xaa locations
LACLQHTDCPSSTSFGPLSLLISRKLADLGYKRSAKKCKEKFENVHKYYKRTKEGRTGRQDGKSYRFFDELEALHAAAPQPQPPLQKQQQQLPPASTTAPPLHAFATPVSAPPPISSMPPPTGPMQPAPISSAAPAVQVQAIVELPDQPLNLLQGFSFSSMSESESEDDDMTAETGGSQDHLGKRX

SEQ ID NO: 13062 - protein, 286 aa, Zea mays
  unsure (1)..(286): unsure at all Xaa locations
XPLVPVPPKAVEALARAGGEGGGSTQSRWPKEEAEALIQMRNEKGEKYHDAGAKGPLWEDIAAAMRGIGYSRSAKRCKEKWENINKYYKKVKESNKRRPEDSKTCPYFHQLDAMYRNKHRSGTGGRTAPRTNMASAVAVAATVQDNPSKRELEGKSSNDADNRKNDEQGNVLTSPASGDTAPGGAAKNKTAEGNVDDTDVQHQHQQRFSADETDSDDDMDMARNYTVYTEEGNNEDKMKYKMGVQERDVIGSSGNVLAPPPSPAAVAATAAAPTSSAAPTSSTFLA

SEQ ID NO: 13063 - protein, 254 aa, Zea mays
  unsure (1)..(254): unsure at all Xaa locations
XLGTSRPAGKTIRRXRRATRSGPRTPRPAHTSTSSRPSXQQKAPPQSHNRGGSSGASSNRWPREETQALIRIRSEMDATFRDATLKGPLWEDVSGKLADLGYKRSAKKCKEKFENVHKYYKRTKEGRAGRQDGKSYRFFDELEALHAAAPQPPPPLLPPPSTAPQLHALAAPVSPPPPVAGIQPPPLHAFPAPVSXAAAAPRPAYPDQLNPSRQEIEGKNINDDKRDNDSDDDXVDQVEARRCRPAMARQRRRR

SEQ ID NO: 13064 - protein, 179 aa, Zea mays
  unsure (1)..(179): unsure at all Xaa locations
LQATTVSCFHGSSFWEKKERKLADLGYKRSAKKCKEKFENVHKYYKRTKEGRAGRQDGKSYRFFEELEALHAAAPQPPPPVSPTPQQQLPASSAAPPLHAFPAPVSAPPPLSSMPLLTGPMQPAPISSAAPAPAPVELGAHQPLNLQGFSFSSMSDSESDDESEDDDMTAETGGNLQGX

SEQ ID NO: 13065 - protein, 260 aa, Zea mays
  unsure (1)..(260): unsure at all Xaa locations
SFCRKLAGLGYHRSAKKCKEKFENVDKYYRRTKDARAGRQGGKYYSFLSHLEALHASAPPLPPPPSGMTTVQAGPHQPMEXXAWTAGPTVLGPAAVAGLPDLSFSSMSESDSEYDSDDDDDDSXCGGGGPQRGRVRQGDDGHXSRGXXSSSRRSKTPCSACSWRRWSGARQTHGXREEAWRRQEVARMNREREQLARERAAAASRDAALIAFLQRVGGGQGEPARLPPHGAGVVPPPPMPDCAPPSPRRHAAAASLQQGX

SEQ ID NO: 13066 - protein, 269 aa, Zea mays
QCIISFTSPLIPLLRGAGGVARSRAAAATTALAGSRTAPQLHALAAPVSPTPQQQLPASSAAPPLHAFPAPVSAPPPLSSIPLLTGPMQPAPISSAAPAPAPVDLLGAHQPHNLQGFSFSSMSDAGAVDEPPADDTTAETGGNQDRLGKRKRGDGGGSGSNKMMSFFEGLMQQVVDRQEEMQRPFLETMEKREAERTAREEAWRRQEVARLNREQEQLAQERAAAASRDAAIIAFLQRISGQSVQPPTAFVVPMPAPVSVHTTPPKQPY

SEQ ID NO: 13067 - protein, 199 aa, Zea mays
  unsure (1)..(199): unsure at all Xaa locations
SXSPGSAPPRPPATPRXSRSSSASAVVRGSPCGSLHTAPAXQCRARAAKAGLRPSVAPARRGCHLELVPAQLKAVEAXGVGGXGEGGGSTSSRWPKEEVEALIQVRNEKDEQYHDAGAKGPLWEDIAAGMRRIGYNRSAKRCKEKWENINKYYKKVKESNKRRPEDSKTCPYFHQLDAMYRNKHRSGTGGRTAPRTNMA

SEQ ID NO: 13068 - protein, 370 aa, Drosophila melanogaster
MAQVQLNAGNGQAPSNGNNVEDNEPYQISDDDLDDLDDDCLLEEADTSGAGNSVGRGPYERAWTTEATRALIHIRGPMEGSFTEGRQKRTALWLHCTRQLQRLGFRYSAAKVQKKWHNILITYNKNLNKKYVSGYVHWEFFEEMFKYLQGKKADFDMQLPQQTSNAPQAPHSANGQNPNPGIPQQPLQLQPTPVSLKPGTPQMQLQLPPQTAAKDSQPYITPVDQVLLQAQMNLDSKSNDEFDEDSNSMSEVVRQPKMEYDGDQVAEAERTNDSSQHLEVNGKLYDLARPMGSHQASGIPDDIWWKDYFERKLEVEREKIELQRSLQREQVQIQKMSLVQQERIERMKIDAINSLTGTLQKLVEAKCRRA

SEQ ID NO: 13069 - protein, 370 aa, Drosophila melanogaster
MAQVQLNAGNGQAPSNGNNVEDNEPYQISDDDLDDLDDDCLLEEADTSGAGNNVGRGPYERAWTTEATRALIHIRGPMEGSFTEGRQKRTALWLHCTRQLQRLGFRYSAAKVQKKWHNILITYNKNLNKKYVSGYVHWEFFEEMFKYLQGKKADFDMQLPQQTSNAPQAPHSANGQNPNPGIPQQPLQLQPTPVSLKPGTPQMQVQLPPQTAAKDSQPYITPVDQVLLQAQMNLDSKSNDEFDEDSNSMSEVVRQPKMEYDGDQVAEAERTNDSSQHLEVNGKLYDLARPMGSHQASGIPDDIWWKDYFERKLEVEREKIELQRSLQREQVQIQKMSLVQQERIERMKIDAINSLTGTLQKLVEAKCRRA

SEQ ID NO: 13070 - protein, 295 aa, Mus musculus
MSTEPKRKFGVVVVGVGRAGSVRIRDLKDPHSSAFLNLIGYVSRRELGSLDNVRQISLEDALRSQEVDVAYICTESSSHEDYIRQFLQAGKHVLVEYPMALSFAAAQELWELAAQKGRVLHEEHIELLMEEFEFLKREVAGKELLKGSLRFTASPLEEEKFGFPAFSGISRLTWLVSLFGELSLISATMENRKEDQYMKMTVQLETQNKSPLSWIEEKGPGLKRNRHISIHFKSGSLEEVPNVGVNKNIFLKDQDIFIQKLLGQVSAEDLAAEKKRILHCLELASDIQRLCHRKQ

SEQ ID NO: 13071 - protein, 303 aa, Mus musculus
MSTEPKRKFGVVVVGVGRAGSVRIRDLKDPHSSAFLNLIGYVSRRELGSLDNVRQISLEDALRSQEVDVAYICTESSSHEDYIRQFLQAGKHVLVEYPMALSFAAAQELWELAAQKGRVLHEEHIELLMEEFEFLKREVAGKELLKGSLRFTASPLEEEKFGFPAFSGISRLTWLVSLFGELSLISATMENRKEDQYMKMTVQLETQNKSPLSWIEEKGPGLKRNRHISIHFKSGSLEEVPNVGVNKNIFLKDQDIFIQKLLGQVSAEDLAAEKKRILHCLELASDIQRLCHRKQWGGSFRYL

SEQ ID NO: 13072 - protein, 294 aa, Rattus norvegicus
MITNSGKFGVVVVGVGRAGSVRLRDLKDPRSAAFLNLIGFVSRRELGSLDEVRQISLEDALRSQEIDVAYICSESSSHEDYIRQFLQAGKHVLVEYPMTLSFAAAQELWELAAQKGRVLHEEHVELLMEEFEFLRREVLGKELLKGSLRFTASPLEEERFGFPAFSGISRLTWLVSLFGELSLISATLEERKEDQYMKMTVQLETQNKGLLSWIEEKGPGLKRNRYVNFQFTSGSLEEVPSVGVNKNIFLKDQDIFVQKLLDQVSAEDLAAEKKRIMHCLGLASDIQKLCHQKK

SEQ ID NO: 13073 - protein, 295 aa, Rattus norvegicus
MDAEPKRKFGVVVVGVGRAGSVRLRDLKDPRSAAFLNLIGFVSRRELGSLDEVRQISLEDALRSQEIDVAYICSESSSHEDYIRQFLQAGKHVLVEYPMTLSFAAAQELWELAAQKGRVLHEEHVELLMEEFEFLRREVLGKELLKGSLRFTASPLEEERFGFPAFSGISRLTWLVSLFGELSLISATLEERKEDQYMKMTVQLETQNKGLLSWIEEKGPGLKRNRYVNFQFTSGSLEEVPSVGVNKNIFLKDQDIFVQKLLDQVSAEDLAAEKKRIMHCLGLASDIQKLCHQKK

SEQ ID NO: 13074 - protein, 322 aa, Nostoc sp. PCC 7120
MGIVGTGYAAKLRAEAFLEDERSHLVAIAGSKLERTQTFAQAYQAEVITGWQQLVEREDIDLVVICTINRDHGAIARAALTAGKHVIVEYPLSVDLTEAEELIALAKTQQKLLHVEHIELLGGLHQALKQNLDKVGHLFYVRYSTINPQNPAPRKWTYNHAMFGFPLIGALSRLHRLTDLFGKVFTVNCHQRYWEIEPEYYQTCFCMTQLCFTSGLLAQVIYGKGESLWQPERKFEVHGDNGALIFDGDTGFFIQSGESTPVELGTRRGLFAKDTSMVLDHIFDGAPLYVTPEESLYTLRVADAAQRAAQMGITIFLTDKLN

SEQ ID NO: 13075 - protein, 347 aa, Streptococcus pneumoniae
MVKYGVVGAGYFGAELARYMQKNDGAEITLLYDPDNAEAIAEELGAKVASSLDELVSSDEVDCVIVATPNNLHKEPVIKAAQHGKNVFCEKPIALSYQDCREMVDACKENNVTFMAGHIMNFFNGVHHAKELINQGVIGDVLYCHTARNGWEEQQLSVSWKKIREKSGGHLYHHIHELDCVQFLMGGMPETVTMTGGNVAHEGEHFGDEDDMIFVNMEFSNKRFALLEWGSAYRWGEHYVLIQGSKGAIRLDLFNCKGTLKLDGQESYFLIHESQEEDDDRTRIYHSTEMDGAIAYGKPGKRTPLWLSSVIDKEMRYLHEIMEGAPVSEEFAKLLTGEAALEAIATA

SEQ ID NO: 13076 - protein, 359 aa, Escherichia coli O157:H7 EDL933
MSNSHHTSMRGNDMSDNIRVGLIGYGYASKTFHAPLIAGTPGLELAVISSSDETKVKADWPTVTVVSEPKHLFNDPNIDLIVIPTPNDTHFPLAKAALEAGKHVVVDKPFTVTLSQARELDALAKSLGRVLSVFHNRRWDSDFLTLKGLLAEGVLGEVAYFESHFDRFRPQVRDRWREQGGPGSGIWYDLAPHLLDQAITLFGLPVSMTVDLAQLRPGAQSTDYFHAILSYPQRRVILHGTMLAAAESARYIVHGSRGSYVKYGLDPQEERLKNGERLPQEDWGYDMRDGVLTRVEGEERVEETLLTVPGNYPAYYAAIRDALNGDGENPVPASQAIQVMELIELGIESAKHRATLCLA

SEQ ID NO: 13077 - protein, 366 aa, Agrobacterium tumefaciens str. C58 (U. Washington)
MKKVGIGIIGCGNISSAYLKAMASFPILDIRGLADMNEEVAKARAAEFGLQATSVDALLSDPSVEIIVNLTIPKAHVEVGLRALDAGKHAYSEKPLGINFTEGKRLADAAKAKGLRIGSAPDTFLGGGHQTARRLIDEGVLGQPVGGTATFMCPGHERWHPNPAFYYEVGGGPMLDMGPYYITDLVNLFGPVAKVAGFAIAPRNERLITSEPKNGEKIPVHVATHVSGVLAFENGAVVQVGMSFDVAGHKHVPLEIYGTEGTLIVPDPNHFGGEVQLLKKGGQFEPQALSSPYADGNYRSIGVADMAHAIRENRPHRANGDLALHVLEVMEAFQTASDSGTTVSITTKVERPAPLETSLVDGQLGK

SEQ ID NO: 13078 - protein, 352 aa, Xanthomonas campestris pv. campestris str. ATCC 33913
MPKPFNLAVVGYGYVGRTFHAPLIASTPGLQLHSVVSSKPQQPQADFREVRVLPDLEAALADPALDAVVIATPNQTHAPMALQALAAGKHVLVDKPFALDAAQARTVVDAAAEAGKIVSVFQNRRWDADFLTVRRLIEDGQLGEVVEFHSHFDRYRPQVRDRWRESDIPGAGLWYDLGPHLLDQALQLFGMPQAISADLQRQRTQARSDDYFNVVLRYPRLRVILHAGSLVADGSLRFAVHGTRGSYLKHGADTQEDQLRAGRRPGTAGWGMDPLPGTLTRVDDEGRVHTHQPDGVPGDYRHCYAAFRDAMAGTAPPPVSAADAVRLMELLELAQRGAALGQVLWLEGNSSD

SEQ ID NO: 13079 - protein, 359 aa, Escherichia coli CFT073
MSNSHHTSMRGNDMSDNIRVGLIGYGYASKTFHAPLIAGTPGLELAVISSSDETKVKADWPTVTVVSEPKHLFNDPNIDLIVIPTPNDTHFPLAKAALEAGKHVVVDKPFTVTLSQARELDALAKSLGRVLSVFHNRRWDSDFLTLKGLLAEGVLGEIAYVESHFDRFRPQVRDRWREQGGPGSGIWYDLAPHLLDQAITLFGLPVSMTVDLAQLRPGAQSTDYFHAILSYPQRRVILHGTMLAAAESARYIVHGSRGSYVKYGLDPQEERLKNGERLPQEDWGYDMRDGVLTRVEGEERVEETLLTVPGNYPAYYAAIRDALNGDGENPVPASQAIQVMELIELGIESAKHRATLCLA

SEQ ID NO: 13080 - protein, 335 aa, Trichodesmium erythraeum IMS101
MTQINISSSFCSIPIRVGIVGTGYAAKARAETLKADERSLLVTVAGHTPEKTEAFSQTFQVESAASWQQLVERKDLDLVIISTINRDHGAIALAALENNKHIIVEYPLSLDPTEAESLITLAKKKNKLLHVEHIELLGGLHNTIKESLSKIGKIFYARYVTINSKQPASQKWTYRYSLFGFPFVGALSRFHRFTDLFGQVDTVNCQSQFWYTEVDLYKACLCTAQLRFNNNVIGEVVYGKGETFWHSENTFTLYGEKGKLIFTPQQGQLLQGEKIQTIEVGARRGLFAKDTKMVIEYLLQGTPLYITPEASLYTLKVANLSQKSSHNSGKATKFK

SEQ ID NO: 13081 - protein, 378 aa, Brucella suis 1330
MNIAIIGTGFVADYYMTTLRNYPELSLRGVYDRSPERLKAFVAHYNVPAYESYEALLADPDVQIVVNLTTPESHFAVSHAALCAGKHVYSEKPLAMDFDDAKALLELARQSGLTLAAAPANGLSDAHKLVSSLIKTIGTPRLVYAEMEDGPVFRDKWSTWRSQSGAPWPGLHEFEIGCTLEHAGYALSWLVSLFGPVESVSAFSAITFPDKGPGTEHLHMAPDFSVGCLVFKSGLVARLTSGLAMPKDRSLTVVADKGSIVVDDLWDNRSAVRLERVEEKRRFFARLFANLERRLGKFLSWKPGVGRKIAYPKTGKYALPSFPSQIDFMRGVADQARSISSGEKAFFSGDVALHITEIALALNNAGQGAAVYRMKSSF

SEQ ID NO: 13082 - protein, 333 aa, Brucella suis 1330
MAKWGLIGASTIAKEWVIGTIRATGGEVVSVYSTNAARGKTYADENGIARSVTSLDALLADAEIDAVYISTTNELHRDQAIAAAQAGKHILCEKPLALTIGDAHEMLKAARAAGVVAGTNHHLRNAASHRAMRDAVAEGRIGKVLGARVFHAVYLPPHLQGWRIERPDAGGGVVLDITVHDADTLRFVLGENPVEAVAFSQQGGLSGEGLEDGVMGVLRFPSGAIAQFHDAFTAKYAETGFGVHGSEGSLIARNVMTQKPVGTVILRDKDGEHELPLDHKNLYETALQAFHDAIAGRGQPSATLEDGIWSLATGLAVLEAAKTGKATAVHSGL

SEQ ID NO: 13083 - protein, 349 aa, Yersinia pestis CO92
MADKIKVGLLGYGYASKTFHAPLIMGTPGLELAGVSSSDASKVHADWPAIPVVSDPQMLFNDPSIDLIVIPTPNDTHFPLAQSALAAGKHVVVDKPFTVTLSQANALKEHADDAGLLLSVFHNRRWDSDFLTLKTLLAEGSLGNVVYFESHFDRYRPEIRQRWREQAGAGGGIWYDLGPHLLDQALQLFGLPETLNVDLGMLRPGSQSVDYFHAVLSYPGQRVVLHSTVLAAAETARYIVHGTQGSYIKFGVDPQEDRLKAGERLPQADWGYDMRDGIVTLSHDNVLTEKPLLTLPGNYPAYYAGIRDAIWGTAPNPVPATEAIKVMELIELGIASDQQKKALPIIAKN

SEQ ID NO: 13084 - protein, 324 aa, Brucella melitensis 16M
MNIAIIGTGFVADYYMTTLRNYPELSLRGVYDRSPERLKAFVAHYNVPAYESYEALLADPDVQIVVNLTTPESHFAVSHAALCAGKHVYSEKPLAMDFDDAKALLELARQSGLTLAAAPANGLSDAHKLVSSLIKTIGTPRLVYAEMEDGPVFRDKWSTWRSQSGAPWPGLHEFEIGCTLEHAGYALSWLVSLFGPVESVSAFSAITFPDKGPGTEHLHMAPDFSVGCLVFKSGLVARLTSGLAMPKDRSLTVVADKGSIVVDDLWDNRSAVRLERVEEKRRFFARLFANLERRLGKFLSWKPGVGRKIAYPKTGKYALPSFPS

SEQ ID NO: 13085 - protein, 333 aa, Brucella melitensis 16M
MAKWGLIGASTIAKEWVIGAIRATGGEVVSVYSTNAARGKTYADENGIARSVTSLDALLADPEIDAVYISTTNELHGDQAIAAAQAGKHILCEKPLALTIGDAHEMLKAARAAGVVAGTNHHLRNAASHRAMRDAVAEGRIGKVLGARVFHAVYLPPHLQGWRIERPDAGGGVVLDITVHDADTLRFVLGENPVEAVAFSQQGGLSGEGLEDGVMGVLRFPSGAIAQFHDAFTAKYAETGFGVHGGEGSLIARNVMTQKPVGTVILRDKDGEHELPLDHKNLYETALQAFHDAIAGRGQPSATLEDGIWSLATGLAVLEAAKTGKATAVHSGL

SEQ ID NO: 13086 - protein, 397 aa, Comamonas testosteroni
MRIGVVGLGKAFMLMLPTFLMDRRVQLVAASDTDPLSLRQFKADFPAAAVHGDIESLCKNPDVEVVYIGTPHQFHAVHAEIALNAGKHVLVEKPMAVTLEDCCRMNACAQRAGKYLIVGHSHSFDHPISRAKELIDSGRYGRVRFIHSMNYTDFLYRPRRAEELNTDLGGGVVFNQASHQLDVIRLLAQGRVVDVSSYLGRWDAARRTEGAYSALIKFDNGVAANVTYSGYAHYNSDEVMGWVNELGEKQPERRLFPTRLRLDEVLNKGSEAAYKNEMSYGRGWSAHGLPKMARNHQHFGHLVISCEGADIVPKAEKIEVFANGEYHCENFSMPDFPRQEVMDELFDAISGTRPPVHTGEWAMETLDLCIALLEGGKPELIGMRATAVACAGRSSGR

SEQ ID NO: 13087 - protein, 383 aa, Ralstonia solanacearum
MSLSAPSPSVLRVALVGYGYAGKLFHAALIGAVPGLRLHVVGSNRPEAVLADLPDALVCPPEAAAVHPEADLVVIAAPNDRHAALAEAALRAGKHVVVDKPFTVTLAEARHLARVARETGRLLSVFQNRRWDSDFLALRAALASGAIGEAMHVEAHFDRYRPQVRARWREQAGQGTGIWFDLGPHLVDQALVLLGLPELVSASFACQRPGAETADWAHVVLHYGERRAILHASMLVAGGAPRWIVHGTRGSFIKQGMDRQEAQLLAGMAPGAAGWGSDHDAARLIDGASAAVTEIAAPAGDQRAYYAAVRDAIGGAAPNPVPPVQAVAVMAVLEAALAAAETGAAAVPDLTDSERADWADWADWADWADWAAACPRAATAPAG

SEQ ID NO: 13088 - protein, 329 aa, Streptomyces galilaeus
MPKDTPRPVLRIGVLGCADIAVRRILPAIVEHPSVRLVALASRDGARAERLAARFGCAAVTGYKALLDREDINAVYVPLPPGMHHEWVTEALTAGKHVLVEKPLSTTYAQSVDLVAMAGRLGLALTENFMFLHHSQHEAVRAMTGEIGELRVFTSSFGVPPPHPSSFRHDARLGGGALLDVGVYPLRAAQLHLAGELDVLGACLRVDEATGVDVAGSALLSTATGVTAQLDFGFQHAYRSVYALWGSRGRLSVPRAFTPPREHRPVVRIEQQDRLTEVTLPADHQVGNALDAFASAVHSETVRASLGEALLRQALLVEQVRKAARVVSG

SEQ ID NO: 13089 - protein, 330 aa, Amycolatopsis mediterranei
MAPLRIGIMGCASIAVRKVLPAMAASPRTEITAIASRNPGKAAEIAHAYGCRAVEGYSALLDLDEVEAVYIPLPNAAHAGWIELALTAGKHVLAEKPLTTSVSRTCELIAAAGAAGLVLMENVMFLHHSQHTAVRDRLAGGAIGELRAFHAAFAVPARPAGDIRHRAELGGGALLDTGVYPVRAAMSFLGSEVDVVSAVLTRRHGRPVDSAGQALLCTADGVSASATFGIDHAYRSGYELWGSEGRIVLDHAFTPPADHLPVVRLERRSGVDEIPLPPDDQVANTLTAFAAAVRSGRLPDNDDVARQAVLVDDIRTKARLYVDHAPEPVG

SEQ ID NO: 13090 - protein, 377 aa, Sinorhizobium meliloti
MTKELGVGIIGCGNISTTYFKLAPLFRGIRIAACADINPAAAEARGAEFDVTAQSIDALLANPEVDIVVNLTIPEAHFPVSKAILEAGKHVYSEKPLVLSLEQGEELRKIATGKGLTVGCAPDTFLGGAHQLARAYIDAGKIGQVTSGTCHVMSPGMEMWHPNPDFFFLPGGGPVLDLGPYYIANLINLIGPVKRVAALSSMASTTRTITSEPRNGEVIPVKTPTNIHALLEFRNGATITLSASWDVWAHRHANMELYGTEGSLFVPDPNFFGGTVEASGRNKDIQPLEMWEHPFAVNNWDHPLGPIANYRTAGLADMADAILKGRDARCSLERTLHGVDVMVSILKSGEEGSFVTLSTTCTQPAALGIEEARALLR

SEQ ID NO: 13091 - protein, 333 aa, Sinorhizobium meliloti
MIRWGLIGASTIAREWVIGAIRAAGGEVVSVMSSSAERGEAYAAENGIAKAVTSVDDLVGDPDVDAVYISTTNELHHGQALAAIRAGKHVLCEKPLAMNLNDGCEMVLKACEAGVVLGTNHHLRNAATHRAMREAIAAGRIGRPIAARVFHAVYLPPHLQGWRLDKPEAGGGVILDITVHDADTLRFVLNDDPIEAVAISHSAGMGKEGLEDGVMGVLRFRSGVIAQFHDAFTTKFAETGLEVHGTAGSLIGRNVMTQRPVGTVVLRNEEGESELPLDHRNLYETAIAAFHSAIGGNGRPSASGEDGVWSLATGLAVVKAAATGGAVEIETGL

SEQ ID NO: 13092 - protein, 366 aa, Sinorhizobium meliloti
MEKLGIGIIGCGNISSAYLKAMAAFPILDIRGIADLNRSLAEERAAEFKVEARNVADLLADPSIELIVNLTVPKAHVTVAMQALEAGKHTYSEKPLATDFADGHKLVAMAREKGLRIGAAPDTFLGGSHQTARAIVDSGVLGTPVGGTATFMCPGHERWHPNPDFYYDVGGGPMLDMGPYYITDLVNLLGPVSKVAGFATAARKERTITSEARNGERIPVRVPTHVAGIMAFENGAVVQIGMSFDVAGHRHVPLELYGTEGTLIVPDPNHFGGQIELLKKGGAFEQTATSEPYADGNYRSIGVADMAHAIRSGRPHRANGDLALHVLEVMEAFHKAADTGTTVSISTKTERPAPLSESLVDGRIGR

SEQ ID NO: 13093 - protein, 346 aa, Escherichia coli
MSDNIRVGLIGYGYASKTFHAPLIAGTPGQELAVISSSDETKVKADWPTVTVVSEPKHLFNDPNIDLIVIPTPNDTHFPLAKAALEAGKHVVVDKPFTVTLSQARELDALAKSLGRVLSVFHNRRWDSDFLTLKGLLAEGVLGEVAYFESHFDRFRPQVRDRWREQGGPGSGIWYDLAPHLLDQAITLFGLPVSMTVDLAQLRPGAQSTDYFHAILSYPQRRVILHGTMLAAAESARYIVHGSRGSYVKYGLDPQEERLKNGERLPQEDWGYDMRDGVLTRVEGEERVEETLLTVPGNYPAYYAAIRDALNGDGENPVPASQAIQVMELIELGIESAKHRATLCLA

SEQ ID NO: 13094 - protein, 333 aa, Nostoc punctiforme
MIVYNSGAALEKARVRVGLVGTGYAAKFRAEALLHDERSQLIAVVGHTAEKTEAFVREYQIKALSSWQELVEREDVDLVVICTVNRDHGAIARAALTNGKHVIIEYPLSLDVVEADELIALAKAQKKLLHVEHLELLGGLHQALKQNLAKIGEVFYARYSTINPQNPAPRKWTYNHELFGFPLIGALSRLHRLIDLFGTVFTVNCHQRYWEIEPEYYQTCFCTSELCFNSGLLAQVVYGKGESIWQSERKFEVHGEKGGLVFDGDTGIFIQPEETTPIEVGPRRGLFAKDTAMVLDHLFDGTPLYVTPEQSLYTLKVADAAQRAAQTGFTMFM

SEQ ID NO: 13095 - protein, 321 aa, Streptomyces cyanogenus
MKTVRIGVLGCADIARRRMLPAMAAEPGITIAAVASRDSARAGELAGRFGARPVTGYAELLERDDIDAVYVPLPAALHARWTEAALRRGKHVLAEKPLTTSLAESRRLIALAQESGLALMENVMFIHHSQHDAVRKLVWDGVIGELRAFHAAFAIPRLPDDDIRYVPELGGGALWDTGVYPVRAALHFLGDNLQVLGAMLTQEPGRRVDTAGSALLRTPEGVGVQLTFGLDHGYRSAYEIWGSQGRITVERAFTPPADHRPLIRVERRGVEEISLSPDDQVAATLRAFTAAVRDGAARDSVCVRQAELLHELRERALPSRP

SEQ ID NO: 13096 - protein, 359 aa, Escherichia coli K12
MSNSHHTSMRGNDMSDNIRVGLIGYGYASKTFHAPLIAGTPGQELAVISSSDETKVKADWPTVTVVSEPKHLFNDPNIDLIVIPTPNDTHFPLAKAALEAGKHVVVDKPFTVTLSQARELDALAKSLGRVLSVFHNRRWDSDFLTLKGLLAEGVLGEVAYFESHFDRFRPQVRDRWREQGGPGSGIWYDLAPHLLDQAITLFGLPVSMTVDLAQLRPGAQSTDYFHAILSYPQRRVILHGTMLAAAESARYIVHGSRGSYVKYGLDPQEERLKNGERLPQEDWGYDMRDGVLTRVEGEERVEETLLTVPGNYPAYYAAIRDALNGDGENPVPASQAIQVMELIELGIESAKHRATLCLA

SEQ ID NO: 13097 - protein, 371 aa, Salmonella enterica subsp. enterica serovar Typhi
MMVRTLLRLVARWCGIAISKTGGSEMNDKIRVGLIGYGYASKTFHAPLIMGTPGLELAAVSSSDETKVKADWPAVSVVSEPRHLFNDPHIDLIVIPTPNDTHFPLAKAALEAGKHVVVDKPFTVTLSQARELDALARSTGRVLSVFHNRRWDSDFLTLKALLADGVLGEVSLFESHFDRFRPQVRDRWREQGGPGSGIWYDLAPHLLDQAIQLFGLPVSMTVDLAQLRPGAQSTDYFHAILSYPQRRVILHGTMLAAAESARYIVHGSRGSYVKYGLDPQEERLKNGERLPQEDWGYDMRDGVLTLVEGETRKEENWLTLPGNYPAYYAAIRDALNGNGENPVPASQAIQIMELIELGMESAKHRATLCLA

SEQ ID NO: 13098 - protein, 367 aa, Salmonella enterica subsp. enterica serovar Typhi
MTKYGVIGTGYFGAELARFMSKVEGAKITAIYDPVNAAPIAKELNCVATSTMEALCTHPDVDCVIIASPNYLHKAPVIAAAKAGKHVFCEKPIALNYQDCKDMVDACKEAGVTFMAGHVMNFFHGVRHAKALIKAGEIGEVTQVHTKRNGFEDVQDEISWKKIRAKSGGHLYHHIHELDCTLFIMDETPSLVSMAAGNVAHKGEKFGDEDDVVLITLEFESGRFATLQWGSSFHYPEHYVLIEGTTGAILIDMQNTAGYLIKAGKKTHFLVHESQAEDDDRRNGNISSEMDGAIAYGKPGKRTPMWLSSIMKLEMQYLHDVINGLEPGEEFAKLLTGEAATNAIATADAATLSSNEGRKVKLTEILG

SEQ ID NO: 13099 - protein, 296 aa, Homo sapiens
MNAEPERKFGVVVVGVGRAGSVRMRDLRNPHPSSAFLNLIGFVSRRELGSIDGVQQISLEDALSSQEVEVAYICSESSSHEDYIRQFLNAGKHVLVEYPMTLSLAAAQELWELAEQKGKVLHEEHVELLMEEFAFLKKEVVGKDLLKGSLLFTSDPLEEDRFGFPAFSGISRLTWLVSLFGELSLVSATLEERKEDQYMKMTVCLETEKKSPLSWIEEKGPGLKRNRYLSFHFKSGSLENVPNVGVNKNIFLKDQNIFVQKLLGQFSEKELAAEKKRILHCLGLAEEIQKYCCSRK

SEQ ID NO: 13100 - protein, 296 aa, Homo sapiens
MNAEPERKFGVVVVGVGRAGSVRMRDLRNPHPSSAFLNLIGFVSRRELGSIDGVQQISLEDALSSQEVEVAYICSESSSHEDYIRQFLNAGKHVLVEYPMTLSLAAAQELWELAEQKGKVLHEEHVELLMEEFAFLKKEVVGKDLLKGSLLFTAGPLEEERFGFPAFSGISRLTWLVSLFGELSLVSATLEERKEDQYMKMTVCLETEKKSPLSWIEEKGPGLKRNRYLSFHFKSGSLENVPNVGVNKNIFLKDQNIFVQKLLGQFSEKELAAEKKRILHCLGLAEEIQKYCCSRK

SEQ ID NO: 13101 - protein, 296 aa, Homo sapiens
MNTEPERKFGVVVVGVGRAGSVRMRDLRNPHPSSAFLNLIGFVSRRELGSIDGVQQISLEDALSSQEVEVAYICSESSSHEDYIRQFLNAGKHVLVEYPMTLSLAAAQELWELAEQKGKVLHEEHVELLMEEFAFLKKEVVGKDLLKGSLLFTAGPLEEERFGFPAFSGISRLTWLVSLFGELSLVSATLEERKEDQYMKMTVCLETEKKSPLSWIEEKGPGLKRNRYLSFHFKSGSLENVPNVGVNKNIFLKDQNIFVQKLLGQFSEKELAAEKKRILHCLGLAEEIQKYCCSRK

SEQ ID NO: 13102 - protein, 296 aa, Homo sapiens [sequence omitted]

SEQ ID NO: 13103 - protein, 296 aa, Homo sapiens
MNTEPERKFGVVVVGVGRAGSVRMRDLRNPHPSSAFLNLIGFVSRRELGSIDGVQQISLEDALSSQEVEVAYICSESSSHEDYIRQFLNAGKHVLVEYPMTLSLAAAQELWELAEQKGKVSHEEHVELLMEEFAFLKKEVVGKDLLKGSLLFTAGPLEEERFGFPAFSGISRLTWLVSLFGELSLVSATLEERKEDQYMKMTVCLETEKKSPLSWIEEKGPGLKRNRYLSFHFKSGSLENVPNVGVNKNIFLKDQNIFVQKLLGQFSEKELAAEKKRILHCLGLAEEIQKYCCSRK

SEQ ID NO: 13104 - protein, 371 aa, Salmonella typhimurium LT2
MMVRTLLRLIARWCGIAISKTGGSEMNDKIRVGLIGYGYASKTFHAPLIMGTPGLELAAVSSSDETKVKADWPAVSVVSEPRHLFNDPHIDLIVIPTPNDTHFPLAKRALEAGKHVVVDKPFTVTLSQARELDALARSTGRVLSVFHNRRWDSDFLTLKALLADGVLGEVSLFESHFDRFRPQVRDRWREQGGPGSGIWYDLAPHLLDQAIQLFGLPVSMTVDLAQLRPGAQSTDYFHAILSYPQRRVILHGTMLAAAESARYIVHGSRGSYVKYGLDPQEERLKNGERLPQEDWGYDMRDGVLTLVEGETRKEENWLTLPGNYPAYYAAIRDALNGNGENPVPASQAIQIMELIELGMESAKHRATLCLA

SEQ ID NO: 13105 - protein, 368 aa, Salmonella typhimurium LT2
MMTKYGVVGTGYFGAELARFMSKVEGAKITAIYDPVNAAPIAKELNCVATATMEALCSHPDVDCVIIASPNYLHKAPVIAAAKAGKHVFCEKPIALNYQDCKDMVDACKEAGVTFMAGHVMNFFHGVRHAKALIKAGEIGEVTQVHTKRNGFEDVQDEISWKKIRAKSGGHLYHHIHELDCTLFIMDETPSLVSMAAGNVAHKGEKFGDEDDVVLITLEFESGRFATLQWGSSFHYPEHYVLIEGTTGAILIDMQNTAGYLIKAGKKTHFLVHESQAEDDDRRNGNISSEMDGAIAYGKPGKRTPMWLSSIMKLEMQYLHDVINGLEPGEEFAKLLTGEAATNAIATADAATLSSNEGRKVKLTEILG

SEQ ID NO: 13106 - protein, 1131 aa, Sorghum bicolor; identical to SEQ ID NO: 363

SEQ ID NO: 13107 - protein, 328 aa, Triticum aestivum
  unsure (1)..(328): unsure at all Xaa locations
WSEQPAQQQKKKXLWGLIVCHHESPRYVPFPLRYACEFLAQVFAVHVNKEFEVQKQLXREKSILRMQTILSDMLFKEASPLTIVSGAPNIMDLIKCDGAALLYGGKVWRLGTAPTESQIRDLALWLSEVHMDSTGLSTESLHDAGYPGASALGDTVCGMAVAKINSSDILFWFRSPTAKEIRWGGAKNDPSDMDDSRRMHPRLSFKAFLEVVKMKSLAWTDSEMDAIHSLQLILRGAVDGVVKPTGKASLDEQIGDLKLDGLAELQAVTSEMVRLMETATVPILAVDGNGLVNGWNQKAAELTGLRVDDAIGRHILTLVEESSVSVVQ

SEQ ID NO: 13108 - protein, 137 aa, Streptomyces coelicolor A3(2)
MTQRSLVLLKPDAVRRGLTGEIISRIERKAGWQITALELRTLDTETLEQHYGEHKGKPFYEPLVEFMASGPVVAMVVEGERVIEGVRALAGPTDPIAAAPGSIRGDYGVIVRENLIHASDSEESAERELKIFFPGRV

SEQ ID NO: 13109 - protein, 137 aa, Streptomyces coelicolor A3(2)
MTQRSLVLLKPEAVRRGLTGEIISRIERKAGWQITALELRTLDTETLEQHYGEHKGKPFYEPLVEFMASGPVVAMVVEGERVIEGVRALAGPTDPIAAAPGSIRGDYGVIVRENLIHASDSEESAERELKIFFPGRV

SEQ ID NO: 13110 - protein, 166 aa, Mus musculus
QSQPAVKPCHLKGTMANSERTFIAIKPDGVQRGLVGEIIKRFEQKGFRLVGLKFLQASEDLLKEHYTDLKDRPFFTGLVKYMHSGPVVAMVWEGLNVVKTGRVMLGETNPADSKPGTIRGDFCIQVGRNIIHGSDSVKSAEKEISLWFQPEELVEYKSCAQNWIYE

SEQ ID NO: 13111 - protein, 152 aa, Mus musculus
MANSERTFIAIKPDGVQRGLVGEIIKRFEQKGFRLVGLKFLQASEDLLKEHYTDLKDRPFFTGLVKYMHSGPVVAMVWEGLNVVKTGRVMLGETNPADSKPGTIRGDFCIQVGRNIIHGSDSVKSAEKEISLWFQPEELVEYKSCAQNWIYE

SEQ ID NO: 13112 - protein, 176 aa, Mus musculus
RGSRARFGCWRLQPEFKPKQLEGTMANCERTFIAIKPDGVQRGLVGEIIKRFEQKGFRLVGLKFMQASEDLLKEHYVDLKDRPFFAGLVKYMHSGPVVAMVWEGLNVVKTGRVMLGETNPADSKPGTIRGDFCIQVGRNIIHGSDSVESAEKEIGLWFHPEELVDYTSCAQNWIYE

SEQ ID NO: 13113 - protein, 152 aa, Mus musculus
MANLERTFIAIKPDGVQRGLVGEIIKRFEQKGFRLVAMKFLRASEEHLKQHYIDLKDRPFFPGLVKYMNSGPVVAMVWEGLNVVKTGRVMLGETNPADSKPGTIRGDFCIQVGRNIIHGSDSVESAEKEIHLWFKPEELIDYKSCAHDWVYE

SEQ ID NO: 13114 - protein, 169 aa, Mus musculus
MICLVLTIFANLFPSAYSGVNERTFLAVKPDGVQRRLVGEIVRRFERKGFKLVALKLVQASEELLREHYVELREKPFYSRLVKYMSSGPVVAMVWQGLDVVHASRALIGATDPGDAMPGTIRGDFCVEVGKNVIHGSDSVESAHREIALWFREAELLCWEDSAGHWLYE

SEQ ID NO: 13115 - protein, 169 aa, Mus musculus
MICLVLTIFANLFPSAYSGVNERTFLAVKPDGVQRRLVGEIVRRFERKGFKLVALKLVQASEELLREHYVELREKPFYSRLVKYMSSGPVVAMVWQGLDVVHASRALIGATDPGDAMPGTIRGDFCMEVGKNVIHGSDSVESAHREIALWFREAELLCWEDSAGHWLYE

SEQ ID NO: 13116 - protein, 167 aa, Mus musculus
GLVLTIFANLFPSAYSGVNERTFLAVKPDGVQRRLVGEIVRRFERKGFKLVALKLVQASEELLREHYVELREKPFYSRLVKYMSSGPVVAMVWQGLDVVHASRALIGATDPGDAMPGTIRGDFCMEVGKNEIHGSDSVESAHREIALWFREAELLCWEDSAGHWLYE

SEQ ID NO: 13117 - protein, 152 aa, Mus musculus
MANLERTFIAIKPDGVQSGLVGEIIKRFEQKGFHLVAMKFLRASEEHLKQHYIDLKDRPFFPGLVKYMNSGPVVAMVWEGLNVVKTGRVMLGETNPADSKPGTIRGDFCIQVGRNIIHGSDSVESAEKEIHLWFKPEELIDYKSCAHDWVYK

SEQ ID NO: 13118 - protein, 169 aa, Mus musculus
MICLVLTIFANLFPSAYSGVNERTFLAVKPDGVQRRLVGEIVRRFERKGFKLVALKLVQASEELLREHYVELREKPFYSRLVKYMSSGPVVAMVWQWLDVVHASRALIGATDPGDAMPGTIRGDFCMEVGKNVIHGSDSVESAHREIALWFREAELLCWEDSAGHWLYE

SEQ ID NO: 13119 - protein, 152 aa, Mus musculus
MANLECTFIAIKPDGVQRGLVGEIIKRFEQKGFHLVAMKFLQASEEHLKQHYIDLKVRPFFPGLVKYMNSGPVVAMVWEGLNVVKTGRVMLGETNPADSKPGTIRGDFCIQVGRNIIHGSDSVESAEKEMHLWFKPEELMDYKSCAHDWVYE

SEQ ID NO: 13120 - protein, 197 aa, Mus musculus
GGVQCGASREQWAAFSGRVAALRALLCGPRFQCLLVRPSSGGPPWPQERTLVAVKPDGVQRRLVGTVIQRFERRGFKLVGMKMLQAPESILAEHYRDLQRKPFYPALISYMSSGPVVAMVWEGPNVVHISRAMIGHTDSTEAAPGTIRGDFSVHISRNVIHASDSVDGAQREIELWFQSSELLNWADGGHHSSCYPA

SEQ ID NO: 13121 - protein, 186 aa, Mus musculus
MGSLFGRVAALRALLCGPRFQCLLVRPSSGGPPWPQERTLVAVKPDGVQRRLVGTVIQRFERRGFKLVGMKMLQAPESILAEHYRDLQRKPFYPALISYMSSGPVVAMVWEGPNVVHISRAMIGHTDSTEAAPGTIRGDFSVHISRNVIHASDSVDGAQREIELWFQSSELLNWADGGHHSSCYPA

SEQ ID NO: 13122 - protein, 167 aa, Mus musculus
MICLVLTIFANLFPSAYSGVNERTFLAVKPDGVQRRLVGEIVRRFERKGFKLVALKLVQASEELLREHYVELREKPFYSRLVKYMSSGPVVAMVRLDVVHASRALIGATDPGDAMPGTIRGDFCVEVGKNVIHGSDSVESAHREIALWFREAELLCWEDSAGHWLYE

SEQ ID NO: 13123 - protein, 365 aa, Mus musculus
MANLERTFIAIKPDGVQRGLVGEIIKRFEQKGFRLVAMKFLRASEEHLKQHYIDLKDRPFFPGLVKYMNSGPVVAMVWEGLNVVKTGRVMLGETNPADSKPGTIRGDFCIQVGRTRAEFGTRPPPRAGLRSRESGAPSAGGWERAERGRGAAARPAIGPPPRRIGPLYGMWLVTFLLLLDSLHKARPEDVGTSLYFVNDSLQHVTFSSSVGVVVPCPAAGSPSAALRWYLATGDDIYDVPHIRHVHANGTLQLFPFSPSAFNSFIHDNDYFCTAENAAGKIRSPNIRIKAVFREPYTVRVEDQRSMRGNVAVFKCLIPSSVQEYVSVVSWEKDTVSITPENRFFITSHGGLYISDVQKEDALSTY

SEQ ID NO: 13124 - protein, 192 aa, Mus musculus
MAYKKEKQRDVKSKGPLTGKKREGHQLTCQLSCTLASLKHTFIAIKFDGVQHGLVGGIIKRFKEKRFCLMAVKFLWASEEHLKQRYVDWKDHPFFPGPLKHLNSGHIGAMVWEGLNLVKRGRVMLRETNPAYSKPGTIRGESCIQGGRNITCGSDSVESLWFKSEELVDYKSRAHDWGYEQTWINRNPFWHY

SEQ ID NO: 13125 - protein, 122 aa, Mus musculus
MKPDGVQRGLVGEIIKGFEQKGFCLVAMKFLWVSKEHLKHHYIDLKDYPFFPGLEKYMNSGPVVAMGWEGLYVVKTGQEMLGEKNPVDSKPGTFVGISAFMLAAIQWRVLRKRWVYGLSPKS

SEQ ID NO: 13126 - protein, 152 aa, Rattus norvegicus
MANSERTFIAIKPDGVQRGLVGEIIKRFEQKGFRLVGLKFIQASEDLLKEHYIDLKDRPFFSGLVKYMHSGPVVAMVWEGLNVVKTGRVMLGETNPADSKPGTIRGDFCIQVGRNIIHGSDSVESAEKEISLWFQPEELVDYKSCAQNWIYE

SEQ ID NO: 13127 - protein, 152 aa, Rattus norvegicus
MANLERTFIAIKPDGVQRGLVGEIIKRFEQKGFRLVAMKFLRASEEHLKQHYIDLKDRPFFPGLVKYMNSGPVVAMVWEGLNVVKTGRVMLGETNPADSKPGTIRGDFCIQVGRNIIHGSDSVESAEKEIGLWFKPEELIDYKSCAHDWVYE

SEQ ID NO: 13128 - protein, 152 aa, Rattus norvegicus
MANLERTFIAIKPDGVQRGLVGEIIKRFEQKGFRLVAMKFLRASEEHLKQHYIDLKDRPFFPGLVKYMNSGPVVAMVWEGLNVVKTGRWMLGETNPADSKPGTIRGDFCIQVGRNIIHGSDSVESAEKEIGLWFKPEELIDYKSCAHDWVYE

SEQ ID NO: 13129 - protein, 169 aa, Rattus norvegicus
MICLVLTIFANLFPSAYSGVNERTFLAVKPDGVQRRLVGEIVRRFERKGFKLVALKLVQASEELLREHYVELRERPFYSRLVKYMGSGPVVAMVWQGLDVVRASRALIGATDPGDATPGTIRGDFCVEVGKNVIHGSDSVESAQREIALWFREDELLCWEDSAGHWLYE

SEQ ID NO: 13130 - protein, 185 aa, Rattus norvegicus
MGCLFDRAALRALLCGPRFQCLLVRPSSGGPPWPQERTLVAVKPDGVQRRLVGTVIHRFERRGFKLVGMKMLQAPESILAEHYRDLQRKPFYPALISYMSSGPVVAMVWEGHNVVHISRAMIGHTDSTEAAPGTIRGDFSVHISRNVIHASDSVDGAQREIELWFQSSELLNWADGGHHSSCYPA

SEQ ID NO: 13131 - protein, 173 aa, Rattus norvegicus
MAPSRGNFWHDLQTYILHSTQLTPCPGLMVQPDGVQWRLVGEIIKQFEQKGKGCCLVGLKFMQASEDLLKEHYIDLNDSPVFTGLVMYMHSGPVVAMVWEGLKVVKTGRVMLGETNPADSKPGTIRGDFCIQVGRNIIHGSDSVKNAGKEISLWFQPKELVDYKSCVQNLIYE

SEQ ID NO: 13132 - protein, 153 aa, Cavia porcellus
MASSERTFIAIKPDGVQRGLVGDIIKRFEQKGFRLVALKLIQASEDLLKEHYVDLKDRPFFPGLVQYMHSGPVVAMVWEGLNVVKTGRVMLGETNPADSKPGTIRGDFCIQVGRNIIHGSGDSVESAEKEIALWFQPEELVDYRSCAQDWIYE

SEQ ID NO: 13133 - protein, 149 aa, Nostoc sp. PCC 7120
MERTFLAIKPDGVQRGLVGEIIRRFETKGFTLVGLKFLQVSKELAEQHYGVHRERPFFPSLVEFITSGPVVAMVWEGDGVIASARKIIGATNPLTAEPGTIRGDFGINIGRNLIHGSDAPETAQKEVSLWFTDAELVNWQPHLTPWLHE

SEQ ID NO: 13134 - protein, 117 aa, Nostoc sp. PCC 7120
MGLKFLQVSKELAEQHYGVHRERPFFPSLVEFITSGPVVAMVWEGDGVIASARKIIGATNPLTAEPGTIRGDFGINIGRNLIHGSDAPETAQKEVSLWFTDAELVNWQPHLTPWLHE

SEQ ID NO: 13135 - protein, 189 aa, Rhodobacter sphaeroides
MSEMRSMGRVMDRPARAVNAAGRPLCPFCRDGTHGKARAQSYTLPRRAFMAIERTLSIIKPDATRRNLTGKINAKFEEAGLRIVAQKRIHLSLAQAQKFYGVHKDRPFFGELTEFMASEPVVVQVLEGEGAIAKNREVMGATNPANADAGTIRKEFALSVGENSVHGSDAPETAAEEIAFFFSGLELVG

SEQ ID NO: 13136 - protein, 153 aa, Choristoneura parallela
MAEPRERTFLMIKPDGVQRGIVGTIIERFEKKGFKLVGLKFMWPSEELLQKHYADLASRPFFPGLVKYMSSGPAVPMVWEGLNAVKTGRQMLGATNPADSLPGTIRGDLCIEVGRNIIHGSDSVESANKEIALWFSEKELVGWTPAAEKWVYE

SEQ ID NO: 13137 - protein, 140 aa, Rhodopseudomonas palustris
MAIERTFSILKPDATERNITGAINALIEKAGLRIVAQKRIRMTRDQAETFYAVHKERPFFGELVDFMISGPVVVQVLEGEGAIAKYRDVMGATDPSKAADGTIRKLHAKSIGENSVHGSDAAETAKIEIAQFFSGNEIVG

SEQ ID NO: 13138 - protein, 296 aa, Rhodospirillum rubrum
MGGGLVKQGATADAVGQGFDVQHGAILNTDAPPRVSIERDAPPRVFLRKSDAPARILAAEPSTGPRPRLVPRKALWARAAGNGRGQRLRTKRGGLLPSLLRGRKRPLRWPARRGRRSLFSSHRGPKHEPSGRRKGRRAVIKIEHPFPTDPQQRDTKMAIERTLSIIKPDATRRNLTGAINARFEEAGLRIVGQKRLRLTTAQAEGFYEVHKERSFFGSLVEFMTSGPVVVQVLEGENAVLKNREVMGATNPANAAEHTIRKDFAESIEANSVHGSDSAENAAHEIAYFFAQTEIVA

SEQ ID NO: 13139 - protein, 151 aa, Chloroflexus aurantiacus
MERALLILKPDAVQRGLIGAIISRFEQRGLKFQGLKLMQVDEALARRHYAEHEGKSFFNGLVSYITSAPVVVAVVAGKPGTVELVRAMVGATNPAKAAPGTIRGDFGVDIGRNLIHASDSPESGERETAIFFQPHELIGEWNRALDNWIYE

SEQ ID NO: 13140 - protein, 148 aa, Sulfolobus tokodaii
MMSIQRTFVMIKPDGVRRNLIGEIISRFEKRGLKIIGLKMVKIDRPTAERLYEEHKGKSFFEELISYITSGPVVCMVIEGDEAVSVVRKMIGNTDPKEAPPGTIRGDYALSKAENVIHASDSEEKAKREMSIFFKEEELVTPLAQVHM

SEQ ID NO: 13141 - protein, 149 aa, Synechocystis sp. PCC 6803
MERTFIMIKPDGVQRQLIGEIVGRFEKKGFKLVAMKVMTVSQELAEKHYEALNDKPFFSGLVNFICSSPVVAMVWEGNSIVSTSRQMIGATDPHAAAPGTIRGDYGVSVGRNIIHGSDAIETAKREISLWFKDEEVNEWDATLNPWLYE

SEQ ID NO: 13142 - protein, 144 aa, Chlamydophila pneumoniae CWL029
MEQTLSIIKPDSVSKAHIGEILSIFEQSGLRIAAMKMMHLSQTEAEGFYFVHRERPFFQELVDFMVSGPVVVLVLEGANAVSRNRELMGATNPAEAASGTIRAKFGESIGVNAVHGSDTLENAAVEIAYFFSKIEVVNASKPLV

SEQ ID NO: 13143 - protein, 139 aa, Thermoanaerobacter tengcongensis
MIFMEVTLAIVKPDGVKRGLIGEILKRYENKGLRLKAAKVVTPSIELLEKHYEEHKGKPFFKPLIEYMSSGPVFAMVLEGENAVKLVRMINGATKVEDALPGTIRGDFASSTTYNVVHGSDSVESAKREIALWFPELIL

SEQ ID NO: 13144 - protein, 141 aa, Ralstonia metallidurans
MAIERTLSIIKPDAVAKNVIGQIYARFEAAGLKVVAAKMVHLSRGEAEQFYAVHKARPFFKDLVDFMVSGPVMIQALEGESAIAKNRDLMGATDPKKAEKGTIRADFADSIDANAVHGSDAPETAAVEVAFFFPGMNVYSR

SEQ ID NO: 13145 - protein, 141 aa, Neisseria meningitidis MC58
MAIERTISIIKPDAVGKNVIGKIYSRFEENGLKIVAAKMKQLTLKEAQEFYAVHKDRPFYAGLVEFMTGGPVMIQVLEGENAVLKNRELMGATNPSEAAEGTIRADFATSVSINAVHGSDSVENAALEIAYFFSQTEICPR

SEQ ID NO: 13146 - protein, 191 aa, Deinococcus radiodurans
MAHLGHGTAGRFAEREHERRLACTPGCGGYWVGGYRAGGQRFVSQSTAILTSGMERTFAMIKPDGVRRGLTPEILARIHNKGYRVVGLKQMMMPRETAEQHYGEHRERPFFGELVDFITGGPVVAIALEGENAIAGWRAMMGATNPANAAPGTIRADFATSTGENVTHGSDSPESAERELALFFGDGELLS

SEQ ID NO: 13147 - protein, 138 aa, Deinococcus radiodurans
MERTFAMIKPDGVRRGLTPEILARIHNKGYRVVGLKQMMMPRETAEQHYGEHRERPFFGELVDFITGGPVVAIALEGENAIAGWRAMMGATNPANAAPGTIRADFATSTGENVTHGSDSPESAERELALFFGDGELLS

SEQ ID NO: 13148 - protein, 141 aa, Burkholderia fungorum
MAIERTLSIIKPDAVAKNVIGQIYTRFENAGLKIVASRMVHLSRADAEKFYAVHAARPFFKDLVDFMISGPVVVQALEGENAILKHRDLMGATDPKKAEKGTIRADFADSIDANAVHGSDAPETAAVEIAFFFPQVNVYSR

SEQ ID NO: 13149 - protein, 111 aa, Enterococcus faecium
MKFETMTPELAKEHYQHLTERSFFDELIDYMTSGPVVYLVLVGEEVIDIVRKMVGATKAADAVPGTIRGDYALPGTENIIHASDSRDAAVKEIARFFPPFDINKPSEKAAK

SEQ ID NO: 13150 - protein, 183 aa, Pyrobaculum aerophilum
MPVEKTLLILKPDAVARGLVGEIISRFEKAGLKIVALKMVKASPEEIERFYPSSEEWLRSAGQKLLKAYQELGIDPRAKIGTDDPVEVGRIIKRSLVKYMTSGPIVVMVLKGNRAVEIVRKLVGPTSPHSAPPGTIRGDYSIDSPDLAAEEGRVVFNLVHASDSPSEAEREIRFWFREEEVLE

SEQ ID NO: 13151 - protein, 167 aa, Borrelia burgdorferi
MLLQKTLCIVKPDGVRRGLIGDVVSRFERVGLKMVAAKMLIVDESLAKKHYLYDDIVFRHSEAVWNSLIKFISNSPVFTFVVEGVESIEVVRKLCGATEPKLAIPGTIRGDFSYHSFKYSNEKGFSIYNVIHASANEADAMREIPIWFKDNEILNYKRDDECEHYYC

SEQ ID NO: 13152 - protein, 148 aa, Bacillus subtilis
MEKTFIMVKPDGVQRQLIGDILSRFERKGLQLAGAKLMRVTEQMAEKHYAEHQGKPFFGELVEFITSGPVFAMVWEGENVIEVTRQLIGKTNPKEALPGTIRGDYGMFVGKNIIHGSDSLESAEREINIFFKNEELVSYQQLMAGWIY

SEQ ID NO: 13153 - protein, 143 aa, Escherichia coli O157:H7 EDL933
MAIERTFSIIKPNAVAKNVIGNIFARFEAAGFKIVGTKMLHLTVEQARGFYAEHDGKPFFDGLVEFMTSGPIVVSVLEGENAVQRHRDLLGATNPANALAGTLRADYADSLTENGTHGSDSVESAAREIAYFFGEGEVCPRTR

SEQ ID NO: 13154 - protein, 167 aa, Magnetococcus sp. MC-1
MPHNLITHMLPCLFMLAVFFHQEFTMTIERTFSIIKPDAVAKNVVGEIQSRFEKAGLRIIASKMIRLTPEIAGKFYEVHKARPFYNDLCSYMSSGPVVVQVLEGDGAVLKNRDIMGATNPKDAAPGTIRADFAESIDANAVHGSDAPETAAQEIAFFFSGTELCDRP

SEQ ID NO: 13155 - protein, 149 aa, Staphylococcus aureus subsp. aureus Mu50
MERTFLMIKPDAVQRNLIGEVISRIERKGLKLVGGKLMQVPMELAETHYGEHQGKPFYNDLISFITSAPVFAMVVEGEDAVNVSRHIIGSTNPSEASPGSIRGDLGLTVGRNIIHGSDSLESAEREINLWFNENEITSYASPRDAWLYE

SEQ ID NO: 13156 - protein, 149 aa, Treponema pallidum
MAFETTFVMLKPGVLQRRLVGEVLSRFERKGLVLTALRLLCVDTATAELHYAEHREKPFYPSLIAYITSAPVVALAFKGENAISLVRTLCGSTRVEHAQPGTIRGDFALRTTTNIVHASDSPESAARELALYFSAQDFVEWRDGNYDFF

SEQ ID NO: 13157 - protein, 141 aa, Pseudomonas putida KT2440
MAVQRTFSIIKPDAVAKNVIGKITTRFEEAGLKIVASKMKQLSKAEAEGFYAEHSERGFFGDLVAFMTSGPVVVQVLEGENAIAKNRELMGATNPKEAAAGTIRADFAESIDANAVHGSDSEAAAAREIAYFFAATEVTTR

SEQ ID NO: 13158 - protein, 141 aa, Xylella fastidiosa 9a5c
MVLERTLSIIKPDAVAKNVIGDIYSRFEKAGLKVVAAKYKQLSRREAEGFYAVHRDRPFFNALVEFMISGPVMIQVLESENAVARHRELLGATNPKDAALGTIRADFAESIEANAAHGSDSVENAAIEVAYFFAATEIILR

SEQ ID NO: 13159 - protein, 41 aa, Beta vulgaris
VVAMVWEGKGVVLTGRKIIGATNPLASEPGTIRGDFAIDIG

SEQ ID NO: 13160 - protein, 153 aa, Aspergillus nidulans
MTSEQTFIAIKPDGVQRGLVGPIISRFENRGFKLAAMKLTSPSRSLLEQHYSDLKEKPFFPGLVTYMLSGPIVAMVWEGKDVVKTGRTILGATNPLASAPGTIRGDFAIDVGRNVCHGSDSVESAKKEIGLWFTPEEIQNYKLNAFGWIYEKE

SEQ ID NO: 13161 - protein, 147 aa, Listeria innocua
MEQTYVMVKPDGVERGLIGEIVAKIEKKGIKLVAGKLMQIDRTLAEQHYAEHIGKPFFEDLIGFITSGPVFAMVLEGDDVIKTARRMMGKTNPLEADPGTIRAEYAIHTNRNVIHGSDSPESAKREIQLFFEPHEILSYEKAVDTWI

SEQ ID NO: 13162 - protein, 147 aa, Listeria monocytogenes EGD-e
MEQTYVMVKPDGVERGLIGEIVTRIEKKGLKIVAGKLMQIDRELAEKHYAEHIGKSFFEDLIGFITSGPVFAMVLEGDDAIATARRMMGKTNPLEADPGTIRADYAIHTNRNVIHGSDSPESAQREIQLFFAPDEILSYQKAVDTWI

SEQ ID NO: 13163 - protein, 137 aa, Streptococcus pneumoniae TIGR4
MEQTFFIIKPDGVKRGLVGEVLKRIEQRGFTIEKLEFRSQVSEELIDQHYQDLVGQSFYPPIREFMTSGPVLVGVISGPKVIETWRTMMGATRPEEALPGTIRGDFAKAAGENEIIQNVVHGSDSEESAKREIALWF

SEQ ID NO: 13164 - protein, 159 aa, Staphylococcus epidermidis ATCC 12228
MKHMHRGTHEVERTFLMIKPDAVQRNLIGEIISRIEKKGLKLVGGKFMQVPMELAEKHYSEHEGKPFYDKLISFITSAPVFAMVVEGENAVAVSRKIIGSTNPSEAAPGTIRGDYGLNLGRNIIHGSDSTESAQREVKLWFTSSEIADYKEPREDWLYE

SEQ ID NO: 13165 - protein, 136 aa, Mycobacterium leprae
MTERTLVLIKPDAVERQLIGEIISRIERKGLTIAALELRQVGEELASQHYAEHESKPFFGSLLEFITSGPVMAAIVEGPRAVAAVRQLTGGTDPVEKAAPGTIRGDLALETQFNLVHGSDSTASAQREIALWFPGI

SEQ ID NO: 13166 - protein, 139 aa, Mycobacterium smegmatis
MTERTLVLIKPDGVKRQLVGEILSRIERKGLTLAALELKNVSDDLARQHYAEHADKPFFGSLLEFITSGPLVAAIVEGPRAVAAFRQIAGGTDPVEKAVPGTIRGDFALITQDNLVHGSDSPESAAREIALWFPGEATA

SEQ ID NO: 13167 - protein, 195 aa, Pyrobaculum aerophilum str. IM2
MHAINIAFFALIMPVEKTLLILKPDAVARGLVGEIISRFEKAGLKIVALKMVKASPEEIERFYPSSEEWLRSAGQKLLKAYQELGIDPRAKIGTDDPVEVGRIIKRSLVKYMTSGPIVVMVLKGNRAVEIVRKLVGPTSPHSAPPGTIRGDYSIDSPDLAAEEGRVVFNLVHASDSPSEAEREIRFWFREEEVLE

SEQ ID NO: 13168 - protein, 173 aa, Anopheles gambiae str. PEST
VRAFRMIASLLAFFSLFSSAMAANKERTFIMIKPDGVQRGLVGQIMQRFEAKGFKLVAMKFMWPSKELLEKHYADLSARPFFPGLVTYMSSGPVVPMVWEGLNAVKTGRKMLGATNPADSEPGTIRGDLCVQVGRNIIHGSDAVESANKEIALWFKDEELVSWTPATEGWVYE

SEQ ID NO: 13169 - protein, 140 aa, Agrobacterium tumefaciens str. C58 (Cereon)
MAIERTFSMIKPDATKRNLTGAITKVFEDNGLRIVASKRVWMSKREAEGFYAVHKERPFFGELVEGMTSGPTIVQVLEGENAILKNREIMGATNPAQAAEGTIRKSFALSIGENSVHGSDAPETAAQEIAYWFAETEIVG

SEQ ID NO: 13170 - protein, 141 aa, Xylella fastidiosa Temecula1
MVLERTLSIIKPDAVAKNVIGDIYSRFEKAGLKIVAAKYKQLSRREAEGFYAVHRDRPFFNALVEFMISGPVMIQVLESENAVARHRELLGATNPKDAAPGTIRADFAESIEANAAHGSDSVENAAIEVAYFFAATEIILR

SEQ ID NO: 13171 - protein, 151 aa, Giardia lamblia ATCC 50803
MARERTFLMVKPDGVQRGLVGEIISRFERRGFKLVAMKFFVPSKNLVEEHYKEHAARPFFAGLCKFLSSGPVCAMVWEGANVVSISRTMMGVTKPAESAPGTIRGDFGIDVGRNIIHGSANLDDAAREIALWFKPEEVASWSCSLESHIYE

SEQ ID NO: 13172 - protein, 161 aa, Pyrococcus furiosus DSM 3638
MNEVERTLVIIKPDAVVRGLIGEIISRFEKKGLKIVGMKMIWIDRELAEKHYEEHKGKPFFEALIDYITKAPVVVMVVEGRYAVEVVRKMAGATDPKDAAPGTIRGDYGLDIGDAIYNVIHASDSKESAEREISLYFKPEEIYEYCKAADWFYREKKQAKC

SEQ ID NO: 13173 - protein, 151 aa, Methanothermobacter thermautotrophicus str. Delta H
MMEKSFVMLKPDAVKRRLAGRIIARFEDRGLKIVAFKMLQIPEDLAMEHYQEHREKPFFRDLVDYITSAPVIAMVIEGKDCISLIRKMVGATNPAEADLGTIRGDFALETGRNIIHASDSPESAEREIKLFFDESEICSYEMPDREMIYEE

SEQ ID NO: 13174 - protein, 140 aa, Magnetospirillum magnetotacticum
MAIERTLSIIKPDATRRNLTGKINARFEEAGLRFVAQKRVQLTKAQAQQFYSVHAERSFFGELVDFMISGPVVVQVLEGEGAVARNREIMGATNPANAAPGTIRADFAESVEANSVHGSDSAENAAIEIAYFFAGSEIVG

SEQ ID NO: 13175 - protein, 105 aa, Magnetospirillum magnetotacticum
MRLLDATPELLAAHYAEHEGKPFFQPLVDFMLSGKILAVVAEGQGVVPGFRSLAGATNPTEALPGTIRGDLGRDWGLKVQQNLVHGSDSPESAAREIALWFPELG

SEQ ID NO: 13176 - protein, 151 aa, Methanosarcina acetivorans C2A
MNMEQTYVMVKPDGVQRGLVGEVISRIEKRGLKILALRMNVIAEATAKEHYGEHAARPFFPSLIEFITSGPSVSMVVAGKDAIKVMRAINGATNPVDAAPGTIRGDFALDVGRNVVHASDSPEAAAREIAIHFKDSEIGKYSRVDEVCLYE

SEQ ID NO: 13177 - protein, 137 aa, Leptospira interrogans serovar lai str. 56601
MSRTFIMIKPDGVKNKHVGNILSRIEKEGFKILGLKYLKLSLEDAKQFYKVHSARPFYNDLCNYMSSGPIVAAALERDNAVLHWREVIGATDPKEAAAGTIRALYAESKEANAVHGSDSDDNAALEISFFFKGNELF

SEQ ID NO: 13178 - protein, 154 aa, Methanopyrus kandleri AV19
MAEVQREFVMIKPDGVVRGLVGEVIRRLERKGLKIVALEMRQLDRETAEKLYEEHRDKPFFEDLIEYVTSGPVVVMIVEGRKAVKVVRNIIGATDPAEAAPGTVRGDFALDIGRNVVHASDSPESAEREIEIVFGKDLSTIDYERCDEEWLYES

SEQ ID NO: 13179 - protein, 141 aa, Xanthomonas campestris pv. campestris str. ATCC 33913
MALERTLSIIKPDAVAKNVIGEIYSRFEKAGLKVVAAKYKQLSRREAEGFYAVHRERPFFNALVEFMISGPVMIQALEGENAVAAHRDLLGATNPKDAAPGTIRADFADSIDANAAHGSDSVENAANEVAYFFAATEVVSR

SEQ ID NO: 13180 - protein, 139 aa, Caulobacter crescentus CB15
MTERTFSIIKPDATRRNLTGAINAVIEAAGLRIVAQRRVKLTEAQAKKFYEVHAERPFYGELVGQMTAEPVVVQVLQGDNAVLKYREVMGATNPENADEGTIRKLFALSIGENSVHGSDSLENAGIEIAQFFTEDEIVG

SEQ ID NO: 13181 - protein, 148 aa, Bacillus anthracis str. A2012
MEKTFLMVKPDGVQRAFIGEIVARFEKKGFQLVGAKLMQVTPEIAGQHYAEHTEKPFFGELVDFITSGPVFAMVWQGEGVVDTARNMMGKTRPHEAAPGTIRGDFGVTVAKNIIHGSDSLESAEREIGIFFKEEELVDYSKLMNEWIY

SEQ ID NO: 13182 - protein, 137 aa, Campylobacter jejuni subsp. jejuni NCTC 11168
MEKTLSIIKPDAVKKGVIGKILDRFESNGLRIAAMKKVQLSKEQAENFYAVHKERPFFKDLVEFMISGPVVVSILEGEGAVLKNRDLMGATNPKEAKAGTIRADFAESIDANAVHGSDSLENAKIEIEFFFKPNEIC

SEQ ID NO: 13183 - protein, 160 aa, Methanosarcina mazei Goe1
MPVSSNTEGVHMEQTYVMVKPDGVQRGLVGEVISRIEKRGLKIVALRMNVIAEATAKEHYGEHAARPFFPSLIEFITSGPSVSMVVAGKDAIKVMRAINGATNPVDAAPGTIRGDFALDVGRNVVHASDSPEAAAREIAIHFKDSEIANYSRVDEVCLYE

SEQ ID NO: 13184 - protein, 140 aa, Chlorobium tepidum TLS
MERTLTILKPDCVRKQLIGAVTNMIERAGFRIVAMKKTRLTKETAGAFYAVHKERPFYGELVEFMSSGPCVPMILEKENAVADFRTLIGATDPAQADEGTIRKLYADSKGENIIHGSDSAENAAIESAFFFAAEEVVRVD

SEQ ID NO: 13185 - protein, 143 aa, Clostridium perfringens str. 13
MRLEKSLVLIKPDAVERNLIGKILEVYEGAGLKIKAMEMKQINKEFAEKHYEEHRDKQFFNSLIKYITRSPLVALILEGEDAINKIRSLNGATNPEKAEFGTIRRRFALSGTENSVHASDSIESAEKEIKLWFPKVFYEEICG

SEQ ID NO: 13186 - protein, 141 aa, Halomonas sp. #593
MATERTLSIIKPDAVAKNVIGEIESRFEKAGLKIVAAKMLQLSQEQAEGFYAEHKERPFFGDLVGFMTSGPVVVQVLEGENAIAANRDLMGATNPKEAEAGTIRADYAQSIDANAVHGSDSPESAAREIAYFFEESEICSR

SEQ ID NO: 13187 - protein, 152 aa, Corynebacterium efficiens YS-314
MTSLRQDRGRSVDSASMTERTLILIKPDGVTNGHVGEIIARIERKGLKLAALDLRVADRETAEKHYEEHADKPFFGELVEFITSAPLIAGIVEGERAIDAWRQLAGGTDPVSKATPGTIRGDFALTVGENVVHGSDSPESAEREISIWFPNL

SEQ ID NO: 13188 - protein, 149 aa, Staphylococcus aureus subsp. aureus MW2
MERTFLMIKPDAVQRNLIGEVISRIERKGLKLVGGKLMQVPMELAETHYGEHQGKPFYNDLISFITSAPVFAMVVEGEDAVNVSRHIIGSTNPSEASPGSIRGDLGLTVGRNIIHGSDSLDSAEREINLWFNENEITSYASPRDAWLYE

SEQ ID NO: 13189 - protein, 136 aa, Corynebacterium glutamicum ATCC 13032
MTERTLILIKPDGVTNGHVGEIIARIERKGLKLAALDLRVADRETAEKHYEEHADKPFFGELVEFITSAPLIAGIVEGERAIDAWRQLAGGTDPVAKATPGTIRGDFALTVGENVVHGSDSPESAEREISIWFPNL

SEQ ID NO: 13190 - protein, 150 aa, Thermosynechococcus elongatus BP-1
MERTFLAIKPDGVQRGLVGTIIQRFEQKGYTLVGLKLMRVSRELAEQHYGEHKDKPFFPGLVNFITSGPVVAMVWEGRGVIANARKLIGATNPLNAEPGTLRGDFAVDVGRNVIHGSDSPENAEREINLWFQTQELVPWEPALTSWVYEM

SEQ ID NO: 13191 - protein, 143 aa, Escherichia coli CFT073
MAIERTFSIIKPNAVAKNVIGSIFARFEAAGFKIVGTKMLHLTVEQARGFYAEHDGKPFFDGLVEFMTSGPIVVSVLEGENAVQRHRDLLGATNPANALAGTLRADYADSLTENGTHGSDSVESAAREIAYFFGEGEVCPRTR

SEQ ID NO: 13192 - protein, 156 aa, Thermobifida fusca
MRCSWTGSTVHSQRRLKEKSTVERTLVLIKPDGVRRNIIGEVISRIERKGLKIVAMELRTLDEETAKAHYEEHVEKPFFSSLVEFITGGPLVAMVVEGNRAIEAFRSLAGATDPVLAAPGTIRGDYGLDVQANIVHGSDSTYSAEREIKLFFPDLA

SEQ ID NO: 13193 - protein, 137 aa, Leuconostoc mesenteroides subsp. mesenteroides ATCC 8293
MVERTFMMIKPDGVSRGKIGEIIQRIEHKGYAIKAMKMVQPTPELLAKHYAEHVGKSFYPSLVQYMTLGPVIAMIGEGTNIVSGWRTIMGTTNPTLAAPGTIRGDLGREWEGEAVMNIVHGSDSVEAAEYEIKLWFA

SEQ ID NO: 13194 - protein, 141 aa, Microbulbifer degradans 2-40
MAIERTLSIVKPDAVEKNIIGKVISRFEKAGLKIVAAKMMHLTEEKARGFYAEHEGRPFFAGLVEFMTSGPVVVQVLEGENAIALNRELMGATNPAEAAEGTLRKDFADSVGRNAVYGSDSPASAEREINYFFDASEICPR

SEQ ID NO: 13195 - protein, 112 aa, Trichodesmium erythraeum IMS101
MTVTKELAEKHYDVHKERPFFSSLIEFIKSGPLVAMVWEGEGVVASARKIIGATNPLTAEPGTIRGDYGISLGRNLIHGSDAIETAQTEINLWFKEEELVSWKPTLTSWIVE

SEQ ID NO: 13196 - protein, 136 aa, Tropheryma whipplei str. Twist
MEQTLVIIKPDGIRRGLIGQVLSRIEAKGYQIVDIRMLVPDRQSVEEHYLEHRDRHFYLPLVDFMTSGPIVLVRAEGHGVVDALRTLVGVSDPTLALPGTIRGDFGRNWGLGVIQNIVHASDSVKSAKRELDIWFP

SEQ ID NO: 13197 - protein, 140 aa, Brucella suis 1330
MAIERTFSMIKPDATRRNLTGAIIAKLEEAGLRVVASKRVWMSRREAEGFYAVHKDRPFFGELVEFMSSGPTVVQVLEGENAIAKNREVMGATNPANADEGTIRKTFALSIGENSVHGSDAPETAAEEIAYWFSGTEIVG

SEQ ID NO: 13198 - protein, 145 aa, Haemophilus somnus 129PT
MERPMTLEQTLAIIKPDAVERNLIGNIISRLEDKGFQIIAMKMLHLNQEQAEGFYTEHSDKAFFAELIRYMTSAPIVVLVLQKENAVKDYRTFMGTTNPEIAENGTLRYEFAINQTQNSVHGSDSLENAQREIAYFFAEAEIYAR

SEQ ID NO: 13199 - protein, 141 aa, Pseudomonas syringae pv. syringae B728a
MAVQRTFSIIKPDAVAKNVIGEITTRFEKAGLRVVASKLKQLSKAEAEGFYAEHSARGFFGDLVAFMISGPVVVQVLEGENAIALNRELMGATNPKEAAAGTIRADFADSIDANAVHGSDSEAAAAREISYFFAATEVTAR

SEQ ID NO: 13200 - protein, 141 aa, Pseudomonas fluorescens PfO-1
MAVQRTFSIIKPDAVAKNVIGKITTRFEDAGLRVVASKLKQLSKAEAEGFYAEHSARGFFGELVAFMTSGPVVVQVLEGENAIARNRELMGATNPKEAAPGTIRADFAESIDANAVHGSDSEAAAAREIAYFFAATEVTTR

SEQ ID NO: 13201 - protein, 160 aa, Desulfovibrio desulfuricans G20
MRTACLMHTHHTNTLHRRNEHMAERTFAIIKPDATRRNLEGPILSVIQQNGLRVVAMKKMRLTREQAEGFYHVHKERPFFASLTDFMTSGPIVAMVLEGDNAVARWRELMGATNPENAAEGTIRRQFAEGLEANSVHGSDAAETAAFEMGYFFNAMEITG

SEQ ID NO: 13202 - protein, 138 aa, Streptococcus agalactiae 2603V/R
MEQTFFMIKPDGVKRGFIGEVISRIERRGFSIDRLEVRYADADILKRHYAELTDRPFFPTLVDYMTSGPVIIGVISGEEVISTWRTMMGSTNPKDALPGTIRGDFAQAPSPNQATCNIVHGSDSPESATREIAIWFNN

SEQ ID NO: 13203 - protein, 143 aa, Pseudomonas aeruginosa PAO1
MALQRTLSIIKPDAVSKNVIGEILTRFEKAGLRVVAAKMVQLSEREAGGFYAEHKERPFFKDLVSFMTSGPVVVQVLEGEDAIAKNRELMGATDPKKADAGTIRADFAVSIDENAVHGSDSEASAAREIAYFFAATEVCERIR

SEQ ID NO: 13204 - protein, 138 aa, Streptococcus agalactiae NEM316
MEQTFFMIKPDGVKRGFIGEVISRIERRGFSIDRLEVRHADADILKRHYAELTDRPFFPTLVDYMTSGPVIIEVISGEEVISTWRTMMGSTNPKDALPGTIRGDFAQAPSPNQATCNIVHGSDSPESATREIAIWFNN

SEQ ID NO: 13205 - protein, 143 aa, Shewanella oneidensis MR-1
MAIERTFSIIKPDAVAKNHIGAIYNRFETAGLKIVAAKMLHLTKEQAEGFYAEHSERGFFGALVAFMTSGPIMVQVLEGENAVLAHREILGATNPAQAAPGTIRADFAQSIDENAAHGSDSLASAEREIAYFFSAEELCPRTR

SEQ ID NO: 13206 - protein, 142 aa, Yersinia pestis CO92
MALERTFSIIKPNAVANNDIGAIYARFERAGFKIIAAKMLHLTKEQAEGFYAEHKGRPFFDGLVEFMTSGPIMVQVLEGENAVQRHRDIMGATNPDNALAGTLRADFSDSFTANAVHGSDAVESAQREIAYFFAADEIFPRS

SEQ ID NO: 13207 - protein, 141 aa, Vibrio vulnificus CMCP6
MALERTFSIIKPDAVERNLIGEIYHRIEKAGLRIIAAKMVHLNDEQASGFYAEHEGKEFFPALKEFMTSGPIMVQVLEGENAIARYRELMGKTNPEEAACGTIRADYALSMRHNSVHGSDSPASAAREIAFFFPESEICPR

SEQ ID NO: 13208 - protein, 136 aa, Tropheryma whipplei TW08/27
MEQTLVIIKPDGIRRGLIGQVLSRIEAKGYQIVDIRMLVPDRQSVEEHYLEHRDRHFYLPLVDFMTSGPIVLVRAEGHGVVDALRTLVGVSDPTLALPGTIRGDFGRNWGLDVIQNIVHASDSVKSAKRELDIWFP

SEQ ID NO: 13209 - protein, 140 aa, Methanocaldococcus jannaschii
MKERTFVALKPDAVKRKLIGKIIERFENKGFEIVAMKMIKLDREMAEKYYEEHKGKEFYERLINFMTSGRMIVMVVEGENAISVVRKMIGKTNPAEAEPGTIRGDFALTTPDNIIHASDSKESAEREIKLFFKEDEIFDK

SEQ ID NO: 13210 - protein, 154 aa, Lactobacillus plantarum WCFS1
MANSEKTLVLVKPDGVSEGHIGEVITRLERKGYQIAALKVIKATAEQLQQHYSEKVGKPYFKEIETYMMEGPLVAIIVSGTGVVKAVHRLAGSTRPAEAQPGTIRGDFSHEYPDGILRNVIHTSDSRENAHHEIAIWFPELAVKARKADNKVKA

SEQ ID NO: 13211 - protein, 151 aa, Methanosarcina barkeri
MHMEQTYVMVKPDGVQRGLVGEIISRIEKRGLKIVALRMNVISEATAKEHYSEHAAKPFFPGLVGFITSGPSVSMVVEGKDAIRVMRAINGATNPVDAAPGTVRGDFALDVGRNVVHASDSPEAAAREIAIHFKDSEIGNYSRIDEVCLYE

SEQ ID NO: 13212 - protein, 149 aa, Methanosarcina mazei
MEQTYVMVKPDGVQRGLVGEVISRIEKRGLKIVALRMNVIAEATAKEHYGEHAARPFFPSLIEFITSGPSVSMVVAGKDAIKVMRAINGATNPVDAAPGTIRGDFALDVGRNVVHASDSPEAAAREIAIHFKDSEIANYSRVDEVCLYE

SEQ ID NO: 13213 - protein, 148 aa, Oceanobacillus iheyensis HTE831
MEKTFLMVKPDGVQRELIGEIVKRFETKGYKLAGAKLMQVSNQLAETHYSEHKERPFFGELVDFITSGPVFAMVWEGENVIATARKMMGKTNPLEADPSTIRGDFGISVGKNIIHGSDSAESAEREITLFFTENEIVSYEKQANNWIY

SEQ ID NO: 13214 - protein, 141 aa, Vibrio parahaemolyticus RIMD 2210633
MALERTFSIVKPDAVERNLIGEIYNRIEKAGLRIIAAKMVHLTEEQASGFYAEHEGKEFFQPLKEFMTSGPIMVQVLEGENAIARYRELMGKTNPEEAAAGTLRADYALSMRHNSVHGSDSPESAAREIEFFFPESEICPR

SEQ ID NO: 13215 - protein, 149 aa, Bacillus subtilis subsp. subtilis str. 168
MMEKTFIMVKPDGVQRQLIGDILSRFERKGLQLAGAKLMRVTEQMAEKHYAEHQGKPFFGELVEFITSGPVFAMVWEGENVIEVTRQLIGKTNPKEALPGTIRGDYGMFVGKNIIHGSDSLESAEREINIFFKNEELVSYQQLMAGWIY

SEQ ID NO: 13216 - protein, 151 aa, Archaeoglobus fulgidus DSM 4304
MERTFVMVKPDGVQRGLVGEVIGRLERKGLKIVAMKMLWIAREMAENHYAEHREKPFFSALVDYITSGPVVAMVVEGKNAIKVVRTLVGATNPAEAAPGTIRGDFGLDVGRNVVHASDSPQSAEREISLFFSDDEIVNWEKADEDWIYEER

SEQ ID NO: 13217 - protein, 169 aa, Borrelia burgdorferi B31
MSMLLQKTLCIVKPDGVRRGLIGDVVSRFERVGLKMVAAKMLIVDESLAKKHYLYDDIVFRHSEAVWNSLIKFISNSPVFTFVVEGVESIEVVRKLCGATEPKLAIPGTIRGDFSYHSFKYSNEKGFSIYNVIHASANEADAMREIPIWFKDNEILNYKRDDECEHYYC

SEQ ID NO: 13218 - protein, 140 aa, Bradyrhizobium japonicum USDA 110
MAIERTFSIIKPDATARNLTGAVNAVIEKAGLRIVAQKRIRMTKEQAETFYAVHKARPFFGELVEFMTSGPVVVQVLEGENAVAKYRDAMGATDPSKAAEGTIRKLYAKSIGENSAHGSDAPETAAIEIAQFFSGNEIVG

SEQ ID NO: 13219 - protein, 140 aa, Brucella melitensis 16M
MAIERTFSMIKPDATRRNLTGAIIAKLEEAGLRVVASKRVWMSRREAEGFYAVHKDRPFFGELVEFMSSGPTVVQVLEGENAIAKNREVMGATNPANADEGTIRKAFALSIGENSVHGSDAPETAAEEIAYWFSGTEIVG

SEQ ID NO: 13220 - protein, 133 aa, Enterococcus faecalis V583
MKETSLVIIKPDGVERKLVGKIIQRFEDKGIDLLHLKFERLTVETVKEHYEHLKDELFFPELLAYMTSGPVVVMVVVGDNVVKKVRKLVGATNPLDAESGTLRADYGLSVTKNLIHASDSVQSAKIEMQRFFG

SEQ ID NO: 13221 - protein, 154 aa, Bacteroides thetaiotaomicron VPI-5482
MIEKTLVILKPCTLQRGLVGEITHLFERKGLRLAGMKMMQLTDELLSEHYAHLSSKPFFQRVKDSMMATPVIVCCYEGVDAIQAVRTLAGPTNGRLAAPGTIRGDYSMSFQENIVHTSDSPETAAIELTRFFKPEEIFDYKQATFDYLYANDEY

SEQ ID NO: 13222 - protein, 148 aa, Bacillus cereus ATCC 14579
MEKTFLMVKPDGVQRAFIGEIVARFEKKGFQLVGAKLMQVTPEIAGQHYAEHKEKPFFGELVDFITSGPVFAMVWQGEGVVDTARNMMGKTRPHEAAPGTIRGDFGVTVAKNIIHGSDSLESAEREIAIFFKEEELVDYSKLMNEWIY

SEQ ID NO: 13223 - protein, 144 aa, Coxiella burnetii RSA 493
MAIERTLSIIKPDAVAKNVIGQIYSRFEKAGLKIIAAKMCHLSKPQAEKFYAVHKDRPFYPDLVKFMTQGPVMIQVLEGENAIVKNREIMGATNPKEALPGTIRADFADSIDANAVHGSDGPETAKEEIAFFFKPDESFNSIGV

SEQ ID NO: 13224 - protein, 137 aa, Streptomyces avermitilis MA-4680
MSQRTLVLLKPDAVRRGLTGEIISRIERKAGWAITALELRTLDQDTLEQHYGEHKGKPFYEPLVEFMASGPVVALVVEGERVIEGVRALAGPTDPIAAAPGSIRGDYGVIVRENLIHASDSEESAERELKIFFPGRV

SEQ ID NO: 13225 - protein, 141 aa, Chlamydophila caviae GPIC
MEQTLSIIKPDSVGKAHIGEIVAIFEKSGFRIAAMKMVHLSVKEAEGFYAVHKSRPFFQELVDFMISGPVVVMVLEGDNAVVRNREIMGATNPQEAAQGTIRAQFGESIGINAVHGSDSLENAAIEINYFFSKIEIVNSAK

SEQ ID NO: 13226 - protein, 138 aa, Sulfolobus solfataricus
MVAQRTFVMIKPDGVKRGLIGEIISRFEKRGLKIVSLKMVKMSRDTAEKLYEEHKGKSFFEELVNYVTSGPVVCMVIEGDDVVQVIRRMIGNTDPKEAPPGTIRGDYALSKSENVIHASDSIEKAQREMSLFFDKSDL

SEQ ID NO: 13227 - protein, 148 aa, Thermoplasma acidophilum
MTERTLVLLKPDAVKRRLIGRIISRLEDKGLKVVALKFMQMTKDQAENHYSVHRSKPFFKDLVTYITSGPIVAMVLEGPKAIEVVRILAGSTDGSKAQPGTIRGDFSMGIEKNIIHASDSPEAYSHEMPIFFNESEIVEWSYGDEIIY

SEQ ID NO: 13228 - protein, 137 aa, Thermus thermophilus
MERTFVMIKPDGVRRGLVGEILARFERKGFRIAALKLMQISQELAERHYAEHREKPFFPGLVRFITSGPVVAMVLEGPGVVAEVRKMMGATHPKDALPGTIRGDFATTIDENVIHGSATLEDAQREIALFFRPEELL

SEQ ID NO: 13229 - protein, 141 aa, Heliobacillus mobilis
MERTYLMIKPDAVQRGLIGEIVSRFEKKGFKLVAMKFLRLTKEMAEKHYAEHVGKPFFAGLVEYIISGPVVAMCWEGKDVVTVSREMMGATNPAKAAPGTIRGTFAVDLPLALRRRVLRRFLEPENPGSEKTDAILEQLQQ

SEQ ID NO: 13230 - protein, 137 aa, Geobacter metallireducens
MERTFAIIKPDAVERNIVGKVLEKIEAAGFRIVGMKKIQLSKKEAEGFYYVHSERPFFGDLCSFMSRSPVVVLALERENAIAKWREVMGATNPANADAGTIRKEFGLSIEENTVHGSDSPESAAFEIPYFFSQLELL

SEQ ID NO: 13231 - protein, 150 aa, Pseudomonas aeruginosa
MALQRTFSIIKPDAVSKNVIGEILTRFEKAGLRVVASKMVQLSEREAGGFYAEHKERPFFKDLVSFMTSGPVVVQVMEGEDAILRNRELMGATDPKKADAGTIRADFAVSIDENAVHGSDSEASAAREIAYFFSSTEVCEALPDSANERG

SEQ ID NO: 13232 - protein, 143 aa, Pseudomonas aeruginosa
MALQRTLSIIKPDAVSKNVIGEILTRFEKAGLRVVAAKMVQLSEREAGGFYAEHKARPFFKDLVSFMTSGPVVVQVLEGEDAIAKNRELMGATDPKKADAGTIRADFAVSIDENAVHGSDSEASAAREIVYFFADTEVCERIR

SEQ ID NO: 13233 - protein, 162 aa, Pyrococcus abyssi
MVSMCENEKERTLVIIKPDAVIRGLIGEIISRFEKRGLKIVGMKMIWISKELAEKHYAEHREKPFFKSLVEYITRTPVVVMVVEGRCAIEVVRKMAGATDPKNAEPGTIRGDFALEVSDAICNVVHASDSKESAEREIKLYFRDDEIFDYPRAEDWFYRKGI

SEQ ID NO: 13234 - protein, 159 aa, Pyrococcus abyssi
MCENEKERTLVIIKPDAVIRGLIGEIISRFEKRGLKIVGMKMIWISKELAEKHYAEHREKPFFKSLVEYITRTPVVVMVVEGRCAIEVVRKMAGATDPKNAEPGTIRGDFALEVSDAICNVVHASDSKESAEREIKLYFRDDEIFDYPRAEDWFYRKGI

SEQ ID NO: 13235 - protein, 221 aa, Dunaliella tertiolecta
MFRNSAVSALRLGAIAFRRVDPTKVPNAMCRAYTQQNTGNSSSSAGKWAWTAGILGAGLLSSNHAFAAGPSTKERSFIAIKPDGVHRGMISNIISRFEQKGYKLVGIKVIVPGMDLAKAHYAEHEGKPFFNKLTSFLTSGPVVAMVWEGKEVIKYGRTMIGATNPLASAPGTIRGDFCVDMGRNMIHGSDGPESAQREIALWFQPSEIAEYESATQSWVYE

SEQ ID NO: 13236 - protein, 141 aa, Ralstonia solanacearum
MAIERTLSIIKPDAVAKNVIGQIYARFEGAGLKVVAAKMIHLSRAEAEQFYAVHKERPFFKDLVDFMISGPVMVQALEGESAIVKNRDLMGATDPKKAEKGTIRADFADSIDANAVHGSDAAETAAVEVAFFFPGLNIYSR

SEQ ID NO: 13237 - protein, 145 aa, Myxococcus xanthus
MAIERTLSIIKPDGLEKGVIGKIISRFEEKGLKPVAIRLQHLSQAQAEGFYAVHKARPFFKDLVQFMISGPVVLMVLEGENAVLANRDIMGATNPAQAAEGTIRKDFATSIDKNTVHGSDSLENAKIEIAYFFRETEIHSYPYQK

SEQ ID NO: 13238 - protein, 144 aa, Myxococcus xanthus
AIERTLSIIKPDGLEKGVIGKIISRFEEKGLKPVAIRLQHLSQAQAEGFYAVHKARPFFKDLVQFMISGPVVLMVLEGENAVLANRDIMGATNPAQAAEGTIRKDFATSIDKNTVHGSDSLENAKIEIAYFFRETEIHSYPYQK

SEQ ID NO: 13239 - protein, 143 aa, Azotobacter vinelandii
MAVERTLSIIKPDAVAKNVIGEILTRFEKAGLSVVAAKMVQLSEREAGGFYAEHKERPFFKDLVSFMTSGPVVVQVLEGEGAIAKNRELMGATDPKKAEPGTIRADFAVSIDENAVHGSDSEASAAREIAYFFAATEVCARIR

SEQ ID NO: 13240 - protein, 233 aa, Spinacia oleracea
MEAMSGLSSPCNCISSLPHSSSTTTRHQNLLFRRNNHHQQKLAAFHSQSHLFSTKCPLISHSLPRKKSFKPHIFLPHLVASMEQVEETYIMIKPDGVQRGLVGEIISRFEKKGFKLIGLKMYPCPKELAEEHYKDLKAKSFYQKLIDYITSGPVVCMAWEGVGVVASSRKLIGATDPLQAEPGTIRGDLAVQTGRNVVHGSDSPDNGKREIGLWFKEGEICQWTPAQAPWLRE

SEQ ID NO: 13241 - protein, 132 aa, Rickettsia sibirica
MIKPDAIKRNKIGQVNTYLENAGLKIVAQKMKFLTKYEAACFYDEHRARPFFNSLVEYITSGAVVLQVLKGEDAITLNRTVMGATNPAEAEAGTIRKDLGESIEANSIHGSDSENSAKREIEFFFNKSEIIE

SEQ ID NO: 13242 - protein, 140 aa, Rhodovulum sulfidophilum
MAIQRTFSIIKPDATKRNLTGAINAKLEAAGLRIVAQKRIHLSKAQAAVFYAVHKERPFYDELCEFMASEPIVVQVLEGEDAIAKNREVMGATNPAEAAEGTIRKEFALSIGENSVHGSDAEDTAKEEIAYFFSGLELVG

SEQ ID NO: 13243 - protein, 149 aa, Plasmodium falciparum 3D7
MEKSFIMIKPDGVQRGLVGTIIKRFEKKGYKLIAIKMLNPTEEILKEHYKELSDQPFFKNLVAYISKGPVVAMVWEGVDMVKQGRKLIGETNPLTSNTGTIRGDFCLEVSKNVIHGSDSVASANKEINIWFKAEELTQWKHHMKEWICS

SEQ ID NO: 13244 - protein, 142 aa, Wigglesworthia glossinidia endosymbiont of Glossina brevipalpis
MKIEQTLSIIKPNIISNNFIGNIINRLEQAKLYIIASKMIKLSWKEAVSFYIEHKNKSFFSDLINFMISHPIIVQILEGENAIKRNREIMGNTNPKIALAGTLRSDFSNDIIKNGVHGSDSEESADREIKFFFKKDRIFSRI

SEQ ID NO: 13245 - protein, 231 aa, Arabidopsis thaliana
MVGATVVSKWTPLCVASPPERNSASLNPHCSPARVNFRTALAAFRPQFRLFSRNSASRRRLRASSSAESGIFLPHLVASMEDVEETYIMVKPDGIQRGLVGEIISRFEKKGFKLIGLKMFQCPKELAEEHYKDLSAKSFFPNLIEYITSGPVVCMAWEGVGVVASARKLIGKTDPLQAEPGTIRGDLAVQTGRNIVHGSDSPENGKREIGLWFKEGELCKWDSALATWLRE

SEQ ID NO: 13246 - protein, 152 aa, Arabidopsis thaliana
MEDVEETYIMVKPDGIQRGLVGEIISRFEKKGFKLIGLKMFQCPKELAEEHYKDLSAKSFFPNLIEYITSGPVVCMAWEGVGVVASARKLIGKTDPLQAEPGTIRGDLAVQTGRNIVHGSDSPENGKREIGLWFKEGELCKWDSALATWLRE

SEQ ID NO: 13247 - protein, 231 aa, Arabidopsis thaliana
MVGATVVSKWTPLCVASPPERNSASLNPHCSPARVNFRTALAAFRPQFRLFSRNSASRRRLRASSSAESGIFLPHLVASMEDVEETYIMVKPDGIQRGLVGEIISRFEKKGFKLIGLKMFQCPKELAEEHYKELSAKSFFLTLIEYITSGPVVCMAWEGVGVVASARKLIGKTDPLQAEPGTIRGDLAVQTGRNIVHGSDSPENGKREIGLWFKEGELCKWDSALATWLRE

SEQ ID NO: 13248 - protein, 230 aa, Brassica rapa
MVGTRVVGQWTLCVASPRLTPAICSSTSSPTTVNLRAELAAFRPQFRLFSRTSPSRRRLRASTSSAESGIFLPHLVASMEQVEETYIMVKPDGIQRGLVGEIISRFEKKGFKLIGLKMFQCPRELAEEHYKDLSSKSFFSSLIEYITSGPVVCMAWEGVGVVASARKMIGKTDPLQAEPGTIRGDLAVQTGRNIVHGSDSPENGKREIALWFKEGELCEWDSVLAKWLRE

SEQ ID NO: 13249 - protein, 140 aa, Mesorhizobium loti
MALERTFSMIKPDATRRNLTGAITKMLEDAGLRVIASRRVWMSRREAEGFYAVHKDRPFFGELVEFMSSAPTIVQVLEGENAIARNREVMGATNPANAAEGTIRKVHALSIGENSVHGSDAPETAAQEIKYWFSDTEIVG

SEQ ID NO: 13250 - protein, 140 aa, Sinorhizobium meliloti
MAIERTFSMIKPDATKRNLTGAITKMLEDAGLRVVASKRVWMSRREAEGFYAVHKERPFFGELVEFMSSGPTVVQVLEGENAIAKNREVMGATNPANAAEGTIRKVHALSIGENSVHGSDAPETAAEEIAYWFSGTEIVG

SEQ ID NO: 13251 - protein, 230 aa, Pisum sativum
MEAMAVFSGSNLFATSSLLLTTNSKTRYSQLRTTQNLSAFSSKSHLFSPSSTSSSYPKTFRTRSSTESGIFLPRLITSLEQVDQAYIMVKPDGVQRGLVGEIISRFEKKGFKLTGLKLFQCSKELAEEHYKHLNQKSFFPKLIEYITSGPVVSMAWEGVGVVPSARKLIGATDPLQAEPGTIRGDFAVQTGRNIIHGSDSPENGEREIALWFKEGELCEWTPVQEPWLRE

SEQ ID NO: 13252 - protein, 144 aa, Lycopersicon esculentum
FIMIKPDGVQRGLVGEIISRFEKKGFSLKGLKLITVDRAFAEKHYADLSAKPFFNGLVEYIVSGPVVAMVWEGKGVVATGRKIIGATNPLESAAGTIRGDFAIDIGRNVIHGSDAVESARKEIALWFPEGIAEWQSSLHSCIYE

SEQ ID NO: 13253 - protein, 142 aa, Lycopersicon esculentum
MIKPDGVQRGLVGEIISRFEKKGFSLKGLKLITVDRAFAEKHYADLSAKPFFNGLVEYIVSGPVVAMVWEGKGVVATGRKIIGATNPLESAAGTIRGDFAIDIGRNVIHGSDAVESARKEIALWFPEGIAEWQSSLHSCIYE

SEQ ID NO: 13254 - protein, 154 aa, Dictyostelium discoideum
STNKVNKERTFLAVKPDGVARGLVGEIIARYEKKGFVLVGLKQLVPTKDLAESHYAEHKERPFFGGLVSFITSGPVVAMVFEGKGVVASARLMIGVTNPLASAPGSIRGDFGVDVGRNIIHGSDSVESANREIALWFKPEELLTEVKPNPNLYE

SEQ ID NO: 13255 - protein, 155 aa, Dictyostelium discoideum
MSTNKVNKERTFLAVKPDGVARGLVGEIIARYEKKGFVLVGLKQLVPTKDLAESHYAEHKERPFFGGLVSFITSGPVVAMVFEGKGVVASARLMIGVTNPLASAPGSIRGDFGVDVGRNIIHGSDSVESANREIALWFKPEELLTEVKPNPNLYE

SEQ ID NO: 13256 - protein, 155 aa, Dictyostelium discoideum
MSTNKVNKERTFLAVAPDGVARGLVGEIIARYEKKGFVLVGLKQLVPTKDLAESHYAEHKERPFFGGLVSFITSGPVVAMVFEGKGVVASARLMIGVTNPLASAPGSIRGDFGVDVGRNIIHGSDSVESANREIALWFKPEELLTEVKPNPNLYE

SEQ ID NO: 13257 - protein, 155 aa, Dictyostelium discoideum
MSTNKVNKERTFLAVKPDGVARGLVGEIIARYEKKGFVLVGLKQLVPTKDLAESHYAEHKERPFFGGLVSFITSGPVVAMVFEGKGVVASARLMIGVTNPLASAPGSIRGDFGVDVGRAIIHGSDSVESANREIALWFKPEELLTEVKPNPNLYE

SEQ ID NO: 13258 - protein, 150 aa, Dictyostelium discoideum
VNKERTFLAVKPDGVARGLVGEIIARYEKKGFVLVGLKQLVPTKDLAESHYAEHKERPFFGGLVSFITSGPVVAMVFEGKGVVASARLMIGVTNSLASAPGSIRGDFGVDVGRNIIHGSDSVESANREIALWFKPEELLTEVKPNPNLYE

SEQ ID NO: 13259 - protein, 150 aa, Dictyostelium discoideum
VNKERTFLAVKPDGVARGLVGEIIARYEKKGFVLVGLKQLVPTKDLAESHYAEHKERPFFGGLVSFITSGPVVAMVFEGKGVVASARLMIGVTNPLASAGGSIRGDFGVDVGRNIIHGSDSVESANREIALWFKPEELLTEVKPNPNLYE

SEQ ID NO: 13260 - protein, 155 aa, Dictyostelium discoideum
MSTNKVNKERTFLAVKPDGVARGLVGEIIARYEKKGFVLVGLKQLVPTKDLAESHYAEHKERPFFGGLVSFITSGPVVAMVFEGKGVVASARLMIGVTNPLASAPGSIRGDFGVDVGRNIIAGSDSVESANREIALWFKPEELLTEVKPNPNLYE

SEQ ID NO: 13261 - protein, 155 aa, Dictyostelium discoideum
MSTNKVNKERTFLAVKPDGVARGLVGEIIARYEKKGFVLVGLKQLVPTKDLAESHYAEHKERPFFGGLVSFITSGPVVAMVFEGKGVVASARLMIGVTNPLASAPGSIRGDFGVDVGRNIIGGSDSVESANREIALWFKPEELLTEVKPNPNLYE

SEQ ID NO: 13262 - protein, 155 aa, Dictyostelium discoideum
MSTNKVNKERTFLAVKPDGVARGLVGEIIARYEKKGFVLVGLKQLVPTKDLAESHYAEHKERPFFGGLVSFITSGPVVAMVFEGKGVVASARLMIGVTNPLASAPGSIRGDFGVDVGRNIICGSDSVESANREIALWFKPEELLTEVKPNPNLYE

SEQ ID NO: 13263 - protein, 155 aa, Dictyostelium discoideum
MSTNKVNKERTFLAVKPDGVARGLVGEIIARYEKKGFVLVGLKQLVPTKDLAESHYAEHKERPWFGGLVSFITSGPVVAMVFEGKGVVASARLMIGVTNPLASAPGSIRGDFGVDVGRSIIGGSDSVESANREIALWFKPEELLTEVKPNPNLYE

SEQ ID NO: 13264 - protein, 220 aa, Dictyostelium discoideum
MFSRFARAFPKILASGASQRTFATVQKAFGNPTSKKLIVGSSLLIGSAFATTSFVACENKSVPLVGLPGTNQERSFIAIKPDGTQRRLIGEIIARFEKKGFKLVGIKILVPTPEHAAKHYEDLNKKPFFNGLVKFFSSGAVVAMVFEGKDVVRTGRVLIGATVPSQSAPGTIRFDLCIETGRNIIHGSDSNESAAHEIALWFKEDEIANWVSTNPVYEKM

SEQ ID NO: 13265 - protein, 220 aa, Dictyostelium discoideum
MFSRFARAFPKILASGASQRTFATVQKAFGNPTSKKLIVGSSLLIGSAFATTSFVACENKSVPLVGLPGTNQERSFIAIKWNSTQRRLIGEIIARFEKKGFKLVGIKILVPTPEHAAKHYEDLNKKPFFNGLVKFFSSGAVVAMVFEGKDVVRTGRVLIGATVPSQSAPGTIRFDLCIETGRNIIHGSDSNESAAHEIALWFKEDEIANWVSTNPVYEKM

SEQ ID NO: 13266 - protein, 150 aa, Lolium perenne
MAEQTFIMIKPDGVQRGLIGEIISRFEKKGFYLKGLKLQNVEKSFAEQHYADLSSKPFFGGLVEYIVSGPVVAMVWEGKSVVATGRKIIGATNPLASEPGTIRGDFAVDIGRNVIHGSDSVENARKEIALWFPEGLAGWTSSQHNWIYEA

SEQ ID NO: 13267 - protein, 152 aa, Oryza sativa
ASSVEQSYIMIKPDGVQRGLVGEIISRFEKKGFVLKGLKLFQCPKDLAQEHYKDLKEKPFFPGLIEYITSGPVVCMAWEGNGVVASARKLIGATNPLQAEPGTIRGDLAVQTGRNVVHGSDSPDNGKREIALWFKEGELCEWESVLTPWLVE

SEQ ID NO: 13268 - protein, 247 aa, Oryza sativa
MVEQSYIMIKPDGVQRGLVGEIISRFEKKGFVLKGLKLFQCPKDLAQEHYKDLKEKPFFPGLIEYITSGPVVCMAWEGNGVVASARKLIGATNPLQAEPGTIRGDLAVQTGRNVVHGSDSPDNGKREIALWFKEGELCEWESVLTPWLVELGKRKPASVEASIRLTLQPSARTPLIPSRHQPGHWLIYFQAHAREQELQARHYGFGLSIGSECIRYLPLRKLIWDEIDGLLMVVATGTYFDCEVTVI

SEQ ID NO: 13269 - protein, 254 aa, Oryza sativa
  unsure (1)..(254): unsure at all Xaa locations
LEPRAPGLGSALPNPKRGGCLGRSRARADVGGGAATGRGAMAVLAGPSRPAPPLLPAIPPAVPRRPAALSFAPAAPPGARXXAARXAPRGAGGRPGGASPPPAASSXSSVEQSYIMIKPDGVQRGLVGEIISRFEKSGFVLKGLKLFQCPKDLAQXEHYKDLKEKPFFPGLIEYITSGPVVCMAWEGNGVVASARKLIXGATNPLQAQPGTIRGXHLAVLAAARVVLGAASPLHATREIALWFTEGELCEWESX

SEQ ID NO: 13270 - protein, 149 aa, Saccharum officinarum
MESTFIMIKPDGVQRGLIGEIISRFEKKGFYLKALKLVNVERSFAEKHYADLSSKPFFQGLVDYIISGPVVAMVWEGKSVVTTGRKIIGATNPLVSEPGTIRGDFAVDIGRNVIHGSDSIESANKEIALWFPEGLADWQSSQHPWIYEK

SEQ ID NO: 13271 - protein, 232 aa, Triticum aestivum
MDAMAALARTGPSLAAAGHRSSATFRPSASLSSFASASSRKLSSFASASSRNRGRVGLSTAGWNRRATRVARATPNRIVASSEVEQTYIMIKPDGVQRGLVGEIISRFEKKGFLLKGLKLFQCPKDLAQEHYKDLKERPFFPNLIDYITSGPVVCMAWEGDGVVASARKLIGATNPLQAEPGTIRGDLAVQTGRNVVHGSDSPDNGKREIGLWFKEGELAQWESVQTPWLIE

SEQ ID NO: 13272 - protein, 260 aa, Triticum aestivum
  unsure (1)..(260): unsure at all Xaa locations
IFSPNPKVRVLPCRVCTELRRRWTXMAAPPERGLPSPPPXHRSSATFRPSASLSSFASASSXGTAAASGXARRGATGGQPGXLAPHRIVASSEVEQTYIMIKPDGVQRGLVGEIISRFEKKGFLLKGLKLFQCPKDLAQEHYKDLKERPFFPNLIDYITSGPVVCMAWEGDGVVASARKLIGATNPLQAEPGTIRGDLAVQTGRNVVHGSDSPDNGKREIGKWXKEGELAQWXSVQTPWLXEVIFAYHCKNHDPYLFGQL

SEQ ID NO: 13273 - protein, 118 aa, Musa acuminata
IFQGLKMVSVERSFAEKHYADLSAKPFFAGLVEYIISGPVVAMVWAGKNVVVTGRKIIGATNPADSAPGTIRGDLAIEIGRNVIHGSDSIESASKEIALWFPEGVAEWQSNLHPWIYE

SEQ ID NO: 13274 - protein, 494 aa, Cloning vector pZEO-SG4
MARSKYIVIEGLEGAGKTTARNVVVETLEQLGIRDMVFTREPGGTQLAEKLRSLVLDIKSVGDEVITDKAEVLMFYAARVQLVETVIKPALANGTWVIGDRHDLSTQAYQGGGRGIDQHMLATLRDAVLGDFRPDLTLYLDVTPEVGLKRARARGELDRIEQESFDFFNRTRARYLELAAQDKSIHTIDATQPLEAVMDAIRTTVTHWVKELDALISGANGVMAKLTSAVPVLTARDVAGAVEFWTDRLGFSRDFVEDDFAGVVRDDVTLFISAVQDQVVPDNTLAWVWVRGLDELYAEWSEVVSTNFRDASGPAMTEIGEQPWGREFALRDPAGNCVHFVAEEQDQGPGCMAIERTFSIIKPNAVAKNVIGNIFARFEAAGFKIVGTKMLHLTVEQARGFYAEHDGKPFFDGLVEFMTSGPIVVSVLEGENAVQRHRDLLGATNPANALAGTLRADYADSLTENGTHGSDSVESAAREIAYFFGEGEVCPRTR

SEQ ID NO: 13275 - protein, 155 aa, Entodinium caudatum
PRLERTFIMIKPDGVQRGLIGPILERFERRGYKLIALKLFTPSKALLEEHYGEHKGKPFFEPLVNYMLMGPVVCMIWEGLDIVKTGRKMLGATKPLNSEPGTIRGDYSIETGRNIVHGSDSVESAEREIKLWFKPEEIQNYKRDCDKWIYEKPFA

SEQ ID NO: 13276 - protein, 156 aa, Entodinium caudatum
DPRLERTFIMIKPDGVQRGLIGPILERFERRGYKLIALKLFTPSKALLEEHYGEHKGKPFFEPLVNYMLMGPVVCMIWEGLDIVKTGRKMLGATKPLNSEPGTIRGDYSIETGRNIVHGSDSVESAEREIKLWFKPEEIQNYKRDCDKWIYEKPFA

SEQ ID NO: 13277 - protein, 144 aa, Entodinium caudatum
TRRCPKRTYWPILERFERRGYKLIALKLFTPSKALLEEHYGEHKGKPFFEPLVNYMLMGPVVCMIWEGLDIVKTGRKMLGATKPLNSEPGTIRGDYSIETGRNIVHGSDSVESAEREIKLWFKPEEIQNYKRDCDKWIYEKPFA

SEQ ID NO: 13278 - protein, 177 aa, Novosphingobium aromaticivorans
MTFPFGPPCVDPPTLHRSTNRARGARNQIPTYRKERPMAVTRTFSIIKPDATRRNLTGAVTKMLEEAGLRVVASKRIHMSREQAEGFYAVHKERPFFGELVEFMISGPVVVQVLEGEDAVKRNRDIMGATNPKDAAPGTIRKELAESIEANSVHGSDSEENAAIEIAYFFKPEEIVG

SEQ ID NO: 13279 - protein, 151 aa, Schizosaccharomyces pombe
MSTEQTFIAVKPDAVQRGLIGYIISKFELKGYKLRALKFLVPSRDLVEEHYAEHKGKPFYEKLVGFMASGPVCAMIWEGKQAVKTGRLMLGASNPLDSAPGTIRGDYGIDLGRNVCHGSDSIESANREIKLWFQPSEIQVYDRTIEPWIYE

SEQ ID NO: 13280 - protein, 153 aa, Saccharomyces cerevisiae
MSSQTERTFIAVKPDGVQRGLVSQILSRFEKKGYKLVAIKLVKADDKLLEQHYAEHVGKPFFPKMVSFMKSGPILATVWEGKDVVRQGRTILGATNPLGSAPGTIRGDFGIDLGRNVCHGSDSVDSAEREINLWFKKEELVDWESNQAKWIYE

SEQ ID NO: 13281 - protein, 149 aa, Desulfitobacterium hafniense
MEKTFIMLKPDAVQRGLVGQIIARFEAKGCKLVGMKLMSVDQALAEQHYAEHKGKSFFEPTVQYIMSSPVVAMVWEGKNVVALARELMGATNPANANPGSIRGSFGMDISRNVIHGSDSVASAEREIALYFRPEELCDYRKAGEEWLSE

SEQ ID NO: 13282 - protein, 147 aa, Thermoplasma volcanium
MDRTLVLLKPDAVKRRLVGKIIERFEEKGLKIVAMKFMQMTKDQAKTHYSVHQNKPFFNDLVNYITSGPIVAMILEGAHAIEIVRLMSGATDGSKAQPGTIRGDYSMGIEKNIIHASDSLEAYNHEMPIFFSDNEIIEWAYGDEVIY

SEQ ID NO: 13283 - protein, 152 aa, Neurospora crassa
MSNQEQTFIAVKPDGVQRGLVGNIISRFENRGFKLVAMKLTQPGQAHLEKHYEDLNTKPFFAGLIKYMNSGPICAMVWEGKDAVKTGRTILGATNPLASAPGTIRGDFALDMGRNVCHGSDSVENAKKEIALWFKPEELNQWNHHSAAWIFE

SEQ ID NO: 13284 - protein, 154 aa, Neurospora crassa
MSNQEQTFIAVKPDGVQRGLVGNIISRFENRGFKLVAMKLTQPGQVHLELEKHYEDLNTKPFFAGLIKYMNSGPICAMVWEGKDAVKTGRTILGATNPLASAPGTIRGDFALDMGRNVCHGSDSVENAKKEIALWFKPEELNQWNHHSAAWIFE

SEQ ID NO: 13285 - protein, 160 aa, Pyrococcus horikoshii
MFQMSETERTLVIIKPDAVVRGLIGEIISRFEKKGLKIVGMKMIWIDRELAEKHYEEHREKPFFKALIDYITKTPVVVMVLEGRYAVEVVRKMAGATDPKDAAPGTIRGDFGLEVSDAICNVIHASDSKESAEREISLFFKPEELFEYPRAADWFYKKGI

SEQ ID NO: 13286 - protein, 157 aa, Pyrococcus horikoshii
MSETERTLVIIKPDAVVRGLIGEIISRFEKKGLKIVGMKMIWIDRELAEKHYEEHREKPFFKALIDYITKTPVVVMVLEGRYAVEVVRKMAGATDPKDAAPGTIRGDFGLEVSDAICNVIHASDSKESAEREISLFFKPEELFEYPRAADWFYKKGI

SEQ ID NO: 13287 - protein, 141 aa, Aeropyrum pernix
MAVQRTLLVVKPDGVERGLIGEVVSRVERKGLKIVAMKMMRLTREKAEEFYSVHRDKPFFGELVEFITSGPVVAMVVEGDEAVSVVRLMIGSTDGRKAAPGTIRGDFSLDIMKNIVHASDSPESFEREFRVLFSESEIVEW

SEQ ID NO: 13288 - protein, 151 aa, Leishmania major
MSSERTFIAVKPDGVQRGLVGEIIARFERKGYKLVALKILQPTTEQAQGHYKDLCSKPFFPALVKYFSSGPIVCMVWEGKNVVKSGRVLLGATNPADSQPGTIRGDFAVDVGRNVCHGSDSVESAEREIAFWFKADEIASWTSHSVSQIYE

SEQ ID NO: 13289 - protein, 151 aa, Leishmania infantum
MSSERTFIAVKPDGVQRGLVGEIIARFERKGYKLVALKILQPTTEQAQGHYKDLSSKPFFPALVKYFSSGPIVCMVWEGKNVVKSGRVLLGATNPADSQPGTIRGDFAVDVGRNVCHGSDSVESAEREIAFWFKADEIASWTSHSVSQIYE

SEQ ID NO: 13290 - protein, 153 aa, Trypanosoma brucei
MPSERTFIAVKPDGVQRNLVGEIIKRFENKGYKLVGLKLLQPTEEQAKQHYIDLASKPFYSGLVSYFSSGPIVGMVWEGLGVVKGGRVLLGATNPADSLPGTIRGDFAVDVGRNVCHGSDSVESAKREIAFWFKAEELVSWTSHSVKQIYGRA

SEQ ID NO: 13291 - protein, 147 aa, Encephalitozoon cuniculi
MERTFIMIKPDAIKRRLISRIIQRFEEKGLYLAASKCVIPKREVLETHYSHLSSMPFFSEMVEDMMSGMVLAMVWVGKDAVSIGRKLIGETNPQAASVGTIRGDYGVSTGKNIIHGSDCVENAEKEIKLWIGDDVQPVSFFDKEWIY

SEQ ID NO: 13292 - protein, 151 aa, Hydra vulgaris
MSTERTFIMVKPDGVVRGLTAKVIKRFEEKGYKLVAMKFMKASEELLNQHYADLKEKKFFPTLIKHIASGPVVPMVWEGKDACRTGRILLGETNPLDSKPGTLRGDYSIDLGRNIVHGSDSVESANKEIALWFTESELVEWSSPLHSSVYE

SEQ ID NO: 13293 - protein, 157 aa, Schistosoma japonicum
HLFVRATNMERTFIMVKPDGVQRGLVGEIIQRFERRGYKLIAVKMIHASEQLLQTHYEALKSLPFFTNLVAYMSSGPVVPMVFEGRKAVENGRTMLGATRPEASCPGSIRGDFCQDVGRNVVHGSDSVESANREINLWFSPQELCRYEQGINTWIHE

SEQ ID NO: 13294 - protein, 149 aa, Schistosoma japonicum
MERTFIMVKPDGVQRGLVGEIIQRFERRGYKLIAVKMIHASEQLLQTHYEALKSLPFFTNLVAYMSSGPVVPMVFEGRKAVENGRTMLGATRPEASCPGSIRGDFCQDVGRNVVHGSDSVESANREINLWFSPQELCRYEQGINTWIHE

SEQ ID NO: 13295 - protein, 153 aa, Caenorhabditis elegans
MSNTERTFIAIKPDGVHRGLVGKIIARFEERGYKLVALKQMTASKAHLEVHYQDLKDKPFFPSLIEYMSSGPVVAMVWQGLDVVKQGRSMLGATNPLASAPGTIRGDFCIQTGRNICHGSDAVDSANREIAHWFKQEEINDYASPFINSWVYE

SEQ ID NO: 13296 - protein, 118 aa, Caenorhabditis elegans
MNHHLLSQAHLDKEKLVILVKEDEKMNSMHKDKPFFPLLIDYMSSGPVVAMLWEGCDVVKRARVILGEELEVGEFRSIFYDLVVRDTHKGCHCSDSVASANREYVLWFEEFKEGTRFD

SEQ ID NO: 13297 - protein, 153 aa, Brugia malayi
MSNTKERTFICIKPDAVQRGLIGKIFERFEQRGYKLVAMKMLKATKSHLEIHYQELQGKPFFNDLVGYMSSGPVIAMVWEGLDVVKQARQMLGATNPLNSMPGTIRGDFSIQTGRNIVHGSDSLPSAEREITHWFKPEELCEWSSATATWVYE

SEQ ID NO: 13298 - protein, 149 aa, Nostoc punctiforme
MERTFLAIKPDGVQRGLVGEIIRRFETKGFTLVGLKFLKVSKELAEQHYGVHRERPFFGSLVEFITSSPVVAMVWEGDGVVASARKIIGATNPLTSEPGTIRGDFGINIGRNLIHGSDAPETAQQEIALWFKDEELVNWQPHITPWLHE

SEQ ID NO: 13299 - protein, 161 aa, Halobacterium sp. NRC-1
MTDHDERTFVMVKPDGVQRGLIGDIVTRLETKGLKMVGGKFMRIDEELAHEHYAEHEDKPFFDGLVSFITSGPVFAMVWEGADATRQVRQLMGATDAQDAAPGTIRGDYGNDLGHNLIHGSDHEDEGANEREIALFFDDDELVDWDRDASAWVYEDLADHD

SEQ ID NO: 13300 - protein, 142 aa, Vibrio cholerae
MALERTFSIIKPDAVKRNLIGEIYHRIEKAGLQIIAAKMVHLSEEQASGFYAEHEGKPFFEPLKEFMTSGPIMVQVLEGENAIARYRELMGKTNPEEAACGTLRADYALSMRYNSVHGSDSPASAAREIEFFFPESEICPRP

SEQ ID NO: 13301 - protein, 141 aa, Haemophilus influenzae Rd
MMTERTFSIIKPDVVKRNLIGAILTRFEQNGFKIIASKMVRLTREQAEGFYAEHQGKEFFVPLVEYMMSSPIVVSVLEKENAVKDYRTLIGTTNPETAAEGTIRKDFALSQRENSVHGSDSIESANREIAYFFTNSEIFER

SEQ ID NO: 13302 - protein, 235 aa, Pinus pinaster
MSSRLFRCSCPNCQDSCCFFSEIFSFTRRKGNSCSASSCRGKVSSLVSLSSHGDYQSAYRQWISGALALPAAVYMLQDPSAEAAELERTFIAIKPDGVQRGLISEIVSRFERKGYKLVAIKLVVPSKQFAEQHYEDLKERPFFNGLCEFLSSGPVLAMVWEGQGVIKYGRKLIGATDPQNSEPGTIRGDLAIIVGRNIIHGSDGPETAKNEINLWFKPEELVNYAHNSEKWLYGK

SEQ ID NO: 13303 - protein, 153 aa, Drosophila melanogaster
MAANKERTFIMVKPDGVQRGLVGKIIERFEQKGFKLVALKFTWASKELLEKHYADLSARPFFPGLVNYMNSGPVVPMVWEGLNVVKTGRQMLGATNPADSLPGTIRGDFCIQVGRNIIHGSDAVESAEKEIALWFNEKELVTWTPAAKDWIYE

SEQ ID NO: 13304 - protein, 149 aa, Plasmodium yoelii yoelii
MEKSFIMIKPDGVQRGLVGVIIKRFERKGYKLIGLKMLNPTEEILKEHYKELSDQPFFKKLVDYINKGPVVAMVWEGMDIVKQGRKLIGETNPLNSNVGTIRGDFCLEVSRNVIHGSDSVASANREINIWFKAEELIQWKNHSNDWVYA

SEQ ID NO: 13305 - protein, 139 aa, Pasteurella multocida
MAVERTLSLIKPDAVKRHLIGAILSRFEQAGFRVVAAKMLHLTQAQAEGFYAEHQDKAFFPELVAYMISAPVLALVLEKENAVKDYRTLIGATNPAVAAEGTIRRDFAIDGRHNSVHGSDSLDSAKREIAYFFVESEIF

SEQ ID NO: 13306 - protein, 149 aa, Scyliorhinus torazame
MERTLIAVKSDGVQRGLIGEIIKRFEHRGFKLIGLKMVKPTEDLAKHHYIDLKDKPFYAGLCKFTSAGPFVAMCWEGQNIVKMGRDMMGETNPADSKPGTIRGDLCVQVGRNIIHGSDSLETAKKEVALWFKPEELIEWKSCAEVYTYE

SEQ ID NO: 13307 - protein, 837 aa, Anthocidaris crassispina
MPAKKEQIQLQKEILNQEMWDELLSLEGLTVIDVYQKWCGPCAAVLSLFKRLRNEIGDDLLRFAVAEADSIETLERYRGKCEPCFLRYGSGQLVNVVRGVNAPALLKNVERELKQEHKVLEEGVERVVIKDPLLAAFEAEEQQAAQAEELEKKRLEEEARIKEIKELGDAGEVSVRPVSQGTVDTLMHGRQDGPQTEPVPKEVTVVLIKPDAVANGHVDSIIAKIEEHGFEILTTEDKTLTEDEAREFYKQHEEEEHFEVLVTFMASGPSKILVLTRGDTGEGVVSEVRNLLGPKDIEVAKEEAPDSLRAQFGTDKKMNAMHGADSKETAAREMAFLLPNFSVPIVPGTGPPPTIEKTLALIRPSALKDHKDEMLQKIQEAGFEVCLQKMVQLTEDQAKEFYKEQEGTPHFEDLIREMTSGEVLALGLAKESAIQSWREFIGPTTIDEAKEKAPDSLRAQYSIPDTQVNVVHGSDSVDTAEKELGFFFPKQTTLAVIKPDAAGEHKEAIIEKIKEAGFNISLQRDVELNKELASKLYLEHEGKEFYENLIDHMSSGLSMVMVLSREDAVDGWRTLMGPTDPDYAREHAPESLRALLGKDVLQNAVHGSSNPEEAKTRIERLFPDVEVLPGGEVKDSVASISMEQSQVKGEGEEGGEEQTEQPAGEGEEQQAEQPAAESGEQQAEGGEPATETATEGGEQQAEQPPAEGGEKPAEEETQQTQEGETPAADEAQAEQTQEGETPAADEAQAEQTQEGEEQKPAEEEAAPATEETAAEQAPAAEETQQTQEGEEKKEETEQTQDAPAAGGGEEAVATEGGGEGDAKPEGGEEKTEEQTAS

SEQ ID NO: 13308 - protein, 653 aa, Ciona intestinalis
MAKRKEVILQETLNTQEAWEVAMNSGKLYVVDAHQKWCGPCTAIVGMLKRIKNELGDDLLRFATAQVDVIDTLEQYRGKCEPNFLFYGGGELVAAVRGCNAPLVQETIQETLKNEHKILSGEMERKVFRDVYSDTPDQEEEEEDEEEEEGGVVSKQITVALIKPDVVQNGQVDEILQKISEAGIEVLADEERMLTVEEARDFYKNKEEEEYFDQLIDYVTSGPCRVLVLTKGESGEGVVTLWRDIIGPFDAAVAKEENPDSLRAIYGTDATSNALHGSSSTEEAVRELGFFFPDFKPPTYRSAKSAASRASGRRSKTPSQKPRLQRTLAIIRPDALQAHKDSILQKIDEAGFKIAMQKEMVLTREQAESFYSEHKDTDYFEPLVKQMTCGPVLALCLAHDDAVDHWRSMLGPKVVADAVEEQPDSLRAQFRVEEAEVNMLHGSDSAEAAEEELSKIFHVEQTLAVIKPDAIDEKEQIMGKLKEAGFMISCQKDMNLSKEIASEIYKSKEGSEYYDHLIDHMTSGPTLMMVLSAENAVEKLRDIMGPTDPEVAKESHPESLRAMFAKSILENAIHSPSTNESAQEKIRIVFGDAQFDWDVNDMQAEEGEVNETSGEQPTDEQSGETEKTEEDGEHEGAQSDQQQAVSEAMEKEE

SEQ ID NO: 13309 - protein, 118 aa, Branchiostoma lanceolatum
GVQRGLVGEVIKRFEQKGFKLVAMKFTQASEEHMKTHYKDLEKLKFYPTLCKYMSSNPVVPMVWEGLGAVKTGRVMLGETDPAKSLPGTIRGDLSVHIGRNLVHGSDSVESAKKEIAL

SEQ ID NO: 13310 - protein, 118 aa, Petromyzon marinus
GVQRRLMGDIVKRFEGKGLKLVAMKFLKPPVALLQQHYIDLKDKAFYSSLVQFMNSGPVLAMVWEGNGVVRTCRRMLGETDPADSAPGTIRGDFCIDIGRNVIHGSDSEESAQKEISL

SEQ ID NO: 13311 - protein, 116 aa, Myxine glutinosa
QRGLVGETVRRFEQKGFKLVAMKMVQASTAHLEEHYKDLKEKPFYSGLCTYMASGPVVAMVWEGSGVVAMGRMLLGETKPQDSLPGTLRGDFCITVGRNIVHGSDSVESAKREIAL

SEQ ID NO: 13312 - protein, 151 aa, Ginglymostoma cirratum
GNKERTFIAVKPDGVQRCIVGEVIKRFEQKGFKLVAMKFLQAPKDLLEKHYCELSDKPFYPKLIKYMSSGPVVAMVWEGLNVVKTGRVMLGETNPADSKPGTIRGDFCIQVGRNIIHGSDSVESAKKEISLWFKREELVEYQNCAQDWIYE

SEQ ID NO: 13313 - protein, 140 aa, Rickettsia conorii
MTIQYTFSMIKPDAIKRNKIGQVNTYLENAGLKIVAQKMKFLTKYEAACFYDEHRARPFFNSLVEYITSGAVVLQVLKGEDAITLNRTVMGATNPAEAEAGTIRKDLGESIEANSIHGSDSENSAKREIEFFFNKSEIIE

SEQ ID NO: 13314 - protein, 140 aa, Rickettsia prowazekii
MTIQYTFSMIKPDVIKRNKIGQVNTYLENAGLKIVAQKMKFLTKYEAECFYDEHRARSFFNSLVEYITSGAVVLQVLKGEDAITLNRTIMGATNPAEAKEGTIRKDLGESIEANSIHGSDSENSAKREIKFFFSKSEIIE

SEQ ID NO: 13315 - protein, 153 aa, Danio rerio
MSAKTERTFIAAKPDGVQRGLMGEIIKRFEQKGFRLVAMKFLQASEDLLKQHYIDLKDRPFYPGLVKYMSSGPVLAMVWEGLNVVKTGRVMLGETNPADSKPGTIRGDFCIEVGRNIIHGSDSVDSANTEISLWFKPEELVSFKSCAQQWIYE

SEQ ID NO: 13316 - protein, 153 aa, Danio rerio
MSAKTERTFIAVKPDGVQRGLMGEIIKRFEQKGFRLVAMKFLQASEDLLKQHYIDLKDRPFYPGLVKYMSSGPVLAIVWEGLNVVKTGRVMLGETNPADSKPGTIRGDFCIEVGRNIIHGSDSVDSANTEISLWFKPEELVSFKHCAQQWIYE

SEQ ID NO: 13317 - protein, 169 aa, Danio rerio
MIILCLTIFANIFKPGWTGANERTFLAVKPDGVQRRLVGEIIRRFERKGFKLVGMKLLQASEAQLRQHYWELREKPFYNGLVKYMSSGPIVAMVWQGLDVVKTARKMLGETNPADSLPGTIRGDYCVEVGRNVIHGSDSVESAAREISLWFEDHELFCYEECGQHWIYA

SEQ ID NO: 13318 - protein, 190 aa, Danio rerio
MAVRFGLRVHAARAVTRNPSRALGIGAARSLSSDSDFSGVNERTLVAVKPDGVQRRLIGEVIKRFEQRGFRLVGLKMLQAPDKLLAQHYVSLQKKPFYSSLLYYMTSGPIVAMVWEGHNVVKTSRMMVGDTDPAAAAPGTIRGDFSVHISRNVVHASDSVEGAQREISLWFHRSELVDWEGCDHKNIYHL

SEQ ID NO: 13319 - protein, 148 aa, Danio rerio
MAGKTEPTFIAVKPDGVQRGLMGEIIKRFEQKGFRLVAAKFVQASEDLAKQHYIDLKDQPFYAGLVKYTSSGPLLAMVWEGLNVIKTGRVMLGETDPFASKPGTIRGDFCIEVGRNLTHGSDSVKSAPPEVSLWFNPENLVSYGSWPR

SEQ ID NO: 13320 - protein, 153 aa, Ictalurus punctatus
MAAKAERTFIAIKPDGVQRGLIGDIIKRFEQKGFRLVALKFLQASEDLLKQHYIDLKDRPFYPGLVKYMSSGPVVAMVWEGLNVVKTGRVMLGETNPADSKPGTIRGDFCIEVGRNIIHGSDSVESANKEISLWFKPEELVSFKSCAFNWIYE

SEQ ID NO: 13321 - protein, 151 aa, Oncorhynchus mykiss
MSNEERTFIAIKPDGVQRRLVGDIIKRFELKGFKLVGMKFIQAPESLLKKHYADLKDRPFFPGLVSYMASGPVVAMVWEGLNVVKTGRVMLGETNPADSKPGTIRGDYCIQVGRNIIHGSDSVESANKEINLWFKPEELCSYTSCSSSWLY

SEQ ID NO: 13322 - protein, 151 aa, Salmo salar
MSNEERTFIAIKPDGVQRRLVGDIIKRFELKGFKMVGMKFIKAPESLLKEHYADLKDRPFFPGLVSYMTSGPVVAMVWEGFNVVKTGRVMLGETNPADSKPGTIRGDFCIQVGRNIIHGSDSVESANTEINLWFKPEELCSYTSCSSQWLY

SEQ ID NO: 13323 - protein, 152 aa, Oreochromis mossambicus
MAELKERTFIAIKPDGVQRGIIGEVIKRFEMKGFKLVGMKMLHASEDLLMEHYVDLKDRPFFPTLINYMRSGPVVAMVWEDKGVVKTGRVMLGETNPADSKPGTIRGDFCIDVSKNIIHGSDSVESANKEISLWFKDDELVNYSSCAFSWLY

SEQ ID NO: 13324 - protein, 141 aa, Chlamydia trachomatis
MEQTLSIIKPDSVGKAHIGEIIAIFEKSGLRIAAMKMVHLSVKEAEGFYVVHKERPFFQELVDFMISGPVVVMVLQGENAVDRNRELMGATNPKEAAEGSIRALFGESIGVNAVHGSDSLENAAIEVSYFFAKTEIVNSVA

SEQ ID NO: 13325 - protein, 149 aa, Gillichthys mirabilis
MERTFIAVKPDGVQRGLCGDIIHRFEKRGFQLVAAKFIQATEDFMKQHYLDLKDMPFYGGLCKYMSSGPVFAMVWEGENIVKLGRMMLGETNPADSKPGSIRGDLCINIGRNIIHGSDTLENAKREVALWFKPEEFVTYTSCFKPFLYE

SEQ ID NO: 13326 - protein, 136 aa, Mycobacterium tuberculosis H37Rv
MTERTLVLIKPDGIERQLIGEIISRIERKGLTIAALQLRTVSAELASQHYAEHEGKPFFGSLLEFITSGPVVAAIVEGTRAIAAVRQLAGGTDPVQAAAPGTIRGDFALETQFNLVHGSDSAESAQREIALWFPGA

SEQ ID NO: 13327 - protein, 154 aa, Xenopus laevis
MAANKERTFIAIKPDGVQRGLMGDIIKRFEQKGFRLVAMKFLQASQDLLRQHYIDLKDRPFYPGLVEYMNSGPVLAMVWEGLNVVKTGRVMLGETNPADSKPGTIRGDLCIQVGRNIIHGSDSVDSANKEIALWFKDEELVEYKSCAYEWVYEN

SEQ ID NO: 13328 - protein, 154 aa, Xenopus laevis
MAANKERTFIAIKPDGVQRGLIGDIIKRFEQKGFRLVAMKFQQASQDLLRQHYIDLKDRPFYPGLVEYMSSGPVLAMVWEGLNVVKTGRVMLGETNPADSKPGTIRGDFCIQVGRNIIHGSDSVESANKEIALWFKDEELVENKSCAYEWVYEN

SEQ ID NO: 13329 - protein, 154 aa, Xenopus laevis
MAANKERTFIAIKPDGVQRGLMGDIIKRFEQKGFRLVAMKFQQASQDLLRQHYIDLKDRPFYPGLVEYMSSGPVLAMVWEGLNVVKTGRVMLGETNPADSKPGTIRGDFCIQVGRNIIHGSDSVESANKEIALWFKDEELVENKSCAYEWVYEN

SEQ ID NO: 13330 - protein, 141 aa, Chlamydia muridarum
MEQTLSIIKPDSVGKAHIGEIVSIFEKAGLRIAAMKMVHLSVKEAEGFYAVHKERPFFQELVDFMISGPVVVMVLQGENAVARNRELMGATNPKEAAEGSIRALFGESIGVNAVHGSDSLENAAIEVSYFFAKTEIVNALA

SEQ ID NO: 13331 - protein, 137 aa, Helicobacter pylori 26695
MKQRTLSIIKPDALKKKVVGKIIDRFESNGLEVVAMKRLHLSVKDAENFYAIHRERPFFKDLIEFMVSGPVVVMVLEGKDAVAKNRDLMGATDPKLAQKGTIRADFAESIDANAVHGSDSLENAHNEIAFFFAARDL

SEQ ID NO: 13332 - protein, 137 aa, Helicobacter pylori J99
MKQRTLSIIKPDALKKKVVGKIIDRFESNGLEVVAMKRLHLSVKDAENFYAIHRERPFFKDLIEFMVSGPVVVMVLEGKDAVAKNRELMGATDPKLAQKGTIRADFAESIDANAVHGSDSLENAHNEIAFFFAAREF

SEQ ID NO: 13333 - protein, 147 aa, Bacillus halodurans
MERTYLMIKPDGVQRNLIGEIVSRFEKKGFTLIGAKLMTVTKEQAETHYAEHKERPFFGELVDFITSGPVFAMVWEGENVIATARKMMGATNPADAEPGTIRGDFGVQVAMNVIHGSDSPESAKREIDIFFDSSELNEYDKVVNRWV

SEQ ID NO: 13334 - protein, 153 aa, Columba livia
MAANCERTFIAIKPDGVQRGLVGEIIKRFEQKGFRLVGMKFVHASEELLKQHYIDLKDRPFYPGLVKYMNSGPIVAMVWEGLNVVKTGRVMLGETNPADSKPGTIRGDFCIQVGRNIIHGSDSVESAQKEINLWFKPAELIDFKSCAHDWIYE

SEQ ID NO: 13335 - protein, 181 aa, Columba livia
MFRGGTHRLRGQPGLSLPHGPRCYGSAPPELQEKTLVLVKPDAVQRRLVGNVIQRFERRGFKLVAMKLLQADQGLLDKHYQQLRQKPFYPALLAYMTSGPLVAMVWEGYNVVRSTRAMVGDTDSAVAAAGTIRGDFSMHVSRNVVHASDSVETAQREIGFWFQRNELVAWESGDRDYTWGP

SEQ ID NO: 13336 - protein, 153 aa, Gallus gallus
MAANCERTFIAIKPDGVQRGLVGEIIKRFEQKGFRLVAMKFVHASEDLLKQHYIDLKDRPFYPGLVKYMNSGPVVAMVWEGLNVVKTGRVMLGETNPADSKPGTIRGDFCIQVGRNIIHGSDSVESAQKEISLWFKPAELIDYRSCAHDWVYE

SEQ ID NO: 13337 - protein, 157 aa, Gallus gallus
GSAPPELREQTLVLVKPDAVQRRLVGDVIGRFERRGFKLVAMKLLQADRGLLDRHYQHLQQKSFYPALLAYMTSGPLVAMVWEGYNVVRSTRAMVGDTDSAQAAAGTIRGDLSMHVSRNVVHASDSVETALREIGFWFQRDELVAWESGDSQYTYGP

SEQ ID NO: 13338 - protein, 143 aa, Salmonella enterica subsp. enterica serovar Typhi
MAIERTFSIIKPNAVAKNVIGSIFARFEAAGFKIVGTKMLHLTVEQARGFYAEHDGKPFFDGLVEFMTSGPIVVSVLESENAVQRHRDLLGATNPANALAGTLRADYADSLTENGTHGSDSLESAQREIAFFFGEGEVCPRTR

SEQ ID NO: 13339 - protein, 145 aa, Nitrosomonas europaea
MRYLMAVERTLSIIKPDAVAKNVIGQIYARFEAAGLKVVAARMAHLSRVEAENFYAIHRERPFFKDLVEFMISGPVMIQVLEGENAIARNRELMGATDPRKAEKGTIRADFAESIDANAVHGSDAPETAVVEIACFFPSLEIHSR

SEQ ID NO: 13340 - protein, 180 aa, Homo sapiens
CCEPRGSRARFGCWRLQPEFKPKQLEGTMANCERTFIAIKPDGVQRGLVGEIIKRFEQKGFRLVGLKFMQASEDLLKEHYVDLKDRPFFAGLVKYMHSGPVVAMVWEGLNVVKTGRVMLGETNPADSKPGTIRGDFCIQVGRNIIHGSDSVESAEKEIGLWFHPEELVDYTSCAQNWIYE

SEQ ID NO: 13341 - protein, 152 aa, Homo sapiens
MANCERTFIAIKPDGVQRGLVGEIIKRFEQKGFRLVGLKFMQASEDLLKEHYVDLKDRPFFAGLVKYMHSGPVVAMVWEGLNVVKTGRVMLGETNPADSKPGTIRGDFCIQVGRNIIHGSDSVESAEKEIGLWFHPEELVDYTSCAQNWIYE

SEQ ID NO: 13342 - protein, 177 aa, Homo sapiens
MVLLSTLGIVFQGEGPPISSCDTGTMANCERTFIAIKPDGVQRGLVGEIIKRFEQKGFRLVGLKFMQASEDLLKEHYVDLKDRPFFAGLVKYMHSGPVVAMVWEGLNVVKTGRVMLGETNPADSKPGTIRGDFCIQVGRNIIHGSDSVESAEKEIGLWFHPEELVDYTSCAQNWIYE

SEQ ID NO: 13343 - protein, 153 aa, Homo sapiens
CTGAHERTFLAVKPDGVQRRLVGEIVRRFERKGFKLVALKLVQASEELLREHYAELRERPFYGRLVKYMASGPVVAMVWQGLDVVRTSRALIGATNPADAPPGTIRGDFCIEVGKNLIHGSDSVESARREIALWFRADELLCWEDSAGHWLYE

SEQ ID NO: 13344 - protein, 169 aa, Homo sapiens
MICLVLTIFANLFPAACTGAHERTFLAVKPDGVQRRLVGEIVRRFERKGFKLVALKLVQASEELLREHYAELRERPFYGRLVKYMASGPVVAMVWQGLDVVRTSRALIGATNPADAPPGTIRGDFCIEVGKNLIHGSDSVESARREIALWFRADELLCWEDSAGHWLYE

SEQ ID NO: 13345 - protein, 152 aa, Homo sapiens
MANLERTFIAIKPDGVQRGLVGEIIKRFEQKGFRLVAMKFLRASEEHLKQHYIDLKDRPFFPGLVKYMNSGPVVAMVWEGLNVVKTGRVMLGETNPADSKPGTIRGDFCIQVGRNIIHGSDSVKSAEKEISLWFKPEELVDYKSCAHDWVYE

SEQ ID NO: 13346 - protein, 151 aa, Homo sapiens
ANLERTFIAIKPDGVQRGLVGEIIKRFEQKGFRLVAMKFLRASEEHLKQHYIDLKDRPFFPGLVKYMNSGPVVAMVWEGLNVVKTGRVMLGETNPADSKPGTIRGDFCIQVGRNIIHGSDSVKSAEKEISLWFKPEELVDYKSCAHDWVYE

SEQ ID NO: 13347 - protein, 168 aa, Homo sapiens
MICLVLTIFANLFPAACTGAHERTFLAVKPDGVQRRLVGEIVRRFERKGFKLVALKLVQSSEELLREHYAELRERPFYGRLVKYMASGPVVAMVWQGLDVVRTSRALIGATNPADAPPGTIRGDFCIEVGNLIHGSDSVESARREIALWFRADELLCWEDSAGHWLYE

SEQ ID NO: 13348 - protein, 162 aa, Homo sapiens
MGSSHHHHHHSSGLVPRGSHMGTRERTLVAVKPDGVQRRLVGDVIQRFERRGFTLVGMKMLQAPESVLAEHYQDLRRKPFYPALIRYMSSGPVVAMVWEGYNVVRASRAMIGHTDSAEAAPGTIRGDFSVHISRNVIHASDSVEGAQREIQLWFQSSELVSW

SEQ ID NO: 13349 - protein, 187 aa, Homo sapiens
MGGLFWRSALRGLRCGPRAPGPSLLVRHGSGGPSWTRERTLVAVKPDGVQRRLVGDVIQRFERRGFTLVGMKMLQAPESVLAEHYQDLRRKPFYPALIRYMSSGPVVAMVWEGYNVVRASRAMIGHTDSAEAAPGTIRGDFSVHISRNVIHASDSVEGAQREIQLWFQSSELVSWADGGQHSSIHPA

SEQ ID NO: 13350 - protein, 152 aa, Homo sapiens
MANLERTFITIRPDSMQCGLVGKIIKRFEQKGFRLVAMKFLPASEEHLKQHYIDLKDRPFFPGLVKYMNSGPVVAMVWEGLNVVKTGRVMLGETNPADSKPGTIRGDFCIQVGRNIIHGSDSVKSAEKEISLRFKPEELVDYKSCAHDWVYE

SEQ ID NO: 13351 - protein, 137 aa, Homo sapiens
MQCGLVGKIIKRFEQKGFRLVAMKFLPASEEHLKQHYIDLKDRPFFPGLVKYMNSGPVVAMVWEGLNVVKTGRVMLGETNPADSKPGTIRGDFCIQVGRNIIHGSDSVKSAEKEISLRFKPEELVDYKSCAHDWVYE

SEQ ID NO: 13352 - protein, 102 aa, Ferroplasma acidarmanus
MKVSDDKARQHYSVHSMKPFFEGLVSYLTSGPIVALILEGDNAIISCRNLAGATDGSAAAAGTIRGDFSLNIEENIVHASDSPESFNHEYKIFFNENEIMDY

SEQ ID NO: 13353 - protein, 152 aa, Bos taurus
MANSERTFIAIKPDGVQRGLMGEIIKRFEQKGFRLVAMKFMRASEDLLKEHYIDLKDRPFFAGLVKYMHSGPVVAMVWEGLNVVKTGRVMLGETNPADSKPGTIRGDFCIQVGRNIIHGSDSVESAEKEIALWFRPEELVNYKSCAQNWIYE

SEQ ID NO: 13354 - protein, 151 aa, Bos taurus
ANSERTFIAIKPDGVQRGLMGEIIKRFEQKGFRLVAMKFMRASEDLLKEHYIDLKDRPFFAGLVKYMHSGPVVAMVWEGLNVVKTGRVMLGETNPADSKPGTIRGDFCIQVGRNIIHGSDSVESAEKEIALWFRPEELVNYKSCAQNWIYE

SEQ ID NO: 13355 - protein, 152 aa, Bos taurus
MANSERTFIAIKPDGVQRGLIGEIIKRFEQKGFRLVAMKFMRASEDLLKEHYIDLKDRPFFAGLVKYMHSGPVVAMVWEGLNVVKTGRVMLGETNPADSKPGTIRGDFCIQVGRNIIHGSDSVESAEKEIALWFHPEELVNYKSCAQNWIYE

SEQ ID NO: 13356 - protein, 151 aa, Synechococcus sp. PCC 7942
MSVERTFIAIKPDGVQRGLVGTIIGRFEQKGFKLVGLKQLKPSRELAEQHYAVHRERPFFNGLVEFITSGPIVAIVLEGEGVVAAARKLIGATNPLTAEPGTIRGDFGVNIGRNIIHGSDAIETAQQEIALWFSPAELSDWTPTIQPWLYE

SEQ ID NO: 13357 - protein, 235 aa, Spinacia oleracea
MRSQIYRSATKAARSFLSSSKNASSRFLPEGRTVAATAAVSLRVKAPYLASFGGANASGTWMSTALAIPAAAYLLQDQEACAAEFERTFIAIKPDGVQRGLISEIVARFERKGFKLVAIKVVIPSKDFAQKHYHDLSERPFFNGLCDFLSSGPVVAMVWEGEGVIKYGRKLIGATDPQKSEPGTIRGDLAVVVGRNIIHGSDGPETAKDEIKLWFKPEELVNYTHNAEKWIYGDN

SEQ ID NO: 13358 - protein, 153 aa, Spinacia oleracea
AEFERTFIAIKPDGVQRGLISEIVARFERKGFSLVAIKVVIPSRPFAQKHYADLKDKPFYVGLVAYWSSGPVVAMVWEGEGVIKYGRKLIGATDPQKSEPGTIRGDLAVVNGRNIIHGSDGPETAKDEIKLWFKPEELVNYTHNAEKWIYGDN

SEQ ID NO: 13359 - protein, 237 aa, Arabidopsis thaliana
MSSQICRSASRAARSLLSSAKNARFFSEGRAIGAATVVHATGKVPQYASNFGKSGSGFVSNSWITRLLALPAAAFMLQDQEALAAEMERTFIAIKPDGVQRGLISEIITRFERKGYKLVGIKVMVPSKGFAQKHYHDLKERPFFNGLCNFLSSGPVVAMVWEGEGVIRYGRKLIGATDPQKSEPGTIRGDLAVVVGRNIIHGSDGPETAKDEISLWFKPEELVSYTSNAEKWIYGQN

SEQ ID NO: 13360 - protein, 237 aa, Arabidopsis thaliana
MSSQICRSASRAARSLLSSAKNARFFSEGRAIGAASVVHATGKVPQYASNFGKSGSGFVSNSWITGLLALPAAAFMLQDQEALAAEMERTFIAIKPDGVQRGLISEIITRFERKGYKLVGIKVMVPSKGFAQKHYHDLKERPFFNGLCNFLSSGPVVAMVWEGEGVIRYGRKLIGATDPQKSEPGTIRGDLAVVVGRNIIHGSDGPETAKDEISLWFKPEELVSYTSNAEKWIYGQN

SEQ ID NO: 13361 - protein, 238 aa, Arabidopsis thaliana
MSSQICRSASKAAKSLLSSAKNARFFSEGRAIGAAAAVSASGKIPLYASNFARSSGSGVASKSWITGLLALPAAAYMIQDQEVLAAEMERTFIAIKPDGVQRGLISEIISRFERKGFKLVGIKVIVPSKDFAQKHYHDLKERPFFNGLCDFLSSGPVIAMVWEGDGVIRYGRKLIGATDPQKSEPGTIRGDLAVTVGRNIIHGSDGPETAKDEISLWFKPQELVSYTSNSEKWLYGDN

SEQ ID NO: 13362 - protein, 235 aa, Brassica rapa
MSSQICRSASKAARSLLSSAKNARFFSEGRAIGAAAAVTASGKMPLYASNFARSSGSSKSWITGLLALPAAAFMVQDQKVFAAEMERTFIAIKPDGVQRGLISEIISRFERKGFKLVGIKVVVPSKDFAQKHYHDLKERPFFNGLCDFLSSGPVIAMVWEGEGVIRYGRKLIGATDPQKFEPGTIRGDLAVVVGRNIIHGSDGPETAKDEINLWFKPQELVSYTNNAEKWIYGDN

SEQ ID NO: 13363 - protein, 194 aa, Brassica rapa
KIPLYASNFARSSSGSSKSWITGLLALPAAAYMVQEQEVLAAEMERTFIAIKPDGVQRGLISEIVARFERKGFKLVGIKVVVPSKDFAQKHYHDLKERPFFNGLCDFLSSGPVIAMVWEGEGVIRYGRKLIGATDPQKSEPGTIRGDLAVVVGRNIIHGSDGPETAKDEINLWFKPQELVSYTNNAEKWIYGDN

SEQ ID NO: 13364 - protein, 237 aa, Glycine max
  unsure (1)..(237): unsure at all Xaa locations
MASQVCKSASRAARSLLSSRFHSQGRALGAAAAVSLSSKVPLFXYGKNGSGNGSASSSSSSSWISGALALPAAAYMFQDQEVQAAELERTFIAIKPDGVQRGLISEIISRFERKGYKLVGIKVVIPKKEFAQRHYHDLKERPFFDGLCDFLSSGPVIAMVWEGQGVISYGRKLIGATDPQKSEPGTIRGDLAVVVGRNIIHGSDGPETAKDEIKLWFKPEELVSFTSNAEKWIYGAN

SEQ ID NO: 13365 - protein, 200 aa, Glycine max
  unsure (1)..(200): unsure at all Xaa locations
XXFSVSVLPPPYRLCLSAIHSRKWRSGGLLKSTTARNMAGSSSSSTSLTRTXALVDAPDMVQRGLISEIISRFERKGYKLVGIKVVIPKKEFAQRHYHDLKERPFFDGLCDFLSSGPVIAMVWEGQGVISNGXQKLIGAPGSQFSGPGTIRGDLAVVVGRNIIHGSDGPETAKDEIKLWFKPEELVSFTSNAEKWVYGVN

SEQ ID NO: 13366 - protein, 233 aa, Pisum sativum
MASHLCKSASRAARSLLSASFHSQGRAVAAAAAVASIRKVPVFAPNYRRTGSGNGPSSWIAGALALPAAAYMLQDQEVHAAELERTFIAIKPDGVQRGLISEIISRFERKGFKLVGIKVLIPTKQFAQQHYHDLKERPFFNGLCDFLSSGPVIAMVWEGEGVITYGRKLIGATDPQKSAPGTIRGDLAVVVGRNIIHGSDGPETAKDEIKLWFKPEELVSFTSNSEKWIYGDN

SEQ ID NO: 13367 - protein, 148 aa, Capsicum annuum
MEQTFIMIKPDGVQRGLVGEIIGRFEKKGFSLKGLKLITVDRAFAEKHYADLSAKPFFNGLVEYIVSGPVVSMVWEGKGVLTTGRKIIGATNPLESAPGTIRGDYAIDIGRNVIHGSDAVESARKEIALWFPEGVAEWQSSLHCWIYE

SEQ ID NO: 13368 - protein, 148 aa, Helianthus annuus
MEQTFIMIKPDGVQRGLVGEIIGRFEKKGFTLKGLKLLTVDQAFAEKHYADLSAKPFFNGLVEYIISGPVVAMVWEGKNVVTTGRKIIGATNPAESPPGTIRGDFAIDIGRNVIHGSDAVESAKKEIGLWFPEGVANWSSSLHPWIYE

SEQ ID NO: 13369 - protein, 271 aa, Oryza sativa
YKTGGLVGWGYNPIQSNQITSIDAATQQQQRNPSQATMSKLCQSACKAAKSLLSATAAASFLAEGRNAALATLTNLGRKTLPTAYAYSYHHNSSAAAAGWLAAIPAAVYMLQDQEAHAAEMERTFIAIKPDGVQRGLISEILSRFERKGFKLVAIKLVVPSKEFAQKHYHDLKDRPFFNGLCDFLSSGPVLAMVWEGEGVIKYGRKLIGATDPQKSEPGTIRGDLAVVVGRNIIHGSDGPETAKAEIGLWFEPRELVSYTSNEEKWIYGVN

SEQ ID NO: 13370 - protein, 152 aa, Prochlorococcus marinus subsp. pastoris str. CCMP1378
MIKERTFLAIKPDGVQRGYVSDIIGRFEKKGFKLVGLKQLIPTKQLAQDHYGVHRERPFFKDLVEFISSGPVVAMIWEGEGVILSARKLIGATKPLEAEPGTIRGDLAIDIGRNIIHGSDGEETAKFEINLWFNQDEICDWETSDSEWRAEN

SEQ ID NO: 13371 - protein, 50 aa, Ceratitis capitata
TIRGDFCIQVGRNIIHGSDAVESANKEIALWFNEKELVSWQPAAESWVYG

SEQ ID NO: 13372 - protein, 152 aa, Prochlorococcus marinus str. MIT 9313
MAMERTFVAIKPDGVQRGLVGEILGRFERKGFKLVGLKQVTPSRDLAGEHYGVHRERPFFAGLVDFITSGPVIAMVWEGDGVIASARKLIGATKPLDAEPGTIRGDLAVNIGRNVIHGSDGPDTAQFEINLWFSAEELNAWTPSDQSWRIES

SEQ ID NO: 13373 - protein, 166 aa, SYNECHOCOCCUS SP. WH 8102
MASTDDGGAFHSYQSMAERTFIAIKPDGVQRGLVGEILGRFERKGFKLVGLKQITPSRALAEQHYGVHKERPFFAGLVDFITSGPVVAMVWEGDGVIASARKLIGATKPLEAEPGTIRGDLAVNIGRNVIHGSDAPETAEFEIGLWFDAAELNDWTPSDQTWRVEA

SEQ ID NO: 13374 - protein, 133 aa, Rattus norvegicus
MANLERTFIAIKPDGVQRSLFLRASGEHLKQHYIDLKDRPFFLGLVKYMNSGPVVAMVWEGLNVVKTGRVMLGETNPADLKPGTIHGDFCIQVVRNIIPGSDSVESAEKEIGLWFKPEELIDYKSCAHDRVYQ

SEQ ID NO: 13375 - protein, 148 aa, Spinacia oleracea
MEQTFIMIKPDGVQRGLVGEIISRFEKKGFSLKALKFVNVDRPFAEKHYADLSAKPFFNGLVEYIVSGPVVAMVWEGKGVVATGRKLIGATNPLASEPGTIRGDFAIDIGRNVIHGSDAVDSATKEIALWFPDGVVHWQSSLHSWIYE

SEQ ID NO: 13376 - protein, 169 aa, Arabidopsis thaliana
MCGLYINLFCLLRITSNKKTMEQTFIMIKPDGVQRGLIGEVICRFEKKGFTLKGLKLISVERSFAEKHYEDLSSKSFFSGLVDYIVSGPVVAMIWEGKNVVLTGRKIIGATNPAASEPGTIRGDFAIDIGRNVIHGSDSVESARKEIALWFPDGPVNWQSSVHPWVYET

SEQ ID NO: 13377 - protein, 149 aa, Arabidopsis thaliana
MEQTFIMIKPDGVQRGLIGEVICRFEKKGFTLKGLKLISVERSFAEKHYEDLSSKSFFSGLVDYIVSGPVVAMIWEGKNVVLTGRKIIGATNPAASEPGTIRGDFAIDIGRNVIHGSDSVESARKEIALWFPDGPVNWQSSVHPWVYET

SEQ ID NO: 13378 - protein, 147 aa, Arabidopsis thaliana
QTFIMIKPDGVQRGLIGEVICRFEKKGFTLKGLKLISVERSFAEKHYEDLSSKSFFSGLVDYIVSGPVVAMIWEGKNVVLTGRKIIGATNPAASEPGTIRGDFAIDIGRNVIHGSDSVESARKEIALWFPDGPVNWQSSVHPWVYET

SEQ ID NO: 13379 - protein, 143 aa, Arabidopsis thaliana
MIKPDGVQRGLIGEVICRFEKKGFTLKGLKLISVERSFAEKHYEDLSSKSFFSGLVDYIVSGPVVAMIWEGKNVVLTGRKIIGATNPAASEPGTIRGDFAIDIGRNVIHGSDSVESARKEIALWFPDGPVNWQSSVHPWVYET

SEQ ID NO: 13380 - protein, 148 aa, Arabidopsis thaliana
MEQTFIMIKPDGVQRGLVSVKSSAGLRRRVSLCLKLISVERSFAEKHYEDLSSKSFFSGLVDYIVSGPVVAMIWEGKNVVLTGRKIIGATNPAASEPGTIRGDFAIDIGRNVIHGSDSVESARKEIALWFPDGPVNWQSSVHPWVYET

SEQ ID NO: 13381 - protein, 148 aa, Brassica rapa
MEQTFIMIKPDGVQRGLVGEIICRFEKKGFTLKGLKLITVDRPFAEKHYQDLSAKPFFSSLVDYIISGPVVAMIWEGKNVVLTGRKIIGATNPAASEPGTIRGDYAIDIGRNVIHGSDSVESANKEAALWFPDGPVNWQSSLHSWIYE

SEQ ID NO: 13382 - protein, 140 aa, Glycine max
  unsure (1)..(140): unsure at all Xaa locations
MESTFIMIKPDGVQRGLIGEIISRFEKKGFYLKALKLVNVERSFAEKHYADLASKPFFQGLVDYIISGPVVAMVWEGKSVVTTGRKIXGATNPLASEPGTIRGDFAVDIGRNVIHGSDSXESANKEIALWFPEGPADWQS

SEQ ID NO: 13383 - protein, 149 aa, Pisum sativum
MAEQTFIMIKPDGVQRGLVGEIISRFEKKGFYLKGLKFVNVERAFAEKHYADLSAKPFFSGLVDYIISGPVVAMIWEGKNVVTTGRKIIGATNPAQSEPGTIRGDFAIDIGRNVIHGSDAVESANKEIALWFPEGAANWQSSLHSWIYE

SEQ ID NO: 13384 - protein, 149 aa, Pisum sativum
MAEQTFIMIKPDGVQRGLVGEIISRFEKKGFYLKGLKFVNVERAFAEKHYADLSAKPFFSGLVDYIISGPVVAMIWEGKNVVTTGRKIIGATNPAQSEPGTIRGDFAIDIGRNVIHGSDAVESANKEIALWFPEGAANWESSLHSWIYE

SEQ ID NO: 13385 - protein, 148 aa, Flaveria bidentis
MEHTFIMIKPDGVQRGLVGEIIGRFEKKGFSLKGLKLLTVDQAFAEKHYADLSAKPFFNGLVEYIISGPVVAMVWEGKNVVTTGRKIIGATNPAESAPGTIRGDFAIDIGRNVIHGSDAVESAKKEIALWFPEGVANWSSSLHPWIYE

SEQ ID NO: 13386 - protein, 148 aa, Flaveria bidentis
MEQTFIMIKPDGVQSGLVGEIIGRFEKKGFSLKGLKLLTVDRAFAEKHYADLSSKPFFNGLVEYIVSGPVVAMVWEGKNVVTTGREIIGATNPAESAPGTIRGDFAIDIGRNVIHGSDAVESARKVIGLWFPEGVANWSSSLHPWIYE

SEQ ID NO: 13387 - protein, 157 aa, Oryza sativa
  unsure (1)..(157): unsure at all Xaa locations
MALEQTFIMIKPDGVQRGLIGXEVIGRFEKKGFYLKAMKLINVEKSFAEKXHYXADLSSKPFFGGLVEYIVSGPXVVAMVWEGKQVVSTGRKLVGATNPLAAEPGXPSRGDFAXVDIGRNVIHGSDSVENARKEIALWFPEGIAEWRSNQHPWIYEV

SEQ ID NO: 13388 - protein, 149 aa, Oryza sativa
MEQSFIMIKPDGVQRGLIGDIISRFEKKGFYLRGMKFMNVERSFAQQHYADLSDKPFFPGLVEYIISGPVVAMVWEGKDVVATGRRIIGATRPWEAAPGTIRADYAVEVGRNVIHGSDSVDNGKKEIALWFPEGLAEWRSNLHPWIYES

SEQ ID NO: 13389 - protein, 149 aa, Oryza sativa; identical to SEQ ID NO: 13388

SEQ ID NO: 13390 - protein, 115 aa, Rattus norvegicus
MKFLPASEDHRKQHYFELKDCPFFLGLVKYMNSGPVVAMVWEGLNVVKTGRVMMGETNPAESKPGAISGDFCIQVGRNIVPGSDSAESAEKEIGLWFKPEELIDYKSCAHNWVYE

SEQ ID NO: 13391 - protein, 157 aa, Oryza sativa
  unsure (1)..(157): unsure at all Xaa locations
ISILRFILKNKYKCFLFWNGGNIRVRDDGAYELLFELQXXPGMKFMNVERSFAQQHYADLSDKPFFPGLVEYIISGPVVAMVWEGKGCVATGRRIIGATRPWEAAPGTIRADYAVEVGRNVIHGSDSVDNGKKEIALWFPEGLAEWRSNLHPWIYES

SEQ ID NO: 13392 - protein, 152 aa, Triticum aestivum
  unsure (1)..(152): unsure at all Xaa locations
MAEQTFIMIKPDGVQRGLIGDIISRFEKKGFYLKGMKFMNVERSFAQQHYADLSDKPFFXXGLVEYIISGPVVAWCXEGEGXVVLTGRRIIGATRPWEAAPGTIRGDYAVEVGRNVIHGSDSVENGKKEIALWFPEGVAEWKSNLHPWIYES

SEQ ID NO: 13393 - protein, 149 aa, Triticum aestivum
MEQTFIMIKPDGVQRGLIGDIISRFEKKGYYLKGMKFMNVEKSFAQQHYADLSAQPFFAKLVDYIISGPVVAMVWEGKDVVLTGPGIIGATRPWEAAPGTIRGDHAVEVSRNVIHGSDSGENGKKEIALWFPGGLAEWKSNLHPWIYEN

SEQ ID NO: 13394 - protein, 211 aa, Mus musculus
MVVSMPLPQIYVEKTLALIKPDVVDKEEEIQDIILGSGFTIIQRRKLHLSPEHCSNFYVEQYGKMFFPNLTAYMSSGPLVAMILARHKAISYWKELMGPSNSLVAKETHPDSLRAIYGTDELRNALHGSNDFAASEREIRFMFPAVIIEPIPIGQAAKDYINLYVAPTLLQGLTELCKEKPPDPYLWLADWLMKNNPNKPKLCHFPVTEEP

SEQ ID NO: 13395 - protein, 277 aa, Mus musculus
MRACQQGRSSSLVSPYMAPKNQSERFAFIAEWYDPNASLLRRYELLFYPTDGSVEMHDVKNRRTFLKRTKYEDLRLEDLFIGNKVNVFSRQLVLIDYGDQYTARQLGSRKEKTLALIKPDAVSKAGEIIEMINKSGFTITKLRMMTLTRKEAADFHVDHHSRPFYNELIQFITSGPVIAMEILRDDAICEWKRLLGPANSGLSRTDAPGSIRALFGTDGVRNAAHGPDTFASAAREMELFFPSSGGCGPANTAKFTNCTCCIIKPHAISEDLFIHYM

SEQ ID NO: 13396 - protein, 395 aa, Mus musculus
MRACQQGRSSSLVSPYMAPKNQSERFAFIAEWYDPNASLLRRYELLFYPVDGSVEMHDVKNRRTFLKRTKYEDLRLEDLFIGNKVNVFSRQLVLIDYGDQYTARQLGSRKEKTLALIKPDAVSKAGEIIEMINKSGFTITKLRMMTLTRKEAADFHVDHHSRPFYNELIQFITSGPVIAMEILRDDAICEWKRLLGPANSGLSRTDAPGSIRALFGTDGVRNAAHGPDTFASAAREMELFFPSSGGCGPANTAKFTNCTCCIIKPHAISEGMLGKNLIAIRDACFGMSAIQMFNLDRANVEEFYEVYKGVVSEYNDMVTELCSGPCVAIEIQQSNPTKTFREFCGPADPEIARHLRPETLRAIFGKTKVQNAVHCTDLPEDGLLEVQYFFKILDN

SEQ ID NO: 13397 - protein, 189 aa, Mus musculus
MTSILRSPQALQLTLALIKPDAVAHPLILEAVHQQILSNKFLIVRTRELQWKLEDCRRFYREHEGRFFYQRLVEFMTSGPIRAYILAHKDAIQLWRTLMGPTRVFRARYIAPDSIRGSLGLTDTRNTTHGSDSVVSASREIAAFFPDFSEQRWYEEEEPQLRCGPVHYSPEEGIHCAAETGGHKQPNKT

SEQ ID NO: 13398 - protein, 189 aa, Mus musculus
MTSILRSPQALQLTLALIKPDAVAHPLILEAVHQQILSNKFLIVRTRELQWKLEDCRRFYREHEGRFFYQRLVEFMTSGPIRAYILAHKDAIQLWRTLMGPTRVFRARYIAPDSIRGSLGLTDTRNTTHGSDSVVSASREIAAFFPDFSEQRWYEEEEPQLRCGPVHYSPEEGIHCAAGTGGHKQPNKA

SEQ ID NO: 13399 - protein, 395 aa, Mus musculus
MRACQQGRSSSLVSPYMAPKNQSERFAFIAEWYDPNASLLRRYELLFYPTDGSVEMHDVKNRRTFLKRTKYEDLRLEDLFIGNKVNVFSRQLVLIDYGDQYTARQLGSRKEKTLALIKPDAVSKAGEIIEMINKSGFTITKLRMMTLTRKEAADFHVDHHSRPFYNELIQFITSGPVIAMEILRDDAICEWKRLLGPANSGLSRTDAPGSIRALFGTDGVRNAAHSPDTFASAAREMELFFPSSGGCGPANTAKFTNCTCCIIKPHAISEGMLGKILIAIRDACFGMSAIQMFNLDRVNVEEFYEVYKGVVSEYNDMVTELCSGPCVAIEIQQSNPTKTFREFCGPADPEIARHLRPETLRAIFGKTKVQNAVHCTDLPEDGLLEVQYFFKILDN

SEQ ID NO: 13400 - protein, 395 aa, Rattus norvegicus
MKAGQQGRSCGLISPYLAPKNQSERFAFIAEWYDPNASLLRRYELLYYPVDGSVEMHDVKNRRTFLKRTKYEDLRVEDLFIGNKVNVFSRQLVLIDYGDQYTARQLGSRKEKTLALIKPDAVSKAGEIIEMINKSGFTITKLRMMTLSRKEAADFHVDHHSRPFYNELIQFITSGPVIAMEILRDDAICEWKRLLGPANSGIARSEAPGSVRALFGTDGIRNAAHGSDTFESAAREMELFFPSSGGCGPTNTAKFTNCTCCIIKPHAISEGMLGKILIAIRDACFEISAIQMFNMDRANVEEFYEVYKGVLSDYNDMVTELYSGPCVAIEIQQSNPTKTFREFCGPSDPEIARHLRPETLRANFGKTKVQNAVHCTDLPEDGLLEVQYFFKILDN

SEQ ID NO: 13401 - protein, 175 aa, Rattus norvegicus
QLTLALIKPDAVAHPLILEAVHQQILSNKFLIVRMRELLWKPEDCRRFYREHEGRFFYQRLVEFMTSGPIRAYILAHKDAIQLWRTLMGPTRVFRARHIAPDSIRGSLGLTDTRNTTHGSDSVVSASREIAAFFPDFSEQRWYEEEEPQLRCGPVHYSPEEGIHCAAETGGPKPA

SEQ ID NO: 13402 - protein, 142 aa, Aquifex aeolicus VF5
MAVERTLIIVKPDAMEKGALGKILDRFIQEGFQIKALKMFRFTPEKAGEFYYVHRERPFFQELVEFMSSGPVVAAVLEGEDAIKRVREIIGPTDSEEARKVAPNSIRAQFGTDKGKNAIHASDSPESAQYEICFIFSGLEIV

SEQ ID NO: 13403 - protein, 162 aa, Arabidopsis thaliana
MIKPDGVSGNYTEEIKTIVVEAGFNIVKEMLTQLDKETASAFYEEHSSRSFFPHLVTYMTSGPVLVMVLEKRNAVSDWRDLIGPTDAEKAKISHPHSIRALCGKNSQKNCVHGSDSTSSAEREIKFFFKDVVSGLFSSPPILLLKLLPLSSIQVLSVMTYDH

SEQ ID NO: 13404 - protein, 133 aa, Glycine max
  unsure (1)..(133): unsure at all Xaa locations
MVRTLAMIKPDGLSGKYTEAIKEVILDSGFHIVKETEVQLDAERASVFYAEHSQRSFFDSLVKYITSGPVLAMVLERPDAVAQWRTVIGPTDAKKANTSHPNSIRAMCGLDSEKNCVHGSDSPESADREISFX

SEQ ID NO: 13405 - protein, 216 aa, Glycine max
  unsure (1)..(216): unsure at all Xaa locations
AAATYCTSLVLPRVRPSVGFTGILVLLVFLSACCCSSSTHGSLATAKTFAIIKPDGLLGNYTDDITRTIVEYGFSIFPAKIVQLDAGTVKSFYAEHSXSKSFFSSLIKYMPSGPVLIMVLEKDNAIADWRALMGPPDASKAKITLPPSIRAKCGLDMEKNCVHGSDSPKSAQREISFFFKELSAEFLLKLIVVFSKENGRKGISTPSLTCXCGCRA

SEQ ID NO: 13406 - protein, 397 aa, Glycine max
  unsure (1)..(397): unsure at all Xaa locations
RVSYVGPPPKKTVLNXFYEMTTAEDRFVFLVEWYDAAASLVRTYNLTYYPKDKTIEMFDLKNKKLFLKRCEYPGVSLNDLYLGSIVTVYSRQLKIVDYADTFTRKNFETTRERTFGMIKPDCYQHIGKIIDIIEHSGFVIGNIKMARMTLNDAEEFYAEHKGKPFYPELTNFICSDFVVGMELVAEGAIAKWRKLIGPTNCQVARVEAPGSLRALFGTEGVRNACHGSDAPTSAQRELDFFFGDKCKLKPTAFLNNCTCCVIKPHIVSEAKVGKVIDHILSEGFEVSALQMFFIDKATSEEFLEIYKGVLPEFSGIANHLTTGPCIALEVRQENAVESFREICGXPHDPEVARTLXRKNSIRAIYGFDRIKNAVHCTDLSEDGPLEVEYFFTILNHK

SEQ ID NO: 13407 - protein, 232 aa, Nicotiana tabacum
MGCLSVVGASPCVSSSALSSPTSRLSCAPSCKLILNPIKKNHHLAAFQPAVHLFASNQSRSHASKRNHTTRIFLPHLVASMEEVEETYIMIKPDGVQRGLVGEIISRFEKKGFKLTGLKLFHCPKELAEEHYKDLQSKPFFPKLIDYITSGPVVCMAWEGVGVVASARKLIGATNPLNAEPGTIRGDLAVQTGRNVVHGSDSPDNGKREIALWFGEGELCSWTPVQEPWLIE

SEQ ID NO: 13408 - protein, 202 aa, Oryza sativa
  unsure (1)..(202): unsure at all Xaa locations
MLELRXIERERTLAMIKPDGLSGNYTERIKEVILESGFDIVKEAVVQLDAERASLFYAXHSGRSFFDSLVKYMTSGPVLVMILERPDAISHWRVLIGPTDARKAKISNPNSIRAMCGVDSEKNCVHGSDSPQSAAREISFFFGDVRSDTVEHDXAVVLXRIXPVYMRHVVRQIILQFICSHTVPNTWLDDGIWIQWKYLNIR

SEQ ID NO: 13409 - protein, 186 aa, Oryza sativa
MGGATSPAAPCLSVCLLPLLFLFLHGCWSCVAIERERTLAMIKPDGLSGNYTERIKEVILESGFDIVKEAVVQLDAERASLFYAEHSGRSFFDSLVKYMTRYLCRKTCVFCSLLKSSQSQAIVNRFDSEAKISNPNSIRAMCGVDSEKNCVHGSDSPQSAAREISFFFGDVRSDTFLLSALQLKKK

SEQ ID NO: 13410 - protein, 215 aa, Triticum aestivum
  unsure (1)..(215): unsure at all Xaa locations
MAGAASSVAPVLVICLLSLALFLHRCRSCEAVERERTLAMIKPDGLSGNFKEKIKEAILGSGFDIIEEAVVHLDAERASLFYAEHADRSFFNSLVKYMTSGPVCAMVLESPDAISRWRNLIGPTDARKAKTSHPDSIRAMCGLDXEKNCVHGSDXPQXAAREISFFFRDDKXEALEHDELXIIGMYPQKADNFXSLICPFQLLVDENVCTSHMLI

SEQ ID NO: 13411 - protein, 132 aa, Triticum aestivum
  unsure (1)..(132): unsure at all Xaa locations
IRTRQRSFFDSLVKYITSGPVLAMVLERPDAIAQWRALIGPTDARKAKTSHPNSIRAMCGLDSEKNCVHGSDSPESAAREISFFFGEEADSVTVEHDELXTLHWYESSQQTEFWFVFKLLRVLVDEYFRFIS

SEQ ID NO: 13412 - protein, 151 aa, Drosophila melanogaster
MEITLALIKPHVLRNTYAMQQIRALISQNFTILDQKEVCITKELSERFYAEHKGKFFYHRLTSFMNSGPSYALILQSETCIQKWRSLLGPTKVFRAVYSDPNCIRALYGISDTRNACHGSDSEASALREISILFPEFDAAVGSRQAKREEA

SEQ ID NO: 13413 - protein, 374 aa, Danio rerio
MEERFAFLAEWYDPSAALLRRYQLLYYPKDGSVEMFDMKNQRTFLRRTKLDELQPEDLFVGNRVNIFSRQLNLISYGDQYTANKLGSKKERTLAMIKPDAVSKVGDIIQMIYDANLIVTKAKMTKLTWKQAADFYMEHQSKSFFNNLVQFVSSGPVIAMELMGDEAVSTWRKVLGPTDSGVAQKEAAHSLRGQFGTDGTKNAGHGSDSLASAARELEYFFPSTAGHGLSNTAKYSDCTCCIIKPHAISEALTGKILKSIIENGFEISALQMFNMDRANAEEFLEVYKGVVAEYTKMVDELCSGPCMALEIHATDAPRTFREFCGPADPEIARHLRPKTLRALYGKNKLQNGVHCTDLPEDGILEVQYFFKILDG

SEQ ID NO: 13414 - protein, 374 aa, Danio rerio
MEERFAFLAEWYDPSAALLRRYQLLYYPKDGSVEMFDMKNQRTFLRRTKLEELQPEDLFVGNRVNIFSRQLNLISYGDQYTANKLCSKKERTLAMIKPDAVSKVGDIIQMIYDANLIVTKAKMTKLTWKQAADFYMEHQSKSFFNNLVQFVSSGPVIAMELMGDEAVSTWRKVLGPTDSGVAQKEAAHSLRGQFGTDGTKNAGHGSDSLASAARELEYFFPSTAGHGLSNTAKYSDCTCCIIKPHAISEALAGKILKSIIENGFEISALQMFNMDRANAEEFLEVYKGVVAEYPKMVDELCSGPCMALEIHAPDAPRTLREFCGPADPEIARPLRPKTFRALYGKNKLQNGVPCTDLPEGGILEVQYFFKILDG

SEQ ID NO: 13415 - protein, 175 aa, Danio rerio
MRCVKALQLTLAVIKPDAMAHPLILEALHQKILENFIIIRKTDLIWRTADSEMFYAEHQGRSSFKRLVEFMSTGQMRAYILAREDAITHWRTMMGPTKVFRARFSSPETLRGKYGLTDTRNTTHGSDSIESAKREISFFFPEFSAEEWMMKEEPHFRLGHTEYNEESQIHTVKHT

SEQ ID NO: 13416 - protein, 212 aa, Homo sapiens
MEISMPPPQIYVEKTLAIIKPDIVDKEEEIQDIILRSGFTIVQRRKLRLSPEQCSNFYVEKYGKMFFPNLTAYMSSGPLVAMILARHKAISYWLELLGPNNSLVAKETHPDSLRAIYGTDDLRNALHGSNDFAAAEREIRFMFPEVIVEPIPIGQAAKDYLNLHIMPTLLEGLTELCKQKPADPLIWLADWLLKNNPNKPKLCHHPIVEEPY

SEQ ID NO: 13417 - protein, 376 aa, Homo sapiens
MNHSERFVFIAEWYDPNASLLRRYELLFYPGDGSVEMHDVKNHRTFLKRTKYDNLHLEDLFIGNKVNVFSRQLVLIDYGDQYTARQLGSRKEKTLALIKPDAISKAGEIIEIINKAGFTITKLKMMMLSRKEALDFHVDHQSRPFFNELIQFITTGPIIAMEILRDDAICEWKRLLGPANSGVARTDASESIRALFGTDGIRNAAHGPDSFASAAREMELFFPSSGGCGPANTAKFTNCTCCIVKPHAVSEGLLGKILMAIRDAGFEISAMQMFNMDRVNVEEFYEVYKGVVTEYHDMVTEMYSGPCVAMEIQQNNATKTFREFCGPADPEIARHLRPGTLRAIFGKTKIQNAVHCTDLPEDGLLEVQYFFKILDN

SEQ ID NO: 13418 - protein, 186 aa, Homo sapiens
MASILRSPQALQLTLALIKPDAVAHPLILEAVHQQILSNKFLIVRMRELLWRKEDCQRFYREHEGRFFYQRLVEFMASGPIRAYILAHKDAIQLWRTLMGPTRVFRARHVAPDSIRGSFGLTDTRNTTHGSDSVVSASREIAAFFPDFSEQRWYEEEEPQLRCGPVCYSPEGGVHYVAGTGGLGPA

SEQ ID NO: 13419 - protein, 194 aa, Homo sapiens
MTQNLGSEMASILRSPQALQLTLALIKPDAVAHPLILEAVHQQILSNKFLIVRMRELLWRKEDCQRFYREHEGRFFYQRLVEFMASGPIRAYILAHKDAIQLWRTLMGPTRVFRARHVAPDSIRGSFGLTDTRNTTHGSDSVVSASREIAAFFPDFSEQRWYEEEEPQLRCGPVCYSPEGGVHYVAGTGGLGPA

SEQ ID NO: 13420 - protein, 588 aa, Homo sapiens
MASKKREVQLQTVINNQSLWDEMLQNKGLTVIDVYQAWCGPCRAMQPLFRKLKNELNEDEILHFAVAEADNIVTLQPFRDKCEPVFLFSVNGKIIEKIQGANAPLVNKKVINLIDEERKIAAGEMARPQYPEIPLVDSDSEVSEESPCESVQELYSIAIIKPDAVISKKVLEIKRKITKAGFIIEAEHKTVLTEEQVVNFYSRIADQRDFEEFVSFMTSGLSYILVVSQGSKHNPPSEETEPQTDTEPNERSEDQPEVEAQVTPGMMKNKQDSLQEYLERQHLAQLCDIEEDAANVAKFMDAFFPDFKKMKSMKLEKTLALLRPNLFHERKDDVLRIIKDEDFKILEQRQVVLSEKEAQALCKEYENEDYFNKLIENMTSGPSLALVLLRDNGLQYWKQLLGPRTVEEAIEYFPESLCAQFAMDSLPVNQLYGSDSLETAEREIQHFFPLQSTLGLIKPHATSEQREQILKIVKEAGFDLTQVKKMFLTPEQTEKIYPKVTGKDFYKDLLEMLSVGPSMVMILTKWNAVAEWRRLMGPTDPEEAKLLSPDSIRAQFGISKLKNIVHGASNAYEAKEVVNRLFEDPEEN

SEQ ID NO: 13421 - protein, 263 aa, Homo sapiens
MLSSKGLTVVDVYQGWCGPCKPVVSLFQKMRIEVGLDLLHFALAEADRLDVLEKYRGKCEPTFLFYAIKDEALSDEDECVSHGKNNGEDEDMVSSERTCTLAIIKPDAVAHGKTDEIIMKIQEAGFEILTNEERTMTEAEVRLFYQHKAGEEAFEKLVHHMCSGPSHLLILTRTEGFEDVVTTWRTVMGPRDPNVARREQPESLRAQYGTEMPFNAVHGSRDREDADRELALLFPSLKFSDKDTEAPQGESSTQPRLKITDLD

SEQ ID NO: 13422 - protein, 588 aa, Homo sapiens
MASKKREVQLQTVINNQSLWDEMLQNKGLTVIDVYQAWCGPCRAMQPLFRKLKNELNEDEILHFAVAEADNIVTLQPFRDKCEPVFLFSVNGKIIEKIQGANAPLVNKKVINLIDEERKIAAGEMARPQYPEIPLVDSDSEVSEESPCESVQELYSIAIIKPDAVISKKVLEIKRKITKAGFIIEAEHKTVLTEEQVVNFYSRIADQCDFEEFVSFMTSGLSYILVVSQGSKHNPPSEETEPQTDTEPNERSEDQPEVEAQVTPGMMKNKQDSLQEYLERQHLAQLCDIEEDAANVAKFMDAFFPDFKKMKSMKLEKTLALLRPNLFHERKDDVLRIIKDEDFKILEQRQVVLSEKEAQALCKEYENEDYFNKLIENMTSGPSLALVLLRDNGLQYWKQLLGPRTVEEAIEYFPESLCAQFAMDSLPVNQLYGSDSLETAEREIQHFFPLQSTLGLIKPHATSEQREQILKIVKEAGFDLTQVKKMFLTPEQIEKIYPKVTGKDFYKDLLEMLSVGPSMVMILTKWNAVAEWRRLMGPTDPEEAKLLSPDSIRAQFGISKLKNIVHGASNAYEAKEVVNRLFEDPEEN

SEQ ID NO: 13423 - protein, 330 aa, Homo sapiens
MGSRKKEIALQVNISTQELWEEMLSSKGLTVVDVYQGWCGPCKPVVSLFQKMRIEVGLDLLHFALAEADRLDVLEKYRGKCEPTFLFYAGGELVAVVRGANAPLLQKTILDQLEAEKKVLAEGRERKVIKDEALSDEDECVSHGKNNGEDEDMVSSERTCTLAIIKPDAVAHGKTDEIIMKIQEAGFEILTNEERTMTEAEVRLFYQHKAGEEAFEKLVHHMCSGPSHLLILTRTEGFEDVVTTWRTVMGPRDPNVARREQPESLRAQYGTEMPFNAVHGSRDREDADRELALLFPSLKFSDKDTEAPQGGEAEATAGPTEALCFPEDVD

SEQ ID NO: 13424 - protein, 139 aa, Cytophaga hutchinsonii
MGGNRTFSMIKPDAVKDGHSGSILKMIEGAGFRIVAIKLTYLSAERAGEFYAVHTGKPFYDSLKSIMSESPIIALILEKENAVEDFRKLIGATNPANADAGTIRKLFAKSLERNAVHGSDSDENAQIEGSFFFSALEKF

SEQ ID NO: 13425 - protein, 608 aa, Mus musculus
MESSRSLLGCLASATAAPPGDDATGAGAEEEEDEEEAAAELGSHAALPYWTAVFEYEAAGEDELTLRLGDVVEVLSKDSQVSGDEGWWTGQLNQRVGIFPSNYVTPRSAFSSRCQPGAEDPSCYPPIQLLEIDFAELTLEEIIGIGGFGKVYRAFWAGDEVAVKAARHDPDEDISKTIENVRQEAKLFAMLKHPNIIALRGVCLKEPNLCLVMEFARGGPLNRVLSGKRIPPDILVNWAVQIARGMNYLHDEAIVPIIHRDLKSSNILILQKVENGDLSNKILKITDFGLAREWHRTTKMSAAGTYAWMAPEVIRASMFSKGSDVWSYGVLLWELLTGEVPFRGIDGLAVAYGVAMNKLALPIPSTCPEPFAKLMEDCWNPDPHSRPSFTSILDQLTTIEESGFFEMPKDSFHCLQDDWKHEIQEMFDQLRAKEKELRTWEEELTRAALQQKNQEELLRRREQELAEREIDILERELNIIIHQLCQEKPRVKKRKGKFRKSRLKLKDGNRISLPSDFQHKFTVQASPTMDKRKSLISNRSSPPASPTIIPRLRAIQLTPGESSKTWGRSSVVPKEEGEEEEKRAPKKKGRTWGPGTLGQKELTSGDEG

SEQ ID NO: 13426 - protein, 1077 aa, Mus musculus
MESSRSLLGCLASATAAPPGDDATGAGAEEEEDEEEAAAELGSHAALPYWTAVFEYEAAGEDELTLRLGDVVEVLSKDSQVSGDEGWWTGQLNQRVGIFPSNYVTPRSAFSSRCQPGAEDPSCYPPIQLLEIDFAELTLEEIIGIGGFGKVYRAFWAGDEVAVKAARHDPDEDISQTIENVRQEAKLFAMLKHPNIIALRGVCLKEPNLCLVMEFARGGPLNRVLSGKRIPPDILVNWAVQIARGMNYLHDEAIVPIIHRDLKSSNILILQKVENGDLSNKILKITDFGLAREWHRTTKMSAAGTYAWMAPEVIRASMFSKGSDVWSYGVLLWELLTGEVPFRGIDGLAVAYGVAMNKLALPIPSTCPEPFAKLMEDCWNPDPHSRPSFTSILDQLTTIEESGFFEMPKDSFHCLQDDWKHEIQEMFDQLRAKEKELRTWEEELTRAALQQKNQEELLRRREQELAEREIDILERELNIIIHQLCQEKPRVKKRKGKFRKSRLKLKDGNRISLPSDFQHKFTVQASPTMDKRKSLISNRSSPPASPTIIPRLRAIQLTPGESSKTWGRSSVVPKEEGEEEEKRAPKKKGRTWGPGTLGQKELTSGDEGLKSLVDGYKQWSSSAPNLGKGPRSSPALPGFTSLMEIEDEDSEGPGSGENHQQHSPNQSYLCIPFPRGEDGDGPSSDGVHEEPTPVNSATSTPQLTPTNSLKRGGTHHRRCEVALLGCGAVLAATGLGFDLLEAGKCQLLPPEEPEPPAREEKKRREGLFQRASRPRRSTSPPSRKLFKKEEPMTLLGDPSASLTLLSLSSISECNSTRSLLRSDSDEIVVYEMPVSPVEAPPLTQCTHNPLVNVRVERFKRDPNQSLTPTHVTLTAPTQPSGHRRTPSDGALKPTAAPAVLGSRSPSSNGMSPSPGTGMLKTPSPSRDPGEFPRLPDPNVVFPPTPRRWNTQRDSTLERPKTLEFLPRPRPSANRQRLDPWWFVSPSHARSASPANSSSTETPSNLDSCFASSSSTVEERPGLPALLPLQAGPLLPAERTLLDLDAEGQSQDSTVPLCRAELNAHGPSPYEIQQEFWS

SEQ ID NO: 13427 - protein, 289 aa, Mus musculus
MSSLGASFVQIKFDDLQFFENCGGGSFGSVYRAKWISQDKEVAVKKLLKIEKEAEILSVLSHRNIIQFYGVILEPPNYGIVTEYASLGSLYDYINSNRSEEMDMEHIMTWATDVAKGMHYLHMEAPVKVIHRDLKSRNVVIAADGVLKICDFGASRFHNHTTHMSLVGTFQWMAPEVIQSLPVSETCDTYSYGVVLWEMLTREVPFKGLEGLQVAWLVVEKNERLTIPSSCPRSFAELLHQCWEADAKKRPSFKQIISILESMSNDTNLPDQCNSFLHNKAEWRWVAPA

SEQ ID NO: 13428 - protein, 802 aa, Mus musculus
MSSLGASFVQIKFDDLQFFENCGGGSFGSVYRAKWISQDKEVAVKKLLKIEKEAEILSVLSHRNIIQFYGVILEPPNYGIVTEYASLGSLYDYINSNRSEEMDMEHIMTWATDVAKGMHYLHMEAPVKVIHRDLKSRNVVIAADGVLKICDFGASRFHNHTTHMSLVGTFPWMAPEVIQSLPVSETCDTYSYGVVLWEMLTREVPFKGLEGLQVAWLVVEKNERLTIPSSCPRSFAELLHQCWEADAKKRPSFKQIISILESMSNDTNLPDQCNSFLHNKAEWRCEIEATLERLKKLERDLSFKEQELKERERRLKMWEQKLTEQSNTPLLPSFEIGAWTEDDVYFWVQQLVRKGESSVEMSGYASLFKENNITGKRLLLLEEEDLKDMGIVSKGHIIHFKSAIEKLTHDYLNLFHFPPLIKDSGGEPEENEEKIVNLELVFGFHLKPGTGPQDCKWKMYMEMDGDEVAITYIKDVTFNTSLPDAEILKMTKPPFVMEKWIVGIAEDQTVECTVTYENDVRTPKLTKHVHSIQWDRTKPQDEVKAVQLAIQTLFSSSEGNPGSRSDSSADCQWLDTLRMRQIASHTSLQRSQSNPILGSPFFPYFANQDSYAAAVRRTQTPVKYQQITPSINPSRSSSPTQYGLSRNFSSLNLSSRDSGFSSLNDSSSERGRYSDRSRNKYYRGSVSLNSSPKGRYGGKSQHSTPSRERYSGKFYRLPQSALNTHQSPDFKRSPNDHDRRVPRTIPGMPLHPETASKAGEEESRVSEGGWTKVEYRKKTHRQLSAKTSKERTRGNYRGRRNF

SEQ ID NO: 13429 - protein, 454 aa, Mus musculus
MSSLGASFVQIKFDDLQFFENCGGGSFGSVYRAKWISQDKEVAVKKLLKIEKEAEILSVLSHRNIIQFYGVILEPPNYGIVTEYASLGSLYDYINSNRSEEMDMEHIMTWATDVAKGMHYLHMEAPVKVIHRDLKSRNVVIAADGVLKICDFGASRFHNHTTHMSLVGTFPWMAPEVIQSLPVSETCDTYSYGVVLWEMLTREVPFKGLEGLQVAWLVVEKNERLTIPSSCPRSFAELLHQCWEADAKKRPSFKQIISILESMSNDTNLPDQCNSFLHNKAEWRCEIEATLERLKKLERDLSFKEQELKERERRLKMWEQKLTEQSNTPLLLPLSARMSEESYFESKTEESNSAEMSCQITAASNGEGHGMNPGLQAMMLMGFGDVFSMNKAGAVLHSGMQINMQAKQNSSKTTCKRRGKKVNMALGFSDFDLSEGDDDDHDGDDAENDVDNSE

SEQ ID NO: 13430 - protein, 888 aa, Mus musculus
MACLHETRTPSPSFGGFVSTLSEASMRKLDPDTSDCTPEKDLTPTQCVLRDVVPLGGQGGGGPSPSPGGEPPPEPFANSVLQLHEQDTGGPGGATGSPESRASRVRADEVRLQCQSGSGFLEGLFGCLRPVWTMIGKAYSTEHKQQQEDLWEVPFEEILDLQWVGSGAQGAVFLGRFHGEEVAVKKVRDLKETDIKHLRKLKHPNIITFKGVCTQAPSYCILMEFCAQGQLYEVLRAGRPVTPSLLVDWSMGIAGGMNYLHLHKIIHRDLKSPNMLITYDDVVKISDFGTSKELSDKSTKMSFAGTVAWMAPEVIRNEPVSEKVDIWSFGVVLWELLTGEIPYKDVDSSAIIWGVGSNSLHLPVPSSCPDGFKILLRQCWNSKPRNRPSFRQILLHLDIASADVLSTPQETYFKSQAEWREEVKLHFEKIKSEGTCLHRLEEELVMRRREELRHALDIREHYERKLERANNLYMELNALMLQLELKERELLRREQALERRCPGLLKSHPSRGLLHGNTMEKLIKKRNVPQKLSPHSKRPDILKTESLLPKLDAALSGVGLPGCPKGPPSPGRSRRGKTRHRKASAKGSCGDLPGLRAALPPHEPGGLGSPGGLGVGPSAWDACPPALRGLHHDLLLRKMSSSSPDLLSAALGARGRGATGGARDPGSPPPPQGDTPPSEGSAPGSTSPDSPGGAKGEPPPPVGPGEGVGLLGTGREGTAGRGGNRAGSQHLTPAALLYRAAVTRSQKRGISSEEEEGEVDSEVELPPSQRWPQGPNMRQSLSTFSSENPSDVEEGTASEPSPSGTPEVGSTNTDERPDERSDDMCSQGSEIPLDLPTSEVVPEREASSLPMQHQDGQGPNPEDSDCDSTELDNSNSIDALRPPASLPP

SEQ ID NO: 13431 - protein, 888 aa, Mus musculus
MACLHETRTPSPSFGGFVSTLSEASMRKLDPDTSDCTPEKDLTPTQCVLRDVVPLGGQGGGGPSPSPGGEPPPEPFANSVLQLHEQDTGGPGGATGSPESRASRVRADEVRLQCQSGSGFLEGLFGCLRPVWTMIGKAYSTEHKQQQEDLWEVPFEEILDLQWVGSGAQGAVFLGRFHGEEVAVKKVRDLKETDIKHLRKLKHPNIITFKGVCTQAPCYCILMEFCAQGQLYEVLRAGRPVTPSLLVDWSMGIAGGMNYLHLHKIIHRDLKSPNMLITYDDVVKISDFGTSKELSDKSTKMSFAGTVAWMAPEVIRNEPVSEKVDIWSFGVVLWELLTGEIPYKDVDSSAIIWGVGSNSLHLPVPSSCPDGFKILLRQCWNSKPRNRPSFRQILLHLDIASADVLSTPQETYFKSQAEWREEVKLHFEKIKSEGTCLHRLEEELVMRRREELRHALDIREHYERKLERANNLYMELNALMLQLELKERELLRREQALERRCPGLLKSHPSRGLLHGNTMEKLIKKRNVPQKLSPHSKRPDILKTESLLPKLDAALSGVGLPGCPKGPPSPGRSRRGKTRHRKASAKGSCGDLPGLRAALPPHEPGGLGSPGGLGVGPSAWDACPPALRGLHHDLLLRKMSSSSPDLLSAALGARGRGATGGARDPGSPPPPQGDTPPSEGSAPGSTSPDSPGGAKGEPPPPVGPGEGVGLLGTGREGTAGRGGNRAGSQHLTPAALLYRAAVTRSQKRGISSEEEEGEVDSEVELPPSQRWPQGPNMRQSLSTFSSENPSDVEEGTASEPSPSGTPEVGSTNTDERPDERSDDMCSQGSEIPLDLPTSEVVPEREASSLPMQHQDGQGPNPEDSDCDSTELDNSNSIDALRPPASLPP

SEQ ID NO: 13432 - protein, 888 aa, Mus musculus
MACLHETRTPSPSFGGFVSTLSEASMRKLDPDTSDCTPEKDLTPTQCVLRDVVPLGGQGGGGPSPSPGGEPPPEPFANSVLQLHEQDTGGPGGATGSPESRASRVRADEVRLQCQSGSGFLEGLFGCLRPVWTMIGKAYSTEHKQQQEDLWEVPFEEILDLQWVGSGAQGAVFLGRFHGEEVAVKKVRDLKETDIKHLRKLKHPNIITFKGVCTQAPCYCILMEFCAQGQLYEVLRAGRPVTPSLLVDWSMGIAGGMNYLHLHKIIHRDLKSPNMLITYDDVVKISDFGTSKELSDKSTKMSFAGTVAWMAPEVIRNEPVSEKVDIWSFGVVLWELLTGEIPYKDVDSSAIIWGVGSNSLHLPVPSSCPDGFKILLRQCWNSKPRNRPSFRKILLHLDIASADVLSTPQETYFKSQAEWREEVKLHFEKIKSEGTCLHRLEEELVMRRREELRHALDIREHYERKLERANNLYMELNALMLQLELKERELLRREQALERRCPGLLKSHPSRGLLHGNTMEKLIKKRNVPQKLSPHSKRPDILKTESLLPKLDAALSGVGLPGCPKGPPSPGRSRRGKTRHRKASAKGSCGDLPGLRAALPPHEPGGLGSPGGLGVGPSAWDACPPALRGLHHDLLLRKMSSSSPDLLSAALGARGRGATGGARDPGSPPPPQGDTPPSEGSAPGSTSPDSPGGAKGEPPPPVGPGEGVGLLGTGREGTAGRGGNRAGSQHLTPAALLYRAAVTRSQKRGISSEEEEGEVDSEVELPPSQRWPQGPNMRQSLSTFSSENPSDVEEGTASEPSPSGTPEVGSTNTDERPDERSDDMCSQGSEIPLDLPTSEVVPEREASSLPMQHQDGQGPNPEDSDCDSTELDNSNSIDALRPPASLPP

SEQ ID NO: 13433 - protein, 511 aa, Mus sp.
MRSLASCSELSHWVLDPLAGTLRGSRPKQVSPRLFGAWHPAPAAARMPTQRWAPGTQCMTKCENSRPKPGELAFRKGDMVTILEACEDKSWYRAKHHGSGQEGLLAAAALRQREALSTDPKLSLMPWFHGKISGQEAIQQLQPPEDGLFLVRESARHPGDYVLCVSFGRDVIHYRVLHRDGHLTIDEAVCFCNLMDMVEHYTKDKGAICTKLVKPRRKQGAKSAEEELAKAGWLLDLQHLTLGAQIGEGEFGAVLQGEYLGQKVAVKNIKCDVTAQAFLDETAVMTKLQHRNLVRLLGVILHHGLYIVMEHVSKGNLVNFLRTRGRALVSTSQLLQFALHVAEGMEYLESKKLVHRDLAARNILVSEDLVAKVSDFGLAKAERKGLDSSRLPVKWTAPEALKNGRFSSKSDVWSFGVLLWEVFSYGRAPYPKMSLKEVSEAVEKGYRMEPPDGCPGSVHTLMGSCWEAEPARRPPFRKIVEKLGRDVRSVGVSAAGGQEAEGSAPTRSQDP

SEQ ID NO: 13434 - protein, 1122 aa, Mus sp.
MDSLAGLVLCGVSLLLYGVVEGAMDLILINSLPLVSDAETSLTCIASGWHPHEPITIGRDFEALMNQHQDPLEVTQDVTREWAKKVVWKREKASKINGAYFCEGRVRGQAIRIRTMKMRQQASFLPATLTMTVDRGDNVNISFKKVLIKEEDAVIYKNGSFIHSVPRHEVPDILEVHLPHAQPQDAGVYSARYIGGNLFTSAFTRLIVRRCEAQKWGPDCSRPCTTCKNNGVCHEDTGECICPPGFMGRTCEKACEPHTFGRTCKERCSGPEGCKSYVFCLPDPYGCSCATGWRGLQCNEACPSGYYGPDCKLRCHCTNEEICDRFQGCLCSQGWQGLQCEKEGRPRMTPQIEDLPDHIEVNSGKFNPICKASGWPLPTSEEMTLVKPDGTVLQPNDFNYTDRFSVAIFTVNRVLPPDSGVWVCSVNTVAGMVEKPFNISVKVLPEPLHAPNVIDTGHNFAIINISSEPYFGDGPIKSKKLFYKPVNQAWKYIEVTNEIFTLNYLEPRTDYELCVQLARPGEGGEGHPGPVRRFTTASIGLPPPRGLSLLPKSQTALNLTWQPIFTNSEDEFYVEVERRSLQTTSDQQNIKVPGNLTSVLLSNLVPREQYTVRARVNTKAQGEWSEELRAWTLSDILPPQPENIKISNITDSTAMVSWTIVDGYSISSIIIRYKVQGKNEDQHIDVKIKNATVTQYQLKGLEPETTYHVDIFAENNIGSSNPAFSHELRTLPHSPGSADLGGGKMLLIAILGSAGMTCITVLLAFLIMLQLKRANVQRRMAQAFQNREEPAVQFNSGTLALNRKAKNNPDPTIYPVLDWNDIKFQDVIGEGNFGQVLKARIKKDGLRMDAAIKRMKEYASKDDHRDFAGELEVLCKLGHHPNIINLLGACEHRGYLYLAIEYAPHGNLLDFLRKSRVLETDPAFAIANSTASTLSSQQLLHFAADVARGMDYLSQKQFIHRDLAARNILVGENYIAKIADFGLSRGQEVYVKKTMGRLPVRWMAIESLNYSVYTTNSDVWSYGVLLWEIVSLGGTPYCGMTCAELYEKLPQGYRLEKPLNCDDEVYDLMRQCWREKPYERPSFAQILVSLNRMLEERKTYVNTTLYEKFTYAGIDCSAEEAA

SEQ ID NO: 13435 - protein, 994 aa, Mus sp.
MGARVPVLPGLDGSFCWLLLLPLLAAVEETLMDSTTATAELGWMVHPPSGWEEVSGYDENMNTIRTYQVCNVFESSQNNWLRTKFIRRRGAHRIHVEMKFSVRDCSSIPSVPGSCKETFNLYYYEADFDLATKTFPNWMENPWVKVDTIAADESFSQVDLGGRVMKINTEVRSFGPVSRNGFYLAFQDYGGCMSLIAVRVFYRKCPRIIQNGAIFQETLSGAESTSLVAARGSCIANAEEVDVPIKLYCNGDGEWLVPIGRCMCKAGFEAVENGTVCRGCPSGTFKANQGDEACTHCPINSRTTSEGATNCVCRNGYYRADLDPLDMPCTTIPSAPQAVISSVNETSLMLEWTPPRDSGGREDLVYNIICKSCGSGRGACTRCGDNVQYAPRQLGLTEPRIYISDLLAHTQYTFEIQAVNGVTDQSPFSPQFASVNITTNQAAPSAVSIMHQVSRTVDSITLSWSQPDQPNGVILDYELQYYEKELSEYNATAIKSPTNTVTVQGLKAGAIYVFQVRARTVAGYGRYSGKMYFQTMTEAEYQTSIKEKLPLIVGSSAAGLVFLIAVVVIAIVCNRRGFERADSEYTDKLQHYTSGHMTPGMKIYIDPFTYEDPNEAVREFAKEIDISCVKIEQVIGAGEFGEVCSGHLKLPGKREIFVAIKTLKSGYTEKQRRDFLSEASIMGQFDHPNVIHLEGVVTKSTPVMIITEFMENGSLDSFLRQNDGQFTVIQLVGMLRGIAAGMKYLADMNYVHRDLAARNILVNSNLVCKVSDFGLSRFLEDDTSDPTYTSALGGKIPIRWTAPEAIQYRKFTSASDVWSYGIVMWEVMSYGERPYWDMTNQDVINAIEQDYRLPPPMDCPSALHQLMLDCWQKDRNHRPKFGQIVNTLDKMIRNPNSLKAMAPLSSGINLPLLDRTIPDYTSFNTVDEWLEAIKMGQYKESFANAGFTSFDVVSQMMMEDILRVGVTLAGHQKKILNSIQVMRAQMNQIQSVEV

SEQ ID NO: 13436 - protein, 1018 aa, Rattus norvegicus
MEEEEGAAAREWGATPAGPVWTAVFDYEAVGDEELTLRRGDRVQVLSQDCAVSGDEGWWTGQLPSGRVGVFPSNYVAPAAPAAPTDLQLPQEIPFHELQLEEIIGVGGFGKVYRALWRGEEVAVKAARLDPERDPAVTAEQVRQEARLFGALQHPNIIALRGACLSPPNLCLVMEYARGGALSRVLAGRRVPPHVLVNWAVQVARGMNYLHNDAPVPIIHRDLKSINILILEAIENHNLADTVLKITDFGLAREWHKTTKMSAAGTYAWMAPEVIRLSLFSKSSDVWSFGVLLWELLTGEVPYREIDALAVAYGVAMNKLTLPIPSTCPEPFARLLEECWDPDPHGRPDFGSILKQLEVIEQSALFQMPLESFHSLQEDWKLEIQHMFDDLRTKEKELRSREEELLRAAQEQRFQEEQLRRREQELAEREMDIVERELHLLMSQLSQEKPRVRKRKGNFKRSRLLKLREGSSHISLPSGTSQFPERPRETSWGRGFEHKITVQASPTLDKRKGSDGASPPASPSIIPRLRAIRCEYTRPSQSVGTPQLSAGIPGAQQGQQLRVCVPLSEGTAKTQLGRRTARFQPRGQLGTAKRDVTPVDCGSSGGSGTWSRSGPPKKEELVGGKKKGRTWGPSSTLQKERAGGEERLKALGEGSKQWSSSAPNLGKSPKHTPMAPGFASLNEMEEFAEADEGNNVPPSPYSTPSYLKVPLPAEASPCAQPPWEPPAATPSRPGHGARRRCDLALLGCATLLSAVGLGADVAEARAGDGEEQRGWLDGLFFPRPGRFPRGLSPTGRPGGRREETAPGFGLAPSATLVSLSSVSDCNSTRSLLRSDSDEAAPTAPSPPPSLLPPSPSTNPLVDVELESFKKDPRQSLTPTHVTAAHAVSRGHRRTPSDGALRQREPPELTNHGPRDPLDFPRLPDPQALFPTRRRPLEFPGRPTTLTFAPRPRPAASRPRLDPWKLVSFGRTLSISPPSRPDTPESPGPLSVQPTLLDMDMEGQSQDNTVPLCGAYGSH

SEQ ID NO: 13437 - protein, 888 aa, Rattus norvegicus
MACLHETRTPSPSFGGFVSTLSEASMRKLDPDTSDCTPEKDLTPTQCVLRDVVPLGGQGGGGPSPSPGGEPPPEPFANSVLQLHEQDTGGPGGATGSPESRASRVRADEVRLQCQSGSGFLEGLFGCLRPVWTMIGKAYSTEHKQQQEDLWEVPFEEILDLQWVGSGAQGAVFLGRFHGEEVAVKKVRDLKETDIKHLRKLKHPNIITFKGVCTQAPCYCILMEFCAQGQLYEVLRAGRPVTPSLLVDWSMGIAGGMNYIHLHKIIHRDLKSPNMLITYDDVVKISDFGTSKELSDKSTKMSFAGTVAWMAPEVIRNEPVSEKVDIWSFGVVLWELLTGEIPYKDVDSSAIIWGVGSNSLHLPVPSSCPDGFKILLRQCWNSKPRNRPSFRQILLHLDIASADVLSTPQETYFKSQAEWREEVKLHFEKIKSEGTCLHRLEEELVMRRRGEFRHALDIREHYERKLERANNLYMELNALMLQLELTERELLRRAQALERRCPGLLKSHPSRGLLHGNTMEKLIKKRNVPQKLSPHSKRPDILKTESLLPKLDAALSGVGLPGCPKGPPSPGRSRRGKTRHRKASAKGSCGDLPVLRAALPPHEPGGLGSPGGLGVGPTAWDACPPALRGLHHDLLLRKMSSSSPDLLSAALGARGRGATGGARDPGSPPPPQADTPPSEGSAPGSTSPDSPGGAKGEPPPPVGPGEGVGLLGTGREGTTGRGGSRAGYQHLTPAALLYRAAVTRSQKRGISSEEEEGEVDSEVELPPSQRWPQGPNMRQSLSTFSSENPSDVEEGTASEPSPSGTPEVGSTNTDERPDERSDDMCSQGSEIPLDLPTSEVVPERETSSLPMQHQDDQGPNPEDSDCDSTELDNSNSIDALPPPASLPP

SEQ ID NO: 13438 - protein, 888 aa, Rattus norvegicus
MACLHETRTPSPSFGGFVSTLSEASMRKLDPDTSDCTPEKDLTPTQCVLRDVVPLGGQGGGGPSPSPGGEPPPEPFANSVLQLHEQDTGGPGGATGSPESRASRVRADEVRLQCQSGSGFLEGLFGCLRPVWTMIGKAYSTEHKQQQEDLWEVPFEEILDLQWVGSGAQGAVFLGRFHGEEVAVKKVRDLKETDIKHLRKLKHPNIITFKGVCTQAPCYCILMEFCAQGQLYEVLRAGRPVTPSLLVDWSMGIAGGMNYLHLHKIIHRDLKSPNMLITYDDVVKISDFGTSKELSDKSTKMSFAGTVAWMAPEVIRNEPVSEKVDIWSFGVVLWELLTGEIPYKDVDSSAIIWGVGSNSLHLPVPSSCPDGFKILLRQCWNRKPRNRPSFRQILLHLDIASADVLSTPQETYFKSQAEWREEVKLHFEKIKSEGTCLHRLEEELVMRRREELRHALDIREHYERKLERANNLYMELNALMLQLELKERELLRREQALERRCPGLLKSHTSRSLLHGNTMEKLIKKRNVPQKLSPHSKRPDILKTESLLPKLDAALSGVGLPGCPKAPPSPGRSRRGKTRHRKASAKGSCGDLPGLRAALPPHEPGGLGSPGGLGVGPTAWDASPPALRGLHHDLLLRKMSSSSPDLLSAALGARGRGATGGARDPGSPPPPQGDTPPSEGSAPGSTSPDSPGGAKGEPPPPVGPGEGVGLLGTGREGTTGRGGSRAGYQHLTPAALLYRAAVTRSQKRGISSEEEEGEVDSEVELPPSQRWPQGPNMRQSLSTFSSENPSDVEEGTASEPSPSGTPEVGSTNTDERPDERSDDMCSQGSEIPLDLPTSEVVPERETSSLPMQHQDDQGPNPEDSDCDSTELDNSNSIDALPPPASLPP

SEQ ID NO: 13439 - protein, 548 aa, Rattus norvegicus
MANPQEHLSCSSLPHLPLTENKISGGRNELAAMGNHPSPKFPEDSQERVVAIQSELTEITGSPVSTTVLTSVSEDSRSQFENSVLQLREQDESEVTVSPGNSNTVDGENTNGPEDIKIQFSRSGSGSGGFLEGLFGCLRPVWNIIGKAYSTDYKLQQQDTWEVPFEEISELQWLGSGAQGAVFLGKFRAEEVAIKKVREQNETDIKHLRKLKHPNIIAFKGVCTQAPCYCIIMEYCAHGQLYEVLRAGRKITPRLLVDWSTGIASGMNYLHLHKIIHRDLKSPNVLVTHTDAVKISDFGTSKELSDKSTKMSFAGTVAWMAPEVIRNEPVSEKVDIWSFGVVLWELLTGEIPYKDVDSSAIIWGVGSNSLHLPVPSTCPDGFKILMKQTWQSKPRNRPSFRQTLMHLDIASADVLATPQETYFKSQAEWREEVKKHFEKIKSEGTCIHRLDEELIRRRREELRHALDIREHYERKLERANNLYMELSAIMLQLEMREKELLKREQAVEKKYPGTYKRHPVRPIIHPNAMEKLMKRKVVSHKAGVQTKR

SEQ ID NO: 13440 - protein, 602 aa, Rattus norvegicus
MAAVLQQVLERPELNKLPKSTQNKLEKFLAEQQSEIDCLKGRHEKFKVESEQQYFEIEKRLSQSQERLVNETRECQNLRLELEKLNNQVKVLTEKNKELETAQDRNLGIQSQFTRAKEELEAEKRDLIRTNERLSQEVEYLTEDVKRLNEKLKESNTTKGELQLKLDELQASDVTVKYREKRLEQEKELLHNQNSWLNTELKTKTDELLALGREKGNEILELKCTLENKKEEDAIRSHSESASPSALSSSPNNLSPTGWSQPKTPVPAQRERAPGSGTQEKNKIRPRGQRDSSYYWEIEASEVMLSTRIGSGSFGTVYKGKWHGDVAVKILKVVDPTPEQLQAFRNEVAVLRKTRHVNILLFMGYMTKDNLAIVTQWCEGSSLYKHLHVQETKFQMFQLIDIARQTAQGMDYLHAKNIIHRDMKSNNIFLHEGLTVKIGDFGLATVKSRWSGSQQVEQPTGSVLWMAPEVIRMQDNNPFSFQSDVYSYGIVLYELMTGELPYSHINNRDQIIFMVGRGYASPDLSRLYKNCPKAMKRLVADCVKKVKEERPLFPQILSSIELLQHSLPKINRSASEPSLHRAAHTEDINACTLTTSPRLPVF

SEQ ID NO: 13441 - protein, 648 aa, Rattus norvegicus
MEHIQGAWKTISNGFGLKDAVFDGSSCISPTIVQQFGYQRRASDDGKLTDSSKTSNTIRVFLPNKQRTVVNVRNGMSLHDCLMKALKVRGLQPECCAVFRLLQEHKGKKARLDWNTDAASLIGEELQVDFLDHVPLTTHNFARKTFLKLAFCDICQKFLLNGFRCQTCGYKFHEHCSTKVPTMCVDWSNIRQLLLFPNSTASDSGVPAPPSFTMRRMRESVSRMPASSQHRYSTPHAFTFNTSSPSSEGSLSQRQRSTSTPNVHMVSTTLPVDSRMIEDAIRSHSESASPSALSSSPNNLSPTGWSQPKTPVPAQRERAPGSGTQEKNKIRPRGQRDSSYYWEIEASEVMLSTRIGSGSFGTVYKGKWHGDVAVKILKVVDPTPEQLQAFRNEVAVLRKTRHVNILLFMGYMTKDNLAIVTQWCEGSSLYKHLHVQETKFQMFQLIDIARQTAQGMDYLHAKNIIHRDMKSNNIFLHEGLTVKIGDFGLATVKSRWSGSQQVEQPTGSVLWMAPEVIRMQDNNPFSFQSDVYSYGIVLYELMTGELPYSHINNRDQIIFMVGRGYASPDLSRLYKNCPKAMKRLVADCVKKVKEERPLFPQILSSIELLQHSLPKINRSASEPSLHRAAHTEDINACTLTTSPRLPVF

SEQ ID NO: 13442 - protein, 623 aa, Rattus norvegicus
MSTASAASSSSSSSASEMIEAPSQVLNFEEIDYKEIEVEEVVGRGAFGVVCKAKWRAKDVAIKQIESESERKAFIVELRQLSRVNHPNIVKLYGACLNPVCLVMEYAEGGSLYNVLHGAEPLPYYTAAHAMSWCLQCSQGVAYLHSMQPKALIHRDLKPPNLLLVAGGTVLKICDFGTACDIQTHMTNNKGSAAWMAPEVFEGSNYSEKCDVFSWGIILWEVITRRKPFDEIGGPAFRIMWAVHNGTRPPLIKNLPKPIESLMTRCWSKDPSQRPSMEEIVKIMTHLMRGLLCTEGILNRDLLLLQYFPGADEPLQYPCQYSDEGQSNSATSTGSFMDIASTNTSNKSDTNMEQVPATNDTIKRLESKLLKNQAKQQSDSGRLSLGASRGSSVESLPPTSEGKRMSADMSEIEARIVATTAYTKPKRGHRKTASFGNILDVPEIVISGNGQPRRRSIQDLTVTGTEPGQVSSRSSSPSVRMITTSGPTSEKPARSLPWTPDDSTDTNGSDNSIPMAYLTLDHQLQPLAPCPNSKESMAVFEQHCKMAQEYMKVQTEIALLLQRKQELVAELDQDEKDQQNTSRLVQEHKKLLDENKSLSTYYQQCKKQLEVIRSQQQKRQGTS

SEQ ID NO: 13443 - protein, 604 aa, Rattus norvegicus
MEPPRGPPASGAEPSRAVGTVKVYLPNKQRTVVTVRDGMSVYDSLDKALKVRGLNQDCCVVYRLIKGRKTVTAWDTAIAPLDGEELIVEVLEDVPLTMHNFVRKTFFSLAFCDFCLKFLFHGFRCQTCGYKFHQHCSSKVPTVCVDMSTNRRQFYHSIQDLSGGSRQQEVPSNLSVNELLTPQGPSPFTQQRDQEHFSFPAPANPPLQRIRSTSTPNVHMVSTTAPMDSSLMQFTAQSFSTDAAGRGGDGAPRGSPSPASVSSGRKSPHSKLPAEQRERKSLADEKKKVKNLGYRDSGYYWEVPPSEVQLLKRIGTGSFGTVFRGRWHGDVAVKVLKVAQPTAEQAQAFKNEMQVLRKTRHVNILLFMGFMTRPGFAIITQWCEGSSLYHHLHVADTRFDMVQLIDVARQTAQGMDYLHAKNIIHRDLKSNNIFLHEGLTVKIGDFGLATVKTRWSGAQPLEQPSGSVLWMAAEVIRMQDPNPYSFQSDVYAYGVVLYELMTGSLPYSHIGSRDQIIFMVGRGYLSPDLSKIFSNCPKAMRRLLTDCLKFQREERPLFPQILATIELLQRSLPKIERSASEPSLHRTQADELPACLLSAARLVP

SEQ ID NO: 13444 - protein, 550 aa, Rattus norvegicus
MRVPILTLERAFANKPGPKGFGVDISCSNDGNGFILCPGYSAPCKKQQDSTFQSILCCCCCCSVQGRRVTTRISLSREEELSEKHSQRQRQWFSKLMGKSQEFTEERIRVKALYDFLPREPCNLALKRAEEYLILERCDPHWWRARDRLGNEGLIPSNYVTENRLTNLETYEWYHKNITRDQTERLLRQEAKEGAFIVRDSRHLGSYTISVFTRARRHTQSSIKHYQIKKNDSGQWYVTERHLFPSVPELIQYHQYNAAGLMSRLRYPVGLLGSCLPATSGFSYEKWEIDPSELTFVKEIGSGQFGVVYLGEWRARIRVAIKAINEGSMSEEDFIEEAKVMMKLSHSRLVQLYGVCIQQKPLYIVTEFMENGCLLDYLRERKGKLPKALLLSMCQDICEGMAYLEKSCYIHRDLAARNCLVSSACVVKISDFGMARYVLDDEYISSSGAKFPVKWSPPEVFHFNKYSSKSDVWSFGVLMWEVFTEGKMPFENKSNLQVVEAISKGFRLYRPHLAPMSIYGVMYSCWHESPKGRPTFAELLQVLAEIAETW

SEQ ID NO: 13445 - protein, 506 aa, Rattus norvegicus
MGSVCMRLWAYLQPFLPCWSQEADKSVVIENPGAYCPPEANRSQGQYFVALFDYEARTAEDLSFHAGDKLQVLDTSHEGWWLARHLEKKGPGLGQQLQGYIPSNYVAEDRSLQAEPWFFGAIKRADAEKQLLYSENQTGAFLIRESESQKGDFSLSVLDEGVVKHYRIRRLDEGGFFLTRRKTFSTLNEFVNYYTTTSDGLCVKLEKPCLKIQVPTPFDLSYKTVDQWEIDRNSIQLLKRLGSGQFGEVWEGLWNNTTPVAVKTLKPGSMDPNDFLREAQIMKSLRHPKLIQLYAVCTLEDPIYIITELMRHGSLQEYLQNDGGSKIRLTQQVDMAAQVASGMAYLESQNYIHRDLAARNVLVGEHNIYKVADFGLARVFKVDNEDIYESKHEIKLPVKWTAPEAIRTNKFSIKSDVWSFGILLYEIITYGKMPYSGMTGAQVIHMLGQNYRLPQPSNCPEQFYSIMMECWNVEPKQRPTFETLHWKLEDYFEPDSSYSDTNNFIN

SEQ ID NO: 13446 - protein, 537 aa, Rattus norvegicus
MGCVQCKDKEAAKLTEERDGSLNQSSGYRYGTDPTPQHYPSFGVTSIPNYNNFHAAGGQGLTVFGGVNSSSHTGTLRTRGGTGVTLFVALYDYEARTEDDLSFHKGEKFQILNSSEGDWWEARSLTTGETGYIPSNYVAPVDSIQAEEWYFGKLGRKDAERQLLSFGNPRGTFLIRESETTKGAYSLSIRDWDDMKGDHVKHYKIRKLDNGGYYITTRAQFETLQQLVQHYSERAAGLCCRLVVPCHKGMPRLTDLSVKTKDVWEIPRESLQLIKRLGNGQFGEVWMGTWNGNTKVAIKTLKPGTMSPESFLEEAQIMKKLKHDKLVQLYAVVSEEPIYIVTEYMNKGSLLDFLKDGEGRALKLPNLVDMAAQVAAGMAYIERMNYIHRDLRSANILVGNGLICKIADFGLARLIEDNEYTARQGAKFPIKWTAPEAALYGRFTIKSDVWSFGILLTELVTKGRVPYPGMNNREVLEQVERGYRMPCPQDCPISLHELMIHCWKKDPEERPTFEYLQGFLEDYFTATEPQYQPGENL

SEQ ID NO: 13447 - protein, 542 aa, Rattus norvegicus
MGSNKSKPKDASQRRRSLEPAENVHGAGGAFPASQTPSKPASADGHRGPNAAFVPPAAAEPKLFGGFNSSDTVTSPQRAGPLAGGVTTFVALYDYESRTETDLSFKKGERLQIVNNTRKVDVREGDWWLAHSLSTGQTGYIPSNYVAPSDSIQAEEWYFGKITRRESERLLLNAENPRGTFLVRESETTKGAYCLSVSDFDNAKGLNVKHYKIRKLDSGGFYITSRTQFNSLQQLVAYYSKHADGLCHRLTTVCPTSKPQTQGLAKDAWEIPRESLRLEVKLGQGCFGEVWMGTWNGTTRVAIKTLKPGTMSPEAFLQEAQVMKKLRHEKLVQLYAVVSEEPIYIVTEYMNKGSLLDFLKGETGKYLRLPQLVDMSAQIASGMAYVERMNYVHRDLRAANILVGENLVCKVADFGLARLIEDNEYTARQGAKFPIKWTAPEAALYGRFTIKSDVWSFGILLTELTTKGRVPYPGMVNREVLDQVERGYRMPCPPECPESLHDLMCQCWRKEPEERPTFEYLQAFLEDYFTSTEPQYQPGENL

SEQ ID NO: 13448 - protein, 380 aa, Rattus rattus
EAVREFAKEIDVSFVKIEEVIGAGEFGEVYKGRLKLPGKREIYVAIKTLKAGYSEKQRRDFLSEASIMGQFDHPNIIRLEGVVTKSRPVMIITEFMENGALDSFLRQNDGQFTVIQLVGMLRGIAAGMKYLSEMNYVHRDLAARNILVNSNLVCKVSDFGLSRYLQDDTSDPTYTSSLGGKIPVRWTAPEAIAYRKFTSASDVWSYGIVMWEVMSFGERPYWDMSNQDVINAIEQDYRLPPPMDCPAALHQLMLDCWQKDRNSRPRFAEIVNTLDKMIRNPASLKTVATITAVPSQPLLDRSIPDFTAFTTVDDWLSAIKMVQYRDSFLTAGFTSLQLVTQMTSEDLLRIGVTLAGHQKKILSSIHSMRVQMNQSPSVMA

SEQ ID NO: 13449 - protein, 1083 aa, Rattus sp.
TSLTCIASGWHPHEPITIGRDFEALMNQHQDPLEVTQDVTREWAKKVVWKREKASKINGAYFCEGRVRGQAIRIRTMKMRQQASFLPATLTMTVDRGDNVNISFKKVLIKEEDAVIYKNGSFIHSVPRHEVPDILEVHLPHAQPQDAGVYSARYIGGNLFTSAFTRLIVRRCEAQKWGPDCNRPCTTCKNNGVCHEDTGECICPPGFMGRTCEKACEPHTFGRTCKERCSGSEGCKSYVFCLPDPYGCSCATGWRGLQCNEACPYGHYGPDCKLRCHCTNEEMCDRFQGCLCSQGWQGLQCEKEGRPRMTPQIEDLPDHIEVNSGKFNPICKASGWPLPTSEEMTLVKPDGTVLQPNDFNHTDHFSVAIFTVNRILPPDSGVWVCSVNTVAGMVEKPFNISVKVLPEPLHAPNVIDTGHNFAIINISSEPYFGDGPIKSKKLFYKPVNQAWKYIQVMNEIVTLNYLEPRTDYELCVQLVRPGEGGEGHPGPVRRFTTASIGLPPPRGLSLLPKSQTALNLTWQPIFTSSEDEFYVEVERWSQQTRSDQQNIKVPGNLTSVLLNNLLPREQYSVRARVNTKAQGEWSEELRAWTLDDSDILPPQPENIKITNITDYTALVSWTIVDGYSISSIIIRYKVQGKNEDQHIDVKIKNATITQYQLKGLEPETTYHVDIFAENNIGSSNPAFSQEIRTLPAPKDLGGGKMLLIAILGSAGMTCITVLLAFLIMLQLKRANVQRRMAQAFQNVREEPAVQFNSGTLALNRKAKNNPDPTIYPVLDWNDIKFQDVIGEGNFGQVLKARIKKDGLRMDAAIKRMKEYASKDDHRDFAGELEVLCKLGHHPNIINLLGACEHRGYLYLAIEYAPHGNLLDFLRKSRVLETDPAFAIANSTASTLSSQQLLHFAADVARGMDYLSQKQFIHRDLAARNILVGENYIAKIADFGLSRGQEVYVKKTMGRLPVRWMAIESLNYSVYTTNSDVWSYGVLLWEIVSLGGTPYCGMTCAELYEKLPQGYRLEKPLNCDDEVYDLMRQCWREKPYERPSFAQILVSLNRMLEERKTYVNTTLYEKFTYAGIDCSAEEAA

SEQ ID NO: 13450 - protein, 697 aa, Feline sarcoma virus
AFPLTRPNWDFATPAGREHLRLYRQLLLAGLRGAARRPTNLAQVKQVVQGKEENLLAGPSENDPNLFVALYDFVASGDNTLSITKGEKLRVLGYNHNGEWCEAQTKNGQGWVPSNYITPVNSLEKHSWYHGPVSRNAAEYLLSSGINGSFLVRESESSPGQRSISLRYEGRVYHYRINTASDGKLYVSPESRFNTLAELVHHHSTVADGLITTLHYPAPKRNKPTVYGVSPNYDKWEMERTDITMKHKLGGGQYGEVYEGVWKKYSLTVAVKTLKEDTMEVEEFLKEAAVMKEIKHPNLVQLLGVCTREPPFYIITEFMTYGNLLDYLRECNRQEVNAVVLLYMATQISSAMEYLEKKNFIHRDLAARNCLVGENHLVKVADFGLSRLMTGDTYTAHAGTKFPIKWTAPESLAYNKFSIKSDVWAFGVLLWEIATYGMSPYPGIDLSQVYELLEKDYRMERPEGCPEKVYELMRACWQWNPSDRPAFAEIHHDCLQILAETHGTRPDLTDQPPLPDADLTWYSDGSFIRNGERKAGAAVTTESEVIWAASLPPGTSAQRAELIALTQALKMAKGKKLTVYTDSRYAFATAHVHGEIYRRRGLLTSEGKEIKNKNEILALLEALFLPKRLSIIHCPGHQKGDSPQAKGNRLADDTAKKAASETQSSLTIIPTELIEGPKRPPWEYDDSDLDLVQKLEA

SEQ ID NO: 13451 - protein, 774 aa, Feline sarcoma virus
  unsure (1)..(774): unsure at all Xaa locations
MGQTVTTPLSLTLDHWSEVRARAHNQGVEVRKKKWITLCKAEWVMMNVGWPREGTFSLDNISQVKKKIFAPGPHGHPDQVPYITTWRSLATDPPSWVRPFLPPPKPPTPLPQPLSPQPSAPLTSSLYPVVPKPDPPKPPVLPPDPSSPLIDLLTEEPPPYPGGHGPPPSGPRTPAASPIVSRLRERRENPAEESQALPLREGPNNRPQYWPFSASDLYNWKSHNPPFSQDPVALTNLIESILVTHQPTWDDCQQLLQALLTGEERQRVLLEARKQVPGEDGRPTQLPNVIDETFPLTHPREQVQLLAKKQVLQEALQALQVALCSQAKLQAQRELLQAKLEQLGPGEPPPVLLLQDDRHSTSSSEQEREGGRTPTLEILKSHISGIFRPKFSLPPPLQLVPEVQKPLHEQLWYHGALPRAEVAXXXXXXXXXXXXXXXXXXXXXXXXXXXXXXXXXXXXXXXXXXXXXXXXXASIPLLVDHLLRSQQPLTKKSGIVLNRAVPKDKWVLNHEDLVLGEQIGRGNFGEVFSGRLRADNTLVAVKSCRETLPPDIKAKFLQEAKILKQYSHPNIVRLIGVCTQKQPIYIVMELVQGGDFLTFLRTEGARLRMKTLLQMVGDAAAGMEYLESKCCIHRDLAARNCLVTEKNVLKISDFGMSREEADGVYAASGGLRLVPVKWTAPEALNYGRYSSESDVWSFGILLWETFSLGASPYPNLSNQQTREFVEKGGRLPCPELCPDAVFRLMEQCWAYEPGQRPSFSAFYQELQSIRKRHR

SEQ ID NO: 13452 - protein, 609 aa, Gardner-Arnstein feline sarcoma virus
AARADGTMGFSSELCSPQGHGAEQQMQEAELRLLEGMRKWMAQRVKSDREYAGLLHHMSLQDGGGRGTGPYSPISQSWAEITSQTEGLSRLLRQHAEDLNSGPLSKLGLLIRERQQLRKTYSEQWQQLQQELTKTHNQDIEKLKSQYRALARDSAQARRKYQEASKDKDRDKAKLEQLGPGEPPPVLLLQDDRHSTSSSEQEREGGRTPTLEILKSHISGIFRPKFSLPPPLQLVPEVQKPLHEQLWYHGALPRAEVAELLTHSGDFLVRESQGKQEYVLSVLWDGQPRHFIIQSADNLYRPEGDGFASIPLLVDHLLRSQQPLTKKSGIVLNRAVPKDKWVLNHEDLVLGEQIGRGNFGEVFSGRLRADNTLVAVKSCRETLPPDIKAKFLQEAKILKQYSHPNIVRLIGVCTQKQPIYIVMELVQGGDFLTFLRTEGARLRMKTLLQMVGDAAAGMEYLESKCCIHRDLAARNCLVTEKNVLKISDFGMSREAADGIYAASGGLRQVPVKWTAPEALNYGRYSSESDVWSFGILLWETFSLGASPYPNLSNQQTREFVEKGGRLPCPELCPDAVFRLMEQCWAYEPGQRPSFSAIYQELQSIRKRHR

SEQ ID NO: 13453 - protein, 439 aa, Feline sarcoma virus (strain Hardy-Zuckerman 2)
ENLLAGPSENDPNLFVALYDFVASGDNTLSITKGEKLRVLGYNHNGEWCEAQTKNGQGWVPSNYITPVNSLEKHSWYHGPVSRNAAEYLLSSGINGSFLVRESESSPGQRSISLRYEGRVYHYRINTASDGKLYVSPESRFNTLAELVHHHSTVADGLITTLHYPAPKRNKPTVYGVSPNYDKWEMERTDITMKHKLGGGQYGEVYEGVWKKYSLTVAVKTLKEDTMEVEEFLKEAAVMKEIKHPNLVQLLGVCTREPPFYIITEFMTYGNLLDYLRECNRQEVNAVVLLYMATQISSAMEYLEKKNFIHRDLAARNCLVGENHLVKVADFGLSRLMTGDTYTAHAGTKFPIKWTAPESLAYNKFSIKSDVWAFGVLLWEIATYGMSPYPGIDLSQVYELLEKDYRMERPEGCPEKVYELMRACWQWNPSDRPAFAEIH

SEQ ID NO: 13454 - protein, 477 aa, Feline sarcoma virus (strain Snyder-Theilen)
HPREQVQLLAKKQVLQEALQALQVALCSQAKLQAQRELLQAKLEQLGPGEPPPVLLLQDDRHSTSSSEQEREGGRTPTLEILKSHISGIFRPKFSLPPPLQLVPEVQKPLHEQLWYHGALPRAEVAELLTHSGDFLVRESQGKQEYVLSVLWDGQPRHFIIQSADNLYRPEGDGFASIPLLVDHLLRSQQPLTKKSGIVLNRAVPKDKWVLNHEDLVLGEQIGRGNFGEVFSGRLRADNTLVAVKSCRETLPPDIKAKFLQEAKILKQYSHPNIVRLIGVCTQKQPIYIVMELVQGGDFLTFLRTEGARLRMKTLLQMVGDAAAGMEYLESKCCIHRDLAARNCLVTEKNVLKISDFGMSREEADGVYAASGGLRLVPVKWTAPEALNYGRYSSESDVWSFGILLWETFSLGASPYPNLSNQQTREFVEKGGRLPCPELCPDAVFRLMEQCWAYEPGQRPSFSAFYQELQSIRKRHR

SEQ ID NO: 13455 - protein, 981 aa, Abelson murine leukemia virus
MGQTVTTPLSLTLGHWKDVERIAHNQSVDVKKRRWVTFCSAEWPTFNVGWPRDGTFNRDLITQVKIKVFSPGPHGHPDQVPYIVTWEALAFDPPPWVKPFVHPKPPPPLPPSAPSLPLEPPLSTPPRSSLYPALTPSLGAKPKPQVLSDSGGPLIDLLTEDPPPYRDPRPPPSDRDGNGGEATPAGEAPDPSPMASRLRGRREPPVADSTTSQAFPLRTGGNGQLQYWPFSSSDLYITPVNSLEKHSWYHGPVSRNAAEYLLSSGINGSFLVRESESSPGQRSISLRYEGRVYHYRINTASDGKLYVSSESRFNTLAELVHHHSTVADGLITTLHYPAPKRNKPTIYGVSPNYDKWEMERTDITMKHKLGGGQYGEVYEGVWKKYSLTVAVKTLKEDTMEVEEFLKEAAVMKEIKHPNLVQLLGVCTREPPFYIITEFMTYGNLLDYLRECNRQEVSAVVLLYMATQISSAMEYLEKKNFIHRDLAARNCLVGENHLVKVADFGLSRLMTGDTYTAHAGAKFPIKWTAPESLAYNKFSIKSDVWAFGVLLWEIATYGMSPYPGIDLSQVYELLEKDYRMERPEGCPEKVYELMRACWQWNPSDRPSFAEIHQAFETMFQESSISDEVEKELGKRGTRGGAGSMLQAPELPTKTRTCRRAAEQKASPPSLTPKLLRRQVTASPSSGLSHKKEATKGSASGMGTPATAEPAPPSNKVGLSKASSEEMRVRRHKHSSESPGRDKGRLAKLKPAPPPPPACTGKAGKPAQSPSQEAGEAGGPTKTKCTSLAMDAVNTDPTKAGPPGEGLRKPVPPSVPKPQSTAKPPGTPTSPVSTPSTAPAPSPLAGDQQPSSAAFIPLISTRVSLRKTRQPPERIASGTITKGVVLDSTEALCLAISRNSEQMASHSAVLEAGKNLYTFCVSYVDSIQQMRNKFAFREAINKLESNLRELQICPATASSGPAATQDFSKLLSSVKEISDIVRR

SEQ ID NO: 13456 - protein, 918 aa, Abelson murine leukemia virus
MGQTVTTPLSLTLGHWKDVERIAHNQSVDVKKRRWVTFCSAEWPTFNVGWPRDGTFNRDLITQVKIKVFSPGPHGHPDQVPYIVTWEALAFDPPPWVKPFVHPKPPPPLPPSAPSLPLEPPLSTPPRSSLYPALTPSLGAKPKPQVLSDSGGPLIDLLTEDPPPYRDPRPPPSDRDGNGGEATPAGEAPDPSPMASRLRGRREPPVADSTTSQAFPLRTGGNGQLQYWPFSSSDLYITPVNSLEKHSWYHGPVSRNAAEYLLSSGINGSFLVRESESSPGQRSISLRYEGRVYHYRINTASDGKLYVSSESRFNTLAELVHHHSTVADGLITTLHYPAPKRNKPTIYGVSPNYDKWEMERTDITMKHKLGGGQYGEVYEGVWKKYSLTVAVKTLKEDTMEVEEFLKEAAVMKEIKHPNLVQLLGVCTREPPFYIITEFMTYGNLLDYLRECNRQEVSAVVLLYMATQISSAMEYLEKKNFIHRDLAARNCLVGENHLVKVADFGLSRLMTGDTYTAHAGAKFPIKWTAPESLAYNKFSIKSDVWAFGVLLWEIATYGMSPYPGIDLSQVYELLEKDYRMERPEGCPEKVYELMRACWQWNPSDRPSFAEIHQAFETMFQESSISDEVEKELGKRGTRGGAGSMLQAPELPTKTRTCRRAAEQKASPPSLTPKLLRRQVTASPSSGLSHKKEATKGSASGMGTPATAEPAPPSNKVGLSKASSEEMRVRRHKHSSESPGRDKGRLAKLKPAPPPPPACTGKAGKPAQSPSQEAGEAGGPTKTKCTSLAMDAVNTDPTKAGPPGEGLRKPVPPSVPKPQSTAKPQGLPPARSPPPPQHQLLHPWLGTSSHLLPPSSPSYQPVCLLGRPASRQSALPVAPSPRVWFWTVLRPCALPSPGTQSRWPATVLYWRLARTCTLSV

SEQ ID NO: 13457 - protein, 746 aa, Abelson murine leukemia virus
YITPVNSLEKHSWYHGPVSRNAAEYLLSSGINGSFLVRESESSPGQRSISLRYEGRVYHYRINTASDGKLYVSSESRFNTLAELVHHHSTVADGLITTLHYPAPKRNKPTIYGVSPNYDKWEMERTDITMKHKLGGGQYGEVYEGVWKKYSLTVAVKTLKEDTMEVEEFLKEAAVMKEIKHPNLVQLLGVCTREPPFYIITEFMTYGNLLDYLRECNRQEVSAVVLLYMATQISSAMEYLEKKNFIHRDLAARNCLVGENHLVKVADFGLSRLMTGDTYTAHAGAKFPIKWTAPESLAYNKFSIKSDVWAFGVLLWEIATYGMSPYPGIDLSQVYELLEKDYRMERPEGCPEKVYELMRACWQWNPSDRPSFAEIHQAFETMFQESSISDEVEKELGKRGTRGGAGSMLQAPELPTKTRTCRRAAEQKASPPSLTPKLLRRQVTASPSSGLSHKKEATKGSASGMGTPATAEPAPPSNKVGLSKASSEEMRVRRHKHSSESPGRDKGRLAKLKPAPPPPPACTGKAGKPAQSPSQEAGEAGGPTKTKCTSLAMDAVNTDPTKAGPPGEGLRKPVPPSVPKPQSTAKPPGTPTSPVSTPSTAPAPSPLAGDQQPSSAAFIPLISTRVSLRKTRQPPERIASGTITKGVVLDSTEALCLAISRNSEQMASHSAVLEAGKNLYTFCVSYVDSIQQMRNKFAFREAINKLESNLRELQICPATASSGPAATQDFSKLLSSVKEISDIVRR

SEQ ID NO: 13458 - protein, 818 aa, Abelson murine leukemia virus
YITPVNSLEKHSWYHGPVSRNAAEYLLSSGINGSFLVRESESSPGQRSISLRYEGRVYHYRINTASDGKLYVSSESRFNTLAELVHHHSTVADGLITTLHYPAPKRNKPTIYGVSPNYDKWEMERTDITMKHKLGGGQYGEVYEGVWKKYSLTVAVKTLKEDTMEVEEFLKEAAVMKEIKHPNLVQLLGVCTREPPFYIITEFMTYGNLLDYLRECNRQEVSAVVLLYMATQISSAMEYLEKKNFIHRDLAARNCLVGENHLVKVADFGLSRLMTGDTYTAHAGAKFPIKWTAPESLAYNKFSIKSDVWAFGVLLWEIATYGMSPYPGIDLSQVYELLEKDYRMERPEGCPEKVYELMRACWQWNPSDRPSFAEIHQAFETMFQESSISDEVEKELGKRGTRGGAGSMLQAPELPTKTRTCRRAAEQKDAPDTPELLHTKGLGESDALDSEPAVSPLLPRKERGPPDGSLNEDERLLPRDRKTNLFSALIKKKKKMAPTPPKRSSSFREMDGQPDRRGASEDDSRELCNGTTSSHLRRSRAYQVPKGQQWGWLPNGAFREPGNSGFRSPHMWKKSSTLTGSRLAAAEEESGMSSSKRFLRSCSASCMPHGARDTEWRSVTLPRDLPSAGKQFDSSTFGGHKSEKPALPRKRTSESRSEQVAKSTAMPLPGWLKKNEEAAEEGFKDTESSPGSSPPSLTPKLLRRQVTASPSSGLSHKKEATKGSASGMGTPATAEPAPPSNKVGLSKASSEEMRVRRHKHSSESPGRDKGRLAKLKPAPPPPPACTGKAGKPAQSPSQEAGEAGGPQRQNARVWLWML

SEQ ID NO: 13459 - protein, 359 aa, Murine sarcoma virus
AKVKGITQGPNESPSAFLERLKEAYRRYTPYDPGTQEKNKIRPRGQRDSSYYWKMEASEVMLSTRIGSGSFGTVYKGKWHGDVAVKILKVVDPTPEQLQAFRNEVAVLRKTRHVNILLFMGYMTKDNLAIVTQWCEGSSLYKHLHVQETKFQMFQLIDIARQTAQGMDYLHAKNIIHRDMKSNNIFLHEGLTVKIGDFGLATVKSRWSGSQQVEQPTGSVLWMAPEVIRMQDDNPFSFQSDVYSYGIVLYELMAGELPYAHINNRDQIIFMVGRGYASPDLSRLYKNCPKAIKRLVADCVKKVKEERPLFPQILSSIELLQHSLPKINRSAPEPSLHRAAHTEDINACTLTTSPRLPVF

SEQ ID NO: 13460 - protein, 323 aa, Murine sarcoma virus 3611
EKNKIRPRGQRDSSYYWKMEASEVMLSTRIGSGSFGTVYKGKWHGDVAVKILKVVDPTPEQLQAFRNEVAVLRKTRHVNILLFMGYMTKDNLAIVTQWCEGSSLYKHLHVQETKFQMFQLIDIARQTAQGMDYLHAKNIIHRDMKSNNIFLHEGLTVKIGDFGLATVKSRWSGSQQVEQPTGSVLWMAPEVIRMQDDNPFSFQSDVYSYGIVLYELMAGELPYAHINNRDQIIFMVGRGYASPDLSRLYKNCPKAIKRLVADCVKKVKEERPLFPQILSSIELLQHSLPKINRSAPEPSLHRAAHTEDINACTLTTSPRLPVF

SEQ ID NO: 13461 - protein, 957 aa, Gardner-Arnstein feline leukemia oncovirus B
MGQTITTPLSLTLDHWSEVRARAHNQGVEVRKKKWITLCEAEWVMMNVGWPREGTFSLDNISQVEKKIFAPGPYGHPDQVPYITTWRSLATDPPSWVRPFLPPPKPPTSLPQPLSPQPSAPLTSSLYPVLPKSDPPKPPVLPPDPSSPLIDLLTEEPPPYPGGHGPPPSGPRTPTASPIASRLRERRENPAEESQALPLREGPNNRPQYWPFSASDLYNWKSHNPPFSQDPVALTNLIESILVTHQPTWDDCQQLLQALLTGEERQRVLLEARKQVPGEDGRPTQLPNVIDETFPLTRPNWDFATPAGREHLRLYRQLLLAGLRGAARRPTNLAQVKQVVQGKEETPAAARADGTMGFSSELCSPQGHGAEQQMQEAELRLLEGMRKWMAQRVKSDREYAGLLHHMSLQDGGGRGTGPYSPISQSWAEITSQTEGLSRLLRQHAEDLNSGPLSKLGLLIRERQQLRKTYSEQWQQLQQELTKTHNQDIEKLKSQYRALARDSAQARRKYQEASKDKDRDKAKLEQLGPGEPPPVLLLQDDRHSTSSSEQEREGGRTPTLEILKSHISGIFRPKFSLPPPLQLVPEVQKPLHEQLWYHGALPRAEVAELLTHSGDFLVRESQGKQEYVLSVLWDGQPRHFIIQSADNLYRPEGDGFASIPLLVDHLLRSQQPLTKKSGIVLNRAVPKDKWVLNHEDLVLGEQIGRGNFGEVFSGRLRADNTLVAVKSCRETLPPDIKAKFLQEAKILKQYSHPNIVRLIGVCTQKQPIYIVMELVQGGDFLTFLRTEGARLRMKTLLQMVGDAAAGMEYLESKCCIHRDLAARNCLVTEKNVLKISDFGMSREAADGIYAASGGLRQVPVKWTAPEALNYGRYSSESDVWSFGILLWETFSLGASPYPNLSNQQTREFVEKGGRLPCPELCPDAVFRLMEQCWAYEPGQRPSFSAIYQELQSIRKRHR

SEQ ID NO: 13462 - protein, 506 aa, Avian myelocytomatosis virus MH2
AGPWADITQGPSESFVDFANRLIKAVEGSDLPPSARAPVIIDCFRQKSQPDIQQLIRAAPSTLTTPGEIIKYVLDRQKTAPLTDQGIAAAMSSAIQPLVMAVVNRERDGQTGSGGRARGLCYTCGSPTMPVDSRIIEDAIRNHSESASPSASSGSPNNMSPTGWSQPKTPVPAQRERAPGTNTQEKNKIRPRGQRDSSYYWEIEASEVLLSTRIGSGSFGTVYKGKWHGDVAVKILKVVDPTPEQFQAFRNEVAVLRKTRHVNILLFMGYMTKDNLAIVTQWCEGSSLYKHLHVQETKFQMFQLIDIARQTAQGMDYLHAKNIIHRDMKSNSIFLHEGLTVKIGDFGLATVKSRWSGSQQVEQPTGSILWMAPEVIRMQDSNPFSFQSDVYSYGIVLYELMTGELPYSHINNRDQIIFMVGRGYASPDLSKLYKNCPKAMKRLVADCLKKAREERPLFPQILSSIELLQHSLPKINRSASEPSLHRASHTEDINSCTLTSTRLPVF

SEQ ID NO: 13463 - protein, 410 aa, Avian myelocytomatosis virus MH2
PLVMAVVNRERDGQTGSGGRARGLCYTCGSPTMPVDSRIIEDAIRNHSESASPSASSGSPNNMSPTGWSQPKTPVPAQRERAPGTNTQEKNKIRPRGQRDSSYYWEIEASEVLLSTRIGSGSFGTVYKGKWHGDVAVKILKVVDPTPEQFQAFRNEVAVLRKTRHVNILLFMGYMTKDNLAIVTQWCEGSSLYKHLHVQETKFQMFQLIDIARQTAQGMDYLHAKNIIHRDMKSNNIFLHGGLTVKIGDFGLATVKSRWSGSQQVEQPTGSILWMAPEVIRMQDSNPFSFQSDVYSYGIVLYELMTGELPYSHINNRDQIIFMVGRGYASPDLSKLYKNCPKAMKRLVADCLKKVREERPLFPQILSSIALLQHSLPKINRSASEPSLHRASHTEDINSCTLTSTRLPVF

SEQ ID NO: 13464 - protein, 410 aa, Avian myelocytomatosis virus MH2
PLVMAVVNRERDGQTGSGGRARGLCYTCGSPTMPVDSRIIEDAIRNHSESASPSASSGSPNNMSPTGWSQPKTPVPAQRERAPGTNTGEKNKIRPRGQRDSSYYWEIEASEVLLSTRIGSGSFGTVYKGKWHGDVAVKILKVVDPTPEQFQAFRNEVAVLRKTRHVNILLFMGYMTKDNLAIVTQWCEGSSLYKHLHVQETKFQMFQLIDIARQTAQGMDYLHAKNIIHRDMKSNNIFLHGGLTVKIGDFGLATVKSRWSGSQQVEQPTGSILWMAPEVIRMQDSNPFSFQSDVYSYGIVLYELMTGELPYSHINNRDQIIFMVGRGYASPDLSKLYKNCPKAMKRLVADCLKKVREERPLFPQILSSIALLQHSLPKINRSASEPSLHRASHTEDINSCTLTSTRLPVF

SEQ ID NO: 13465 - protein, 380 aa, Avian myelocytomatosis virus MH2
PTMPVDSRIIEDAIRNHSESASPSASSGSPNNMSPTGWSQPKTPVPAQRERAPGTNTQEKNKIRPRGQRDSSYYWEIEASEVLLSTRIGSGSFGTVYKGKWHGDVAVKILKVVDPTPEQFQAFRNEVAVLRKTRHVNILLFMGYMTKDNLAIVTQWCEGSSLYKHLHVQETKFQMFQLIDIARQTAQGMDYLHAKNIIHRDMKSNNIFLHGGLTVKIGDFGLATVKSRWSGSQQVEQPTGSILWMAPEVIRMQDSNPFSFQSDVYSYGIVLYELMTGELPYSHINNRDQIIFMVGRGYASPDLSKLYKNCPKAMKRLVADCLKKVREERPLFPQILSSIALLQHSLPKINRSASEPSLHRASHTEDINSCTLTSTRLPVF

SEQ ID NO: 13466 - protein, 1079 aa, Avian retrovirus IC10
MEAVIKVISSACKTYCGKTSPSKKEIGAMLSLLQKEGLLTSPSDLYSPGSWDPITAALSQRAMVLGKSGELKTWGLVLGALKAAREEQVTSEQAKFWLGLGGGRVSPPGPESIEKPATERRIDKGEEVGETTVQRDAKMAPEETATPKTVGTFCYHCGTAIGCNCATASAPPPPYVGSGLYPSLAGVGEQQGQGGDTPPGAEQPRAEQQHAGQAPGPALTDWARVREELASTGPPVVAMPVVIKTEGPAWTPLEPKLITRLADTVRTKGLRSPITMAEVEALMSSPLLPHDVTNLMRVILGPAPYALWMDAWGVQLQTVIAAATRDPRHPANGQGRGERTNLDRLKGLADGMVGNPQGQAVLLRPGELVAITASALQAFREVARLAEPAGPWADITQGPSESFVDFANRLIKAVEGSDLPPSARAPVIIDCFRQKSQPDIQQLIRAAPSTLTTPGEIIKYVLDRQKTAPLTDQGIAAAMSSAIQPLVMAVVNRERDGQTGSGGRARGLCYTCGSPGHYQAQCPKKRKSGNSRERCQLCDGMGHNAKQCRKRDGNQGQRPGRGLSSGPWPGPDQPAVSLAMTMEHKDRPLVRVILTNTGSHPVKQRSVYITALLDSGADITIISEEDWPTDWPVMEAANPQIHGIGEGGSTAGLSATPPASLPGSLTNVKALQKSPGPQRERKSSSSSEDRNRMKTLGRRDSSDDWEIPDGQITVGQRIGSGSFGTVYKGKWHGDVAVKMLNVTAPTPQQLQAFKNEVGVLRKTRHVNILLFMGYSTKPQLAIVTQWCEGSSLYHHLHIIETKFEMIKLIDIARQTAQGMDYLHAKSIIHRDLKSNNIFLHEDLTVKIGDFGLATVKSRWSGSHQFEQLSGSILWMAPEVIRMQDKNPYSFQSDVYAFGIVLYELMTGQLPYSNINNRDQIIFMVGRGYLSPDLSKVRSNCPKAMKRLMAECLKKKRDERPLFPQILASIELLARSLPKIHRSASEPSLNRAGFQTEDFSLYACASPKTPIQAGGIGEWAVHLLKGLLLGLVVILLLVVCLPCLLQCVSSSIRKMIDNSLGYREEYKKLQEAYKQPERRA

SEQ ID NO: 13467 - protein, 367 aa, Avian retrovirus IC10
EGGSTAGLSATPPASLPGSLTNVKALQKSPGPQRERKSSSSSEDRNRMKTLGRRDSSDDWEIPDGQITVGQRIGSGSFGTVYKGKWHGDVAVKMLNVTAPTPQQLQAFKNEVGVLRKTRHVNILLFMGYSTKPQLAIVTQWCEGSSLYHHLHIIETKFEMIKLIDIARQTAQGMDYLHAKSIIHRDLKSNNIFLHEDLTVKIGDFGLATVKSRWSGSHQFEQLSGSILWMAPEVIRMQDKNPYSFQSDVYAFGIVLYELMTGQLPYSNINNRDQIIFMVGRGYLSPDLSKVRSNCPKAMKRLMAECLKKKRDERPLFPQILASIELLARSLPKIHRSASEPSLNRAGFQTEDFSLYACASPKTPIQA

SEQ ID NO: 13468 - protein, 567 aa, Avian retrovirus IC10
GSPGHYQAQCPKKRKSGNSRERCQLCDGMGHNAKQCRKRDGNQGQRPGRGLSSGPWPGPDQPAVSLAMTMEHKDRPLVRVILTNTGSHPVKQRSVYITALLDSGADITIISEEDWPTDWPVMEAANPQIHGIGEGGSTAGLSATPPASLPGSLTNVKALQKSPGPQRERKSSSSSEDRNRMKTLGRRDSSDDWEIPDGQITVGQRIGSGSFGTVYKGKWHGDVAVKMLNVTAPTPQQLQAFKNEVGVLRKTRHVNILLFMGYSTKPQLAIVTQWCEGSSLYHHLHIIETKFEMIKLIDIARQTAQGMDYLHAKSIIHRDLKSNNIFLHEDLTVKIGDFGLATVKSRWSGSHQFEQLSGSILWMAPEVIRMQDKNPYSFQSDVYAFGIVLYELMTGQLPYSNINNRDQIIFMVGRGYLSPDLSKVRSNCPKAMKRLMAECLKKKRDERPLFPQILASIELLARSLPKIHRSASEPSLNRAGFQTEDFSLYACASPKTPIQAGGIGEWAVHLLKGLLLGLVVILLLVVCLPCLLQCVSSSIRKMIDNSLGYREEYKKLQEAYKQPERRA

SEQ ID NO: 13469 - protein, 587 aa, Avian sarcoma virus
MGSSKSKPKDPSQRRRSLEPPDSTHHGGFPASQTPNKTAAPDTHRTPSRSFGTVATEPKLFGGFNTSDTVTSPQRAGALAGGVTTFVALYDYESRTETDLSFKKGERLQIVNNTEGDWWLAHSLTTGQTGYIPSNYVAPSDSIQAEEWYFGKTTRRESERLLLNPENPRGTFLVRESETTKGAYCLSVSDFDNAKGLNVKHYKIRKLDSGGFYITSRTQFSSLQQLVAYYSKHADGLCHRLTNVCPTSKPQTQGLAKDAWEIPRESLRLEVKLGQGCFGEVWMGTWNGTTRVAIKTLKPGTMSSEAFLQEAQVMKKLRHEKLVQLYAVVSEEPIYIVTEYMSKGSLLDFLKGEMGKYLRLPQLVDMAAQIASGMAYVERMNYVHRDLRAANILVGENLVCKVADFGLARLIEDNEYTARQGAKFPIKWTAPEAALYGRFTIKSDVWSFGILLTELTTKGRVPYPGMVNREVLDQVERGYRMPCPPECPESLHDLMCQCWRKDPEERPTFEYLQAFLEDYFTSTEPPVPAWREPIGLELLLAPEASLWGTGAWLRAEGPRFGEQPQSRMWHGEVSGAPSLIKTVLGHP

SEQ ID NO: 13470 - protein, 812 aa, Avian sarcoma virus
MEAVIKVISSACKTYCGKTSPSKKEIGAMLSLLQKEGLLMSPSDLYSPGSWDPITAALSQRAMVLGKSGELKTWGLVLGALKAAREEQVTSEQAKFWLGLGGGRVSPPGPECIEKPATERRIDKGEEVGETTVQRDAKMAPEETATPKTVGTSCYHCGTASGCNCATATASAPPPPYVGSGLCPSLAGVGEQRKRGDDTPRGAEQPRAEPRHTGLTLGPARSARLPPPAPLPSSLPLLPPFPPRVAAVPGGAGGAPLPSLSPSFSHPRRRGRAEATVGCIKSKEDKGPAMKYRTDNTPEPISSHVSHYGSDSSQATQSPAIKGSAVNFNSHSMTPFGGPSGMTPFGGASSSFSAVPSPYPSTLTGGGTVFVALYDYEARTTDDLSFKKGERFQIINNTEGDWWEARSIATGKTGYIPSNYVAPADSIQAEEWYFGKMGRKDAERLLLNPGNQRGIFLVRESETTKGAYSLSIRDWDEVRGDNVKHYKIRKLDNGGYYITTRAQFESLQKLVKHYREHADGLCHKLTTVCPTVKPQTQGLAKDAWEIPRESLRLEVKLGQGCFGEVWMGTWNGTTKVAIKTLKLGTMMPEAFLQEAQIMKKLRHDKLVPLYAVVSEEPIYIVTEFMTKGSLLDFLKEGEGKFLKLPQLVDMAAQIADGMAYIERMNYIHRDLRAANILVGDNLVCKIADFGLARLIEDNEYTARQGAKFPIKWTAPEAALYGRFTIKSDVWSFGILLTELVTKGRVPYPGMVNREVLEQVERGYRMPCPQGCPESLHELMKLCWKKDPDERPTFEYIQSFLEDYFTAAEPSGY

SEQ ID NO: 13471 - protein, 634 aa, Avian sarcoma virus
ITRLADTVRTKGLRSPITMAEVEALMSSPLLPHDVTNLMRVILGPAPYALWMDAWGVQLQTVIAAATRDPRHPANGQGRGERTNLDRLKGLADGMVGNPQAASGQLHRPQPQEHTSTSAAAGTWRHTQASESRHRLPHCSAAPSHQDHSAMGFGPELWCPKGHSELLRLQDSELRLLELMKKWMSERAKSDREYAGMLHHMFSQLGSEEPPPALPLQEDRQSVCSTDQERSGVTALETIKNHISGIFSPRFSLPPPVPLIPEVQKPLCQQAWYHGAIPRSEVQELLKCSGDFLVRESQGKQEYVLSVLWDGQPRHFIIQAADNLYRLEGDGFPTIPLLIDHLLQSQQPITRKSGIVLTRAVLKDKWVLNHEDVLLGERIGRGNFGEVFSGRLRADNTPVAVKSCRETLPPELKAKFLQEARILKQYNHPNIVRLIGVCTQKQPIYIVMELVQGGDFLSFLRSKGPHLKMKELIKMMENAAAGMEYLESKHCIHRDLAARNCLVTEKNTLKISDFGMSRQEEDGVYASTGGMKQIPVKWTAPEALNYGRYSSESDVWSFGILLWEAFSLGAVPYANLSNQQTREAIEQGVRLEPPEQCPEDVYRLMQRCWEYDPRRRPSFGAVHQDLIAIRKRHR

SEQ ID NO: 13472 - protein, 587 aa, Avian sarcoma virus PR2257
MGSSKSKPKDPSQRRRSLEPPDSTHHGGFPASQTPNKTAAPDTHRTPSRSFGTVATEPKLFGGFNTSDTVTSPQRAGALAGGVTTFVALYDYESRTETDLSFKKGERLQIVNNTEGDWWLAHSLTTGQTGYIPSNYVAPSDSIQAEEWYFGKITRRESERLLLNPENPRGTFLVRESETTKGAYCLSVSDFDNAKGLNVKHYKIRKLDSGGFYITSRTQFSSLQQLVAYYSKHADGLCHRLTNVCPTSKPQTQGLAKDAWEIPRESLRLEVKLGQGCFGEVWMGTWNGTTRVAIKTLKPGTMSPEAFLQEAQVMKKLRHEKLVQLYAVVSEEPIYIVTEYMSKGSLLDFLKGEMGKYLRLPQLVDMAAQIASGMAYVERMNYVHRDLRAANILVGENLVCKVADFGLARLIEDNEYTARQGAKFPIKWTAPEAALYGRFTIKSDVWSFGILLTELTTKGRVPYPGMVNREVLDQVERGYRMPCPPECPESLHDLMCQCWRKDPEERPTFEYLQAFLEDYFTSTEPPVPAWREPIGLELLLAPEASLWGTGAWLRAEGPRFGEQPQSRMWHGEVSGAPSLIKTVLGHP

SEQ ID NO: 13473 - protein, 533 aa, Avian sarcoma virus PRCII
ASGQLHRPQPQEHTSTSAAAGTWRHTQASESRHRLPHCSAAPSHQDHSAMGFGPELWCPKGHSELLRLQDSELRLLELMKKWMSERAKSDREYAGMLHHMFSQLGSEEPPPALPLQEDRQSVCSTDQERSGVTALETIKNHISGIFSPRFSLPPPVPLIPEVQKPLCQQAWYHGAIPRSEVQELLKCSGDFLVRESQGKQEYVLSVLWDGQPRHFIIQAADNLYRLEGDGFPTIPLLIDHLLQSQQPITRKSGIVLTRAVLKDKWVLNHEDVLLGERIGRGNFGEVFSGRLRADNTPVAVKSCRETLPPELKAKFLQEARILKQYNHPNIVRLIGVCTQKQPIYIVMELVQGGDFLSFLRSKGPHLKMKELIKMMENAAAGMEYLESKHCIHRDLAARNCLVTEKNTLKISDFGMSRQEEDGVYASTGGMKQIPVKWTAPEALNYGRYSSESDVWSFGILLWEAFSLGAVPYANLSNQQTREAIEQGVRLEPPEQCPEDVYRLMQRCWEYDPRRRPSFGAVHQDLIAIRKRHR

SEQ ID NO: 13474 - protein, 568 aa, Avian sarcoma virus S1
MGSSKSKPKDPSQRRRSLEPPDSTHHGGFPASQTPNKTAAPDTHRTPSRSFGTVATEPKLFGGFNTSDTVTSPQRAGALAGGVTTFVALYDYESRTETDLSFKKGERLQIVNNTEGDWWLAHSLTTGQTGYIPSNYVAPSDSIQAEEWYFGKITRRESERLLLNPENPRGTFLVRESETTKGAYCLSVSDFDNARGLNVKHYKIRKLDSGGFYITSRTQFSSLQQLVAYYSKHADGLCHRLTNVCPTSKPQTQGLAKDAWEIPRESLRLEVKLGQGCFGEVWMGTWNGTTRVAIKTLKPGTMSPEAFLQEAQVMKKLRHEKLVRLYAVVSEEPIYIVTEYMSKGSLLDFLKGEMGKYLRLPQLVDMAAQIASGMAYVERMNYVHRDLRAANILVGENLVCKVADFGLARLIEDNEYTARQGAKFPIKWTAPEAALYGRFTIKSDVWSFGILLTELTTKGRVPYPGMVNREVLDQVERGYRMPCPPECPESLHDLMCQCWRKDPEERPTFEYLQAFLEDYFTSTEPTAVHMATDPGKYTTAHKSRARVSSNTAVARPAAPVRVLLKPSV

SEQ ID NO: 13475 - protein, 557 aa, Avian sarcoma virus S2
MGSSKSKPKDPSQRRRSLEPPDSTHHGGFPASQTPNKTAAPDTHRTPSRSFGTVATEPKLFGGFNTSDTVTSPQRAGALAGGVTTFVALYDYESRTETDLSFKKGERLQIVNNTEGDWWLAHSLTTGQTGYIPSNYVAPSDSIQAEEWYFGKITRRESERLLLNPENPRGTFLVRESETTKGAYCLSVSDFDNAKGLNVKHYKIRKLDSGGFYITSRTQFSSLQQLVAYYSKHADGLCHRLTNVCPTSKPQTQGLAKDAWEIPRESLRLEVKLGQGCFGEVWMGTWNGTTRVAIKTLKPGTMSPEAFLQEAQVMKKLRHEKLVQLYAVVSEEPIYIVTEYMSKGSLLDFLKGEMGKYLRLPQLVDMAAQIASGMAYVERMNYVHRDLRAANILVGENLVCKVADFGLARLIEDNEYTARQGAKFPIKWTAPEAALYGRFTIKSDVWSFGILLTELTTKGRVPYPGMVNREVLDQVERGYRMPCPPECPESLHDLMCQCWRKDPEERPTFEYLQAFLEDYLGILAWTPWEDKQEGPRGETASNKQERPGEDTLAADES

SEQ ID NO: 13476 - protein, 812 aa, Avian sarcoma virus Y73
MEAVIKVISSACKTYCGKTSPSKKEIGAMLSLLQKEGLLMSPSDLYSPGSWDPITAALSQRAMVLGKSGELKTWGLVLGALKAAREEQVTSEQAKFWLGLGGGRVSPPGPECIEKPATERRIDKGEEVGETTVQRDAKMAPEETATPKTVGTSCYHCGTASGCNCATATASAPPPPYVGSGLCPSLAGVGEQRKRGDDTPRGAEQPRAEPRHTGLTLGPARSARLPPPAPLPSSLPLLPPFPPRVAAVPGGAGGAPLPSLSPSFFHPRRRGRAEATVGCIKSKEDKGPAMKYRTDNTPEPISSHVSHYGSDSSQATQSPAIKGSAVNFNSHSMTPFGGPSGMTPFGGASSSFSAVPSPYPSTLTGGGTVFVALYDYEARTTDDLSFKGGERFQIINNTEGDWWEARSIATGKTGYIPSNYVAPADSIEAEEWYFGKMGRKDAERLLLNPGNQRGIFLVRESETTKGAYSLSIRDWDEVRGDNVKHYKIRKLDNGGYYITTRAQFESLQKLVKHSREHADGLCHKLTTVCPTVKPQTQGLAKDAWEIPRESLRLEVKLGQGCFGEVWMGTWNGTTKVAIKTLKLGTMMPEAFLQEAQIMKKLRHDKLVPLYAVVSEEPIYIVTEFMTKGSLLDFLKEGEGKFLKLPQLVDMAAQIADGMAYIERMNYIHRDLRAANILVGDNLVCKIADFGLARLIEDNEYTARQGAKFPIKWTAPEAALYGRFTIKSDVWSFGILLTELVTKGRVPYPGMVNREVLEQVERGYRMPCPQGCPESLHELMKLCWKKDPDERPTFEYIQSFLEDYFTAAEPSGY

SEQ ID NO: 13477 - protein, 528 aa, Avian sarcoma virus Y73
DKGPAMKYRTDNTPEPISSHVSHYGSDSSQATQSPAIKGSAVNFNSHSMTPFGGPSGMTPFGGASSSFSAVPSPYPSTLTGGGTVFVALYDYEARTTDDLSFKGGERFQIINNTEGDWWEARSIATGKTGYIPSNYVAPADSIEAEEWYFGKMGRKDAERLLLNPGNQRGIFLVRESETTKGAYSLSIRDWDEVRGDNVKHYKIRKLDNGGYYITTRAQFESLQKLVKHSREHADGLCHKLTTVCPTVKPQTQGLAKDAWEIPRESLRLEVKLGQGCFGEVWMGTWNGTTKVAIKTLKLGTMMPEAFLQEAQIMKKLRHDKLVPLYAVVSEEPIYIVTEFMTKGSLLDFLKEGEGKFLKLPQLVDMAAQIADGMAYIERMNYIHRDLRAANILVGDNLVCKIADFGLARLIEDNEYTARQGAKFPIKWTAPEAALYGRFTIKSDVWSFGILLTELVTKGRVPYPGMVNREVLEQVERGYRMPCPQGCPESLHELMKLCWKKDPDERPTFEYIQSFLEDYFTAAEPSGY

SEQ ID NO: 13478 - protein, 528 aa, Avian sarcoma virus Y73
DKGPAMKYRTDNTPEPISSHVSHYGSDSSQATQSPAIKGSAVNFNSHSMTPFGGPSGMTPFGGASSSFSAVPSPYPSTLTGGGTVFVALYDYEARTTDDLSFKKGERFQIINNTEGDWWEARSIATGKTGYIPSNYVAPADSIQAEEWYFGKMGRKDAERLLLNPGNQRGIFLVRESETTKGAYSLSIRDWDEVRGDNVKHYKIRKLDNGGYYITTRAQFESLQKLVKHYREHADGLCHKLTTVCPTVKPQTQGLAKDAWEIPRESLRLEVKLGQGCFGEVWMGTWNGTTKVAIKTLKLGTMMPEAFLQEAQIMKKLRHDKLVPLYAVVSEEPIYIVTEFMTKGSLLDFLKEGEGKFLKLPQLVDMAAQIADGMAYIERMNYIHRDLRAANILVGDNLVCKIADFGLARLIEDNEYTARQGAKFPIKWTAPEAALYGRFTIKSDVWSFGILLTELVTKGRVPYPGMVNREVLEQVERGYRMPCPQGCPESLHELMKLCWKKDPDERPTFEYIQSFLEDYFTAAEPSGY

SEQ ID NO: 13479 - protein, 1182 aa, Fujinami sarcoma virus
MEAVIKVISSACKTYCGKTSPSKKEIGAMLSQLQKEGLLMSLSDLYSPGSWDPITAALTQRAMVLGKSGELKTWGLVLGALKAAREEQVTSEQAKFWLGLGGGRVSPPGPECIEKPATERRIDKGETTVQRDTKMAPEETATPKTVGTSCYHCGTAIGCNCATASAPPPPYVGSGLYPSLAGVGEQQGQGGDTPRGAEQPRAEPGRTGLAPGPALTDWARIREELASTGPPMVAMPVVIKTEGPAWTPLEPKLIAGLAGAVGAGGLRSPIAVAGVEALMSSPLLPHDVTNPMRVILGPAPHALWMDAWAASGQLHRPQPQEHTSTSAAAGTWRLTQASESRHRLPHCSAAPSHQDHSAMGFGPELWCPKGHTELLRLQDSELRLLELMKKWMSQRAKSDREYAGMLHHMFSQLEKQEGLGHLRATDHSSQIGESWWVLASQTETLSQTLRRHAEELAAGPLAKLSILIRDKQQLRKVFSEQWQQLSQEYAWTTQQEVEKLKAQYRSLVRDSTQAKRKYQEASKDKEREKAKEKYVRSLSKLYALHNQYVLAVQAAALHHHHHYQRALPTLHESLYSLQQEMVLVLKEILGEYCSITSLVQEDVLAIHQKVAHAVEMIDPATEYSSFVQCHRYDSEVPPAVTFDESLLEEAENLEPGELQLNELTIESVQHSLTSIEEELLASRKAVSSKEQRVWELQVELRGEELALSPGERVHLLGKRQGLREAQQQLQGLVCAQAKLQAQRDMLANKLAELGSEEPPPALPLQEDRQSARSTDQERSGVTALKTIKNHISGIFSPRFSLPPPVPLIPEVQKPLCQQAWYHGAIPRSEVQELLKYSGDFLVRESQGKQEYVLSVLWDGQPRHFIIQAADNLYRLEDDGLPTIPLLIDHLLQSQRPITRKSGIVLTRAVLKDKWVLNHEDVLLGERIGRGNFGEVFSGRLRADNTPVAVKSCRETLPPELKAKFLQEARILKQCNHPNIVRLIGVCTQKQPIYIVMELVQGGDFLSFLRSKGPRLKMKKLIKMMENAAAGMEYLESKHCIHRDLAARNCLVTEKNTLKISDFGMSRQEEDGVYASTGGMKQIPVKWTAPEALNYGWYSSESDVWSFGILLWEAFSLGAVPYANLSNQQTREAIEQGVRLEPPEQCPEDVYRLMQRCWEYDPHRRPSFGAVHQDLIAIRKRHR

SEQ ID NO: 13480 - protein, 873 aa, Fujinami sarcoma virus
ASGQLHRPQPQEHTSTSAAAGTWRLTQASESRHRLPHCSAAPSHQDHSAMGFGPELWCPKGHTELLRLQDSELRLLELMKKWMSQRAKSDREYAGMLHHMFSQLEKQEGLGHLRATDHSSQIGESWWVLASQTETLSQTLRRHAEELAAGPLAKLSILIRDKQQLRKVFSEQWQQLSQEYAWTTQQEVEKLKAQYRSLVRDSTQAKRKYQEASKDKEREKAKEKYVRSLSKLYALHNQYVLAVQAAALHHHHHYQRALPTLHESLYSLQQEMVLVLKEILGEYCSITSLVQEDVLAIHQKVAHAVEMIDPATEYSSFVQCHRYDSEVPPAVTFDESLLEEAENLEPGELQLNELTIESVQHSLTSIEEELLASRKAVSSKEQRVWELQVELRGEELALSPGERVHLLGKRQGLREAQQQLQGLVCAQAKLQAQRDMLANKLAELGSEEPPPALPLQEDRQSARSTDQERSGVTALKTIKNHISGIFSPRFSLPPPVPLIPEVQKPLCQQAWYHGAIPRSEVQELLKYSGDFLVRESQGKQEYVLSVLWDGQPRHFIIQAADNLYRLEDDGLPTIPLLIDHLLQSQRPITRKSGIVLTRAVLKDKWVLNHEDVLLGERIGRGNFGEVFSGRLRADNTPVAVKSCRETLPPELKAKFLQEARILKQCNHPNIVRLIGVCTQKQPIYIVMELVQGGDFLSFLRSKGPRLKMKKLIKMMENAAAGMEYLESKHCIHRDLAARNCLVTEKNTLKISDFGMSRQEEDGVYASTGGMKQIPVKWTAPEALNYGWYSSESDVWSFGILLWEAFSLGAVPYANLSNQQTREAIEQGVRLEPPEQCPEDVYRLMQRCWEYDPHRRPSFGAVHQDLIAIRKRHR

SEQ ID NO: 13481 - protein, 898 aa, Fujinami sarcoma virus
PHDVTNPMRVILGPAPYALWMDAWAASGQLHRPQPQEHTSTSAAAGTWRLTQASESRHRLPHCSAAPSHQDHSAMGFGPELWCPKGHSELLRLQDSELRLLELMKKWMSQRAKSDREYAGMLHHMFSQLEKQEGLGHLRATDHSSQIGESWWVLASQTETLSQTLRRHAEELAAGPLAKLSILIRDKQQLRKVFSEQWQQLSQEYAWTTQQEVEKLKAQYRSLVRDSTQAKRKYQEASKDKEREKAKEKYVRSLSKLYALHNQYVLAVQAAALHHRHHYQRALPTLHESLYSLQQEMVLVLKEILGEYCSITSLVQEDVLAIHQEVAHAVEMIDPATEYSSFVQCHRYDSEVPPAVTFDESLLEEAESLEPGELQLNELTIESVQHSLTSIEEELLASRKAVSSKEQRVWELQVELRGEELALSPGERVHLLGKRQGLREAQQQLQGLVCAQAKLQAQRDMLTNKLAELGSDEPPPALPLQEDRQSACSTDQERSGVTALKTIKNHISGIFSPRFSLPPPVPLIPEVQKPLCQQAWYHGAIPRSEVQELLKYSGDFLVRESQGKQEYVLSVLWDGQPRHFIIQAADNLYRLEDDGLPTIPLLIDHLLQSQRPITRKSGIVLTRAVLKDKWVLNHEDVLLGERIGRGNFGEVFSGRLRADNTPVAVKSCRETLPPELKAKFLQEARILKQCNHPNIVRLIGVCTQKQPIYIVMELVQGGDFLSFLRSKGPRLKMKKLIKMMDNAAAGMEYLESKHCIHRDLAARNCLVTEKNTLKISDFGMSRQEEDGVYASTGGMKQIPVKWTAPEALNYGWYSSESDVWSFGILLWEAFSLGAVPYANLSNQQTREAIEQGVRLEPPEQCPEDVYRLMQRCWEYDPHRRPSFGAVHQDLIAIRKRHR

SEQ ID NO: 13482 - protein, 873 aa, Fujinami sarcoma virus
ASGQLHRPQPQEHTSTSAAAGTWRLTQASESRHRLPHCSAAPSHQDHSAMGFGPELWCPKGHSELLRLQDSELRLLELMKKWMSQRAKSDREYAGMLHHMFSQLEKQEGLGHLRATDHSSQIGESWWVLASQTETLSQTLRRHAEELAAGPLAKLSILIRDKQQLRKVFSEQWQQLSQEYAWTTQQEVEKLKAQYRSLVRDSTQAKRKYQEASKDKEREKAKEKYVRSLSKLYALHNQYVLAVQAAALHHRHHYQRALPTLHESLYSLQQEMVLVLKEILGEYCSITSLVQEDVLAIHQEVAHAVEMIDPATEYSSFVQCHRYDSEVPPAVTFDESLLEEAESLEPGELQLNELTIESVQHSLTSIEEELLASRKAVSSKEQRVWELQVELRGEELALSPGERVHLLGKRQGLREAQQQLQGLVCAQAKLQAQRDMLANKLAELGSEEPPPALPLQEDRQSACSTDQERSGVTALKTIKNHISGIFSPRFSLPPPVPLIPEVQKPLCQQAWYHGAIPRSEVQELLKYSGDFLVRESQGKQEYVLSVLWDGQPRHFIIQAADNLYRLEDDGLPTIPLLIDHLLQSQRPITRKSGIVLTRAVLKDKWVLNHEDVLLGERIGRGNFGEVFSGRLRADNTPVAVKSCRETLPPELKAKFLQEARILKQCNHPNIVRLIGVCTQKQPIYIVMELVQGGDFLSFLRSKGPRLKMKKLIKMMDNAAAGMEYLESKHCIHRDLAARNCLVTEKNTLKISDFGMSRQEEDGVYASTGGMKQIPVKWTAPEALNYGWYSSESDVWSFGILLWEAFSLGAVPYANLSNQQTREAIEQGVRLEPPEQCPEDVYRLMQRCWEYDPHRRPSFGAVHQDLIAIRKRHR

SEQ ID NO: 13483 - protein, 526 aa, Rous sarcoma virus
MGSSKSKPKDPSQRRRSLEPPDSTHHGGFPASQTPDETAAPDAHRNPSRSFGTVATEPKLFWGFNTSDTVTSPQRAGALAGGVTTFVALYDYESWTETDLSFKKGERLQIVNNTEGDWWLAHSLTTGQTGYIPSNYVAPSDSIQAEEWYFGKITRRESERLLLNPENPRGTFLVRKSETAKGAYCLSVSDFDNAKGPNVKHYKICKLYSGGFYITSRTQFGSLQQLVAYYSKHADGLCHRLTNVCPTSKPQTQGLAKDAWEIPRESLRLEAKLGQGCFGEVWMGTWNGTTRVAIKTLKPGTMSPEAFLQEAQVMKKLRHEKLVQLYAVVSEEPIYIVIEYMSKGSLLDFLKGEMGKYLRLPQLVDMAAQIASGMAYVERMNYVHRDLRAANILVGENLVCKVADFGLARLIEDNEYTARQGAKFPIKWTAPEAALYGRFTIKSDVWSFGILLTELTTKGRVPYPGMVNREVLDQVERGYRMPCPPECPESLHDLMCQCWRKDPEERPTFKYLQAQLLPACVLEVAE

SEQ ID NO: 13484 - protein, 526 aa, Rous sarcoma virus
MGSSKSKPKDPSQRRRSLEPPDSTHHGGFPASQTPNKTAAPDTHRTPSRSFGTVATEPKLFGGFNTSDTVTSPQRAGALAGGVTTFVALYDYESWIETDLSFKKGERLQIVNNTEGNWWLAHSLTTGQTGYIPSNYVAPSDSIQAEEWYFGKITRRESERLLLNPENPRGTFLVRESETTKGAYCLSVSDFDNAKGLNVKHYKIRKLDSGGFYITSRTQFSSLQQLVAYYSKHADGLCHRLTNVCPTSKPQTQGLAKDAWEIPRESLRLEVKLGQGCFGEVWMGTWNGTTRVAIKTLKPGTMSPEAFLQEAQVMKKLRHEKLVQLYAVVSEEPIYIVIEYMSKGSLLDFLKGEMGKYLRLPQLVDMAAQIASGMAYVERMNYVHRDLRAANILVGENLVCKVADFGLARLIEDNEYTARQGAKFPIKWTAPEAALYGRFTIKSDVWSFGILLTELTTKGRVPYPGMGNGEVLDRVERGYRMPCPPECPESLHDLMCQCWRRDPEERPTFEYLQAQLLPACVLEVAE

SEQ ID NO: 13485 - protein, 772 aa, Rous sarcoma virus
IPSRPVGGPCYLGKLTMLAPKHTDILKVLVNSSRTGIRRKRSTSHLDDTCSDEVQLWGPTARIFASILAPGVAAAQALREIERLACWSVKQANLTTSLLGDLLDDVTSIRHAVLQNRAAIDFLLLAHGHGCEDVAGMCCFNLSDQSESIQKKFQLMKEHVNKIGVDSDLIGSWLRGLFGGIGEWAVHLLKGLLLGLVVILLLVVCLPCLLQMLCGNRRKMINNSISYHTEYKKLQKACGQPESRIVMGSSKSKPKDPSQRRRSLEPPDSTHHGGFPASQTPNKTAAPDTHRTPSRSFGTVATEPKLFGGFNTSDTVTSPQRAGALAGGVTTFVALYDYESWIETDLSFKKGERLQIVNNTEGNWWLAHSLTTGQTGYIPSNYVAPSDSIQAEEWYFGKITRRESERLLLNPENPRGTFLVRESETTKGAYCLSVSDFDNAKGLNVKHYKIRKLDSGGFYITSRTQFSSLQQLVAYYSKHADGLCHRLTNVCPTSKPQTQGLAKDAWEIPRESLRLEVKLGQGCFGEVWMGTWNGTTRVAIKTLKPGTMSPEAFLQEAQVMKKLRHEKLVQLYAVVSEEPIYIVIEYMSKGSLLDFLKGEMGKYLRLPQLVDMAAQIASGMAYVERMNYVHRDLRAANILVGENLVCKVADFGLARLIEDNEYTARQGAKFPIKWTAPEAALYGRFTIKSDVWSFGILLTELTTKGRVPYPGMGNGEVLDRVERGYRMPCPPECPESLHDLMCQCWRRDPEERPTFEYLQAQLLPACVLEVAE

SEQ ID NO: 13486 - protein, 526 aa, Rous sarcoma virus
MGSSKSKPKDPSQRRRSLEPPDSTHHGGFPASQTPNTTAAPDTHRTPSRSFGTVATEPKLFGDFNTSDTVTSPQRAGALAGGVTTFVALYDYESWIETDLSFKKGERLQIVNNTEGNWWLAHSVTTGQTGYIPSNYVAPSDSIQAEEWYFGKITRRESERLLLNPENPRGTFLVRESETTKGAYCLSVSDFDNAKGLNVKHYKIRKLDSGGFYITSRTQFSSLQQLVAYYSKHADGLCHRLTNVCPTSKPQTQGLAKDAWEIPRESLRLEVKLGQGCFGKVWMGTWNGTTRVAIKTLKPGTMSPEAFLQEAQVMKKLQHEKLVQLYAVVSKEPIYIVIEYMSKGSLLNFLKGEMGKYLRLPQLVDMAAQIASGMAYVERMNYVHRDLRAANILVGENLVCKVADFGLARLIEDNEYTARQGAKFPIKWTAPEAALYGRFTIKSDVWSFGILLTELTTKGRVPYPGMGNGEVLDRVERGYRMPCPPECPESLHDLMCQCWRRDPEERPTFEYLQAQLLPACVLEVAE

SEQ ID NO: 13487 - protein, 526 aa, Rous sarcoma virus
MGSSKSKPRDPSQRRHSLEPPDSTHHGGFPASQTPDETAAPDAHRNPSRSFGTVATEPKLFWGFNTSDTVTSPQRAGALAGGVTTFVALYDYESWTETDLSFKKGERLQIVNNTEGYWWLAHSLTTGQTGYIPSNYVAPSDSIQAEEWYFGKITRRESERLLLNPENPRGTFLVRKSETAKGAYCLSVSDFDNAKGPNVKHYKIYKLYSGGFYITLRTQFGSLQQLVAHYSKHADGLCHRLTNVCPTSKPQTQGLAKDAWEIPRESLRLEAKLGQGCFGEVWMGTWNGTTRVAIKTLKPGTMSPEAFLQEAQVMKKFRHEKLVQLYAVVSEEPIYIVIEYMSKGSLLDFLKGEMGKYLRLPQLVDMAAQIASGMAYVERMNYVHRDLRAANILVGENLVCKVADFGLARLIEDNEYTARQGAKFPIKWTAPEAALYGRFTIKSDVWSFGILLTELTTKGRVPYPGMVNREVLDQVERGYRMPCPPECPESLHDLMCQCWRKDPEERPTFKYLQAQLLPACVLEVAE

SEQ ID NO: 13488 - protein, 523 aa, Rous sarcoma virus
MGSSKSKPKDPSQRRRSLEPPDSTHHGGFPASQTPNKTAAPDTHRTPSRSFGTVATEPKLFGDFNTSDTVTSPQRAGALAGGVTTFVALYDYESWIETDLSFKKGERLQIVNNTEGNWWLAHSVTTGQTGYIPSNYVAPSDSIQAEEWYFGKITRRESERLLLNPENPRGTFLVRESETTKGAYCLSVSDFDNAKGLNVKHYKIRKLDSGGFYITSRTQFSSLQQLVAYYSKHADGLCHRLTNVCPTSKPQTQGLAKDAWEIPRESLRLEVKLGQGCFGEVWMGTWNGTTRVAIKTLKPGTMSPEAFLQEAQVMKKLRHEKLVQLYAVVSEEPIYIVIEYMSKGSLLDFLKGKYLRLPQLVDMAAQIASGMAYVERMNYVHRDLRAANILVGENLVCKVADFGLARLIEDNEYTARQGAKFPIKWTAPEAALYGRFTIKSDVWSFGILLTELTTKGRMPYPGMGNGEVLDRVERGYRMPCPPECPESLHDLMCQCWRRDPEERPTFEYLQAQLLPACVLEVAE

SEQ ID NO: 13489 - protein, 526 aa, Rous sarcoma virus
MGSSKSKPKDPSQRRRSLEPPDSTHHGGFPASQTPDETAAPDAHRNPSRSFGTVATEPKLFWGFNTSDTVTSPQRAGALAGGVTTFVALYDYESWTETDLSFKKGERLQIVNNTEGDWWLAHSLTTGQTGYIPSNYVAPSDSIQAEEWYFGKITRRESERLLLNPENPRGTFLVRKSETTKGAYCLSVSDFDNAKGPNVKHYKIYKLYSGGFYITSRTQFGSLQQLVAYYSKHADGLCHRLANVCPTSKPQTQGLAKDAWEIPRESLRLEAKLGQGCFGEVWMGTWNNTTRVAIKTLKPGTMSPEAFLQEAQVMKKLRHEKLVQLYAVVSEEPIYIVIEYMSKGSLLDFLKGEMGKYLRLPQLVDMAAQIASGMAYVERMNYVHRDLRAANILVGENLVCKVADFGLARLIEDNEYTARQGAKFPIKWTAPEAALYGRFTIKSDVWSFGILLTELTTKGRVPYTGMVNREVLDQVERGYRMPCPPECPESLHDLMCQCWRKDPEERPTFKYLQAQLLPACVLEVAE

SEQ ID NO: 13490 - protein, 546 aa, Rous sarcoma virus
MGSSKSKPKDPSQRRRSLEPPDSTHHGGFPASQTPNKTAPLTAAPRSSRRPPASQHRAAAPDTHRTPSRSFGAVATEPKLLGDFNTSDTVTSPQRARALAGGVTTFVALYDYESWIETDLSFKKGERLQIVNNTEGNWWLAHSVTTGQTGYIPSNYVAPSDSIQAEEWYFGKITRRESGRLLLNPENPRGTFLVRESETTKGAYCLSVSDFDNAKGLNVKHYKIRKLDSGGFYITSRTQFSSLQQLVAYYSKHADGLCHRLTNVCPTSKPQTQGLAKDAWEIPRESLRLEVKLGQGCFGEVWMGTWNGTTRVAIKTLKPGTMSPEAFLQEAQVMKKLRHEKLVQLYAVVSEEPIYIVIEYMSKGSLLNFLKGEMGKYLRLPQLVDMAAQIASGMAYVERMNYVHRDLRAANILVGENLECKVADFGLARLIEDNEYTARQGAKFPAKWTAPEAGLYGRFTIKSDVWSFGILLTELTTKGRVPYPGMGNGEVLDRVERGYRMPCPPECPESLHDLMCQCWRRDPEERPTFEYLQAQLLPACMLEVAE

SEQ ID NO: 13491 - protein, 526 aa, Rous sarcoma virus
MGSSKSKPKDPSQRRHSLEPPDSTHHGGFPASQTPDETAAPDAHRNPSRSFGTVATEPKLFWGFNTSDTVTSPQRAGALAGGVTTFVALYDYESWTETDLSFKKGERLQIVNNTEGDWWLAHSLTTGQTGYIPSNYVAPSDSIQAEEWYFGKITRRESERLLLNPENPRGTFLVRKSETAKGAYCLSVSDFDNAKGPNVKHYKIYKLYSGGFYITSRTQFGSLQQLVAYYSKHADGLCHRLANVCPTSKPQTQGLAKDAWEIPRESLRLEAKLGQGCFGEVWMGTWNDTTRVAIKTLKPGTMSPEAFLQEAQVMKKLRHEKLVQLYAVVSEEPIYIVIEYMSKGSLLDFLKGEMGKYLRLPQLVDMAAQIASGMAYVERMNYVHRDLRAANILVGENLVCKVADFGLARLIEDNEYTARQGAKFPIKWTAPEAALYGRFTIKSDVWSFGILLTELTTKGRVPYPGMVNREVLDQVERGYRMPCPPECPESLHDLMCQCWRKDPEERPTFKYLQAQLLPACVLEVAE

SEQ ID NO: 13492 - protein, 526 aa, Rous sarcoma virus
MGSSKSKPKDPSQRRRSLEPPDSTHHGGFPASQTPNTTAAPDTHRTPSRSFGTVATEPKLFGDFNTSDTVTSPQRAGALAGGVTTFVALYDYESWIETDLSFKKGERLQIVNNTEGNWWLAHSVTTGQTGYIPSNYVAPSDSIQAEEWYFGKITRRESERLLLNPENPRGTFSVRESETTKGAYCLSVSDFDNAKGLNVKHYKIRKLDSGGFYITSRTQFSSLQQLVTYYSKHADGLCHRLTNVCPTSKPQTQGLAKDAWEIPRESLRLEVKLGQGCFGEVWMGTWNGTTRVAIKTLKPGTMSPEAFLQEAQVMKKLQHEKLVQLYAVVSEEPIYIVIEYMSKGSLLNFLKGEMGKYLRLPQLVDMAAQIASSMAYVERMNYVHRDLRAANILVGENLVCKVADFGLARLIEDNEYTARQGAKFPIKWTAPEAALYGRFTIKSDVWSFGILLTELTTKGRVPYPGMGNGEVLDRVEEGYRMPCPPECPESLHDLMCQCWRRDPEERPTFEYLQAQLLPACVLEVAE

SEQ ID NO: 13493 - protein, 526 aa, Rous sarcoma virus
MGSSKSKPKDPSQRRRSLEPPDSTHHGGFPASQTPNKTAAPDTHRTPSRSFGTVATEPKLFEDFNTSDTVTSPQRAGALAGGVTTFVALYDYESWIETDLSFKKGERLQIVNNTEGNWWLAHSVTTGQTGYIPSNYVAPSDSIQAEEWYFGKITRRESERLLLNPENPRGTFLVRESETTKGAYCLSVSDFDNAKGLNVKHYKIRKLDSGGFYITSRTQFSSLQQLVAYYSKHADGLCHRLTNVCPTSKPQTQGLAKDAWEIPRESLRLEVKLGQGCFGEVWMGTWNGTTRVAIKTLKPGTMSPEAFLQEAQVMKKLQHEKLVQLYAVVSEEPIYIVIEYMSKGSLLDFLKGEMGKYLRLPQLVDMADQIASGMAYVERMNYVHRDLRAANILVGENLVCKVADFGLARLIEDNEYTARQGAKFPIKWTAPEAALYGRFTIKSDVWSFGILLTELTTKGRMPYPGMGNGEVLDRVERGYRMPCPPECPESLHDLMCQCWRRDPEERPTFEYLQAQLLPACVLEVAE

SEQ ID NO: 13494 - protein, 523 aa, Rous sarcoma virus
MGSSKSKPKDPSQRRRSLEPPDSTHHGGFPASQTPNKTAAPDTHRTPSRSFGTVATELKLFGDFNTSDTVTSPQRAGALAGSVTTFGTRESRIETDLSFKKRERLQIVNNTEGDWWLAHSLTTGQTGYIPSNYVAPSDSIQAEEWYFGKITRRESGRLLLNPENPRGTFLVRESETTKGAYCLSVSDFDNAKGLNVKHYKIRKLDSGGFYITSRTQFSSLQQLVAYYSKHADGLCHRLTNVCPTSKPQTQGLAKDAWEIPRESLRLEVKLGQGYFGEVWMGTWNGTTRVAIKTLKPGTMSPEAFLQEAQVMKKLRHEKLVQLYAMVSEEPIYIVIEYMSKGSLLDFLKGEMGKYLRLPQLVEMAAQIASGMAYVERMNYVHRDLRAANILVGENLVCKVADFGLARLIEDNEYTARPGARFPVKWTAPEAALYGRFTIKSDVWSFGILLTELTTKGRAPYPGMVNGEVLDRVERGYRMPCPPECPESLHDLMCQCWRKDPEERPTFEYLQAQLLPACVLKIAE

SEQ ID NO: 13495 - protein, 535 aa, Rous sarcoma virus
MGSSKSKPKDPSHRRRSLEPPDSTHHGGFPASQTPNKTAAPDTHRTPSRSFGTVATEPKLFGDFNTSDTVTSPQRAGALAGGVTTFVALYDYESWIETDLSFKKGERLQIVNNTEGNWWLAHSVTTGQTGYIPSNYVAPSDSIQAEEWYFGKITRRESERLLLNPENPRGTFLVRESETTKGAYCLSVSDFDNAKGLNVKHYKIRKLDSGGFYITSRTQFSSLQQLVAYYSKHADGLCHRLTNVCPTSKPQTQGLAKDAWEIPRESLRLEVKLGQGCFGEVWMGTWNGTTRVGTWNGTTRVAIKTLKPGTMSPEAFLQEAQVMKKLRHEKLVQLYAVVSEEPIYIVIEYMSKGSLLDFLKGEMGKYLRLPQLVDMAAQIASGMAYVERMNYVHRDLRAANILVGENLVCKVADFGLARLLEDNEYTARQGAKFPIKWTAPEAALYGRFTIKSDVWSFGILLTELTTKGRMPYPGMGNGEVLDRVERGYRMPCPPECPESLHDLMCQCWRRDPEERPTFEYLQAQLLPACVLEVAE

SEQ ID NO: 13496 - protein, 545 aa, Rous sarcoma virus
MGSSKSKPKDPSQRRRSLEPPDSTHHGGFPASQTPNKTAPLTAAPRSSRRPPASQHRAAAPDTHRTPSRSFGTVANEPKLFGDFNTSDTVTSPQRARTLAGGVTTFVALYDYESWIETDLSFKKGERLQIVNNTEGNWWLAHSVTTGQTGYIPSNYVAPSDSIQAEEWYFGKITRRESGRLLLNPENPRGTFLVRESETTKGAYCLSVSDFDNAKGLNVKHYKIRKLDSGGFYITSRTQFSSLQQLVAYYSKHADGLCHRLTNVCPTSKPQTQGLAKDAWEIPRESLRLEVKLGQGCFGEVWMGTWNGTTRVAIKTLKPGTMSPEAFLQEAQVMKKLRHEKLVQLYAVVSEEPIYIVIEYMSKGSLLNFLKGEMGKYLRLPQLVDMAAQIASGMAYVERMNYVHRDLRAANILVGENLECKVADFGLARLIEDNEYTARQGAKFPAKWTAPEAGLYGRFTIKSDVWSFGILLTELTTKGRVPYPGMGNGEVLDRVERGYRMPCPPECPESLHDLMCQCWRREPEERPTFEYLQAQLLPACVLAAE

SEQ ID NO: 13497 - protein, 526 aa, Rous sarcoma virus (strain H-19)
MGSSKSKPKDPSQRRRSLEPPDSTHHGGFPASQTPDETAAPDAHRNPSRSFGTVATEPKLFWGFNTSDTVTSPQRAGALAGGVTTFVALYDYESWTETDLSFKKGERLQIVNNTEGDWWLAHSLTTGQTGYIPSNYVAPSDSIQAEEWYFGKITRRESERLLLNPENPRGTFLVRKSETAKGAYCLSVSDFDNAKGPNVKHYKICKLYSGGFYITSRTQFGSLQQLVAYYSKHADGLCHRLTNVCPTSKPQTQGLAKDAWEIPRESLRLEAKLGQGCFGEVWMGTWNGTTRVAIKTLKPGTMSPEAFLQEAQVMKKLRHEKLVQLYAVVSEEPIYIVIEYMSKGSLLDFLKGEMGKYLRLPQLVDMAAQIASGMAYVERMNYVHRDLRAANILVGENLVCKVADFGLARLIEDNEYTARQGAKFPIKWTAPEAALYGRFTIKSDVWSFGILLTELTTKGRVPYPGMVNREVLDQVERAYRMPCPPECPESLHDLMCQCWRKDPEERPTFKYLQAQLLPACVLEVAE

SEQ ID NO: 13498 - protein, 526 aa, Rous sarcoma virus (strain Schmidt-Ruppin)
MGSSKSKPKGPSQRRRSLEPPDSTHHGGFPASQTPNKTAAPDTHRTPSRSFGTVATEPKLFGDFNTSDTVTSPQRAGALAGGVTTFVALYDYESWIETDLSFKKGERLQIVNNTEGNWWLAHSVTTGQTGYIPSNYVAPSDSIQAEEWYFGKITRRESERLLLNPENPRGTFLVRESETTKGAYCLSVSDFDNAKGLNVKHYKIRKLDSGGFYITSRTQFSSLQQLVAYYSKHADGLCHRLTNVCPTSKPQTQGLAKDAWEIPRESLRLEVKLGQGCFGEVWMGTWNGTTRVAIKTLKPGTMSPEAFLQEAQVMKKLRHKKLVQLYAVVSEEPIYIVIEYMSKGSLLDFLKGEMGKYLRLPQLVDMAAQIASGMAYVERMNYVHRDLRAANILVGENLVCKVADFGLARLIEDNEYTARQGAKFPIKWTAPEAALYGRFTIKSDVWSFGILLTELTTKGRVPYPGMGNGEVLDRVERGYRMPCPPECPESLHDLMSQCWRRDPEERPTFEYLQAQLLPACVLEVAE

SEQ ID NO: 13499 - protein, 526 aa, Avian sarcoma virus RASV1441
MGSSKSKPKDPSQRRCSLEPPDSTHHGGFPASQTPNKTAAPDTHRTPSRSFGTVATEPKLFGGFNTSDTVTSPQRAGALAGGVTTFVALYDYESRTETDLSFKKGERLQIVNNTEGDWWLAHSLTTGQTGYIPSNYVAPSDSIQAEEWYFGKITRRESERLLLNPENPRGTFLVRESETTKGAYCLSVSDFDNAKGLNVKHYKIRKLDSGGFYITSRTQFSSLQQLVAYYSKHADGLCHRLTNVCPTSKPQTQGLAKDAWEIPRESLRLEVKLGQGCFGEVWMGTWNGTTRVAIKTLKPGTMSPEAFLQEAQVMKKLRHEKLVQLYAVVSEEPIYIVTEYMSKGSLLDFLKGEMGKYLRLPQLVDMAAQIASGMAYVERMNYVHRDLRAANILVGENLVCKVADFGLARLIEDNEYTARQGAKFPIKWTAPEAALYGRFTIKSDVWSFGILLTELTTKGRVPYPGMGNGEVLDRVERGYRMPCPPECPESLHDLMCQCWRRDPEERPTFEYLQAQLLPACVLEVAE

SEQ ID NO: 13500 - protein, 450 aa, Rous-associated virus type 1
MEAVIKDLIRDQGVRGEGGSTAGLSATPPASLPGSLTNVKALQKSPGPQRERKSSSSSEDRNRMKTLGRRDSSDDWEIPDGQITVGQRIGSGSFGTVYKGKWHGDVAVKMLNVTAPTPQQLQAFKNEVGVLRKTRHVNILLFMGYSTKPQLAIVTQWCEGSSLYHHLHIIETKFEMIKLIDIARQTAQGMDYLHAKSIIHRDLKSNNIFLHEDLTVKIGDFGLATVKSRWSGSHQFEQLSGSILWMAPEVIRMQDKNPYSFQSDVYAFGIVLYELMTGQLPYSNINNRDQIIFMVGRGYLSPDLSKVRSNCPKAMKRLMAECLKKKRDERPLFPQILASIELLARSLPKIHRSASEPSLNRAGFQTEDFSLYACASPKTPIQAGGIGEWAVHLLKGLLLGLVVILLLVVCLPCLLQCVSSSIRKMIDNSLGYREEYKKLQEAYKQPERRA

SEQ ID NO: 13501 - protein, 677 aa, Anopheles gambiae str. PEST
MLMRSGIERSGSREQRDQQQDWVMMSPLWTARYDYEAQGDDELSLRVGQIVYVLSTDSSISGDEGWWTGKIGDRVGIFPSNFVTNEDPAVLKVQPVEIQYHELDLKEVIGVGGFSKVHRAFLNGEEVAVKASRQDDEFEVARQNVLQEAKLFWSLKHPNIVSLKGVCLDPKTLCLVMEYARGGSLNKILAGRKIPPNVLVDWAIQIARGMKYLHCEAPISVIHRDLKSSNVLISESIQHGHLLNKTLKITDFGLAREAYRTTRMSAAGTFAWMPPEVIKSGTYSKASDVWSYGVLLWELLTGETPYKGFDSLSVAYGVAVNTLALPIPKTCPESWGKLMKSCWEIDPHRRPSFKDIEKDLDIIARSGFAQTPHESFHTMQDGWKKEIAEVLQELRKKEKELRSKEEELTRVQQEQRYKEENLAKREQELHAREIELLGRELKILINQNTPTPKKRKGKFSKSRIKLIKKAPGQISLPSDFRHTITIQHTAIRDERQRIDTPPGSPATRLRTIVFPGDVIKGKTWGPSTLHQRERSHLPTMRPSARPQQFSKSAPNLDKSRATALSASSSRHEILGKSHDDGLHTIEANRNYSRTNTTTTCTSNDVMNSNINRNRMHNTFQHYHTTVPRTVDSNSGVCSSNRSNYSPHSNPHHPHHNHAADSGRAHSEASVLAARQDV

SEQ ID NO: 13502 - protein, 712 aa, Anopheles gambiae str. PEST
LEEDLRNIKSVIHVTRENIDALNEKFADFQQPPALYLEEYQELTSKLHDLEIKEQDLMEKKIQMQNEQLSEPSEPPDPAERVEVSLSYCEKCRILSSSHCFQTESMCGTLSRQSKMLLRAFLPNQQRTSVQVIPGMRLKDALAKALKRRNLTCEFCEVTAGNSNYPIPWETDVSALNCDEVFVRILDIGFPTYISHQFIRKTFFSLAFCECCRRLLFTGFYCNQCNYRFHQRCVDKVPPICSKRHMDSTFYHVLLANPESTAGIINPGAGGYSTSLRHPRSLNQHDRSNSAPNVCINNVIKPFFGGENRHVISNRPLQVVLICFMYNLSFMVKPKLLMRSHCLSIDFTGILYICNGLQAQPNQEHSHSTQASPTNTLNHSKRPRARSADESNKNLLSPRDSKQSDENWNIQAEEILIGQRIGSGSFGTVYKAHWHGPVAVKTLNVKTPSPAQLQAFKNEVAMLKKTRHCNILLFMGCVSKPSLAIVTQWCEGSSLYKHIHVNETKFKLNTLIDIARQAAQGMDYLHAKNIIHRDLKSNNIFLHDDFSVKIGDFGLATAKVRWSGSQQSNQPTGSILWMAPEVIRMKEQNPYSFQSDVYAFGIVLYEMLTEQLPYNHINNKDQILFMVGCGKLRPDSTKVRTDCPQALKRCVEDCIKFNRDERPLFRLLLNMLENMLRTMPKFHRSASEPNFTQTQLQNDDFLYMCSSPKTPV

SEQ ID NO: 13503 - protein, 880 aa, Anopheles gambiae str. PEST
MCANGWPQLPVGMVAAGGPGVGPVGVGIGVGVGVGMSSKPATAGWMDGLFGCMRPVLSLIGKSHIMEMKSKQTEDWEIPYETITDMVWLGSGAQGAVFCGKLRNELVAVKKVRELKETDIRHLRKLDHENIVKFKGVCTQAPVFCIIMEYCAHGPLHKKLQDSGGVITPQQLVSWSQQIALGMQYLHTHKIIHRDLKSPNILIGENDVIKISDFGTSREWNEISTKMSFAGTVAWMAPEVIRNEPCNEKVDIWSYGVVLWELLTGEVPYKNVDSSQIIFGVGNNSLYLPIPDTCPEGFKLLIKQCWSAKPRNRPSFKIILTHLDIAGRELLQACEKGQYELYYQTQRSWREDIRSHMQKLTSNGMDIQKHEQDLIQKRKDEWKHAQDVRMTYERKLERTNMLCMQLSQLILQVEQKEQEILKREKLLAPEQRKCGFLKRGGDKANRKRPFSFPAMTTALPGRGGYGYSTTPSPTAAGVTPAKATLYAELNPSGHQGAKSVVVPVAAAPPPPYSTLAPLQTAAAAVPVTSPITSPEAVPVQPMAPSTTSSGRVKKLRHRRVGSGTINCSPKCSPCRDRRVQSEPESRHVKLVDTETQTEPMDISEPDVIEEALRRLSVSERLAGDRVLPVETRVSAYRCSSKPQSEDDGEVPEDEENGNSISISTMTNSRSSDMMTTSGGVPVTGSEQNYRYRRQQSSQQQEDLREEEADGYVEEFDDEREGSSPDPIMDAMNRNERFDRACSDDDKIDTLDRKVNIISEKLQQSAAYGNLLNDNNVIVYRAALKQPNGPPSGGKTILLKHPGAGSNLKPAGAGGAGIGAYLYSGPHAGGLAVVGGGAGAVPAEVEQHHEPKLGEQEEEESWTDEEGEEPDQKQYYVLRRK

SEQ ID NO: 13504 - protein, 871 aa, Anopheles gambiae str. PEST
VNIRRGLDVIQSMIDISADRLEGLRTQCATSAELTQQEIRTLETKLVKLFSDLLITKSKLPERLPAQGLPATGNELKQWLRVVGLSCASLNAVIQQVSTLEGLLEKDEKELRTIMGNNVYVREEEMKRLTRACGNLRRCREHLELPATDGSVSRKGTEPHDLFWDSWDRQPACHRTNGPGMPGEAMGSTSNTSPQTDDGGGSLSLATTQHVEGAALLNPQHAISPDEASTSGCTPSPSPPNSPSNVQLHNRQNRRGFPTTPPPRKKHQTALLSFASGGSATSAGMLSETGGEYGGDPGVPPHPTGYSAVPPKSPCTPIITRGMGHMIQHRFTKKFKVTKSTCDLCNKQMFFGFKCTECKYRCHKDCKSNVPPSCGLPQEFVDEFKKSLHGGIGRGPMHAIHACGGGPDSSSAGSSCNSSSPSSPALLSLPPQTPATSKYSQFNFPEVSNSIGGSGGGGNGGSLMMMNYASSMGGGSSSGGITIETHPIGGGTGGAGGLGGSLGSSGVYTMDTSVEIPKLQFSDDHSVPGGGEDKTGSASATSTDSSSDRTPIRLDSTEERDHESSWPRQNSLSLKEWDIPYDDLHLKEKIGNGRFGTVHRALWHGDVAVKLLKEDYVADERTLEAFKLEVATFKKTRHENVVLFMGACMKPPRLAIVTSLCKGNTLFTHIHLRKDKFNLNRTTLVAQQISQGMGYLHARGIVHKDLKTKNIFLENGKVIITDFGLFSATKLLYCDLGLGIPGGWLCYLAPELMRNLTPYRPIEGDLPFSKTSDIYAFGTVWYELLCGEFPFKSQPAESIIWQVGRGMKQTLANLQASRDVKDILIQCWSHNSEDRPDFAKLLTQLERLPKKRLARSPSHPVQLSRSAESVF

SEQ ID NO: 13505 - protein, 1314 aa, Anopheles gambiae str. PEST
EALLQSRPLPHIPPPGSLLPTDLLGQNQDGLENHTGTMHSQGSSNAAQSSFETAHRWTSKENLLAPGPEEDDPQLFVALYDFKAGGENQLSLRKGEQVRILSYNKSGEWCEAHSDSGHVGWVPSNYVTPLNSLEKHSWYHGPISRNAAEYLLSSGINGSFLVRESESSPGQRSISLRYDGRVYHYRISEDSDGKVYVTADAKFNTLAELVHHHSALHEGHGLITPLLYPAPKQNKPTVFPLSPEPDEWEICRTDIVMKHKLGGGQYGEVYEAVWKRYGNTVAVKTLKEDTMALKDFLEEAAIMKEMKHPNLVQLIGVCTREPPFYIITEFMSHGNLLDFLRTAGRETLDAVALLYMATQIASGMSYLESRNFIHRDLAARNCLVGDNNLVKVADFGLARLMRDDTYTAHAGAKFPIKWTAPEGLAYNKFSTKSDVWAFGVLLWEIATYGMSPYPGIDLTDVFHKLESGYRMERPPGCPPEVYDLMRKCWQWNAQDRPTFKSIHHDLEHMFQESSITEAVEKQLQGVGWETCITLIATWFFFSDSGSGSGSKFSTFGNKQPSTAGVQMRRTTNKRGKTAPAPPKRTSLLSSSRDSTYRDDDNCKLGEGEQNANGFSRDMANLMNRATDSENEQTEVTPDTDTDNPEPVGFQKTPQQSSFKRAPIMGNRGLETRGSKRLPQQARRDQLPPGPGGQPCTPVLGTGQPPIVGALEVQNVKKAINRYGTLPKDARIGAYLESLRQSDGTMGMNPNMALVSEPPPPPMAAANAISNSILAQRNAAAIKAQPQMIRSNSSSGVTMSNSATASLSKLQRHRTTTDGSMMTFSSFRGSVGNNSPKRAVQPTLADLEFPPPPVDLPPPPEEFDMPLDQRGGGGSGGSGGMLEKSIAPSNDVRNTEPSVEEASTRFGVSLRKREPSTDSCSSLGSPADAMINTVGDPSSLPIPPPPPAKDLKADPKRVTNVPKCLQGDVVGGKRTAGPLHGTSDPASQLVSELAESMHLPKAPSPLTTAQEPQHHQQQQPISHYKSSDPPFKAQLKKVDTAKRAPAQPAKKEESTGGIIDFKSRLRKVDQNNTEVSSNGGSGGAPIDSNKVIELKKTEIKIELSDDRKRESLEGNSLKVDSGGGSGDNLSTGSSGAGGEDGDGKRKSTGSISSLKKLWEAKESPSDPNKKPAVPMKPSKFASIYATPVQNMMQTASSTVASATGSSVGGGGGRESILELVQLLQTSLKQPVGNISASQWLALSDRLNSLQSSCVTFADNESLPPHAKFHFRELVTRVENQARSLRSASNKNVQDNEKLVQEVGQSLKQISNALHR

SEQ ID NO: 13506 - protein, 473 aa, Anopheles gambiae str. PEST
VNGGGDLNMPGGPTVTPGTPNTKAKDVSPRVKIVVALYPFKAIESGDLSLEKNAEYEVIDDSQEHWWKVKDQHGTIGYIPSNYVKEKELLGLQKYDWYVGDMSRQRAESLLKQNDKEGCFVVRKSSTKGLYTLSLHTKVPQSHVKHYHIKQNARSEFYLSEKHCCETIPDLINYHRHNSGGLACRLKTSPCDRPVPPTAGLSHDKWEIHPSELMILEELGSGQFGVVRRAKWRGSIDTAVKMMKVGTMSEDDFIEEAKVMTKLQHPNLVQLYGVCSKHRPIYIITEYMKHGSLLNYLRRHEQSLIGNMGLLLDMCIQVCKGMSYLERHNYIHRDLAARNCLVGSENTVKVADFGLARYVLDDQYTSSGGTKFPIKWAPPEVLNYTRFSSKSDVWAYGVLMWEVFTCGKMPYGRLKNTEVVERVQRGIILEKPKACAKEIYDVMKKCWSHSPEDRPGFRILKDQLAAVAQGLTD

SEQ ID NO: 13507 - protein, 589 aa, Anopheles gambiae str. PEST
CASCYNAIEPEQHVAAVGQLWHAECFRCSVCDARLSSWYFEKDGLLFCRDDHWSKFGDCCQQCSQFISGPAMFAGDHKFHPECFRCESCKVFIGDRESYALLERSKLYWYVLTGAKNAIAPPKDRIIMSPTKQERQRIPHSIRLVEIPWSGNRSDRIRLATDDKPSGVKGVANGCKSVRISEVTLNSDLMALRVGDKVLEVNGTPVRDVPLESLQNLIEASAGKALQLTVEHDPDVVALATAGGLPGCKGILSASYAGTETNSTNSLKEKERSSSMSRLLDEHRTMATGGEFYDLSRTKSFRVEPKAARIFRASDLVQGELLGKGFFGQVFKVTHRVTQEVMVLKELYRVDEEAQKNFLKEVAVLRSLSHHNVLRFIGVLYKDKKLHLVTEFIPGGSLKELIHDSGLPLSWAQRISFARDISSGMSYLHSMNIIHRDLNSLNCLVRENGTVIVADFGLARIIKQPLISTTAYEKPRRQRYTVVGNPYWMAPEMMRGNKYDEKVDIFSFGIMLCEIIGRVQADPDYLPRLPDFGLNEKVFREKFCGQCPEPFYKIAFLCCDLNPDKRPPFHVLQGWLETMATVVALQRPI

SEQ ID NO: 13508 - protein, 268 aa, Anopheles gambiae str. PEST
TVGKGSYGTVIKAKWRNKYVAVKYMEVLTEQAFTAEVSHLSRVAHPNIIELYGACTEKPNFCLVMEYADGGSLHKVLHSRPRPVYTAAHAMSWARQCAEGVAYLHDMTPRPMIHRDLKPPNLLLVNNGTVLKICDFGTVTDKSTLMTNNKGSAAWMAPEVFEGSSYTEKCDVFSWGIILWEVIAREQPFKHIDTSYAIMWRVHQGSRPPLIDHCPKPIEQLMVRCWDKDPISRPSMKEVVNVMNALCKLFTGENEPIGNEFLPEDEVE

SEQ ID NO: 13509 - protein, 378 aa, Anopheles gambiae str. PEST
MTLSTNRPLHEEEWFHGVLPREEVVRLLRNEGDFLVRETTRNDESQTVLSVCWNGHKHFIVQTTAEGHYRFEGPAFPSIQELIVHQYQSELPVTGRSGAVLRKPVLRERWELSNDDVILLDKIGRGNFGDVYKAKLKSSKNTLVAVKTCRMTLPEEQKRKFLQEGRILKQYDHPNIVKLIGICVQKQPIMIVMELVAGGSLLMFLRKNASTLGQRQMMGMCRDAAAGMRYLESKNCIHRDLAARNCLIGSENIVKISDFGMSREEEEYIVSGGMKQIPIKWTAPEALNFGKYTSLCDVWSYGILVWEIFSRGDTPYSGMSNSMARERIDEGYRMPAPEGAPPEMYRLMLKCWSYEPESRPHFDEICSVVDALLLCTKD

SEQ ID NO: 13510 - protein, 1066 aa, Anopheles gambiae str. PEST
QVPDLSCLKALDQELFNYYYSQLRYDLLHNRIPEIDYRKYKNKILGYVVNDMYRKMIEDKVGLSELKRDFEKYIPRKISREHSVCFVNVAQKRIFESLNSIQNRDHDVNYVKNVYINDIDNIAPGYLYEEYAAEIQYPRGEFSSRTGKCPVKLRFQPYGTAVSSRETTKYGSTGGGLERTLDHEDATTTPGLKVFYASKWQHVTNIDEILTILVEKLTVKLALEDQSEPYCIDFHDQTELNSFVTCLAGYYRLMCKWTVYLCQDYLSSPMLNLLKELKCHGPIGGKYSTDKIREKNSSCGACIIRQCEEQYDTYYVDMLETDGLIKTYKLIHAEDQWHVQRDKEEEEALHRYNQLTEALKSLNPEITSVYRLPPSDNDTAPNLLLCRPTHKASPKRLLRGGTQELGQKRACIINAAKELVINRNAVEDESDGYTKRTRADFLLPNNSKMEVTLKLLKNEKEGEYLKDFLQVAGQWATIDSIDIIKLYGMTVCKPITMVLEFPRYGRLDEFLRTRRTSVRPTALIEIGHSLARALYYLQKHGIIHGHIRCSSMLVTQYDEGEQRVLAKLGDPGMHGQRRLTKHDLLWIPYEYQDLSEQSVARLRADPATDAWACTSTLWEIFSRGIKMHVYKPAEFLPTRKWLQTMPPELKDSKQIYECLSCGWHADPDKRLAPQTVVGLLVHARQLDGSYCTVGNGHVNGHSTSNMLNGSVFKNSILSMETNSTLIRSRTDCTSSSYVSNGSDSELRSNASSGSSSLPLLSNSINRFSGDSYYEKTFVNCSDYIQLSGSERIFFHNMLGEGNYGRVYRGTLERDNQAPRDVALKTIYDDRPDLGRVKDDFRREVDIMKNLRHTNIVEFICFIEELDKLVVVMEYVPLGSLLAYLGYMRYELKELDLLWMARDIANGMNYLCEKNIVHRDLAARNILVESKKCVKISDFGLAQVTEGSNYYVARHSRELPIRWYAPETLETQKYSSQSDVWSFGVTLYEMFTYGATPYSHVDVKSAAQLYQLLQRETKILQLPEDFSYVYDKLMAPCFKRDPHERMTFSELLEELNDMINQYGEPIY

SEQ ID NO: 13511 - protein, 500 aa, Anopheles gambiae str. PEST
SCPTLRFSYVSSDGKGKKPHPKQADPVVCVWEFPEKQPSAAAFPRRSRKTRKMEDIFHWCREGNSIQVRLWLDDTEHDMNLGDDHGFSPLHWCAKEGHSKLVEMLLHRGARVNATNMGDDIPLHLASAHGHYDIVQMLIRHRSDVNAANEHGNTPLHYACFWGYQAIAEELVNNGALISLANKDGDTPLDKAKALLATRLHNLAVESGQELKKISFKDQSWSGMKTRSRDATLSRFKGINIQELTLHNKVAITPGGETWRGRWQNNEIIAKILAIRECTARVARDFNEEFPKLRIFSHPNILPVLGACNAPSNLIVISQYMPRGSLYDLLHGTAGIVVDTAQAVRFALDIARGMAYLHSLERIIPEYHLNSFHVMIDDDLTARINMADAKFSFQERGRVYQPAWMSPEMLQKKRTERNWEACDMWSFAICIWELATREIPFADLTPMEAGMRIATEGLRVTIPPGTSPHLAKLIKICMNEDPGKRPTFDMIIPILDKMKR

SEQ ID NO: 13512 - protein, 994 aa, Anopheles gambiae str. PEST
VVLGALLLAIETINNDSTLLPGKKLRLRAVDIGAQKSLKAFPIKKMTEMRDNGIVVFIGPDETCTSEALVASAWNLPMISYKCADIAVSDKTVYSSFARTLPPATKVSKSVAALLLANNWHCFSIVASKHPAWSMEIAHAIELQAELNNLTVNHFRIYSDYIPSKIYELQEIVDNTYRNTRVYVFVGDHIEMVDFVRCLQNRKLLSTGDYIVISIDDEIYDPNMKRNIYQDKHQQNRKRYNYKDQERLQEAFQSVLRISPLFPMNPKFVRPSLRPIYGAYLYDALIIYARAATEVLRDGGDVSDGRLIMRHIFNRSYHSIQGFDVYIDANGDAEGNFSVIALQKDDKVNNSLHMSMQPVALFAYGARNATGTGTTLPEFRYLNPNRPIMWLKGRPPLAEPVCGFYNEKCRPKAKDWRYITGALVVILFMAIFTIILFKHYRYEQTLACLLWKVDMKDVILITSPDALYNNELRKNLVCQQSIMVNSAGDVNKRAYTTIGLYRGNIVAIKYLHKRTVDITRNIRKELKQMREIRHENLITFVGASIDHGTVSILTSYCARGSLVDVLSNEDLKLDHMFVSSLVSDIVKGLIYLHDSDVGSHGNLRSSKILIDSRWVAQIADFGLHEFKSCQEEPSKFEKELRRSLWKAPELLRDPNCPPKGTQKGDVYSFGIVLYEIIGRKGPWGDLNMSWQDIVARVMSPEEYGIFRPSLRGIDAPEYVIQLLHSCWEEDPEDRPDIRLVRVKLKPMQAGLKPNIFDNMLAIMEKYAYNLEGIVQERTNQLSEEKKKTESLLLRMLPKSVAESLKRGERVEAECFDCVTIFFSDLVGFTELCAQSTPFEVVEMLNDLYTCCDFIISSYDVYKVETIGDAYMVVSGLPLRNGDRHAGEIASLALHLLNSISNLEIRHRPGEFIQMRIGIHSGQCVAGVVGLKMPRYCLFGDTVNTASRMESNGEALKIHISSITYGLLKKLGGYKCEERGIIKVKGKGEMRTYWL

SEQ ID NO: 13513 - protein, 1046 aa, Anopheles gambiae str. PEST
DTVWLEELLKDVQLEQFLPRIRDELQVTRLAHFDYVHVDDLEKIGLGKPGIRRLLEAVKKRKAQQWRRNILSKLIGGGKQQPPKKSTGVGGSVGGAGQNEEPSALALTCLIHEKDVTLSVKLGDGSFGVVRRGEWHAPGNHLVPVAVKVLKADTLAQPGVIEDFFKEVQAMHAMNHPNLIRLHGVVLSQPMMMVTELAVNGSLLDLLRKQCKHTPLPMIWSWSVQIATGMAYLESKRFLHRDLACRNVLLAAGNKIKIGDFGLMRALPQQEDCYVMTEHKKVPFPWCAPESLRYRQFSHASDTWMFAVTLWEMFTFGEDPWVGLNGSQILRKIDREGERLHHPDACPPDVYQLMLQCWDKTPSERPTFAAIKEFLTGVPPPIYRAVSNYSAENRLAAQQGDTIVIVDDRPELQFIKGQNQRTFDIGTIPRGVVVDARKSSTSSSGGSSATISRPLHDSFRHTGHGSPFGASWGNPATLEMEGEVKLRNKSKDLVSVDRRGKCISEQYVKERKSNASKQFSYNKLVNENHSKQQHLHHQAQLHRPPRPPQPQQPAATEGILIDLSSPNDDATFGGSSGASGAAPGTVRQVASILDEPIDIPTEGDDPFGAQQPAQQQHEQQHLQLATVASFASVSPVPSVAAKLEPPPYQMPPKYSNTYGIVHDSTLNLSIATEPDPFAPQQSQPAQQHYQKQETIVTSDYESGPSSSVSARDLMASIKRQQTIEQGAAPPTQPVDTYNDSLEVNVSGNELASPYGGSTAHVNVTPKKLDKSFLAELEKDIYKQEPSAGNSMNSSVAYAARNSAKDVSHSKYDTTANLAMSQIYANQANSIALAASLQQQLTLSPKKQNMVQQPVASDTNTLVQQMWAERNNVAAAAAAAPLPDGGQQPVSPQKSHNFVALSNGVQPAHHHQYGSTMSLSGANIYSSVYNGSIASSDVYQTVGGDLELRPIRPAPSAPLSAQQIQRRLDRLAQQDQQVASLLQELGDEANEEEARNSLAAVNWDHTLAVRHFKIERLCRLGLANRTRCEEALQKTGWSIQLAASILL

SEQ ID NO: 13514 - protein, 520 aa, Pyrus communis
DVQYLTGHVDERKPPQLADFLNWFLHDKKGTSTLSKPSSTGHRPHHVRVTGRLSTSCHLVDEDRELLLPRRHHNDDDHDNHVSSIFIDQSLTDGGEGGQIIKETSLLPGDQTRFGLESSLMRLELKGNSPHCLVQSDIPPCVQGDASEALDVTATAVASLEECARLSEENDVVQQAYRKEIVVSRNQVIRNSVEQPKVTLYNQSDLEGVHSELVKQGRITAVTNPRYLNLEPTLAMDWLEISWDELNIKERVGAGSFGTVHRAEWNGSDVAVKVLTVQDFHDDQLKDFLREVAIMKRVLHPNVVLFMGAVTKRPHLSIVTEYLPRGSLYRLIHRPASGELLDQRRRLRLALDVAKGINYLHCLNPPIVHWDLKSPNLLVDKNWTAKVCDFGLSRFKANTFISSKSVAGTPEWMAPEFLRGEPSNEKSDVYSFGVILWELATMQQPWGNLNPAQVVAAVGFKNKRLEIPRDLNPNVAAIIEACWANEPWKRPSFAVIMDSLTPLIKAPVTQPSRADMPLLT

SEQ ID NO: 13515 - protein, 634 aa, Fugu rubripes
MSDLILEELFIKRSQQKKKTSPLNYKERLFVLTQEKIAYYDFDAEKRKRKGLRGSVDLEKIKCVETVEPEPNAPQERMYAFQIVYDEGPLYIFAKNEDARCRWIKTLKNMVRCNKDLLQKYHPCAWMDGMWLCCHQEVKQAMGCRVLDNKNGFNWISPRRTSRKPLPPTPTEENPGPNVLLQAPEPQGPSVGMTVTAEYNYLPMTTQDLELKKDEEYTILEMSDPNWWRARDKYGNEGYIPSNYVVEAENGLERFDWFCKNTNRSQAEKLLRTENKDGGFLVRDSSRPGKYTVSLLSKSGGDTGASCRHYNICTTPQGHFYLAEKHYFSTIPELIVYHQHNAAGMVSRLKYIVTTRMRPPSTVGLGYGVWEIDPRHLTFIKDLGTGQFGVVKYGKWQGKHDVAIKMIKEGSMSEDDFIEEAKIMMKLHHENLVQLYGVCTTQRPIYIVTEFLSNGCLLTYLREGLKQHPTMVQLLEMCKDVSEGMAYLESKQYIHRDLAARNCLVDSNGTVKVTDFGLSRYVLDDEYTSSVGAKFPVRWSPPEVLLYCKFSSKSDVWAYGVLLWEVYTLGKLPYERLNNQEIVDKVSSGRRLYRPQLASEKVYAVMTSCWHEKADERPTFEELVLTVQDLLDGL

SEQ ID NO: 13516 - protein, 1425 aa, Fugu rubripes
MNLCSFPAAVLLLWALSASAEGHCQKSPEPNKLNLSVSYELPTFTAEFPIQNVVTLDGIIYVGATNRIYALAPSLTKLSEYRTGPLLANQTCGQKVANASSGGGRKDNLNVALVVENIYDKGLFSCGSADNGVCRRHVLEDDVSLDEEGRQKSVDELVYCFTDLKQDKGQPRDSDVVVSPSGSQVLNVESNMIMFFVGNSEIPGSGNVTGPTARPHTMSLRKMKTSQNGFTFFSNRSYMDLIPPLRGSYYLRYVYSFHSGPFTYFLTVQQVSKDSQTYHTRIVRMCSSDHDIRRYVEMPLECISTDKRRRRSMEDVKVFNILQAATVTKVGSDVELQRQLRLEEGDDVLFAAFARGKPNSTEATPNSAICVMSLKLINSMFKMYMQKCNTVDLYHFTGSDKKSCYNVSSSDDCDPHEGIHEGKEGKYRLQVTQFVQRLEYWQKVLTNTLVTSITVVTVHGRAVGYLGTADGRHIQVVFSRFASPHVNIRLDSRPVSGSVVLPGQDPSEGALLLTTGNKITKVPLIGPGCDHLTTCTSCLVSSRVTECGWCEGRCTRANQCPPSVWTQEYCTPVVTKVFPTSGPIRGSTTVTMCGRNFGFDKTESFKASLVTVEVAGVPCKLSRQDYASRWTEIQCSPMFSGNFTPSGHTVKVTSGHKIATIEGFTFVDPVVSEIFPTFGPKSGNTMLTIRGAFLDTGNKREVTVGKAACKIQSLSATMLTCKTPPHAVPSKQPVRLTVDSVARDAPVLYTYHQDPIISSIQPSRSFVSGGCTVAAHGLFLQSGLQPQMVLTTGQDAEVFHVSCVYGENRTSIQCTTPSLAKLALQPPVVTKVAFVLDGYMTEQWDLIYVEDPLFQDPKLTSKDNKSIVELKGDRMDREAMKCQVLTVSNHSCESLTLVGNTLECTVPTELQTTTSKELQVEWRQADSIRHLGKVTLAQEQDYTGLIVGCMCVSLLLLLLGTLLLWKKNKHIDDLSEVWYDGRGHIQHLDRLANARSVSPTNEMVSHESVDYRTNLLEDQGSDRPETCRAGPPIYGGNGELLSPRLVALGSGLGLGMEGELVSPLLMAPVHIDPSCLHPDLLTEVQHVVIAREQLLLHLNQVIGRGHFGCVFHGTLLEPDGQKQHCAVKSLNRITDLEEVSQFLKEGIIMKDFSHPNVLSLLGICLPPEGSPLMVLPYMKHGDLRNFIRDESHNPTVKDLMGFGLQVARGMEYLASKKFVHRDLAARNCMLDESYTVKVADFGLARDVYDKEYYSVHNKSGVKLPVKWMALESLQTHKFTSKSDVWSFGVLLWELMTRGAPPYSDVNSFDITVFLLQGRRLLQPEFCPDALYTVMIECWHPNPERRPSFSELVEPISSIFSSFSGEHYILLNTTYVNIEKLNPYPSLFASTHLTPSSSSLSSDPTTSTSLPAQSPLFCRVERACCT

SEQ ID NO: 13517 - protein, 1369 aa, Caenorhabditis vulgaris
  unsure (1)..(1369): unsure at all Xaa locations
MRFLFLFLFLILEINTKDATSSSTPGMTNMRRRQRKIVVREYNLTDPDVMQYLPTVLILLIIVFYEKCHAQLWRRCEFENECVCSGTNNLLSRYGSGNILEDLEHMYRGCRRVYGNLEITWIEANEIQKWRNSTNQTVDADIDYLKTVNFFDHLEEIRGSLIIYRANIQKISFPKLRVIYGDEVFHDNSLYIHQNEKVNELVMKELRVIRNGSVSIQNNPRMCFLATKVDWNEILYDXSRQKVEXXNSHKACWXNGELIASXHENCKDKCWGKGDNDCQKIYRSVCPKPCSQCFYSNITQSYECCDSSCLGGCTNHGPDSCIACSKYEMDEMCIDTCPARKIFNHKTGRLVPNPDGRYQNGNHCVKECPPELLIXNDVCVRHCSEGHHYDATKDMRECEKCPSSGCPKICTVDGPLTNETLKTLEGCEQIDGHLIIEKKFKYEELKVLETVKIVSEXITIVEQDFFXLKFLKNLQIIEGRKHHHMKWALAIYLCDNLAELXLNSLKLIRTGSVLIKKNHRLCYVGTVDWESIIQSKGDQGKPNLKVEENRDRKLCIQEEEICDPNCNSRGCWGKRPEDCRECRTWNNMGTCVSKCDTIGFLRNQTSMKCQKCSPECETCNGLGEFDCLSCRHYTLYNSDFGNRMECVSDCPTSTHYSTTKNVCERCHPTCYENGCTGSDSNLGHGGCNKCKYAVKYLNGTVQCLKATGTNSVCMENNLEHFHIHPMDIDGVTDSHCEECHPFCTTCSTYGRNKNGNGCVCKQFEYHPNDVEEICVDQCPINTFLIPDANESGYGICXKCHEECDQNLPCVNEFATGCKKCKSYNVFNNDVVECVSECPENLPFTNEANGECLSYDIAGRQKKTRMIIIGTVLIGFAIMFLFIMLIYWRCQKIGKKLKIAEMVDMPELTPIDASVRPNMSRICLIPSSELQIKLDKKLGSGAFGTVFAGIYYPKRAKNVKIPVAIKIFQTDQSQTDEMIEEATNMFRLKHENLLKIIGFCMHDDGLKIVTIYRPLGNLQSFLKLHKENLGAREQMLYCYQIASGMRYLYHQRVVHRDLATRNVLVKKFNHVEITDFGLSKILKHDADSITIKSGKVAIKWLAXEIFSKHCYTHASDVWAFGVTCWEIITFGQSPYQGMSTDSIHNFLKDGNRLAQPPNSTPDLYQELLRCWMADPKSRPDFDTLYQRFKEFCKVPQLFLENSNNISETDLTAEEKFQTEQLREIFGGNIDPQTYFDQASMPSSPTSMATFTMPNGDLISRMQSVNSSRYXTEPFDYGSTPEDNSYLIPKTKEVQQSSVLYTAVTMEDGQTELSPSNGDYYNQPNDSNSPSTSNAYYNQPNIDNNKNEATEKNEDTVEYQNETIAQKETCL

SEQ ID NO: 13518 - protein, 1368 aa, Caenorhabditis vulgaris
  unsure (1)..(1368): unsure at all Xaa locations
MRFLFLFLFLILEINTKDATSSSTPGMTNMRRRQRKIVVREYNLTDPDVMQYLPTVLILLIIVFYEKCHAQLWRRCEFENECVCSGTNNLLSRYGSGNILEDLEMYRGCRRVYGNLEITWIEANEIQKWRNSTNQTVDADIDYLKTVNFFDHLEEIRGSLIIYRANIQKISFPKLRVIYGDEVFHDNSLYIHQNEKVNELVMKELRVIRNGSVSIQNNPRMCFLATKVDWNEILYDXSRQKVEXXNSHKACWXNGELIASXHENCKDKCWGKGDNDCQKIYRSVCPKPCSQCFYSNITQSYECCDSSCLGGCTNHGPDSCIACSKYEMDEMCIDTCPARKIFNHKTGRLVPNPDGRYQNGNHCVKECPPELLIXNDVCVRHCSEGHHYDATKDMRECEKCPSSGCPKICTVDGPLTNETLKTLEGCEQIDGHLIIEKKFKYEELKVLETVKIVSEXITIVEQDFFXLKFLKNLQIIEGRKHHHMKWALAIYLCDNLAELXLNSLKLIRTGSVLIKKNHRLCYVGTVDWESIIQSKGDQGKPNLKVEENRDRKLCIQEEEICDPNCNSRGCWGKRPEDCRECRTWNNMGTCVSKCDTIGFLRNQTSMKCQKCSPECETCNGLGEFDCLSCRHYTLYNSDFGNRMECVSDCPTSTHYSTTKNVCERCHPTCYENGCTGSDSNLGHGGCNKCKYAVKYLNGTVQCLKATGTNSVCMENNLEHFHIHPMDIDGVTDSHCEECHPFCTTCSTYGRNKNGNGCVCKQFEYHPNDVEEICVDQCPINTFLIPDANESGYGICXKCHEECDQNLPCVNEFATGCKKCKSYNVFNNDVVECVSECPENLPFTNEANGECLSYDIAGRQKKTRMIIIGTVLIGFAIMFLFIMLIYWRCQKIGKKLKIAEMVDMPELTPIDASVRPNMSRICLIPSSELQIKLDKKLGSGAFGTVFAGIYYPKRAKNVKIPVAIKIFQTDQSQTDEMIEEATNMFRLKHENLLKIIGFCMHDDGLKIVTIYRPLGNLQSFLKLHKENLGAREQMLYCYQIASGMRYLYHQRVVHRDLATRNVLVKKFNHVEITDFGLSKILKHDADSITIKSGKVAIKWLAXEIFSKHCYTHASDVWAFGVTCWEIITFGQSPYQGMSTDSIHNFLKDGNRLAQPPNSTPDLYQELLRCWMADPKSRPDFDTLYQRFKEFCKVPQLFLENSNNISETDLTAEEKFQTEQLREIFGGNIDPQTYFDQASMPSSPTSMATFTMPNGDLISRMQSVNSSRYXTEPFDYGSTPEDNSYLIPKTKEVQQSSVLYTAVTMEDGQTELSPSNGDYYNQPNDSNSPSTSNAYYNQPNIDNNKNEATEKNEDTVEYQNETIAQKETCL

SEQ ID NO: 13519 - protein, 495 aa, Ephydatia fluviatilis
MGSCLSSPDSSDKKSKGGVELTNKGKERQPEPKPRAPQAPPVQEVKYPIYVGKYDYDSRTDDDLSFKKGDLMYIISTDEGDWWFARSKDTGKEGYIPSNYVAEYKSLDAEEWFLGKIKRVEAEKILNQSFNQIGSFLIRDSETTPGDFSLSVKDQDRVRHYRIRRLEDGSLFVTRRSTFQGLHELVEHYKTNTDGLCCNLLYPCLQAEKPQTAGLSRQANEEWEIEKKQIKLLKKLGAGQFGEVWEGVWNGTTSVAVKTLKPGTMSVEEFLQEASIMKKLRHPKLIQLYAVCTKEEPIYIVTELMKYGSLLEYLRGDGRTLKIDRLVDIAAQVASGMSYLEQQNYIHRDLAARNILVGEHGICKVADFGLARVIDEEIYEAHTGAKFPIKWTAPEAAMYNRFTIKSDVWSFGVVLYEIITYGRFPYPGMTNPEVLEKIQQGYRMPCPANCPKQYHDVMLDCWREDPASRPTFETLQWQLEEFFNSEGYRDPDALH

SEQ ID NO: 13520 - protein, 893 aa, Ephydatia fluviatilis
MLSENVWLCASIQIVLFATLQAQAPEDGSDTCRNPPFTKPPFPSNIVPLLDSYDYLGLLGTMGTWKTQDVDGDSRTWSQPGDTACRQVPGSCSYTFGPQNNWLITQHINTTVNGVALSQVVVRVNFSLNGCLTGGSCQQSFLLQTYQTQNIDPSGSLNATNYASFPGNRVTVGSNPTGTVVETQDVMVPLGAIGGMYLAAQETGTCVSISRLIVFHYMCPQQVVNFISYPMAMSNGAITQLACVSGASLVGVQLPLATCGSQGVWGAPNGGCSCNFGYTSIGQSCQSCPPGTYKSVQGSSVCLPCPSNSNSSVNGSSQCPCLPGYYRPASSGADSDCIASRPPSAPQNLNKGAASATSVVLSWSPPQDSGGTGIVLYTVYYQAIISGSLRMTWGNVTTTSVTVTNLLPATEYIMTVVAQNGEPGDEADRSVSLRVTTLNTASSNPSSISTPIIVGVLVGVLLPIAICIGICIVVPLLVWSFCYRPGKGVYLPQTSSEMVDIPQNKGTRMYVDPRTYQSTTQAVSTVATEIPPKYIKLVEEIGGGEFGTVYKGMWNERKPPVPIAVKTLKPGSSDKMRDDFLTEASIMGQFHHPNVIKLYGVITKVEPAMIIMEFMDNGSLYYYLRHNDEKLSLQQLLKMACGVAAGMQYLSEVGYVHRDLAARNILVSKDEVCKVADFGLSRETTNDEYDVKKGGKIPVRWTAPEAISYRKFTTASDVWSYGVLLWEVMSYGQQPYEDWDNQMVLDKLESGYRLQKPKDCPSTVYELMQSCWSAEHTDRPTFKELVRLLDAMLESNNKDAPIPKPRTRRGTFGLGRKTPLDYQSIEAWLEAIKMDRYVQNFHSQGLKSIQDVLLLAEEDLRGMGVAIPGHVNKIMSSVRGAHQQMQREASVRV

SEQ ID NO: 13521 - protein, 503 aa, Ephydatia fluviatilis
MGCKQSTTADTPQKANDVKIEFSQSQNSVQLPTARVATPPPLPQPPPPIVSPSKPMYVARYTYTARTAEDLSFDKGDKLIILAGLDGDWWMARSTKTNKEGYIPRNYVAPLASYEAEDWYFGDVGRAEAEKWLLAPGTQSGAFLVRASSTQKNSLSLSLRDGEGIKHYRIRTLDNGGFFIANRISFPTLQDLVAHYMMDSDGLAQRLAMPCSRANIPITSGLSYKDEWEIDRSTIVLQRKLGQGNFGEVWAGVWNGTTAVAVKTLKPDTMEVKDFVQEAQVMKKIHHPNLLQLYAVCTIGEPIYIVTELMKFGSLLEYLKHGEGKNITLHQMIDMSAQIASGMTYLEAHSYIHRDLAARNILVGEGNVCKVADFGLARVIKEDIYSPREGTKFPIKWTAPEAALYNRFTIKSDVWSFGVLISEILTRGAMPYTGMNNKQVLEAVDRGYRMPPPEGCPDPLYKIMLTCWKHEPEDRPTFESLKNLLEDYYVSASEGSYREPTSR

SEQ ID NO: 13522 - protein, 504 aa, Ephydatia fluviatilis
MGCLESKTEENSVRAQTKGGNGATQSTNMENLQSSTQWNPPPVVPQATAKSYEPKGPIYLALFDYDQRTSEDLAFRKGERLEIINNQDGDWWFARSLTTMKEGYIPSNYVAEDKSIKAEEWFFGAIKRAESEKLLRAAGEKGTFLVRESESKPGDYSLSIQDGDNVKHYRIRKLDEGGFFITRRAVFNTLKDLVQYYQNESDGLCVNLRQPCRALERPQIDLSHKTKDMWEISRDSITLIRKLGAGQFGEVYQGLWNNSTPVAVKTLKAGTMQPAAFLAEAQIMKKLRHPKLIQLYAVCTQGEPVYIITELMSKGSLLDYLQGEGRNLKLPQLIDMAAQVAAGMAYLELHNYIHRDLAARNILVGDNNICKVADFGLARLIVSDDYNATEGAKFPIKWTAPEAALFNRFSIKSDVWSFGILITELVTYGRIPYPGMSNAEVLQNLDKGYRMPCPANTPESLYQIMLDCWKRNPADRPTFEALQWRLEDFFVLDAGQYQHASDVL

SEQ ID NO: 13523 - protein, 893 aa, Ephydatia fluviatilis
  unsure (1)..(893): unsure at all Xaa locations
NFGFCLQSGRDCINKRHDDELKALESFRVYMHKRAKADAEYAVTLGKINSQTAREMAGVGANSIIVQAWNGALEAMDSIQKKLLNCSQQVETLLHNIDLLIKDKRGAKRAYDIGRSQLDDEYRKSCNEVQNLRREYVQTLQATTAAKKKLEQTVSKQPVKPAEVDKLRGKFVSSAAKLHKCHNDYTLAILNANTHLEHYHKSTVPFCLNTLQERMELIVSQWRKGMEEYARTTDMTQVYQESFGKLFTNLQNLNPQDEYTKLIQENKSDSDEDVFTFDTSLLQDYSSPKVEATKMSVNNLTYESLKAELSKMEQRLEEYAKQHAEKEEKLKALNXAAPDAQQNSEVPKAVLISNLQAELKLLDCTLEREKVKAEKVKEDLQGIGESPPLFDPLGEGVVXTDPTSPTTPTHPGDHASPSATLDTESVENGGKKAAEKGGNSKAAKISNTLKKSFAKGFSMFRHRMQSNTSQSIDSTEGEAGEPGEPGETATDAASSADPSAIVEDNESETGSTTDVPPETRVEEERWFYPNMERKEAEEKCKNTGDYLIRYSSKQNRYVLTVCWAGQGKHFVIQEAPDEQTKTKYRFESRSFPSVRELLDFHVNSQTPVTKASGAILSRPILREDDKWALKHEDIKMGRKLGKGAFGDVWEAALKGQGKVAVKTCRSTDVPDREKFLQEAEILKQYDHPNIVKLIGVSWDTEPVLIVMELMPGGSLLDYLRKKAAQMTKGKLLHMSIDACGGMEYLESKNCIHRDLAARNCLVGENDIVKISDFGMSREEEGGMYTVQSGTRQIPIKWTAPEALNYGRYTSASDVWSFGVLLYEVFSGGSTPYPGMSNAETRTQVDSGYRMPPPQGCPAEIHQIMQLCWAYDAEDRPKFGAVLESLKKLDGTVQ

SEQ ID NO: 13524 - protein, 485 aa, Ephydatia fluviatilis
MAQVWAVGTECIGKYNFPGSSPHDLPFKKGDRLVIVAPSKDPNWYKARREDGLEGMIPFNYVQEKVPVAGSAPQPPQRPVLSAPQPVADNDAAMNHASKGAVQLKTMPWFHGRISREDAEKLLTPPKNGRFLVRESQNYPGDYTLCVSYDGRVENYRVRRNEKGLVTVDDDEYFDNLIKLVEHYQKEADGLCTRLKAPVDKEGQHLFVVDVNDFKEKGWAIPKASLLKKSLIGKGEFGEVWLGDYEGKKVAMKSMKDHLKDEKAKTQFLAEASVMTTLRHPNLVCLIGISLDDNPIYLITEFMAKGSLIDYLRSRGRAVITKQNQIDFARDVVKGMVYLESQNFVHRDLAARNVLIAEDNVAKVSDFGLAKSSSNVKQEGAKLPVKWTAPEALRENKFSNKTDVWSFGVLLWEIYSYGRVPYPRVPVEDVANHVENGYRMESPDGCPDQIYKIMMDCWEKDPSQRPNFTRIEKALESVAVAMSSS

SEQ ID NO: 13525 - protein, 470 aa, Ephydatia fluviatilis
MGSCCSSPERKDTNTVKTELEKDKGVQEVEHPIYVGKYDYDSRTDDDLGFKKGDLMYIISTEDVDWWFARLKDTRKEGYIPSSYVAEYKSLDAEAWFLGQIKRIEAERLLNQPVNKVESFLIRDSESNPGDFSLSVKDQDRVRHYRVHRLEDGSLFVTNGVMFQSLHDLVEHYKTQKDGLCCNLLCPCLQTEKPQTAGLSRQANKEWEIDKTQIQLKTKLGAGMLGEVWEGVWNGTTSVAVKTIRPGKVSVEVFLQEARIVKKLRHPRLIQLYAVCTKEEPIYMVMELMKYGSLVEYLKGEGRTLKIERLVDIAAQVASGMSYLEQQNYIHCDLAARNILVGEHGMCKVADIGLTKVIDKDNMEAQGAKFPIKWTAPEAAIYNRFSTKSDVWSFGVVLYEIITYGRPVYPGITDHEVLEKIQQGYRMPCPPNCPKEYYDIMLDCWHEDPASRPTFETLQWQLEEFFNSEG

SEQ ID NO: 13526 - protein, 523 aa, Rous sarcoma virus (strain PA101T)
MGSSKSKPKDPSQRRRSLEPPDSTHHGGFPASQTPNKTAAPDTHRTPSRSFGTVATELKLFGDFNTSDTVTSPQRAGALAGSVTTFGTRESRIETDLSFKKRERLQIVNNTEGTWWLAHSLTTGQTGYIPSNYVAPSDSIQAEEWYFGKITRRESGRLLLNPENPRGTFLVRESETTKGAYCLSVSDFDNAKGLNVKHYKIRKLDSGGFYITSRTQFSSLQQLVAYYSKHADGLCHRLTNVCPTSKPQTQGLAKDAWEIPRESLRLEVKLGQGYFGEVWMGTWNGTTRVAIKTLKPGTMSPEAFLQEAQVMKKLRHEKLVQLYAMVSEEPIYIVIEYMSKGSLLDFLKGEMGKYLRLPQLVEMAAQIASGMAYVERMNYVHRDLRAANILVGENLVCKVADFGLARLIEDNEYTARPGARFPVKWTAPEAALYGRFTIKSDVWSFGILLTELTTKGRVPYPGMVNGEVLDRVERGYRMPCPPECPESLHDLMCQCWRKDPEERPTFEYLQAQLLPACVLKIAE

SEQ ID NO: 13527 - protein, 628 aa, Raja eglanteria
MEEVFIKRSQQKKKTSPLNYKERLFILSLTRVAYYEYDTERMKRGCKKGSIDLERIKCVEEVKPEESGPIDRQFPFQIVHDEGPLYVFAKTEDVRRQWITELGNRIRFNTELLQKYHPCFWMEGEWSCCQQSAKTAPGCCLVHTHNSFPGAGTSRRKSRKPLPPTPQEQAVKPVSVSASRKVVVALYDYDIMNPDDLPLRKDQEYVVLEQGAHNWWRARDAQGREGFIPSNYVVETRDQLEHCQWYNKDITRSKAEQLLKQEGKEGAFLLRNSSQPGKYTMSVLSKAAGEQSGKVKHYTVCVTPSDQYYLAEKHAFTTIPELIKYHQHNAAGLVTRLRHPVSCHSTKAPLTAGFGYGAWEINPVDLTFLRELGDGQFGVVKHGKWRGQYEVAIKMIKEGSMSEDDFIEEAETMMRLTHPKLVQLYGVCTKQRPIYIVTEFMAQGNLLDHLRGQGRRLSGLQLLEMSRDVCEAMAYLESHQFLHRDLAARNCLVDDAATVKVSDFGLSRYVLDDEYTSSQGSKFPVRWSPPEVLNFCRFSSKSDVWAFGVLMWEIFSLGKTPYERFSNADVVDHIVQGRRLYRPQHATDHVYTVMCSFWEEKADNRPPFSSLLSNIQELVEDDSQTSGD

SEQ ID NO: 13528 - protein, 1233 aa, Plasmodium falciparum 3D7
MGKRIKCNNVSYIRTVRGVYIGRIENGQKNGWGLQINNNGNKYEGLFKNDEKYLFGLELICCLCGHTYRNKVQNGIYEKGKIHYKDVNNISAYNNDDQHDNIHHEKVYHENIHHEKVYHENIHHEKVYHDNINHEKVYHGNIYDHNIYHNNKFNFQYSSENEFAKGNICVHENRYIYIGTYKKGKKHGKGILINYNNYFMYSCIFYKNKIIYVDMLFSKVQKYMNMKNIDMKHYNTHKKKKIYLFLQKEYKNKILGFINFYKHITHKIKKKQENVHDKITFLKCLKELFFVTHTNKENNQMEGIIHTYKNYTINKNDNTYNIFKEKLHNITQGGNKTQHEKRYMKTIYRHAGHENVILNNKRKEKNKSTNMSSDEKKTNKHTNISSDEKKKNKHTNISSDEKKKKKRTNITNDEKTNKHTNIINDEKTNKRTNISNDEKTNKHTTISCDEKKNGYLFLSNEIKTKYCMIENMKKKKESYTMINNNKKKEHLYNLKSMIYQEVQFFHNNSICDHENKKKNRNIEMPFFLKRTKKNNDIEQLVLVKNKYNKCYNLESGKDDIIYNNQKDKIKKDKLKVPFFFKEKGIYNFFNKTVENKEDERFFVHEQNDEKIFTDKVTNDVRTNDIRTNDIRTNDVRTYDVRTNDVRTNDIRTNDIRTNDIRTNDIRTNDIRTNDIPYNIIPNKRETIVDDINSCSNNFTTRSNTDNANSYHMNMYSDSNNFYGNKKKKIKKRNNNKCEYSSIIKNKNQLYNDQIHNNTCVCIKFKTKCCSFKINKLEKKKKESYKCNSHKELKQHDKNLLFNNYIFNDNFLDNVFVLKPPMDEEEKKKNYDKLKRDTFPLFLRKKKKKLFQAQNYIYWNIFELNLFFFLVGIPKEILEIFIYHRLDGYCLKYIDKKILKEMKIKNRMMRKYIYLCIQYLLRLREKYKYKKKSNSKLTEKINEDFILKKEQLHILNLIGRGGYSNVYRCIYGNKNILRINKFFDIHYSINNTALKIFLNKKKNILEYFTELYIVSNLRHPNVTLFLGAINNPRAIVLEYIQYGTLFDILHKYKINMKLQDIIKISKDITAFMSFLHNKGIMHCDLKSSNILISITRDIKICDFGLSVFNKYNKPKYLGIVGTYQWTAPEVLRSEGYTKEADIYSFGVILWEMIHRKIPFSDMKNPLDIIAHVGYANKKLSVTNKNIPDQLKYILHSCLHKNTHKRKSFLFWSEYFDFLYNVTDIPKEDHTSFFF

SEQ ID NO: 13529 - protein, 375 aa, IC4 retrovirus
MEAVIKDAIRNHSESASPSALSGSPNNMSPTGWSQPKTPVPAQRERAPGTNTQEKNKIRPRGQRDSSYYWEIEASEVMLSTRIGSGSFGTVYKGKWHGDVAVKILKVVDPTPEQFQAFRNEVAVLRKTRHVNILLFMGYMTKDNLAIVTQWCEGSSLYKHLHVQETKFQMFQLIDIARQTAQGMDYLHAKNIIHRDMKSNNIFLHEGLTVKIGDFGLATVKSRWSGSQQVEQPTGSILWMAPEVIRMQDSNPFSFQSDVYSYGIVLYELMTGELPYSHINNRDQIIFMVGRGYASPDLSKLYKNCPKAMKRLVADCLKKVREERPLFPQILSSIELLQHSLPKINRSASEPSLHRASHTEDINSCTLTSTRLPVF

SEQ ID NO: 13530 - protein, 765 aa, Arabidopsis thaliana
MENPNPPAEKLLKKIRELEESQEDLKREMSKLKVSAEIKRRSHSSSPKRPSRRNSGEGTPLWRKTGAASFRHASPLRKESHSKDGVAGGGDGPSAGKFTDKQYLNILQSMAQAVHVFDLNGQIIFWNSMAEKLYGFSAAEALGKDSINILVDGQDAAVAKNIFQRCSSGESWTGEFPVKNKMGERFSVVTTISPFYDDDGLLIGIICITNDSALFQRPRVPPAKNRWQEGDSSFCRGTNGVASRLGFDSKEAVVSKLGLDSQQPIQAAIASKISDLASKVGNKVRSKMRAGDNNASHPEGGNGGSHQSDQGFFDAAFSDQREDAETNDASTPRGNLIQSPFGVFLCNDDKSSSKASGESNDENDRNSVVPKKLTSKTEEWMVKKGLSWPWKGNEREGLERRNAHSVWPWVHNEQQKEEAHHSNSYNSVKSESLASESNKPANNENMGSVNVNSASSASSCGSTSSSVMNKVDMDSDCLDYEILWEDLTIGEQIGQGSCGTVYHGLWFGSDVAVKVFSKQEYSEEIITSFKQEVSLMKRLRHPNVLLFMGAVASPQRLCIVTEFLPRGSLFRLLQRNKSKLDLRRRIHMASDIARGMNYLHHCSPPIIHRDLKSSNLLVDRNWTVKVADFGLSRIKHETYLTTNGRGTPQWMAPEVLRNEAADEKSDVYSFGVVLWELVTEKIPWENLNAMQVIGAVGFMNQRLEVPKDVDPQWIALMESCWHSEPQCRPSFQELMDKLRELQRKYTIQFQAARAASIDNSSLKEK

SEQ ID NO: 13531 - protein, 765 aa, Arabidopsis thaliana
MENPNPPAEKLLKKIRELEESQEDLKREMSKLKVSAEIKRRSHSSSPKRPSRRNSGEGTPLWRKTGAASFRHASPLRKESHSKDGVAGGGDGPSAGKFTDKQYLNILQSMAQAVHVFDLNGQIIFWNSMAEKLYGFSAAEALGKDSINILVDGQDAAVAKNIFQRCSSGESWTGEFPVKNKMGESFSVVTTISPFYDDDGLLIGIICITNDSALFQRPRVPPAKNRWQEGDSSFCRGTNGVASRLGFDSKEAVVSKLGLDSQQPIQAAIASKISDLASKVGNKVRSKMRAGDNNASHPEGGNGGSHQSDQGFFDAAFSDQREDAETNDASTPRGNLIQSPFGVFLCNDDKSSSKASGESNDENDRNSVVPKKLTSKTEEWMVKKGLSWPWKGNEREGLERRNAHSVWPWVHNEQQKEEAHHSNSYNSVKSESLASESNKPANNENMGSVNVNSASSASSCGSTSSSVMNKVDMDSDCLDYEILWEDLTNGEQIGQGSCGTVYHGLWFGSDVAVKVFSKQEYSEEIITSFKQEVSLMKRLRHPNVLLFMGAVASPQRLCIVTEFLPRGSLFRLLQRNKSKLDLRRRIHMASDIARGMNYLHHCSPPIIHRDLKSSNLLVDRNWTVKVADFGLSRIKHETYLTTNGRGTPQWMAPEVLRNEAADEKSDVYSFGVVLWELVTEKIPWENLNAMQVIGAVGFMNQRLEVPKDVDPQWIALMESCWHSEPQCRPSFQELMDKLRELQRKYTIQFQAARAASIDNSSLKEK

SEQ ID NO: 13532 - protein, 773 aa, Arabidopsis thaliana
MENPPAEELLKKILELEESQEHLKQEMSRLKVSTELRQRSHSVSPHRPARRNIGEGAPSWRKSGAASFRNASPLRKESRIQNSMRLRSEVGGGGPSAGKFTDKQYLNILQSMAQAVHAFDLNMRIIFWNAMAEKVYGYSAAEALGENPINVIADDRDAAFAMNIARRCVRGESWTGEFPVKSKSGDRFSAVTTCSPFYDDDGALMGIICITSNTAPYLNPRISLAKLKAQEEGETSSIPARNSFASKLGLDSRGAVISKLGLDSDQPIQVAIASKISDLASKVSNKVRSKMRAGDNSATLSEGGSGDSHQKDHNVFGATLVDHRDDAASSGASTPRGDFIQSPFGVFTCNDEKFVSKPFKDSSDESDGKPAIHKVLTSKAEEWMVKKGLSWPWKGNEQEGSKGRPTNSVWPWVQNEQKKERCHQINPSAGVQYESHAFESNKPINNEASSLWSSPINANSTSSASSCGSTSSSVMNKVDTDSEGLEYEILWDDLTIGEQVGQGSCGTVYHGLWFGSDVAVKVFSKQEYSAEVIESFKQEVLLMKRLRHPNVLLFMGAVTSPQRLCIVSEFLPRGSLFRLLQKSTSKLDWRRRIHMALDIARGMNYLHHCSPPIIHRDLKSSNLLVDKNWTVKVADFGLSRIKHETYLTSKSGKGTPQWMAPEVLRNESADEKSDIYSFGVVLWELATEKIPWETLNSMQVIGAVGFMDQRLEIPKDIDPRWISLMESCWHSDTKLRPTFQELMDKLRDLQRKYMIQFQATRAALSDNSLLKDN

SEQ ID NO: 13533 - protein, 738 aa, Arabidopsis thaliana
MENPNPPAEKLLKKIRELEESQEDLKREMSKLKVSAEIKRRSHSSSPKRPSRRNSGEGTPLWRKTGAASFRHASPLRKESHSKDGVAGGGDGPSAGKFTDKQYLNILQSMAQAVHVFDLNGQIIFWNSMAEKLYGFSAAEALGKDSINILVDGQDAAVAKNIFQRCSSGESWTGEFPVKNKMGERFSVVTTISPFYDDDGLLIGIICITNDSALFQRPRVPPAKNRWQEGDSSFCRGTNGVASRLGFDSKEAVVSKLGLDSQQPIQAAIASKISDLASKVGNKVRSKMRAGDNNASHPEGGNGGSHQSDQGFFDAAFSDQREDAETNDASTPRGNLIQSPFGVFLCNDDKSSSKASGESNDENDRNSVVPKKLTSKTEEWMVKKGLSWPWKGNEREGLERRNAHSVWPWVHNEQQKEEAHHSNSYNSVKSESLASESNKPANNENMGSVNVNSASSASSCGSTSSSVMNKVDMDSDCLDYEILWEDLTIGEQIGQGSCGTVYHGLWFGSDVAVKVFSKQEYSEEIITSFKQEVSLMKRLRHPNVLLFMGAVASPQRLCIVTEFLPRGSLFRLLQRNKSKLDLRRRIHMASDIARGMNYLHHCSPPIIHRDLKSSNLLVDRNWTVKVADFGLSRIKHETYLTTNGRGTPQWMAPEVLRNEAADEKSDVYSFGVVLWELVTEKIPWENLNAMQVIGAVGFMNQRLEVPKDVDPQWIALMESCWHRYINHIKHYIYLARGK

SEQ ID NO: 13534 - protein, 671 aa, Arabidopsis thaliana
MEEELLKKMLELEQSQELLKQEMSRLKLSTELRQPSHPVLPRRPLRRIQGSMNSNPSPGKFTDKQYLNILQSLAQSVHVLDLNTRIIFWNAMSEKLYGYSAAEVVGRNPVHVIVDDQNAAFALNVARRCANGESWTGEFPVKTKSGKIFSAVTTCSPFYDDNGTVVGIISITSDIAPYLNPRLSLPRLKPQEPERKLGLDSKGAVISKPGLDSDQPIQVSIASKISSLASKLSNKVRSKMRAGDNSACGDSHHSDHDVFGDTLSDHRDDAASSGASTPRGDFIQSPFGVFTCYDDKFPSKPSKDSSDRKPAIHKVPTSKAEEWMVKKGLSRPWKGNEQEGSRVRPTHSVWSWVENEQEKDKYHQIYPSAGVKSESHGSESNKPTDDEASNMWSSSINANSTNSASSCGSTSRSVMDKVDIDSDPLEHEILWDDLTIGEQIGRGSCGTVYHGIWFGSDVAVKVFSKQEYSESVIKSFEKEVSLMKRLRHPNVLLFMGAVTSPQRLCIVSEFVPRGSLFRLLQRSMSKLDWRRRINMALDIARGMNYLHCCSPPIIHRDLKSSNLLVDRNWTVKVADFGLSRIKHQTYLTSKSGKGTPQWMAPEVLRNESADEKSDIYSFGVVLWELATEKIPWENLNSMQVIGAVGFMNQRLEIPKDTDPDWISLIESCWHR

SEQ ID NO: 13535 - protein, 763 aa, Arabidopsis thaliana
MVKLLQDPITPNKELLKKMIELEKSQEHLMQEMSRLKVSTELRKESRIQCSMNLRPSPWKFTHKQYLNILQSMAQSVHAFDLNMRIIFWNAMAEKVYGYSAAEAVGQNPIDVMVDDRDAPFAMTIAQLCSNGESWTGKFPVKRRTGEKFSAVTTCSPFYADDGSLIGIVSITSDVAPYLNPTISLAKLKASEVETSSTPARNSFAFKLGLDTKGAVVSKLGLDSDQPIQVAIASKISDLASKVRNKVRSKMPAGDSSVTVFEGETGDSHHSDHGVFGATLSDHMDDAASSGASTPRGDFIQSPFGVFTCNDDKFSSEPFIDSSDGYPITLFTSKAEEWMVKKGLSWPWKGNEQEGSRVKPTYSVWPCVQNEQKKDKSHQINRYSGVKSKSHASESNKPTNNKASGLRSSCINANSAISRGIISHSTMNKVDTNSNCLEYEILWDDLTIGEQIGQGSCGTVYHGLWFGSDVAVKLISKQEYSEEVIQSFRQEVSLMQRLRHPNVLLFMGAVTLPQGLCIVSEFLPRGSLFRLLQRNMSKLDWRRRINMALDIARGMNYLHRCSPPIIHRDLKSSNLLVDKNLTVKVADFGLSRIKHHTYLTSKSGKGMPQWMAPEVLRNESADEKSDIYSFGVVLWELATEKIPWENLNSMQVIGAVGFMNQRLEIPKDIDPDWISLIESCWHRDAKLRPTFQELMERLRDLQRKYTIQFQATRAALSDKNKEREKERVGLFEQQQLVETCCAGVPMSSTIEQGYGIENIMKVG

SEQ ID NO: 13536 - protein, 777 aa, Arabidopsis thaliana
MVKLLQDPITPNKELLKKMIELEKSQEHLMQEMSRLKVSTELRKESRIQCSMNLRPSPWKFTHKQYLNILQSMAQSVHAFDLNMRIIFWNAMAEKVYGYSAAEAVGQNPIDVMVDDRDAPFAMTIAQLCSNGESWTGKFPVKRRTGEKFSAVTTCSPFYADDGSLIGIVSITSDVAPYLNPTISLAKLKASEVETSSTPARNSFAFKLGLDTKGAVVSKLGLDSDQPIQVAIASKISDLASKVRNKVRSKMPAGDSSVTVFEGETGDSHHSDHGVFGATLSDHMDDAASSGASTPRGDFIQSPFGVFTCNDDKFSSEPFIDSSDGYPITLFTSKAEEWMVKKGLSWPWKGNEQEGSRVKPTYSVWPCVQNEQKKDKSHQINRYSGVKSKSHASESNKPTNNKASGLRSSCINANSAISRGIISHSTMNKVDTNSNCLEYEILWDDLTIGEQIGQGSCGTVYHGLWFGSDVAVKLISKQEYSEEVIQSFRQEVSLMQRLRHPNVLLFMGAVTLPQGLCIVSEFLPRGSLFRLLQRNMSKLDWRRRINMALDIARGMNYLHRCSPPIIHRDLKSSNLLVDKNLTVKVADFGLSRIKHHTYLTSKSGKGMPQWMAPEVLRNESADEKSDIYSFGVVLWELATEKIPWENLNSMQVIGAVGFMNQRLEIPKDIDPDWISLIESCWHRDAKLRPTFQELMERLRDLQRKYTIQFQATRAALSDKNKEREKERVGLFEQQQLVETCCAGVPMSSTIEQGYGIENIMKICIMLCTDQCVSGHGG

SEQ ID NO: 13537 - protein, 483 aa, Arabidopsis thaliana
MRAGDNNAANLEGGSGDSHQSDQGFFDAAFADRREDAATSGADTPRGDFIQSPFGVFLRSDEKASTKPFRDSSDESDGNSVVPKTLTSKAEEWMVKKGLSWPWKGNEREGLEGRRSHSVWPWVRNEQQKQQAYQSNSNHSVKSESQACESIKASSNEPMGYWSSSVNVNSTSSSSSCGSTSSSVMNKVDMDSDCLDYEILWEDLTIGEQIGQGSCGTVYHGLWFGSDVAVKVFSKQEYSEEIITSFRQEVSLMKRLRHPNVLLFMGAVTSPQRLCIVTEFLPRGSLFRLLQRNTSKLDWRRRIHMASDIARGMNYLHHCTPPIIHRDLKSSNLLVDKNWTVKVADFGLSRIKHETYLTTKTGRGTPQWMAPEVLRNEAADEKSDVYSFGVILWELVTEKIPWESLNAMQVIGAVGFMNQRLEVPKNVDPQWISLMESCWHSEPQDRPSFQEIMEKLRELQRKYTIQFQAARAASIENSALKEK

SEQ ID NO: 13538 - protein, 735 aa, Arabidopsis thaliana
MAGNNSESSLYQVLVEWCQRMETSQARLREDVDDLLLQEESRTGKESATGLETDTEKEAEVEVEAEAADSWDNPTATWERAVSGFYFADSAYRTLMDSMGHAIHVTSAASGEITFWSRSAENLYHWYAEEVVGYRTIDVLVTEEYRNSLTGIRNRVCRGETWTGQFPFQKKTGELFMALVTKSPVYENGELVGVVTVSSDATLFNRMHPLSNEHQQQARSNNRHESNLRKHQWHLPRPQIAAASQVPVVPQYSSAVASNLASKLLPQRNGDDSFNGNHNSRSRDENVPVVASTTFEKYGSLADKFLGKLQRKITGSQGTEDNEPILRNGINKSACGSGGSSKASNAVTCTAFRDNGNGKPKRAEVRISDVYGNGAEGLIHNGDRFQYIGNLGQSKPPRGLESGLVSGMRGTKMSDLNGEIEDAWNTRLSVDPLPILGVNSGRQQSPVNQRNNRLVTDSSCEIRWEDLQLGEEVGRGSFAAVHRGVWNGSDVAIKVYFDGDYNAMTLTECKKEINIMKKLRHPNVLLFMGAVCTEEKSAIIMEYMPRGSLFKILHNTNQPLDKKRRLRMALDVARGMNYLHRRNPPIVHRDLKSSNLLVDKNWNVKVGDFGLSKWKNATFLSTKSGKGTPQWMAPEVLRSEPSNEKCDVFSFGVILWELMTTLVPWDRLNSIQVVGVVGFMDRRLDLPEGLNPRIASIIQDCWQTDPAKRPSFEELISQMMSLFRKPGSGAQEEDD

SEQ ID NO: 13539 - protein, 736 aa, Arabidopsis thaliana
MAGNNSESSLYQVLVEWCQRMETSQARLREDVDDLLLQEESRTGKESATGLETDTEKEAEVEVEAEAADSWDNPTATWERAVSGFYFADSAYRTLMDSMGHAIHVTSAASGEITFWSRSAENLYHWYAEEVVGYRTIDVLVTEEYRNSLTGIRNRVCRGETWTGQFPFQKKTGELFMALVTKSPVYENGELVGVVTVSSDATLFNRMHPLSNEHQQQARSNNRHESNLRKHQWHLPRPQIAAASQVPVVPQYSSAVASNLKASKLLPQRNGDDSFNGNHNSRSRDENVPVVASTTFEKYGSLADKFLGKLQRKITGSQGTEDNEPILRNGINKSACGSGGSSKASNAVTCTAFRDNGNGKPKRAEVRISDVYGNGAEGLIHNGDRFQYIGNLGQSKPPRGLESGLVSGMRGTKMSDLNGEIEDAWNTRLSVDPLPILGVNSGRQQSPVNQRNNRLVTDSSCEIRWEDLQLGEEVGRGSFAAVHRGVWNGSDVAIKVYFDGDYNAMTLTECKKEINIMKKLRHPNVLLFMGAVCTEEKSAIIMEYMPRGSLFKILHNTNQPLDKKRRLRMALDVARGMNYLHRRNPPIVHRDLKSSNLLVDKNWNVKVGDFGLSKWKNATFLSTKSGKGTPQWMAPEVLRSEPSNEKCDVFSFGVILWELMTTLVPWDRLNSIQVVGVVGFMDRRLDLPEGLNPRIASIIQDCWQTDPAKRPSFEELISQMMSLFRKPGSGAQEEDD

SEQ ID NO: 13540 - protein, 411 aa, Arachis hypogaea
MLEGGAKFPGLIDLNKHTTDNYYDFSQGFYHKLGEGTNMSIDSMQTSNGGGSVAMSIDNSSVGSNDSHTRILNHQGLRRRANDNYSVQNSVNRRGRVTHALSDDALAQALMDSSSPTEGLENFDEWTIDLRKLNMGEAFAQGAFGKLYRGTYNGEDVAIKILERPENELSKAQLMEQQFQQEVMMLATLKHPNIVRFIGACRKPMVWCIVTEYAKGGSVRQSLMKRQNRSVPLKLAVKQALDVARGMAYVPWLGLIHRDLKSDNLLIFGAKSIKIADFGVAGIEVQTEGMTPETGTYRWMAPEMIQHRPYTQKVDVYSFGIVLWELIPGMLPFQNMPAVQAAFAVVTKNVRPIIPNDCLPVLRDIMPRCWDPNPDVRPPICRNCRNAETEIMTTVRKARFRCCMTQPMTAD

SEQ ID NO: 13541 - protein, 433 aa, Glycine max
  unsure (1)..(433): unsure at all Xaa locations
XLRESGDESEGKSIHKIIPKAEAWIQRKTLSWPWRTKDREGSDAMNVRVAGSWRQNDQENESVNQKILSSGLKQESQAGESNRPTNNEASGSWSSXXNVNSTSSASSCGSAGSGAANIKGDVDSDCLDYEILWEDLTMGEPIGQGSCGTVYHAQWYGSDVAVKVFSKHEYTDDTILSFKQEVSVMKRLRHPNIILFMGAVTSPQHLCIVTEFLPRGSLFRLFQRNTSKIDWRRRVHMALDVARGVNYLHHCNPPIIHRDLKSSNLLVDKNWTVKVGDFGLSRLKHETYLTTKTGRGTPQWMAPEVLRNEPSDEKSDVYSFGVILWEIATEKIPWDNLNSMQVIGAVGFMNQRLEIPKNVDPRWASIIESCWHSDPACRPTFPELLDKLKELQKQYVIQFQAARSTAKESTQKESXTTLELFFLSPVPVAVADA

SEQ ID NO: 13542 - protein, 434 aa, Glycine max
  unsure (1)..(434): unsure at all Xaa locations
XLRESGDESEGKSIHKIIPKAEAWIQRKTLSWPWRTKDREGSDAMNVRVAGSWRQNDQENESVNQKILSSGLKQESQAGESNRPTNNEASGSWSSXXNVNSTSSASSCGSAGSGAANIKGDVDSDCLDYEILWEDLTMGEPIGQGSCGTVYHAQWYGSDVAVKVFSKHEYTDDTILSFKQEVSVMKRLRHPNIILFMGAVTSPQHLCIVTEFLPRGSLFRLLHRNTSKLDWRRRVHMALDIARGVNYLHHCNPPIMHRDLKASNXLLVDKNWTDKGGDYGISRIKHETYLTAKTGRGTPQWMAPEVLHXEPLDVKXDVYRLQVTRGEIATEKIPWDNLNSMQVIGAARFTDQRLEIPKNVDPRWASIIESCWHSDPACRPTFPELLDKLKELQKQYVIQFQAARSTAKESTQKESXTTLELFFLSPVPVAVADA

SEQ ID NO: 13543 - protein, 903 aa, Oryza sativa (indica cultivar-group)
QIRKAKLISLGRGNRFAAVRDDEQTADALSRRYRDYNFLDYHEKVIDGFYDIFGPSMESSKQGKMPSLADLQTGIGDLGFEVIVINRAIDTTLQEMEQVAQCILLDFPVANIAALVQRIAELVTDHMGGPVKDANDMLTRWLEKSTELRTSLHTSLLPIGCIKIGLSRHRALLFKILADSVGIPCKLVKGSNYTGDDDDAINIIKMNEREFLVDLMAAPGTLIPSDVLSWKGNSLNSNARLTQNPLAGSSSTTDSNLSANALPPGHKGGQLPLFSSGDWILASQSGYEKDGATTSSQASSSGTTSVAAGSAFDSSWTLVSHGQSDDPSTSAGMSAQQKVILPGGEHPWNENINARNENIKLVSDLQGNSESINLFADLNPFGGREPKRTSVPLNGPDNRNNELQRRRENVVPSTRRPQQRLVMKNWSPYNDVSNNKQYNYVEDSFARRNIGDNAASSSQVARPSAKNTNLNVGVRTDTPYMAAHNYDNSMAGSSAMKMTSTAGIGKVPDKVLYGDLDKGLTNSRLGDQPPIERHKWGNSVEGRIPTGTVHNQAKEHKENFDGKQDNKKLHPDPKKSPLDRFMDTSMPSRNPESVSPSFARSHKLDTMFDDVSECEIHWEDLVIGERIGLGSYGEVYRADWNGTEVAVKKFLDQDFYGDALDEFRSEVRIMRRLRHPNIVLFMGAVTRPPNLSIVSEYLPRGSLYKILHRPNCQIDEKRRIKMALDVAKGMNCLHISVPTIVHRDLKSPNLLVDNNWNVKVCDFGLSRLKHSTFLSSKSTAGTPEWMAPEVLRNEQSNEKCDVYSFGVILWELATLRMPWSGMNPMQVVGAVGFQDKRLDIPKEIDPLVARIIWECWQKDPNLRPSFAQLTSALKTVQRLVTPSHQESQSPPVPQEIWVNSSTP

SEQ ID NO: 13544 - protein, 461 aa, Oryza sativa (japonica cultivar-group)
GRRVDGEAVHQGVAVAGAVLHILDLEGKIMYWNRSAEKLYGYPASEALGQDGLMLLIDSCDINVVNDIFRRISLGESWTGKFPVKNRAGDRFSAVATNTPFYDEDGSLVGIVCVSSDLRTMEEIISGPSICARPHPESSRTYCEASCSNSNRKASLLSRSPFDSQQPLQSTIASKITNLATKVTNKVRSRVRADENGIEREGGSGESHCSDRDAKEEPTSSGTTTPRGDAPRGAFATEESSPGKTAKMNSDESEGKVGFHRILSSKAEALLNKKGISWPWKGRDNDGPDVKNQATWPWLHGEQDGSQNHQKISDSAITQDGQGAEYNQPNKNEASGSWSSFNNNSTSSASSTGSTNSSALYKVDHEADCLDYEILWEDLVIGEQIGQGSCGTVYHALWYGSDVAVKVFSKQEYSEEVIQTFRQEVSLMKKLRHPNILLFMGAVTSPQRLCIVTEFLPPDAW

SEQ ID NO: 13545 - protein, 982 aa, Lycopersicon esculentum
MKHIFKKLHHSNRSNDAQSTSSISSSSSPASSLSSASCTTDHRNSNSVSQSPLSPSTISTASTTTTPAAPVGAGGGGGGGNLSTINRQQDYYTSEEEYQVQLALALSVSSSQSQDPFPSDVNSSNGHGVGRTAVDLARDREDAAADLLSRQYWDYGVMDYEEKVVDGFYDVYNLFTDPASRGKMPSLSELETNPGTSNFEGVIINQRIDPSLEELMQIAHCITLDCPASEISLLVLRLSELVTGHLGGPVKDANIILAKWMEISTELRTSLHTSVLPIGSLKIGLSRHRALLFKVLADHVGIPCRLVKGSHYTGVEDDAVNIVKLPNDSEFLVDLMGAPGTLIPADVLSAKDASFNSPKLNKIPSLPSNSHSGVSYPRRNLLSGQNSVLGDDFSGRSKPEKIESVHSISDAGGSSTAGSSGINKRPSSNQVDWTSPLAIGTSLYKGGRGPNAAGDGLRLNVNVVPYDQNNPEDPKNLFADLNPFQIKGSGNTLLQKNPARNKVSELQQPINTLIPGRPPAPMMWKNRYAPNEVPRKNESDSEGLFPKKNGGSSGYNISSIASTSSNIPQKSSTDTSRLHGNSRPAYRGNDEVASTRNNSSILSAELEFRRLSVQNSQNNNRETSQWEGHSLQSDDLNRTQAYGDDIIVESDHTRNLQAQSIGTNIKLKEPENPTSSGNLGPSQVDPVFDDVGDCEIPWEDLVIGERIGLGSYGEVYHADWNGTEVAVKKFLDQDFSGAALAEFKREVRIMRRLRHPNVVRFMGAITRPPHLSIITEFLPRGSLYRIIHRPHFQIDERQKIKMALDVAKGMDCLHTSNPTIVHRDLKSPNLLVDTDWNVKVCDFGLSRLKHNTFLSSKSTAGTPEWMAPEVLRNEPSNEKCDIYSFGVILWELATLRLPWSGMNPMQVVGAVGFQNKRLEIPKELDPIVARIIWECWQTDPNLRPSFAQLTVALTPLQRLVIPAYVDQLNSRLPQEISVNSTP

SEQ ID NO: 13546 - protein, 982 aa, Lycopersicon esculentum
MKHIFKKLHHSNRSNDAQSTSSISSSSSPASSLSSASCTTDHRNSNSVSQSPLSPSTISTASTTTTPAAPVGAGGGGGGGNLSTINRQQDYYTSEEEYQVQLALALSVSSSQSQDPFPSDVNSSNGHGVGRTAVDLARDREDAAADLLSRQYWDYGVMDYEEKVVDGFYDVYNLFTDPASRGKMPSLSELETNPGTSNFEGVIINQRIDPSLEELMQIAHCITLDCPASEISLLVLRLSELVTGHLGGPVKDANIILAKWMEISTELRTSLHTSVLPIGSLKIGLSRHRALLFKVLADHVGIPCRLVKGSHYTGVEDDAVNIVKLPNDSEFLVDLRGAPGTLIPADVLSAKDASFNSPKLNKIPSLPSNSHSGVSYPRRNLLSGQNSVLGDDFSGRSKPEKIESVHSISDAGGSSTAGSSGINKRPSSNQVDWTSPLAIGTSLYKGGRGPNAAGDGLRLNVNVVPYDQNNPEDPKNLFADLNPFQIKGSGNTLLQKNPARNKVSELQQPINTLIPGRPPAPMMWKNRYAPNEVPRKNESDSEGLFPKKNGGSSGYNISSIASTSSNIPQKSSTDTSRLHGNSRPAYRGNDEVASTRNNSSILSAELEFRRLSVQNSQNNNRETSQWEGHSLQSDDLNRTQAYGDDIIVESDHTRNLQAQSIGTNIKLKEPENPTSSGNLGPSQVDPVFDDVGDCEIPWEDLVIGERIGLGSYEKFTHADWNGTEVAVKKFLDQDFSGAALAEFKREVRIMRRLRHPNVVRFMGAITRPPHLSIITEFLPRGSLYRIIHRPHFQIDERQKIKMALDVAKGMDCSHTSNPTIVHRDLKSPNLLVDTDWNVKVCDFGLSRLKHNTFLSSKSTAGTPEWMAPEVLRNEPSNEKCDIYSFGVILWELATLRLPWSGMNPMQVVGAVGFQNKRLEIPKELDPIVARIIWECWQTDPNLRPSFAQLTVALTPLQRLVIPAYVDQLNSRLPQEISVNSTP

SEQ ID NO: 13547 - protein, 2165 aa, Dictyostelium discoideum
MDDEFMTLKEGILLLFEDDRQQYLEKRVSLVSEAVTGCILNKMPVVNNLNFEILVTNNHSLKFQCFSYEDKESWIKQLSVYTINKNNNSTTTQNKSRGISLPDVKVDNPSQVHHRNFNQSAPSLISVATNSVKDYSKDDQIDFSSASFQENIDDNFDNSFEGNDSSDQESTENEESEVEESQESDQQSISEESEEDEESEQEESEESEEEIPESFEEREQDHNFIKQPPQSPQLQTQQQQQQQQQQQTQPQKHLNRELNEDESFIIELFPNVEVSVILDAMDFCGGDRDEVIALLASQTRLSFQDLNGFSPLDNKRKSSIGQNLRQQQNEKERKQEQLNKEQEELKKELKKELKQLENEEKQFDNLNTNQDCYNNNNKNITTTTTNKQTTQSPKRKQSLATNIKKPTPITKNNNSSINTNSYESNSSTASLTAFSPSLIWQPQSINNNNNSNIINSINNNNNKCIQLDTQSDDGTTTGSLEDEVSFESHHISKENEKIVTIEPPSFVSLNISGRSRRSSKNNNNCTVPSPSLHSSTPSLPSHSSSSQQQQIKKSNWSYKPSAQSSPTSSNSTTAPSSLSSSQDRNVLNTSQDRSLSSSQDRGLSSSQDRFQQQQQQSSSPSTPLKSSQERPITPNSWKPSSKSGTAWDISIRIVGFFQIDDHIEYKLQVISNSNEWFVCRRYNNFLMLDKKLKSSGIIDKKDLGLTLPPKKLKVASNQVAKARQLPLQSYLVHLLSNYQGIFYNNNIVATTNSNSSINNTHLTNVSKQGGLRNRSHSFSEDLSQPHSPILKKKFPSSPSQSRNNSHNNTHHSHHNTHQQHKIPDKVSTILKSTTMETSSNSSGSSSSPPSQHQQQQQQNSQLNLSSQSCFSNNSSSAADFNNYMESKLSEENNYYKNFNSNLDRGDSFKLEKESIKDTIKDNIKEDKICNDNNNSSSSSSSSSSGNNNNNIKDGRAPSPITTQQISPNKLILNTTKAITKPTPILNTQQTPTTTATTNTSTSTTNSTPSKFKKIKNSTINPTIEFISKPSLSVMFGFSPIYFVESIFIVLLIYILSNFVLKETSVYVISIFVIYFVIYFDNRYQIINKLSKSSINDSDSSSNNNNNNNNTTTTNNDSASTKGNNNNEISSPETYQKDVKSKINFYEHVNISSTNLNNVNTTSNTPITNPSNVNQPSNITTATTATTTSTNNNNNVNNSINNNNNNNNNNNNNNNNNNNNNNNNNNNNNNNNNNNNGNNNGNNNGNNNNILSKENSTNSLLNNLILNNTSVGKTHNRSSSGSDSIQPPPLPTGGSSHNIFYSAFPTHPYTDIDQSSTYRTRTFGSSSINNRKSLPPEYYNQYLNFLAHSNNNNNNNNSNTNNNNNNQSVSAPVSQLATPVYQTPGTNSVVGNLENDNENNNDSFSDINDNNSVVGNDFEQDDQILQNNGISTTTSTIVPTNDETKQELSQLENSNKVRSTVSKFIKLSTGVEEKLDWAIAQQCTLQPPRSSHSVTVYGSSLVLIGGEGITGENLVQFIDVERNLFISPKVTGGKVGPESIYNHDYCRIGNKFYLFGGYVAGKLSNKLYVLTIMDDSTVHWSSPRISGGCIPSPRYGHTFTRYGNRFLLFGGYDGEQCLNDLYILEPETMCWSTVTNIKGGQTPSERFGHTSTILGEKLIIFGGKGINNNNNNNNNNNNNNNNNNNNNNNNNNNNNKGLVELNDTHILLLNEIDSSFQWQVASFHQVSEIPSERSFHSATRVGRNIVMVGGKKDDSNGNPIALRDCWVLSYRMQWSKVSGVQFSPPRYNFGLIKNGSKLFILGGKGNNNNINNNSSSGGNNSSSSSGNSNTIITNTTNTTNNNNNNNNNNNNNNNNNNNNNNNNNNNNNNNNNNNNNNNNLSILDDIWFVNTVTLPISSSVTMINYSDIKIDKEIGKGHFSKVLKGNWKGKDVAVKKLNSNKDKAREEMIQEFKAEVELLGSLQHPNLVTCYGYSLNPMCIVMEFLPSGNLFELIHSKPSEQQQSIKLDSTLILAIAFDIARGMQHLHTRNIIHRDLKSSNLLMDKHFNIKIADLGIARETSFTQTMTTIGTVAWTAPEILRHESYNQKADVYSYAIVLYELLTGEEPYQGIPPMNAGILVASKGLRPELPDNCDPNWKKLVVWCWSEDPNKRPSFEEITNYLTKTF

SEQ ID NO: 13548 - protein, 1584 aa, Dictyostelium discoideum
MSFKFFKKKLVPSNEYRWDLRKSNSLTLNIEDKSRCSYRLPTSGSKGIAKSTQPFSSSFTYFELFITNGNGDKICFGLTTNDHPIEVYPGNYQGSYGYSGDGKCYFGTNEGRVYGPSFSSGDVVGCGYDSSSKTLYFTKNGVYLGVAAQKVNLIGLYPTVGLQNPGESVVINFFGPFSYRGAPEKPSKQSTIKDSGGSSIIPSEDLIPKEEFEVCRWSEKKNYHGKHVVVRNRTAFLPLDSPKDTIGGVRATQPFGEGFCYFEVIIDQLDKGQLSIGLANLEYPTFYHVGWMPRSYGYHNDDGRKFRWREEPGVNEGESYGSSYKKGDIIGCGLSFTSREIFFTKNGMYLGTAFSNVYGVFYPSVAFNEPGISITGVFGPPFKFSQVTLMLKNVNSTSILVPNGNNNNNSNNNNNNNNNNIIGNGKITTTTTTSTSPSSINNNEDISSNNNNNNNNNNNNNNNNNNNNNNNNNNNNNNSNSSNTNNNNINNTTNNNNSNSNNNNNNNNSNSNSNSNNNNINNNNNNNNNNNNIYLTKKPSIGSTDESSTGSLGGNNSSGNNNSSSGSIGNNSSIIKQRSPPHSINGPLMLPPSSTNNNNNIYSSYNSTTAGSSTTILPTLNHPIFGNTTSNNNSSSTLSVGGNNNLLGRHCQSLPITASTNHTLSSSLGVSFSSPSSSPKTSPRKIVNSSEDLGFVQTFQDQDGQPPSAWRRCGKSIKTKDDITLTIIKKKTSVAMADRPFSSNSSSTICYFEVYLEGHDKKGSITVGLSHSTYPFIKHIGREPKSYGFSSEGEKYGGSEIGEPYGPFFFFDGDSIASSCVIGCGINTSTRDIFFTKNGHYLGVAFSRVTSDPLYPSISFRGVVGGLCVATFPGGHFRFNIEDLPGISPSVWTEALGPDRQGSGFKNWAPNDVAIWLESFNYGQYRKNFRDNNISGRHLEGITHAMLKNDLGIEPYGHREDIINRLNRMIQIWNDKSPDSYPKIAIDSSDKIRWPASGGSSGGINISGGVVIGSSSGSDDGITEISSSSKNIRPYKSYTQKEIEDRNRRSTISGGEKKNKYYIDNQMDPHQIGSMDSDGLLPDFGQGPPDEKNSSKTLSNEQIRYLQQRKDEPPIAISSTGNGGSVSSTGGSSGFLTFPSSNSLTHPPQRDKPTQEFTHLPPITSNYKGITNTGQPHKSFDQPLELFPRHSAFSNNGNNGNNNNNNNNNNIKANQQQQQQSSYQQSQTQQQQQHITSTSTSTTNKWIDPFGGWETQSSLSHPPSRPPPPPPPPPQLPVRSEYEIDFNELEFGQTIGKGFFGEVKRGYWRETDVAIKIIYRDQFKTKSSLVMFQNEVGILSKLRHPNVVQFLGACTAGGEDHHCIVTEWMGGGSLRQFLTDHFNLLEQNPHIRLKLALDIAKGMNYLHGWTPPILHRDLSSRNILLDHNIDPKNPVVSSRQDIKCKISDFGLSRLKKEQASQMTQSVGCIPYMAPEVFKGDSNSEKSDVYSYGMVLFELLTSDEPQQDMKPMKMAHLAAYESYRPPIPLTTSSKWKEILTQCWDSNPDSRPTFKQIIVHLKEMEDQGVSSFASVPVQTIDTGVYA

SEQ ID NO: 13549 - protein, 337 aa, Dictyostelium discoideum
RPFGGWETQSSLSHPPSRPPPPPPPPPQLPVRSEYEIDFNELEFGQTIGKGFFGEVKRGYWRETDVAIKIIYRDQFKTKSSLVMFQNEVGILSKLRHPNVVQFLGACTAGGEDHHCIVTEWMGGGSLRQFLTDHFNLLEQNPHIRLKLALDIAKGMNYLHGWTPPILHRDLSSRNILLDHNIDPKNPLVSSRQDIKCKISDFGLSRLKKEQASQMTQSVGCIPYMAPEVFKGDSNSEKSDVYSYGMVLFELLTSDEPQQDMKPMKMAHLAAYESYRPPIPLTTSSKWKEILTQCWDSNPDSRPTFKQIIVHLKEMEDQGVSSFASVPVQTIDTGVYA

SEQ ID NO: 13550 - protein, 1024 aa, Dictyostelium discoideum
MATLDLCNNEHLNETESADEEDDQLQTPIKTVVTLKFKENPDSTSPIQVFQLNIGSNIIGRGSPSFLNDIKISRRHAEIIVSAEVGNVTFNQLGQNHSTLYRKDQTPIKMVRGISNQLLDDDLISLYDGSIPFSIHIERDNQFMSVCEGNFILTQDAADTNYHINSPTKTITTTSTTTTTTETLIKNIDNNNNNNNNNNNNNNNNNNNNNNNNNNNNNNNNNNNNNNNNNNNNNNNNNNNNNNNSILSKRSRDNENNHNHQYIHHDKTPLTLQQQQQLQNQQQLHQQQQQQLQYEQLQQLQQLQQHQQQQQHQQQQQQQQQQQQQQQQQQQQQQFKKHKRENTPVIVEDSLKLNIQENELLFIKKIGSGACGEVCQYEWKGTPVAVKTIFKSLLRKDKKEEFEKEVSILKCLRHPNVVLFMGTCLLNGNLAIITEYLNRGSLRDVLTTMNKSELSLSVKVKMLIDVAQGMNYLHTYSPPIIHRDLKSLNLLVDNNFNVKVSDFGLSRFISGGIGSSAKTFCGTLSWIAPEVFNGSGYTTKVDVYSFGIVLWEILTHKQPSGNISATSLGHPELPSNCPQSFSDLIKECCNRNPDQRPNFSQILLKLKLMYNQINNNNNNNKIDSSSFHNNNNNCSYNNSNDNNGILVTGGVGGNVSGNVESNNNNNNNTLNGAGNVIILNEIKDFTIQPNEITNIKTIIVKDSYSILEGQYKGKLVSIKQINGSINDFEMKQLGVLASIKSPLAVRFIGVVFNTDEYAIISEHVGNNGSLLTLMQNHSNQLNWSNTIDLAIQITQSIQYLHKHQPPILHRNITSDCFLLSSLNNNSNQNNNNNNNNNNNNNNNNNNNNNNNKKNDGGDDNGENTNTTTTTTTTTTTATNITNELNINEIKIKVHDFGLSRFNTQENEESLKEIKGNFLYSPPELLSLNTYSNKSDIYSLSIVLYELFETCLTKTYKKPYHEVTLDFDFQIIHKTSKLNLRPTISNNMPNEISKILQQGWFSDSVLRPSLDTIIKELLICKKNLC

SEQ ID NO: 13551 - protein, 527 aa, Dictyostelium discoideum
MATQQQQQQQQQQQQQIKARKDIQIQQAQSASDILGPPEISETEITTESILGDGSFGTVYKGRCKLKDVPVKVMLKQVDQKTLTDFRKEVAIMSKIFHPNIVLFLGACTSTPGKLMICTELMKGNLESLLLDPMVKLPLITRMRMAKDAALGVLWLHSSNPVFIHRDLKTSNLLVDANLTVKVCDFGLSQIKQRGENLKDGQDGAKGTPLWMAPEVLQGRLFNEKADVYSFGLVLWQIFTRQELFPEFDNFFKFVAAICEKQLRPSIPDDCPKSLKELIQKCWDPNPEVRPSFEGIVSELEEIIIDCCIPDEYGAILWKNHFKHENEANWKDFINVFSNFVGLTNANTPSMSDLLQFSPNLNGSTIELNFKCLKSIIVSSPKGPHEEEVVLMEQFGKVLAWFGNLKEDGSQILDKIRQLMECAWFHGDISTSESENRLRQKPEGTFLVRFSTSEYGAYTISKVSKNGGISHQRIHRPQGKFQVNNSKYLSVKELITGEAQALGINTPCLGSRFLFLIYKAQLSGYIN

SEQ ID NO: 13552 - protein, 2964 aa, Dictyostelium discoideum
IIDIEDIVSSFQYVGNESEIADLVKIVLSNNDGLSSNSNNNSSSNIGSMLNSGGGGSGSNLGLGLSSGTGGSFNGNSSGSSSSSSYYYNNNNNNNNIELTAQQKNPKVLCSFILHLLQIIFSQTSLTYSLYITYLKTNNNNNNNNNNNSSSPSNTDLSRSTYFYDIPVKSRIILKHIMLFLYNLTQRDASLLDSLSNIIGPFILGNVLLDPPPPPPSNSSPPISKSTSNNNLNVSNYHNNNNNNNNSNSNLSNSGNGDESPDFQSQNLVKSYNRENSGNSLNSMLHQTSLPNNNNSNVVNNNNNNNNNNNNNNNNNNNNNNNNNNNNNNNNNINNNSTSSNNNNNNNSNNNNSQIPPLIQVRQPSSDFTTTSSGNLRSLSNTENSLCKKVAIDLIQNIPLYLLFSHLKIQQLEGEKILFSAENIFCVDKCNFPPNKAMLGEIWVTNFRIIFINSNSNSSTIPNSTSSTSISSFASTQNLSILSIMTLFGSYNGNGGSGPTNATLSGGGSTSSSSNLNTPITTSPIHTSTNSNGAILNPINNSLINSNNNNNNNNINNNINNNINNINNNINNINSNSNNNINSIINSNSNNNNNNNNLNKLSTLDNTEIPLSMIYRWKMVKTGSLYDSFKIYCKDFRCKIIGFQINSHVLVKFKDLLTKCSVPTLDTIFAYNSKESSFGNTECFPDHSLLQEYNRIGVSWDLWRTTTQSKLCEHYPPTSVVPKSVSDNIVVTSAYYRSYGFPVLAWSHPTQKSSITRATSPEDQNNGSSNYLLTPNSPNSSSSNLANNNNSNNNNINNNNNNNNNNNNNNNNNSNNNNNNNNNNNNNNNNNNNNNGGGSGSRSTTIDNGQTSILNKNISNTPLIQSPTPNLPPSQHSLNLLMSPQTSSPRIHQSISSSSIPQVCQEDIDFLRGILDIKSSSMLNVFDTGSGGSYSSTMIGCQIEFLNLPPPNKVRERFNRLLHLHLGNPDSEWSETIRFFWLDPLKPILSAAINIAMHVDQGRSVLIQNSSSGPDIELQLSSLAQILLDPYYRTMDGFKVLIEKEWLSYGYPFSKRCHHKTSDDGFSPIFMQFIFLVWQIWKEFPTHFQFNEYYLLTLLDNVYNSRFGTFLCNNYKERMENNVYSSTKSFWSFQQQNQSRFTNLFYRPSPSSSSSSSSSSSSLSNGYNSSVQHLKCLRVFQDTMWNEYFFRYCFKSSLAIEQFEDRIKLSLLDIEMTVNSAITSTANALLPFLETLDLSNLRLYYLPSESTLYHLVGLRELNLSKNNLNSISCSLSSLVKLEKLSFEENSITNLPIETVVLLAEKLTSLTELNLSSNQLIDLPIEFSMFSKSLKKLHLKNNRFSAIPEVLGMLENLIELDLSELDLSSSTNSGVGIPTKLSKLCILNLNQTRIVELPKEFGDLKSLEKLYLDFNSLVTLPHSFRQLTNLEELSLSFNSMTELPREVCFLINLKKLMIEGNQIQFLPNEISQLSKLMILNVCKNKLDSLPASIGQLSQLVSLNLNNNSQLVSLRPTMGLLSNLVELKLDGTRLKTPPPEIVSLGLKSILLYLKDLIKGQEQCYKMKLMIVGQENVGKTTLLKTLKEKKKKATPSGPNISTDGIAIDQWVFSCLFEELDETSQNGRLIKKKQDITLSIWDFAGQEIYYTTHQFFLSERSVYIVAWNCALAEEESRVEFWLQSITTRAKDAPIIIVGTHLDDVNRTTAKMQKKRMKEKYLIRYQNIKAIKLVSCTSGKGITSLREKLEALVQSQSNMGESLPRSYMLLENLVKEETKKRIIPTIPWTEFIQMGTICTITDEAELLRATMFLHQLGSLVYFPKEPGLKQFVILDPQWITTMLSSIITTKHSYAKDGILNHKSLKQIWRPPQYPTHLHPHLISLLEKFEISYNLSPDSTSFETGTSLIPSLLLNDRPAIFPSLWGSFNQLVRQFGRIYQFEFVPNGFFSRLMVRILNFARVEAKCYWKNGMILQHDEETIFLEMNNAKKSLSFTVRGGANSTTLSRDVIETIQSLLDDSFQLPTYVFVPCFHCIFLSLPQCYYFPLDVCENAAVKGTGYLKCLTYDANVRTDLLVPDLVMSNFTGAKIPFDQLMIEELIGEGGAALVYRARWQGQTVAVKKLKTIENLDSPIEINDISLSKAFNEFRRECWVMSELEHPNIVQLKGLCLDPLCIVTEYLPHGNLYSFLHKPEMEFSWLFRLKVALDISSGMAFLHSSTPPIIHRDLKSPNILLASINENAQTIAKVVDFGLSGLQHTITNRGVENPLWLAPEILNKTKEASTQTDVYAFGVILWELVTRKDYFGEIGFMTLIEEKVINGERPKIPEDCPEMYSKLIVECWQTDASQRPKFSEIEDRLIKIAEAMFPDIHLSNIYQQQQQQQQQQQQSSPSKSSSTSPIIKSLNLSTVSELGESSNQTPKQNITTTTTTTHSDHKRQLSTDSGSSYRNKSHDTISHSTSVASDLLDIDNTLTVATTPRNRSKTNDDNIINTSNGRIITNSINNSNSNNEQPLSPNSLLQHSQSQQQLENVGLSALLDALPNSPIVSSTAAPSTTSTNKKVMYTSIVGDSARTRRGSVSIQPFQNEFNRELLPNQGTIQCLIKVGGNGCQVWAGTGNGFISTWKIEGQEKYIQRLFEANKDKKRIHCLYPYMNTVWCGSADDSITIWDIDTYQKIKSYSVEGPSCITRVGNTMWVGTIVNTIHIYDLKKKTKYKGKISLDSPIECLLRRDQEVWVATLGNIARIDVNSLRVVQMTKAHERAIHAMIQVDDHVWTASSDGTIKVWSSTCQSVHTIENAHSSRIFTLELVGDFVWSGSWDTTIKIWSTKDYHLVSENSGKHKDAISSFVYISNDQPLQTNERPIQKQVWSGSWDSSICVWALPNDTNSRSNTIFSSDSQFNLNGGSSNSITNSNSNSNNNLNGNLNNSNNSINNNYIIIIIIIIIIIIIIIIIIIIIIITIIIIIIIIIIVIM

SEQ ID NO: 13553 - protein, 752 aa, Oryza sativa
  unsure (1)..(752): unsure at all Xaa locations
METDEAAMEAADLVKKIRELEEGQAELKREISRIVPERGYARRPPTLSXRSIGAPSSRMRRRRHRCLXSCSAWTAPDSXDRHYVRILHSLGQAVHVISLDGKLMYWNRYAEHLYGYSVPEAVGQNALELIVHPSDYGAANDIIQNIFMGKCWRGKFPVKHKSGERFNIVASNTPLYDDDGSLVGLICLSTDTRTLEEILXXPFNLRESVSEFSKAARSTQXGSKSGLLNKVSCDSQQPLQSAITSRITNLATRVTNRVRSRVKTGQNCDDQFGGACESHYSEXXDAREEQTSSEGSTPSGDVLXXGAFVSEDNYSGKSSKTNSDDSGEGKLGLHKILSSTAEALWANRGIPWPWRGHGNEGRIERTCHSSMKFKRMDRAIRKFQSQSYYQTAKILNLSRKSNMRFQVPGGLSMXSTSSMSSTGSTNSSAIERADREADCLDFEILWEDLAIGEQVGQGSCGTVYHALWYGSDVAVKVFSKYEYSEDMILTFRQEVALMKKLRHPNVILFMGAVASLQRLCIVTEFLPRGSLFRLLQKNAGKLDPRRRVHMAIDIARGMNYLHNSSPPIVHRDLKSSNLLVDKNWTVKVADFGLSRLKLETFLTTNGKGTPQWMAPEVLRNEPSNEKSDVYSYGVILWEIATQKIPWDNLNTMQVVGAVGFMDHRLDIPSDVDPHWASMIESCWDSDPQRRPSFQELLDQLRDLQKQYNLQAQLQRTAAAKMSVDDCXLQNLNGPCSACCQYEVPAGQQNGIR

SEQ ID NO: 13554 - protein, 707 aa, Oryza sativa
  unsure (1)..(707): unsure at all Xaa locations
MEAADLVKKIRELEEGQAELKREISRIVPERGYARRPPTLSAQHRRTELPHAEXGGGGPGGGTVVSDPAAXILHSLGQAVHVISLDGKLMYWNRYAEHLYGYSVPEAVGQNALELIVHPSDYGAANDIIQNIFMGKCWRGKFPVKHKSGERFNIVASNTPLYDDDGSLVGLICLSTDTRTLEEILXXPFNLRESVSEFSKAARSTQXGSKSGLLNKVSCDSQQPLQSAITSRITNLATRVTNRVRSRVKTGQNCDDQFGGACESHYSEXXDAREEQTSSEGSTPSGDVLXXGAFVSEDNYSGKSSKTNSDDSGEGKLGLHKILSSTAEALWANRGIPWPWRGHGNEGRIERTCHSSMKFKRMDRAIRKFQSQSYYQTAKILNLSRKSNMRFQVPGGLSMXSTSSMSSTGSTNSSAIERADREADCLDFEILWEDLAIGEQVGQGSCGTVYHALWYGSDVAVKVFSKYEYSEDMILTFRQEVALMKKLRHPNVILFMGAVASLQRLCIVTEFLPRGSLFRLLQKNAGKLDPRRRVHMAIDINITYIFLQARGMNYLHNSSPPIVHRDLKSSNLLVDKNWTVKVADFGLSRLKLETFLTTNGKGTXXRSDVYSYGVILWEIATQKIPWDNLNTMQVVGAVGFMDHRLDIPSDVDPHWASMIESCWDSDPQRRPSFQELLDQLRDLQKQYNLQAQLQRTAAAKMSVDDCX

SEQ ID NO: 13555 - protein, 282 aa, Oryza sativa
  unsure (1)..(282): unsure at all Xaa locations
XPRAAGIRHGAGSCGTVYHALWYGSDVAVKVFSKQEYSEEVIQTFRQEGSLMKKLRHPNLLLFGAAVTSPQRLCIVTEFLPRGSLFRVLQRNNTKLDWRRRVHMALDIARGMNYLHHFSPLIIHRDLKSSNLLVDKNWTVKVADFGLSRLKRETFLTTKTGKGTPQWMAPEVLRNEPSDEKSDVYSYGVILWELVTQKIPWENLNSMQVIGAVGFMNHRLEIPSETDPQWTSLILSCWETDSQLRPSFQQLLERLRELQRQYNVQTQMERNASAAAKNSSIE

SEQ ID NO: 13556 - protein, 236 aa, Triticum aestivum
  unsure (1)..(236): unsure at all Xaa locations
XSGSWSSXXNNNSSSSASSTGSTNSSALYKIDHEADCLDYEILWEDLVIGEQVGQGSCGTVYHALWYGSDVGVKVFSRQEYSEEVIQAFRQEVSLMKKLRHPNILLFMGAVTSPHRLCIVTEFLPRGSLFRLLQRSTTKLDWRRRVHMALDVARGMNYLHHYSPPIIHRDLKSSNLLVDKNWTVNVADFGLSRLKRETYLTTNTGKGTPQWMAPEVLRNEPSDEKSDVYSYGVTLX

SEQ ID NO: 13557 - protein, 1120 aa, Tetraodon fluviatilis
MASLAAMETLADACPTVHQNGTAQRESPEARLSVDVLRLHFYRSGQGATDSSFLSYPPGNYVAEELCIDAAKACSISPLYFSLFGLFRERDCLWFSPNHTFQLDEFASEDVFFRIRYYFPGWYSGGASRAYRYGVAKGSESPVFDDCVMSYLFSQWRNDFVNGFMKIPSSHEIQEECLGMAVLDMTRTAKERQLSPLDIYHTMSYKSFLPKEIRAQIQDCNFLTRKRIRFRFKRFIQQFSQCRTTVRDLKLKYLISMESLEKAFYTETFQVRELSRGQLIILVVADNGIQWCQEKLKDSDEELQILCDFPDVTDISIKQASKEGATESRVVTINKQDGKNLELEFPSLSEALSFVSLIDGYYRLTTDAHHYLCKEVAPPRLVEAITSHCHGPISLEFAINQLQKCGNKQGLFILQCSPKDFNKYFLTFPVEVYGTVEFKHCQITRSECGQFNLSGTKRNFSSLHELLSCYKNETVRSDSVVFQFSKCCPPKAKERSCLLVCRTNKGPEVPLSPSTNRHNISQMVFHKIRKEDLEFNESLGQGTFTKIFKGVRKELGDYGLMHQTEVVMKVLDQAHRNYSESFFEAASMMTQLSHVHLILNYGVCVCGEENIMVQEYVKFGSLDTYLKKNKNSVNILWKLEVAKQLAQAMNFLEEKNLVHGNVCAKNVLLIREDDWRAGNPPFIKLSDPGISITVLPKEILVERIPWVPPECVNDPANLSLAADKWSFGTTLWEICSGGEKPLASLDNTNKTLFYEDRHQLPAPKWIELANLITSCMDYEPTFRPTFRAIIRDLHSLFTPDYELIVDSDILPNRTACTGWSTGGFDSQEPAQFEERHLIFLQQLGKGNFGSVEMCRYDPLQDNTGEVVAVKKLQHGTAEHIRDFEREIEILKSLQHENIVKYKGVCYSAGRRNLRLVMEYLPFGSLRDYLIKNKERIDHKKLVHYSSQICKGMEYLSGKRYIHRDLATRNILVESESRVKIGDFGLTKILPQDKEYYMVREPGESPIFWYAPESLTESKFSVASDVWSFGVVLYELFTHSSRNSSPPTVFMSMMGNDKQGQLIVYHLIELLKSGSRLPQPLDCPTEIHEIMEQCWDNDPYLRPSFKELALSIDLFREHKEF

SEQ ID NO: 13558 - protein, 974 aa, Saccharomyces cerevisiae
MNSMADTDRVNLTPIQRASEKSVQYHLKQVIGRGSYGVVYKAINKHTDQVVAIKEVVYENDEELNDIMAEISLLKNLNHNNIVKYHGFIRKSYELYILLEYCANGSLRRLISRSSTGLSENESKTYVTQTLLGLKYLHGEGVIHRDIKAANILLSADNTVKLADFGVSTIVNSSALTLAGTLNWMAPEILGNRGASTLSDIWSLGATVVEMLTKNPPYHNLTDANIYYAVENDTYYPPSSFSEPLKDFLSKCFVKNMYKRPTADQLLKHVWINSTENVKVDKLNKFKEDFTDADYHWDADFQEEKLNISPSKFSLRAAPAPWAENNQELDLMPPTESQLLSQLKSSSKPLTDLHVLFSVCSLENIADTIIECLSRTTVDKRLITAFGSIFVYDTQHNHSRLRLKFIAMGGIPLIIKFEHLAKEFVIDYPQTLIECGIMYPPNFASLKTPKYILELVYRFYDLTSTAFWCRWCFKHLDISLLLNNIHERRAQSILLKLSSYAPWSFEKILPSLIDSKLKKKILISPQITYVVFKSINYMITTNDDKIHKSAIPSSSSLPLSSSPTRNSPVNSVQSPSRSPVHSLMATRPSSPMRHKSISNFPHLTISSKSRLLIELPEGFFTWLTSFFVDMAQIKDLSVLKYFTKLCYLTVHINSTFLNDLLDNDAFFAFIRNIDTIIPFIDDAKTAAFIWKQITAICVEMSLDMDQMSASLFSTAMNFIRKKNNTSISGLEIILNCLHFTLRNVNDDVAPTVGSSESHSVFLIKVNNDAAIELPIDQLVDLFYALNDDDVNLSKLISIFTKICSLPGFENLTINIIFHPNFYEKIVSFFDTYFNSLLIQIDLLKFIKLIFSKSLLKLYDYTGQPDPIKQTEPNRRNKATVFKLRAILVQITEFLNNNWNNGCPKRNSNQVGGDSVLICQLCEDIRSLSKKGSLQKVSSVTAAIGSSPTKDERSNLRSSKDKSDGFSVPITTFQT

SEQ ID NO: 13559 - protein, 974 aa, Saccharomyces cerevisiae
MNSMADTDRVNLTPIQRASEKSVQYHLKQVIGRGSYGVVYKAINKHTDQVVAIKEVVYENDEELNDIMAEISLLKNLNHNNIVKYHGFIRKSYELYILLEYCANGSLRRLISRSSTGLSENESKTYVTQTLLGLKYLHGEGVIHRDIKAANILLSADNTVKLADFGVSTIVNSSALTLAGTLNWMAPEILGNRGASTLSDIWSLGATVVEMLTKNPPYHNLTDANIYYAVENDTYYPPSSFSEPLKDFLSKCFVKNMYKRPTADQLLKHVWINSTENVKVDKLNKFKEDFTDADYHWDADFQEEKLNISPSKFSLRAAPAPWAENNQELDLMPPTESQLLSQLKSSSKPLTDLHVLFSVCSLENIADTIIECLSRTTVDKRLITAFGSIFVYDTQHNHSRLRLKFIAMGGIPLIIKFEHLAKEFVIDYPQTLIECGIMYPPNFASLKTPKYILELVYRFYDLTSTAFWCRWCFKHLDISLLLNNIHERRAQSILLKLSSYAPWSFEKILPSLIDSKLKKKILISPQITYVVFKSINYMITTNDDKIHKSAIPSSSSLPLSSSPTRNSPVNSVQSPSRSPVHSLMATRPSSPMRHKSISNFPHLTISSKSRLLIELPEGFFTWLTSFFVDMAQIKDLSVLKYFTKLCYLTVHINSTFLNDLLDNDAFFAFIRNIDTIIPFIDDAKTAAFIWKQITAICVEMSLDMDQMSASLFSTAMNFIRKKNNTSISGLEIILNCLHFTLRNVNDDVAPTVGSSESHSVFLIKVNNDAAIELPIDQLVDLFYALNDDDVNLSKLISIFTKICSLPGFENLTINIIFHPNFYEKIVSFFDTYFNSLLIQIDLLKFIKLIFSKSLLKLYDYTGQPDPIKQTEPNRRNKATVFKLRAILVQITEFLNNNWNKDVPKRNSNQVGGDSVLICQLCEDIRSLSKKGSLQKVSSVTAAIGSSPTKDERSNLRSSKDKSDGFSVPITTFQT

SEQ ID NO: 13560 - protein, 666 aa, Neurospora crassa
MDGSLMAALPQGQDVIRVISTGGVTKVVKIADCNTCEEVMRVTLRKFGLREDHERNYCFWVLAGVDPDPNQCRRLGDTELWRVIKDHTRPERNRLILRRVPSGEPGKAELERAAAIAMEEAQQTHRPPIEPSDKRSQLKLQKVLGVGWEDLQQQPPLSPMSYQDRERNVSNAARDLERPAPLETPRAMPRRTQALRQFGGLRPPSELIASDLTSYFPDHSREAIDRTARLSMRRSARLSRVNHRLSVASTLSFASSIQDAPPIPTIADSWLTASNQIAKVRPRDVLPRAPHGYRDSVASSVLDTLQEEGSPTEPNRRSFVPFSDSGSDTAAVSVIDPDGNIVRHSYYDSGTNNSADSAVIQEALAEDGEDAADKELQTFLAGDAWDDSMWMKGSLIGQGSFGSVYLALHAITGELLAVKQVETPAPGADSKNDARKKSMIEALKREITLLRDLQHPNIVQYLGCSSSAEYLNIFLEYVPGGSVQTMLNQYGALPESLVRSFVRQILQGLSYLHNRDIIHRDIKGANILVDNKGTIKISDFGISKKLEATNILNGANNNKHRPSLQGSVFWMAPEVVKQTSYTRKADIWSLGCLVVEMMTGTHPFPDCTQLQAIFKIGGSKASPTIPDNASEEAKQFLAQTFEIDHNKRPSADELMLSPFLTPVPGT

SEQ ID NO: 13561 - protein, 879 aa, Sycon raphanus
MAEQDECNFGTDLITRAGSEALLRLNDEEIRLLESMKTYMTKRAKADQDYAKELLRLRVDRSTGGALHRSDSTSAEETSPILKAWHQFQAETDRVSSLIAQHAQALNAITVQSVDKLLLNKKTAKKRFTTCRQDADAAYGRTTERVNKLKKSYQQLSADVSRKKTEFQKSVGSPNQQDKMKRYIRAADKLCKCHNDYLLALQEVQEHQEAYRTRILPLLLNNMQQVCQGHAQQWMDALNDSLDNIDSCRDEYREIFSRLHATLGDLDPSSEYNGFLERNGEKLPPAEKFTFDVKLLEHAPEHASPDHLIINNLTQPQLESSITTMNSQLEELKKTLQTKTDELEVVRNTEVDENATTAEQMDQHMSTLGKYSDISLEVEQLWLNQTKLELAINTMESSLTSLGGQPAPLFDESVGNVDQQMLDHAEQVNGGGDQTAAAHPTSTKLFSAMLGGVKSMKNKVKKKALKMKTSMTATSHAQSSNLAVSSSPCGDMEDEFDDEDVEYDTPEAHAGVEEEPWYHGEISRQEATGLLKKMGDFLVRYSADKEHYTLTVKMEGIKHFIIQHNEEGFRFEGDPYPSIPMLIDHHFKNRLPVTRKSQAILRQPVKKPDLREYNISHDNILIGEKIGKGNFGDVFKGYLKTHNMEVAVKSCRSEDFPDKQKFLQEAEILKQYRHPNIVELIGVCAEKEPLYIIMELMAGGNFLSFLRGPEGKRLKVNNLTEMCVEAAAGMVFLEQRNCIHRDLAARNCLVGDNNVLKISDFGMSREEDDGIYTVSSGLKQIPIKWTSPEALNYGRYTTQSDVWSYGILLWETYTYGSGPYPGMNNRETRERIESNYRMPRPELCPHPVYKLMLSCWEYDPDKRPSFAEIYDKLYSFNHQ

SEQ ID NO: 13562 - protein, 505 aa, Spongilla lacustris
MGSCCSSQDGDGNGKATAGSTVDSHELSQSVKGKIKQPEPKPKPPPQVPPAQDVKYPIYVGKYDYDSRTDDDLSFKKGDLMYIISTDEGDWWFARSKDTAGKEGYIPSNYVAEYKSLDAEEWFLGKIKRVEAEKMLNQSFNQVGSFLIRDSETTPGDFSLSVKDQDRVRHYRVRRLEDGSLFVTRRSTFQILHELVDHYKIETDGLCCKLLYPCLQAEKPQTAGLLRQANEEWEIEKTQIKLLRRLGAGQFGEVWEGLWNGTTSVAVKTLKPGTMSVEEFLQEASIMKRLRHPKLIQLYAVCTKEEPIYIVTELMKYGSLLEYLRGEDGVLKIEQLVDVAAQVASGMSYLEQQNYIHRDLAARNILVGEHGICKVADFGLARVIDEEIYEAHTGAKFPIKWTAPEAAMYNRFTIKSDVWSFGVVLYEIITYGRFPYPGMTNPEVLEKIQQNYRMPCPANCPKQFHDIMLDCWREDPASRPTFETLQWQLEEFFNSEGYRDPDAIH

SEQ ID NO: 13563 - protein, 505 aa, Spongilla lacustris
MGSCCSSQDGDGNGKATAGSTVDSHELSQSVKGKIKQPEPKPKPPPQVPPAQDVKYPIYVGKYDYDSRTDDDLSFKKGDLMYIISTDEGDWWFARSKDTAGKEGYIPSNYVAEYKSLDAEEWFLGKIKRVEAEKMLNQSFNQVGSFLIRDSETTPGDFSLSVKDQDRVRHYRVRRLEDGSLFVTRRSTFQILHELVDHYKIETDGLCCKLLYPCLQAEKPQTAGLLRQANEEWEIEKTQIKLLRRLGAGQFGEVWEGLWNGTTSVAVKTLKPGTMSVEEFLQEASIMKRLRHPKLIQLYAVCTKEEPIYIVTELMKYGSLLEYLRGEDGVLKIEQLVDYAAQVASGMSYLEQQNYIHRDLAARNILVGEHGICKVADFGLARVIDEEIYEAHTGAKFPIKWTAPEAAMYNRFTIKSDVWSFGVVLYEIITYGRFPYPGMTWPEVLEKIQQNYRMPCPANCPKQFHDIMLDCWREDPASRPTFETLQWQLEEFFNSEGYRDPDAIH

SEQ ID NO: 13564 - protein, 506 aa, Spongilla lacustris
MGSCCSSQDGDGNGKATAGSTVDSHELSQSVKGKIKQPEPKPKPPPQVPPAQDVKYPIYVGKYDYDSRTDDDLSFKKGDLMYIISTDEGDWWFARSKDTAGKEGYIPSNYVAEYKSLDAEEWFFGQVKRVDAEKQLMMPFNNLGSFLIRDSDTTPGDFSLSVRDIDRVRHYRIKKLENGTYFVTRRLTFQSIQELVAYYTQQADGLCVNLKGPCMVMEKPQTAGLSKQANEEWEIEKKQIKLLRGLGAGQFGEVWEGLWNGTTSVAVKTLKPGTMSIEEFLEEASIMKQLRHPKLIQLYAVCTKEEPIYIVTELMKHGSLLEYLRGDGRSLKLPDLVDMCSQVASGMSYLEQQNYIHRDLAARNILVGEHKICKVADFGLARVIDEEIYEAKLGAKFPIKWTAPEAAMYSRFTIKSDVWSFGIVLYEVITYGRFPYPGMTNAQVLEQIQQSYRMPRPMGCPEKLYAIMMDCWREDPASRPTFETLSWQLEEFFTTGDDAGYKDMER

SEQ ID NO: 13565 - protein, 334 aa, Spongilla lacustris
IRTLDDGGFYMANRISFPTLQNLVSHYMMDADGLAQRLSRPCSRANIPITSGLSYKDEWEIDRTTIQLQRKLGQGNFGEVWAGVWNGTTAVAVKTLKPDTMEVKDFVQEAQVMKKIHHPNLLQLYAVCTIGEPIYIVTELMKYGSMLEYLKHGEGKNITLHQMVDMSAQIASGMTYLEAHSYIHRDLAARNILVGEGNVCKVADFGLARVIKEDIYNPREGTKFPIKWTAPEAALYNRFTIKSDVWSFGVLISEIVTHGRMPYPGMTNRQVLEAVDRGYRMPCPEGCPDPLYKIMLSCWKHEPDDRPTFESLKNLLEDYYVSAAEGSYREPAPR

SEQ ID NO: 13566 - protein, 362 aa, Spongilla lacustris
TFLVRESESKPGDYSLSIQDGDNVKHYRIRKLDEGGFFITRRAVFNTLKDLVQYYQNESDGLCVNLRQPCRPLERPQIDLSHKTKDMWEISRDSITLIRKLGAGQFGEVYQGLWNNSTPVAVKTLKAGTMQPAAFLAEAQIMKKLRHPKLIQLYAVCTQGEPVYIITELMSKGSLLDYLQGEAGALKLPQLIDMAAQVAAGMAYLELHNYIHRDLAARNILVGDNNICKVADFGLARLIVSDDYNATEGAKFPIKWTAPEAALFNRFSIKSDVWSFGILITELVTYGRIPYPGMSNAEVLQNLDKGYRMPCPVTTPESLYQIMLDCWKRNPADRPTFEALQWRLEDFFVLDAGQYQHAADVL

SEQ ID NO: 13567 - protein, 467 aa, Hydra vulgaris
MSNSMSGNSGNPMSGNSSKNFPNGTECVARYDFKGNSEKDLPFKKGDIIEILQSTRDPNWYNAKKVSDGRTGLIPINYVQQRRALHLHEMPWFFGKITREKAEELLTPREVGLFLVRESTNFPGDYTLCVVSPQNNKKVEHYRVISTSDNQVTVDEEAFFPTLIELIKHYEKDADGLCTMLKKPLKKKTEILQSAIFKESFQKEGWAVPIEDVEFKELIGKGEFGNVYKGVWAKKTVAIKKLRDDSKTAQSLLAEASVMTTLQHKNLVVLVAISFQGDSILILTEYCEKGVLVEYLRTRGRAVITLEEQKGFAIDVCNGMRYLEEKNIIHRDLAARNVLLSDELCAKVSDFGLAKDVEQELASGKFPVKWTAPEAIELKIFSTKSDVWSFGILLWEIFSFGRNPYPREPLDELLTKIKSNYRMECPEKCPPFVYQLMLKCWDADPSRRPSFKQLHNELFNPDRETKL

SEQ ID NO: 13568 - protein, 887 aa, Dugesia japonica
MLNKFIVIVTMLAMWNYAQDCNFELSKNETVQFTSFLPLILNCASISKFDTDLCETINDERPYNWYFQNKKIGNETKGKIKLVSSSQQMIIFNGSASDEGNYMCETINNNKEFISKTFDARMIEPSMTQMELLLNSFPNDHQEEINGRIYWLPEMILNHIRDVVIINQGAESDLHSFYYVSGSDSQISTFDVQWYFHYQPKSEDKTIIDHNIKTFYSSCNDLDLLPRKVNGSCYSSRLYLYNVEIKDQGFYSVEATLRMKNGSSHGLNFTYELKINIANILDPDKTNSILSTPQISFNLNSRVCINDRFDWICKVTPVVSYYVTIYKNNSNPNNITVLAESEVLQMNIDGNSGQGFYLKSSTVNYSVNSVQREHAGVYACRIINFKDYSSDHQNRHEPEVLMRLTVKDCVGNSYFTIIWYSISVGIIILVVISFLIIRLYNKYSNGYIVKTVIVQHPNKLYVPHDTCFPLLMPDITIKTIHKHINSSEDSLLQQKHFTNNSNIPFSQKISKYFRKSFIFSYRHVDVSSSNLDSPLGVISNTETNKLTSNSLTVETQRPQLILQNDANTKYILPSNIGWIFSRDSLIIGSKIGEGAFGIVYSALVKSFSENSASVEVAIKTLHTSFGDQDVINLIQELEMMKIIGRHRHIISLYGACIDNGHPYMVIELAKHGNLRDFLRAQRSQSKVGEIQNSGGLVTRLTVTDFLRFSIEIAEGMEYLSSRKIIHRDLAARNVLVDQYVEMKIADFGLTRIVENYYRKTTDGRLPIKWMAPECLLDRVYTVKSDVWSYGIVLWEIFTMGQTPYPTIQSDGMHQALRNGIRNEKPALASDEMYRLMLTIWNDDPLERHTFSEIIDKLTHIQLSNGGSSPKRDYLEISSNQCYSTTIV

SEQ ID NO: 13569 - protein, 666 aa, Dugesia japonica
LDLLPRKVNGSCYSSRLYLYNVEIKDQGFYSVEATLRMKNGSSHGLNFTYELKINIANILDPDKTNSILSTPQISFNLNSRVCINDRFDWICKVTPVVSYYVTIYKNNSNPNNITVLAESEVLQMNIDGNSGQGFYLKSSTVNYSVNSVQREHAGVYACRIINFKDYSSDHQNRHEPEVLMRLTVKDCVGNSYFTIIWYSISVGIIILVVISFLIIRLYNKYSNGYIVKTVIVQHPNKLYVPHDTCFPLLMPDITIKTIHKHINSSEDSLLQQKHFTNNSNIPFSQKISKYFRKSFIFSYRHVDVSSSNLDSPLGVISNTETNKLTSNSLTVETQRPQLILQNDANTKYILPSNIGWIFSRDSLIIGSKIGEGAFGIVYSALVKSFSENSASVEVAIKTLHTSFGDQDVINLIQELEMMKIIGRHRHIISLYGACIDNGHPYMVIELAKHGNLRDFLRAQRSQSKVGEIQNSGGLVTRLTVTDFLRFSIEIAEGMEYLSSRKIIHRDLAARNVLVDQYVEMKIADFGLTRIVENYYRKTTDGRLPIKWMAPECLLDRVYTVKSDVWSYGIVLWEIFTMGQTPYPTIQSDGMHQALRNGIRNEKPALASDEMYRLMLTIWNDDPLERHTFSEIIDKLTHIQLSNGGSSPKRDYLEISSNQCYSTTIV

SEQ ID NO: 13570 - protein, 813 aa, Caenorhabditis elegans
MSRINFKKSSASTTPTSPHCPSPRLISLPRCASSSIDRKDQASPMASPSTPLYPKHSDSLHSLSGHHSAGGAGTSDKEPPKFKYKMIMVHLPFDQHSRVEVRPGETARDAISKLLKKRNITPQLCHVNASSDPKQESIELSLTMEEIASRLPGNELWVHSEYLNTVSSIKHAIVRRTFIPPKSCDVCNNPIWMMGFRCEFCQFKFHQRCSSFAPLYCDLLQSVPKNEDLVKELFGIASQVEGPDRSVAEIVLANLAPTSGQSPAATPDSSHPDLTSIKRTGGVKRHPMAVSPQNETSQLSPSGPYPRDRSSSAPNINAINDEATVQHNQRILDALEAQRLEEESRDKTGSLLSTQARHRPHFQSGHILSGARMNRLHPLVDCTPLGSNSPSSTCSSPPGGLIGQPTLGQSPNVSGSTTSSLVAAHLHTLPLTPPQSAPPQKISPGFFRNRSRSPGERLDAQRPRPPQKPHHEDWEILPNEFIIQYKVGSGSFGTVYRGEFFGTVAIKKLNVVDPTPSQMAAFKNEVAVLKKTRHLNVLLFMGWVREPEIAIITQWCEGSSLYRHIHVQEPRVEFEMGAIIDILKQVSLGMNYLHSKNIIHRDLKTNNIFLMDDMSTVKIGDFGLATVKTKWTVNGGQQQQQPTGSILWMAPEVIRMQDDNPYTPQSDVYSFGICMYEILSSHLPYSNINNRDQILFMVGRGYLRPDRSKIRHDTPKSMLKLYDNCIMFDRNERPVFGEVLERLRDIILPKLTRSQSAPNVLHLDSQYSVMDAVMRSQMLSWSYIPPATAKTPQSAAAAAAANKKAYYNVYGLI

SEQ ID NO: 13571 - protein, 813 aa, Caenorhabditis elegans
MSRINFKKSSASTTPTSPHCPSPRLISLPRCASSSIDRKDQASPMASPSTPLYPKHSDSLHSLSGHHSAGGAGTSDKEPPKFKYKMIMVHLPFDQHSRVEVRPGETARDAISKLLKKRNITPQLCHVNASSDPKQESIELSLTMEEIASRLPGNELWVHSEYLNTVSSIKHAIVRRTFIPPKSCDVCNNPIWMMGFRCEFCQFKFHQRCSSFAPLYCDLLQSVPKNEDLVKELFGIASQVEGPDRSVAEIVLANLAPTSGQSPAATPDSSHPDLTSIKRTGGVKRHPMAVSPQNETSQLSPSGPYPRDRSSSAPNINAINDEATVQHNQRILDALEAQRLEEESRDKTGSLLSTQARHRPHFQSGHILSGARMNRLHPLVDCTPLGSNSPSSTCSSPPGGLIGQPTLGQSPNVSGSTTSSLVAAHLHTLPLTPPQSAPPQKISPGFFRNRSRSPGERLDAQRPRPPQKPHHEDWEILPNEFIIQYKVGSGSFGTVYRGEFFGTVAIKKLNVVDPTPSQMAAFKNEVAVLKKTRHLNVLLFMGWVREPEIAIITQWCEGSSLYRHIHVQEPRVEFEMGAIIDILKQVSLGMNYLHSKNIIHRDLKTNNIFLMDDMSTVKIGDFGLATVKTKWTVNGGQQQQQPTGSILWMAPEVIRMQDDNPYTPQSDVYSFGICMYEILSSHLPYSNINNRDQILFMVGRGYLRPDRSKIRHDTPKSMLKLYDNCIMFDRNERPVFGEVLERLRDIILPKLTRSQSAPNVLHLDSQYSVMDAVMRSQMLSWSYIPPATAKTPQSAAAAAARNKKAYYNVYGLI

SEQ ID NO: 13572 - protein, 850 aa, Caenorhabditis elegans
MGNYKSRPLTSCSDELKKKISEGYSVVRSRLSDDVRSRSNLGWVDVQIAAFEKSLEDFKQHMCPENAELKSTQLLSLFHIICAGHSDSQPEKLQFLIDNLPKESSITLISSQSANGFTPLHIAIYRGDVAILKALIATKLVDLDQSGRHLLPALHLAAMIGDSEMLTILLNSGANIHVTDFVHFTALHCATYFGQENAVRTLISASANLNLGGAVNDRPIHLAAAKGLTSITKLLLEAKADPLLADDEGNQALHYAAKSGSLVILNMLIKQVRGTNDRICARNLYGDTALHLSCYSGRLDIVKSILDSSPTNIVNMENVFSETPLHAACTGGKSIELVSFLMKYPGVDPNYQGQDGHTALHSACYHGHLRIVQYLLENGADQSLASRAFEGGALRQQAGPGTNRPSKVASAIMALNRSDTPSSNASYNSTVSLDDQQTPVIWAYERGHDAIVALLKHYAARTVEGDVCSEYSSGESSYTPLPSPMGRLTSLTRDKADLLQLRSALPAPFHLCLAEIEFQESIGSGSFGKVYKGTYRGKLVAVKRYRAMAFGCKSETDMLCREVSILSRLAHPNVVAFVGTSLDDPSQFAIITEFVENGSLFRRENGERKNYRVMDPAFRLRISLDVARGMRYLHESAAKPVIHRDLNSHNILIHADGRSVVADFGESRFVCQREDENLTKQPGNLRWMAPEVFSQSGKYDRKVDVFSFALVIWEIHTAELPFSHLKPAAAAAEMTYKRGRPTLPNQPTAQFPAHILSLIPQAWHPESSSRPDFVEIVALLEPHVESTHTDISAPSTVSQLTSQWEQLSVAPPPASKFPPILSALHGIAATGTVEELRQRIDNNGYVINKS

SEQ ID NO: 13573 - protein, 842 aa, Caenorhabditis elegans
MRTFSDELKKKISEGYSVVRSRLSDDVRSRSNLGWVDVQIAAFEKSLEDFKQHMCPENAELKSTQLLSLFHIICAGHSDSQPEKLQFLIDNLPKESSITLISSQSANGFTPLHIAIYRGDVAILKALIATKLVDLDQSGRHLLPALHLAAMIGDSEMLTILLNSGANIHVTDFVHFTALHCATYFGQENAVRTLISASANLNLGGAVNDRPIHLAAAKGLTSITKLLLEAKADPLLADDEGNQALHYAAKSGSLVILNMLIKQVRGTNDRICARNLYGDTALHLSCYSGRLDIVKSILDSSPTNIVNMENVFSETPLHAACTGGKSIELVSFLMKYPGVDPNYQGQDGHTALHSACYHGHLRIVQYLLENGADQSLASRAFEGGALRQQAGPGTNRPSKVASAIMALNRSDTPSSNASYNSTVSLDDQQTPVIWAYERGHDAIVALLKHYAARTVEGDVCSEYSSGESSYTPLPSPMGRLTSLTRDKADLLQLRSALPAPFHLCLAEIEFQESIGSGSFGKVYKGTYRGKLVAVKRYRAMAFGCKSETDMLCREVSILSRLAHPNVVAFVGTSLDDPSQFAIITEFVENGSLFRRENGERKNYRVMDPAFRLRISLDVARGMRYLHESAAKPVIHRDLNSHNILIHADGRSVVADFGESRFVCQREDENLTKQPGNLRWMAPEVFSQSGKYDRKVDVFSFALVIWEIHTAELPFSHLKPAAAAAEMTYKRGRPTLPNQPTAQFPAHILSLIPQAWHPESSSRPDFVEIVALLEPHVESTHTDISAPSTVSQLTSQWEQLSVAPPPASKFPPILSALHGIAATGTVEELRQRIDNNGYVINKS

SEQ ID NO: 13574 - protein, 848 aa, Caenorhabditis elegans
MVAATGNASKPSLNSFYADGLGQLRNGLFSCFQPVFGYFGTKTTVEIEKSEDELWEIPFDAISELEWLGSGSQGAVFRGQLENRTVAVKKVNQLKETEIKHLRHLRHQNIIEFLGVCSKSPCYCIVMEYCSKGQLCTVLKSRNTITRELFAQWVKEIADGMHYLHQNKVIHRDLKSPNILISAEDSIKICDFGTSHMQKKMDSTMMSFCGTVSWMAPEMIKKQPCNEKVDVYSFGVVLWEMLTRETPYANIAQMAIIFGVGTNILSLPMPEEAPKGLVLLIKQCLSQKGRNRPSFSHIRQHWEIFKPELFEMTEEEWQLAWDSYREFAKCIQYPSTVTRDHGGPKSAFAMEEEIQRKRHEQLNHIKDIRNMYEMKLKRTNKMYDKLQGCFTELKLKESELAEWEKDLTEREQWHNQNSPKAVAAPRAQLRGYPNEGYDDMSSDEDVQPCRGSPYRCSNTSSSSGVQSSPFSRQSSSRSSAGQQTRRSEGANPPKILRNDAIRHSGSYWETLGGARGSPARDSGFSQDSGMWSAGAGSCTAINGGGQQVCYSQTLYRNGDGRWSDGRIASRRRVSTSVNKSTAVPGQPVFFTRDSPSRVPHARSSSKLNRSSYPSRNAPHQLEDGCCCAHARAPRAKSIAVPMTSSSRARSPTPYDNDFENAESFVDPESPKNLKNLEKIVNLPESTSYDEALCNSDVTMNPIYTSPITTYSNPCHVELVDEENANDVDLTSSMDSRRSRSDDADVESSEEDEGNGNNILNTSMESEDLRYRIDTSQSTMMSSLERSLEIGATRSDGLSDNEMRVQAVKMSIKTHRRTGSNPQALIHQCIDEYTTSATDDSDDAGAVRI

SEQ ID NO: 13575 - protein, 855 aa, Caenorhabditis elegans
MVAATGNASKPSLNSFYADGLGQLRNGLFSCFQPVFGYFGTKTTVEIEKSEDELWEIPFDAISELEWLGSGSQGAVFRGQLENRTVAVKKVNQLKETEIKHLRHLRHQNIIEFLGVCSKSPCYCIVMEYCSKGQLCTVLKSRNTITRELFAQWVKEIADGMHYLHQNKVIHRDLKSPNILISAEDSIKICDFGTSHMQKKMDSTMMSFCGTVSWMAPEMIKKQPCNEKVDVYSFGVVLWEMLTRETPYANIAQMAIIFGVGTNILSLPMPEEAPKGLVLLIKQCLSQKGRNRPSFSHIRQHWEIFKPELFEMTEEEWQLAWDSYREFAKCIQYPSTVTRDHGGPKSAFAMEEEIQRKRHEQLNHIKDIRNMYEMKLKRTNKMYDKLQGCFTELKLKESELAEWEKDLTEREQWHNQNSPKAVAAPRAQLRGYPNEGYDDMSSDEDVQPCRGSPYRCSNTSSSSGVQSSPFSRQSSSRSSAGQQTRRSEGANPPKILRNDAIRHSGSYWETLGGARGSPARDSGFSQDSGMWSAGAGSCTAINGGGQQVCYSQTLYRNGDGRWSDGRIASRRRVSTSVNKSTAVPGQPVFFTRDSPSRVPHGVISCSSPRSSSKLNRSSYPSRNAPHQLEDGCCCAHARAPRAKSIAVPMTSSSRARSPTPYDNDFENAESFVDPESPKNLKNLEKIVNLPESTSYDEALCNSDVTMNPIYTSPITTYSNPCHVELVDEENANDVDLTSSMDSRRSRSDDADVESSEEDEGNGNNILNTSMESEDLRYRIDTSQSTMMSSLERSLEIGATRSDGLSDNEMRVQAVKMSIKTHRRTGSNPQALIHQCIDEYTTSATDDSDDAGAVRI

SEQ ID NO: 13576 - protein, 449 aa, Caenorhabditis elegans
MEDVFGWVREGNAFQVRVWLDDHEHDLNVGDDHAFSLLHWAAKGGHVAIAEMLLSRGARVNSTNMGDDTSLHLAAAHGHRQIVVKLLSRKADVNATNEHGMTPLHYACFWGYEQIAEDLISCGAAVNVCNKKGMTPLDVCQPMCKNTILEIAQEHGQSPNDRVPFKDTTWKGTKSRTRDATLSRYTGVDVSSLNLITKIAESHSGELWRGKWQGNDIVARILNVQEVTARISRDFQTEFPALRIFAHPNICAVLAAANQPPNLVIISQYMPFGSLYNVLHEQSSVVIDHGQAVRFALDIARGMSYLHSLDPMLLRFYLSSKHVVVDEELTAKLSMADTKFSFQEVGKAYSPAWMSPEALSRAPEDLNIRAADMWSFAILLWELNTREVPFSDLPPMECGMKIALEGLRVHIPPGIARNMNRLMNICMNEDPGRRPNFDQIIPILERMIL

SEQ ID NO: 13577 - protein, 466 aa, Caenorhabditis elegans
MSLSTHYHAHKPNVPIIMEDVFGWVREGNAFQVRVWLDDHEHDLNVGDDHAFSLLHWAAKGGHVAIAEMLLSRGARVNSTNMGDDTSLHLAAAHGHRQIVVKLLSRKADVNATNEHGMTPLHYACFWGYEQIAEDLISCGAAVNVCNKKGMTPLDVCQPMCKNTILEIAQEHGQSPNDRVPFKDTTWKGTKSRTRDATLSRYTGVDVSSLNLITKIAESHSGELWRGKWQGNDIVARILNVQEVTARISRDFQTEFPALRIFAHPNICAVLAAANQPPNLVIISQYMPFGSLYNVLHEQSSVVIDHGQAVRFALDIARGMSYLHSLDPMLLRFYLSSKHVVVDEELTAKLSMADTKFSFQEVGKAYSPAWMSPEALSRAPEDLNIRAADMWSFAILLWELNTREVPFSDLPPMECGMKIALEGLRVHIPPGIARNMNRLMNICMNEDPGRRPNFDQIIPILERMIL

SEQ ID NO: 13578 - protein, 533 aa, Caenorhabditis elegans
MGCLFSKERRSGGSDMGVSERIDVSRFQTPQQQTVFHVNNGGNEGTISQLNGTSDGMMGNGRGGGGGGGAQERETLVALYPYDSRADGDLSFQKGDAMYLLDHSNCDWWYVRHQRTGQTGYVPRNFVAKQQTIESEEWYAGKIPRNRAERLVLSSHLPKGTFLIREREADTREFALTIRDTDDQRNGGTVKHYKIKRLDHDQGYFITTRRTFRSLQELVRYYSDVPDGLCCQLTFPAPRLAPTRPDLSHDTQQNWEIPRNQLHLKRKLGDGNFGEVWYGKWRGIVEVAIKTMKPGTMSPEAFLQEAQIMKQCDHPNLVKLYAVCTREEPFYIITEYMINGSLLQYLRTDGSTLGIQALVDMAAQIANGMMYLEERKLVHRDLAARNVLVGDKISGVPVVKVADFGLARKLMEEDIYEARTGAKFPIKWTAPEAATCGNFTVKSDVWSYGILLYEIMTKGQVPYPGMHNREVVEQVELGYRMPMPRGCPEQIYEEVLLKCWDKTPDRRPTFDTLYHFFDDYFVSTQPNYAPPSA

SEQ ID NO: 13579 - protein, 539 aa, Caenorhabditis elegans
MGCLFSKERRSGGSDMGVSERIDVSRFQTPQQQTVFHVNNGGNEGTISQLNGTSDGMMGNGRGGGGGGGAQERETLVALYPYDSRADGDLSFQKGDAMYLLDHSNCDWWYVRHQRTGQTGYVPRNFVAKQQTIESEEWYAGKIPRNRAERLVLSSHLPKGTFLIREREADTREFALTIRDTDDQRNGGTVKHYKIKRLDHDQGYFITTRRTFRSLQELVRYYSDVPDGLCCQLTFPAPRLAPTRPDLSHDTQQNWEIPRNQLHLKRKLGDGNFGEVWYGKWRGIVEVAIKTMKPGTMSPEAFLQEAQIMKQCDHPNLVKLYAVCTREEPFYIITEYMINGSLLQYLRTDGSTLGIQALVDMAAQIANGMMYLEERKLVHRDLAARNVLVGDKISGVPVVKVADFGLARKLMEEDIYEARTGAKFPIKWTAPEAATCGNFTVKSDVWSYGILLYEIMTKGQVPYPGMHNREVVEQVELGYRMPMPRGCPEQIYEEVLLKCWDKTPDRRPTFDTLYHFFDDYFVSTQPNYAPPILYTNIYI

SEQ ID NO: 13580 - protein, 328 aa, Caenorhabditis elegans
MSRNHEENKRKTKNKEYKCMKMSTPTSNESTSSSSNNSDQRVLFPDIQRDDIQVGDHIGVGTFGAVFSGNWTLPDGSQRTIALKKVFVLEKEAEILSKIRHKNIIQFYGICKATGNDFFIVTEYAEKGSLYDFIHSEESQSFASSSGGNSFDVVVKWASQIASGIQYLHYDAVDTIIHRDLKSKNVVLDKNLVCKICDFGTSKDLTHSCTAPSWGGTAAWMSPEMILQSEGLTTATDVWSYGVVLWEILSKEVPYKDYSEFRIFTMITQSGITLAIPPSCPAPLKQLMSNCWKMTPKDRANMRQIQGELNRLAGNQKVRVSKLSLSSV

SEQ ID NO: 13581 - protein, 1224 aa, Caenorhabditis elegans
MGHSHSTGKEINDNELFTCEDPVFDQPVASPKSEISSKLAEEIERSKSPLILEVSPRTPDSVQMFRPTFDTFRPPNSDSSTFRGSQSREDLVACSSMNSVNNVHDMNTVSSSSSSSAPLFVALYDFHGVGEEQLSLRKGDQVRILGYNKNNEWCEARLYSTRKNDASNQRRLGEIGWVPSNFIAPYNSLDKYTWYHGKISRSDSEAILGSGITGSFLVRESETSIGQYTISVRHDGRVFHYRINVDNTEKMFITQEVKFRTLGELVHHHSVHADGLICLLMYPASKKDKGRGLFSLSPNAPDEWELDRSEIIMHNKLGGGQYGDVYEGYWKRHDCTIAVKALKEDAMPLHEFLAEAAIMKDLHHKNLVRLLGVCTHEAPFYIITEFMCNGNLLEYLRRTDKSLLPPIILVQMASQIASGMSYLEARHFIHRDLAARNCLVSEHNIVKIADFGLARFMKEDTYTAHAGAKFPIKWTAPEGLAFNTFSSKSDVWAFGVLLWEIATYGMAPYPGVELSNVYGLLENGFRMDGPQGCPPSVYRLMLQCWNWSPSDRPRFRDIHFNLENLISSNSLNDEVQKQLKKNNDKKLESDKRRSNVRERSDSKSRHSSHHDRDRDRESLHSRNSNPEIPNRSFIRTDDSVSFFNPSTTSKVTSFRAQGPPFPPPPQQNTKPKLLKSVLNSNARHASEEFERNEQDDVVPLAEKNVRKAVTRLGGTMPKGQRIDAYLDSMRRVDSWKESTDADNEGAGSSSLSRTVSNDSLDTLPLPDSMNSSTYVKMHPASGENVFLRQIRSKLKKRSETPELDHIDSDTADETTKSEKSPFGSLNKSSIKYPIKNAPEFSENHSRVSPVPVPPSRNASVSVRPDSKAEDSSDETTKDVGMWGPKHAVTRKIEIVKNDSYPNVEGELKAKIRNLRHVPKEESNTSSQEDLPLDATDNTNDSIIVIPRDEKAKVRQLVTQKVSPLQHHRPFSLQCPNNSTSSAISHSEHADSSETSSLSGVYEERMKPELPRKRSNGDTKVVPVTWIINGEKEPNGMARTKSLRDITSKFEQLGTASTIESKIEEAVPYREHALEKKGTSKRFSMLEGSNELKHVVPPRKNRNQDESGSIDEEPVSKDMIVSLLKVIQKEFVNLFNLASSEITDEKLQQFVIMADNVQKLHSTCSVYAEQISPHSKFRFKELLSQLEIYNRQIKFSHNPRAKPVDDKLKMAFQDCFDQIMRLVDR

SEQ ID NO: 13582 - protein, 552 aa, Caenorhabditis elegans
NNEWCEARLYSTRKNDASNQRRLGEIGWVPSNFIAPYNSLDKYTWYHGKISRSDSEAILGSGITGSFLVRESETSIGQYTISVRHDGRVFHYRINVDNTEKMFITQEVKFRTLGELVHHHSVHADGLICLLMYPASKKDKGRGLFSLSPNAPDEWELDRSEIIMHNKLGGGQYGDVYEGYWKRHDCTIAVKALKEDAMPLHEFLAEAAIMKDLHHKNLVRLLGVCTHEAPFYIITEFMCNGNLLEYLRRTDKSLLPPIILVQMASQIASGMSYLEARHFIHRDLAARNCLVSEHNIVKIADFGLARFMKEDTYTAHAGAKFPIKWTAPEGLAFNTFSSKSDVWAFGVLLWEIATYGMAPYPGVELSNVYGLLENGFRMDGPQGCPPSVYRLMLQCWNWSPSDRPRFRDIHFNLENLISSNSLNDEVQKQLKKNNDKKLESDKRRSNVRERSDSKSRHSSHHDRDRDRESLHSRNSNPEIPNRSFIRTDDSVSFFNPSTTSKVTSFRAQGPPFPPPPQQNTKPKLLKSVLNSNARHASEEFERNEQDDVVPLA

SEQ ID NO: 13583 - protein, 1196 aa, Caenorhabditis elegans
MGHSHSTGKEINDNELFTCEDPVFDQPVASPKSEISSKLAEEIERSKSPLILEVSPRTPDSVQMFRPTFDTFRPPNSDSSTFRGSQSREDLVACSSMNSVNNVHDMNTVSSSSSSSAPLFVALYDFHGVGEEQLSLRKGDQVRILGYNKNNEWCEARLYSTRKNDASNQRRLGEIGWVPSNFIAPYNSLDKYTWYHGKISRSDSEAILGSGITGSFLVRESETSIGQYTISVRHDGRVFHYRINVDNTEKMFITQEVKFRTLGELVHHHSVHADGLICLLMYPASKKDKGRGLFSLSPNAPDEWELDRSEIIMHNKLGGGQYGDVYEGYWKRHDCTIAVKALKEDAMPLHEFLAEAAIMKDLHHKNLVRLLGVCTHEAPFYIITEFMCNGNLLEYLRRTDKSLLPPIILVQMASQIASGMSYLEARHFIHRDLAARNCLVSEHNIVKIADFGLARFMKEDTYTAHAGAKFPIKWTAPEGLAFNTFSSKSDVWAFGVLLWEIATYGMAPYPGVELSNVYGLLENGFRMDGPQGCPPSVYRLMLQCWNWSPSDRPRFRDIHFNLENLISSNSLNDEVQKQLKKNNDKKLESDKRRSNVRERSDSKSRHSSHHDRDRDRESLHSRNSNPEIPNRSFIRTDDSVSFFNPSTTSKVTSFRAQGPPFPPPPQQNTKPKLLKSVLNSNARHASEEFERNEQDDVVPLAEKNVRKAVTRLGGTMPKGQRIDAYLDSMRRVDSWKESTDADNEGAGSSSLSRTVSNDSLDTLPLPDSMNSSTYVKMHPASGENVFLRQIRSKLKKRSETPELDHIDSDTADETTKSEKSPFGSLNKSSIKYPIKNAPEFSENHSRVSPVPVPPSRNASVSVRPDSKAEDSSDETTKDVGMWGPKHAVTRKIEIVKNDSYPNVEGELKAKIRNLRHVPKEESNTSSQEDLPLDATDNTNDSIIVIPRDEKAKVRQLVTQKVSPLQHHRPFSLQCPNNSTSSAISHSEHADSSETSSLSGVYEERMKPELPRKRSNGDTKVVPVTWIINGEKEPNGMARTKSLRDITSKFEQLGTASTIESKIEEAVPYREHALEKKGTSKRFSMLEGSNELKHVVPPRKNRNQDESGSIDEEPVSKDMIVSLLKVIQKEFVNLFNLASSEITDEKLQQFVIELLSQLEIYNRQIKFSHNPRAKPVDDKLKMAFQDCFDQIMRLVDR

SEQ ID NO: 13584 - protein, 1209 aa, Caenorhabditis elegans
MIMNPCFRERSQKRTKKRAKNRAKSRSTMYLSKVGDSSLAMSRSLPSVALPMHYLHHKLAESICFITATIDSLEDLVACSSMNSVNNVHDMNTVSSSSSSSAPLFVALYDFHGVGEEQLSLRKGDQVRILGYNKNNEWCEARLYSTRKNDASNQRRLGEIGWVPSNFIAPYNSLDKYTWYHGKISRSDSEAILGSGITGSFLVRESETSIGQYTISVRHDGRVFHYRINVDNTEKMFITQEVKFRTLGELVHHHSVHADGLICLLMYPASKKDKGRGLFSLSPNAPDEWELDRSEIIMHNKLGGGQYGDVYEGYWKRHDCTIAVKALKEDAMPLHEFLAEAAIMKDLHHKNLVRLLGVCTHEAPFYIITEFMCNGNLLEYLRRTDKSLLPPIILVQMASQIASGMSYLEARHFIHRDLAARNCLVSEHNIVKIADFGLARFMKEDTYTAHAGAKFPIKWTAPEGLAFNTFSSKSDVWAFGVLLWEIATYGMAPYPGVELSNVYGLLENGFRMDGPQGCPPSVYRLMLQCWNWSPSDRPRFRDIHFNLENLISSNSLNDEVQKQLKKNNDKKLESDKRRSNVRERSDSKSRHSSHHDRDRDRESLHSRNSNPEIPNRSFIRTDDSVSFFNPSTTSKVTSFRAQGPPFPPPPQQNTKPKLLKSVLNSNARHASEEFERNEQDDVVPLAEKNVRKAVTRLGGTMPKGQRIDAYLDSMRRVDSWKESTDADNEGAGSSSLSRTVSNDSLDTLPLPDSMNSSTYVKMHPASGENVFLRQIRSKLKKRSETPELDHIDSDTADETTKSEKSPFGSLNKSSIKYPIKNAPEFSENHSRVSPVPVPPSRNASVSVRPDSKAEDSSDETTKDVGMWGPKHAVTRKIEIVKNDSYPNVEGELKAKIRNLRHVPKEESNTSSQEDLPLDATDNTNDSIIVIPRDEKAKVRQLVTQKVSPLQHHRPFSLQCPNNSTSSAISHSEHADSSETSSLSGVYEERMKPELPRKRSNGDTKVVPVTWIINGEKEPNGMARTKSLRDITSKFEQLGTASTIESKIEEAVPYREHALEKKGTSKRFSMLEGSNELKHVVPPRKNRNQDESGSIDEEPVSKDMIVSLLKVIQKEFVNLFNLASSEITDEKLQQFVIMADNVQKLHSTCSVYAEQISPHSKFRFKELLSQLEIYNRQIKFSHNPRAKPVDDKLKMAFQDCFDQIMRLVDR

SEQ ID NO: 13585 - protein, 1214 aa, Caenorhabditis elegans
MGHSHSTGKEINDNELFTCEDPVFDQPVASPKSEISSKLAEEIERSKSPLILEMFRPTFDTFRPPNSDSSTFRGSQSREDLVACSSMNSVNNVHDMNTVSSSSSSSAPLFVALYDFHGVGEEQLSLRKGDQVRILGYNKNNEWCEARLYSTRKNDASNQRRLGEIGWVPSNFIAPYNSLDKYTWYHGKISRSDSEAILGSGITGSFLVRESETSIGQYTISVRHDGRVFHYRINVDNTEKMFITQEVKFRTLGELVHHHSVHADGLICLLMYPASKKDKGRGLFSLSPNAPDEWELDRSEIIMHNKLGGGQYGDVYEGYWKRHDCTIAVKALKEDAMPLHEFLAEAAIMKDLHHKNLVRLLGVCTHEAPFYIITEFMCNGNLLEYLRRTDKSLLPPIILVQMASQIASGMSYLEARHFIHRDLAARNCLVSEHNIVKIADFGLARFMKEDTYTAHAGAKFPIKWTAPEGLAFNTFSSKSDVWAFGVLLWEIATYGMAPYPGVELSNVYGLLENGFRMDGPQGCPPSVYRLMLQCWNWSPSDRPRFRDIHFNLENLISSNSLNDEVQKQLKKNNDKKLESDKRRSNVRERSDSKSRHSSHHDRDRDRESLHSRNSNPEIPNRSFIRTDDSVSFFNPSTTSKVTSFRAQGPPFPPPPQQNTKPKLLKSVLNSNARHASEEFERNEQDDVVPLAEKNVRKAVTRLGGTMPKGQRIDAYLDSMRRVDSWKESTDADNEGAGSSSLSRTVSNDSLDTLPLPDSMNSSTYVKMHPASGENVFLRQIRSKLKKRSETPELDHIDSDTADETTKSEKSPFGSLNKSSIKYPIKNAPEFSENHSRVSPVPVPPSRNASVSVRPDSKAEDSSDETTKDVGMWGPKHAVTRKIEIVKNDSYPNVEGELKAKIRNLRHVPKEESNTSSQEDLPLDATDNTNDSIIVIPRDEKAKVRQLVTQKVSPLQHHRPFSLQCPNNSTSSAISHSEHADSSETSSLSGVYEERMKPELPRKRSNGDTKVVPVTWIINGEKEPNGMARTKSLRDITSKFEQLGTASTIESKIEEAVPYREHALEKKGTSKRFSMLEGSNELKHVVPPRKNRNQDESGSIDEEPVSKDMIVSLLKVIQKEFVNLFNLASSEITDEKLQQFVIMADNVQKLHSTCSVYAEQISPHSKFRFKELLSQLEIYNRQIKFSHNPRAKPVDDKLKMAFQDCFDQIMRLVDR

SEQ ID NO: 13586 - protein, 669 aa, Drosophila mauritiana
QELMERLNSQDQQEDSSLVERFKEQPHYQNQTQILQQQRQLARVHHGNDLTDSLGSQPGSQCGTLTRQPKILLRAHLPNQQRTSVEVISGVRLCDALMKALKLRQLTPDMCEVSTTHSGRHIIPWHTDIGTLHVEEIFVRLLDKFPIRTHIKHQIIRKTFFSLVFCEGCRRLLFTGFYCSQCNFRFHQRCANRVPMLCQPFPMDSYYQLLLAENPDNGVGFPGRGTAVRFNMSSRSRSRRCSSSGSSSSSKLPSSSSGNHRQGRPPRISQDDRSNSAPNVCINNIRSVTSEVQRSLIMQARPPLPHPCTDHSNSTQASPTSTLKHNRPRARSADESNKNLLLRDAKSSEENWNILAEEILIGPRIGSGSFGTVYRAHWHGPVAVKTLNVKTPSPAQLQAFKNEVAMLKKTRHCNILLFMGCVSKPSLAIVTQWCEGSSLYKHVHVSETKFKLNTLIDIGRQVAQGMDYLHAKNIIHRDLKSNNIFLHEDLSVKIGDFGLATAKTRWSGEKQANQPTGSILWMAPEVIRMQELNPYSFQSDVYAFGIVMYELLAECLPYGHISNKDQILFMVGRGLLRPDMSQVRSDAPQALKRLAEDCIKYTPKDRPLFRPLLNMLENMLRTLPKIHRSASEPNLTQSQLQNDEFLYLPSPKTPVNFNNFQFFGSAGNI

SEQ ID NO: 13587 - protein, 977 aa, Drosophila melanogaster
MQPFSDSLSKSRDDLVTAASRQQQQLHGRRRHHGSSPNLSLDQTDNLRRSMACLQDEFGHLGIAATDLPFKSSDLDSPPRLQHHNNYAEITDSSAENTCQQRWPPHVGGAGAAFGHPDKPIGWMYGLLGCMKPVLSFIGKTGVIEVKSQRSEDWQIPFESITELEWLGSGAQGAVFSGRLKNETVAVKKVKELKETDIKHLRKLDHENIIKFKGVCTQSPVFCIIMEFCPYGPLQNILKEEQVMLPSRLVSWSKQIALGMQYLHSHKIIHRDLKSPNILISTNEVVKISDFGTSREWNEISTKMSFAGTVAWMAPEVIRNEPCSEKVDIWSYGVVLWEMLTCEIPYKDVDSSAIIWGVGNNSLKLLVPSTCPEGFKLLVKLCWKSKPRNRPSFRQILSHLDIAGPELLRKTEKQYFETQKSWKEEVRSHLKEITQNGTNIHKYEQDLIKRRTAEWRHAQDIRMVYEDKLQKTNQLFFELSECMSQLQEKEKEIAERERKLPGSGYKPNRRFGNTIRKMQHYRRRLNPAPAAIQQQSTTPDPETTPESPVKCMLYAQLDSNCQPKSYLANIIPSSGLGAPMPNKNKKVFRHRRNASGSFGAPPKYSPTRDRRYQSEPENRKVQLVERQTQTDAMDVSETDISPSAEAPRSQPIDVPVPNHRQLPLQLQRVQKIAQAQARARSGSTSSAAGAVNPACPSNGNSLSTSELTYQDACSSPDQLIDDVMNSNERLDMTECCSDNENLERLGRKVIEFINENRLSIQSNTNSVSNADNGNGGASPLELRESGNSPCLSRCSSTHSKRRKHPLGDNPNGSSIGNANGESHEQDSWSDEEGETTDYKYALRRRSIGRQPIARGMRPRRSYKAPLSQKIAIHKRNVVIVSDEEENTSEYSHSPSSQHSTLESNTDIADMKKTQATSTSSNSYSEPEDDSSDSSDEEQGNRPTEAKAEGPALPMGAVRSSDIISIPTFEADGAVNMV

SEQ ID NO: 13588 - protein, 675 aa, Drosophila melanogaster
ELEAKEQELMERLNSQDQQEDSSLVERFKEQPHYQNQTQILQQQRQLARVHHGNDLTDSLGSQPGSQCGTLTRQPKILLRAHLPNQQRTSVEVISGVRLCDALMKALKLRQLTPDMCEVSTTHSGRHIIPWHTDIGTLHVEEIFVRLLDKFPIRTHIKHQIIRKTFFSLVFCEGCRRLLFTGFYCSQCNFRFHQRCANRVPMLCQPFPMDSYYQLLLAENPDNGVGFPGRGTAVRFNMSSRSRSRRCSSSGSSSSSKLPSSSSGNHRQGRPPRISQDDRSNSAPNVCINNIRSVTSEVQRSLIMQARPPLPHPCTDHSNSTQASPTSTLKHNRPRARSADESNKNLLLRDAKSSEENWNILAEEILIGPRIGSGSFGTVYRAHWHGPVAVKTLNVKTPSPAQLQAFKNEVAMLKKTRHCNILLFMGCVSKPSLAIVTQWCEGSSLYKHVHVSETKFKLNTLIDIGRQVAQGMDYLHAKNIIHRDLKSNNIFLHEDLSVKIGDFGLATAKTRWSGEKQANQPTGSILWMAPEVIRMQELNPYSFQSDVYAFGIVMYELLAECLPYGHISNKDQILFMVGRGLLRPDMSQVRSDAPQALKRLAEDCIKYTPKDRPLFRPLLNMLENMLRTLPKIHRSASEPNLTQSQLQNDEFLYLPSPKTPVNFNNFQFFGSAGNI

SEQ ID NO: 13589 - protein, 782 aa, Drosophila melanogaster
MSSESSTEGDSDLYDPLAEELHNVQLVKHVTRENIDALNAKFANLQEPPAMYLIGESSKAELNTTWVLGNPTPTSKLFIKYPTYVYVCISRLWFLPTEYQELTSKLHELEAKEQELMERLNSQDQQEDSSLVERFKEQPHYQNQTQILQQQRQLARVHHGNDLTDSLGSQPGSQCGTLTRQPKILLRAHLPNQQRTSVEVISGVRLCDALMKALKLRQLTPDMCEVSTTHSGRHIIPWHTDIGTLHVEEIFVRLLDKFPIRTHIKHQIIRKTFFSLVFCEGCRRLLFTGFYCSQCNFRFHQRCANRVPMLCQPFPMDSYYQLLLAENPDNGVGFPGRGTAVRFNMSSRSRSRRCSSSGSSSSSKPPSSSSGNHRQGRPPRISQDDRSNSAPNVCINNIRSVTSEVQRSLIMQARPPLPHPCTDHSNSTQASPTSTLKHNRPRARSADESNKNLLLRDAKSSEENWNILAEEILIGPRIGSGSFGTVYRAHWHGPVAVKTLNVKTPSPAQLQAFKNEVAMLKKTRHCNILLFMGCVSKPSLAIVTQWCEGSSLYKHVHVSETKFKLNTLIDIGRQVAQGMDYLHAKNIIHRDLKSNNIFLHEDLSVKIGDFGLATAKTRWSGEKQANQPTGSILWMAPEVIRMQELNPYSFQSDVYAFGIVMYELLAECLPYGHISNKDQILFMVGRGLLRPDMSQVRSDAPQALKRLAEDCIKYTPKDRPLFRPLLNMLENMLRTLPKIHRSASEPNLTQSQLQNDEFLYLPSPKTPVNFNNFQFFGSAGNI

SEQ ID NO: 13590 - protein, 739 aa, Drosophila melanogaster
MSSESSTEGDSDLYDPLAEELHNVQLVKHVTRENIDALNAKFANLQEPPAMYLIEYQELTSKLHELEAKEQELMERLNSQDQQEDSSLVERFKEQPHYQNQTQILQQQRQLARVHHGNDLTDSLGSQPGSQCGTLTRQPKILLRAHLPNQQRTSVEVISGVRLCDALMKALKLRQLTPDMCEVSTTHSGRHIIPWHTDIGTLHVEEIFVRLLDKFPIRTHIKHQIIRKTFFSLVFCEGCRRLLFTGFYCSQCNFRFHQRCANRVPMLCQPFPMDSYYQLLLAENPDNGVGFPGRGTAVRFNMSSRSRSRRCSSSGSSSSSKPPSSSSGNHRQGRPPRISQDDRSNSAPNVCINNIRSVTSEVQRSLIMQARPPLPHPCTDHSNSTQASPTSTLKHNRPRARSADESNKNLLLRDAKSSEENWNILAEEILIGPRIGSGSFGTVYRAHWHGPVAVKTLNVKTPSPAQLQAFKNEVAMLKKTRHCNILLFMGCVSKPSLAIVTQWCEGSSLYKHVHVSETKFKLNTLIDIGRQVAQGMDYLHAKNIIHRDLKSNNIFLHEDLSVKIGDFGLATAKTRWSGEKQANQPTGSILWMAPEVIRMQELNPYSFQSDVYAFGIVMYELLAECLPYGHISNKDQILFMVGRGLLRPDMSQVRSDAPQALKRLAEDCIKYTPKDRPLFRPLLNMLENMLRTLPKIHRSASEPNLTQSQLQNDEFLYLPSPKTPVNFNNFQFFGSAGNI

SEQ ID NO: 13591 - protein, 675 aa, Drosophila melanogaster
ELEAKEQELMERLNSQDQQEDSSLVERFKEQPHYQNQTQILQQQRQLARVHHGNDLTDSLGSQPGSQCGTLTRQPKILLRAHLPNQQRTSVEVISGVRLCDALMKALKLRQLTPDMCEVSTTHSGRHIIPWHTDIGTLHVEEIFVRLLDKFPIRTHIKHQIIRKTFFSLVFCEGCRRLLFTGFYCSQCNFRFHQRCANRVPMLCQPFPMDSYYQLLLAENPDNGVGFPGRGTAVRFNMSSRSRSRRCSSSGSSSSSKPPSSSTGNHRQGRPPRISQDDRSNSAPNVCINNIRSVTSEVQRSLIMQARPPLPHPCTDHSNSTQASPTSTLKHNRPRARSADESNKNLLLRDAKSSEENWNILAEEILIGPRIGSGSFGTVYRAHWHGPVAVKTLNVKTPSPAQLQAFKNEVAMLKKTRHCNILLFMGCVSKPSLAIVTQWCEGSSLYKHVHVSETKFKLNTLIDIGRQVAQGMDYLHAKNIIHRDLKSNNIFLHEDLSVKIGDFGLATAKTRWSGEKQANQPTGSILWMAPEVIRMQELNPYSFQSDVYAFGIVMYELLAECLPYGHISNKDQILFMVGRGLLRPDMSQVRSDAPQALKRLAEDCIKYTPKDRPLFRPLLNMLENMLRTLPKIHRSASEPNLTQSQLQNDEFLYLPSPKTPVNFNNFQFFGSAGNI

SEQ ID NO: 13592 - protein, 675 aa, Drosophila melanogaster
ELEAKEQELMERLNSQDQQEDSSLVERFKEQPHYQNQTQILQQQRQLARVHHGNDLTDSLGSQPGSQCGTLTRQPKILLRAHLPNQQRTSVEVISGVRLCDALMKALKLRQLTPDMCEVSTTHSGRHIIPWHTDIGTLHVEEIFVRLLDKFPIRTHIKHQIIRKTFFSLVFCEGCRRLLFTGFYCSQCNFRFHQRCANRVPMLCQPFPMDSYYQLLLAENPDNGVGFPGRGTAVRFNMSSRSRSRRCSSSGSSSSSKPPSSSSGNHRQGRPPRISQDDRSNSAPNVCINNIRSVTSEVQRSLIMQARPPLPHPCTDHSNSTQASPTSTLKHNRPRARSADESNKNLLLRDAKSSEENWNILAEEILIGPRIGSGSFGTVYRAHWHGPVAVKTLNVKTPSPTQLQAFKNEVAMLKKTRHCNILLFMGCVSKPSLAIVTQWCEGSSLYKHVHVSETKFKLNTLIDIGRQVAQGMDYLHAKNIIHRDLKSNNIFLHEDLSVKIGDFGLATAKTRWSGEKQANQPTGSILWMAPEVIRMQELNPYSFQSDVYAFGIVMYELLAECLPYGHISNKDQILFMVGRGLLRPDMSQVRSDAPQALKRLAEDCIKYTPKDRPLFRPLLNMLENMLRTLPKIHRSASEPNLTQSQLQNDEFLYLPSPKTPVNFNNFQFFGSAGNI

SEQ ID NO: 13593 - protein, 675 aa, Drosophila melanogaster
ELEAKEQELMERLNSQDQQEDSSLVERFKEQPHYQNQTQILQQQRQLARVHHGNDLTDSLGSQPGSQCGTLTRQPKILLRAHLPNQQRTSVEVISGVRLCDALMKALKLRQLTPDMCEVSTTHSGRHIIPWHTDIGTLHVEEIFVRLLDKFPIRTHIKHQIIRKTFFSLVFCEGCRRLLFTGFYCSQCNFRFHQRCANRVPMLCQPFPMDSYYQLLLAENPDNGVGFPGRGTAVRFNMSSRSRSRRCSSSGSSSSSKPPSSSSGNHRQGRPPRISQDDRSNSAPNVCINNIRSVTSEVQRSLIMQARPPLPHPCTDHSNSTQASPTSTLKHNRPRARSADESNKNLLLRDAKSSEENWNILAEEILIGPRIGSGSFGTVYRAHWHGPVAVKTLNVKTPSPAQLQAFKNEVAMLKKTRHCNILLFMGCVSKPSLAIVTQWCEGSSLYKHVHVSETKFKLNTLIDIGRQVAQGMDYLHAKNIIHRDLKSNNIFLHEDLSVKIGDFGLATAKTRWSGEKQANQPTGSILWMAPEVIRMQELNPYSFQSDVYAFGIVMYELLAECLPYGHISNKDQILFMVGRGLLRPDMSQVRSDAPQALKRLAEDCIKYTPKDRPLFRPLLNMLENMLRTLPKIHRSASEPNLTQSQLQNDEFLYLPSPKTPVNFNNFQFFGSAGNI

SEQ ID NO: 13594 - protein, 675 aa, Drosophila melanogaster
ELEAKEQELMERLNSQDQQEDSSLVERFKEQPHYQNQTQILQQQRQLARVHHGNDLTDSLGSQPGSQCGTLTRQPKILLRAHLPNQQRTSVEVISGVRLCDALMKALKLRQLTPDMCEVSTTHSGRHIIPWHTDIGTLHVEEIFVRLLDKFPIRTHIKHQIIRKTFFSLVFCEGCRRLLFTGFYCSQCNFRFHQRCANRVPMLCQPFPMDSYYQLLLAENPDNGVGFPGRGTAVRFNMSSRSRSRRCSSSGSSSSSKPPSSSSGNHRQGRPPRISQDDRSNSAPNVCINNIRSVTREVQRSLIMQARPPLPHPCTDHSNSTQASPTSTLKHNRPRARSADESNKNLLLRDAKSSEENWNILAEEILIGPRIGSGSFGTVYRAHWHGPVAVKTLNVKTPSPAQLQAFKNEVAMLKKTRHCNILLFMGCVSKPSLAIVTQWCEGSSLYKHVHVSETKFKLNTLIDIGRQVAQGMDYLHAKNIIHRDLKSNNIFLHEDLSVKIGDFGLATAKTRWSGEKQANQPTGSILWMAPEVIRMQELNPYSFQSDVYAFGIVMYELLAECLPYGHISNKDQILFMVGRGLLRPDMSQVRSDAPQALKRLAEDCIKYTPKDRPLFRPLLNMLENMLRTLPKIHRSASEPNLTQSQLQNDEFLYLPSPKTPVNFNNFQFFGSAGNI

SEQ ID NO: 13595 - protein, 781 aa, Drosophila melanogaster
MSSESSPKRQDLYDPLAEELHNVQLVKHVTRENIDALNAKFANLQEPPAMYLIGESSKAELNTTWVLGNPTPTSKLFIKYPTYVYVCISRLWFLPTEYQELTSKLHELEAKEQELMERLNSQDQQEDSSLVERFKEQPHYQNQTQILQQQRQLARVHHGTDLTDSLGSQPGSQCGTLTRQPKILLRAHLPNQQRTSVEVISGVRLCDALMKALKLRQLTPDMCEVSTTHSGRHIIPWHTDIGTLHVEEIFVRLLDKFPIRTHIKHQIIRKTFFSLVFCEGCRRLLFTGFYCSQCNFRFHQRCANRVPMLCQPFPMDSYYQLLLAENPDNGVGFPGRGTAVRFNMSSRSRSRRCSSSGSSSSSKPPSSSSGNHRQGRPPRISQDDRSNSAPNVCINNIRSVTSEVQRSLIMQARPPLPHPCTDHSNSTQASPTSTLKHNRPRARSADESNKNLLLRDAKSSEENWNILAEEILIGPRIGSGSFGTVYRAHWHGPVAVKTLNVKTPSPAQLQAFKNEVAMLKKTRHCNILLFMGCVSKPSLAIVTQWCEGSSLYKHVHVSETKFKLNTLIDIGRQVAQGMDYLHAKNIIHRDLKSNNIFLHEDLSVKIGDFGLATAKTRWSGEKQANQPTGSILWMAPEVIRMQELNPYSFQSDVYAFGIVMYELLAECLPYGHISNKDQILFMVGRGLLRPDMSQVRSDARRHSKRLAEDCIKYTPKDRPLFRPLLNMLENMLRTLPKIHRSASEPNLTQSQLQNDEFLYLPSPKTPVNFNNFQFFGSAGNI

SEQ ID NO: 13596 - protein, 781 aa, Drosophila melanogaster
MSSESSPKRQDLYDPLAEELHNVQLVKHVTRENIDALNAKFANLQEPPAMYLIGESSKAELNTTWVLGNPTPTSKLFIKYPTYVYVCISRLWFLPTEYQELTSKLHELEAKEQELMERLNSQDQQEDSSLVERFKEQPHYQNQTQILQQQRQLARVHHGTDLTDSLGSQPGSQCGTLTRQPKILLRAHLPNQQRTSVEVISGVRLCDALMKALKLRQLTPDMCEVSTTHSGRHIIPWHTDIGTLHVEEIFVRLLDKFPIRTHIKHQIIRKTFFSLVFCEGCRRLLFTGFYCSQCNFRFHQRCANRVPMLCQPFPMDSYYQLLLAENPDNGVGFPGRGTAVRFNMSSRSRSRRCSSSGSSSSSKPPSSSSGNHRQGRPPRISQDDRSNSAPNVCINNIRSVTSEVQRSLIMQARPPLPHPCTDHSNSTQASPTSTLKHNRPRARSADESNKNLLLRDAKSSEENWNILAEEILIGPRIGSGSFGTVYRAHWHGPVPVKTLNVKTPSPAQLQAFKNEVAMLKKTRHCNILLFMGCVSKPSLAIVTQWCEGSSLYKHVHVSETKFKLNTLIDIGRQVAQGMDYLHAKNIIHRDLKSNNIFLHEDLSVKIGDFGLATAKTRWSGEKQANQPTGSILWMAPEVIRMQELNPYSFQSDVYAFGIVMYELLAECLPYGHISNKDQILFMVGRGLLRPDMSQVRSDARRHSKRLAEDCIKYTPKDRPLFRPLLNMLENMLRTLPKIHRSASEPNLTQSQLQNDEFLYLPSPKTPVNFNNFQFFGSAGNI

SEQ ID NO: 13597 - protein, 666 aa, Drosophila melanogaster
MERLNSQDQQEDSSLVERFKEQPHYQNQTQILQQQRQLARVHHGTDLTDSLGSQPGSQCGTLTRQPKILLRAHLPNQQRTSVEVISGVRLCDALMKALKLRQLTPDMCEVSTTHSGRHIIPWHTDIGTLHVEEIFVRLLDKFPIRTHIKHQIIRKTFFSLVFCEGCRRLLFTGFYCSQCNFRFHQRCANRVPMLCQPFPMDSYYQLLLAENPDNGVGFPGRGTAVRFNMSSRSRSRRCSSSGSSSSSKPPSSSSGNHRQGRPPRISQDDRSNSAPNVCINNIRSVTSEVQRSLIMQARPPLPHPCTDHSNSTQASPTSTLKHNRPRARSADESNKNLLLRDAKSSEENWNILAEEILIGPRIGSGSFGTVYRAHWHGPVPVKTLNVKTPSPAQLQAFKNEVAMLKKTRHCNILLFMGCVSKPSLAIVTQWCEGSSLYKHVHVSETKFKLNTLIDIGRQVAQGMDYLHAKNIIHRDLKSNNIFLHEDLSVKIGDFGLATAKTRWSGEKQANQPTGSILWMAPEVIRMQELNPYSFQSDVYAFGIVMYELLAECLPYGHISNKDQILFMVGRGLLRPDMSQVRSDARRHSKRLAEDCIKYTPKDRPLFRPLLNMLENMLRTLPKIHRSASEPNLTQSQLQNDEFLYLPSPKTPVNFNNFQFFGSAGNI

SEQ ID NO: 13598 - protein, 669 aa, Drosophila simulans
QELMERLNSQDQQEDSSLVERFKEQPHYQNQTQILQQQRQLARVHHGNDLTDSLGSQPGSQCGTLTRQPKILLRAHLPNQQRTSVEVISGVRLCDALMKALKLRQLTPDMCEVSTTHSGRHIIPWHTDIGTLHVEEIFVRLLDKFPIRTHIKHQIIRKTFFSLVFCEGCRRLLFTGFYCSQCNFRFHQRCANRVPMLCQPFPMDSYYQLLLAENPDNGVGFPGRGTAVRFNMSSRSRSRRCSSSGSSSSSKPPSSSSGNHRQGRPPRISQDDRSNSAPNVCINNIRSVTSEVQRSLIMQARPPLPHPCTDHSNSTQASPTSTLKHNRPRARSADESNKNLLLRDAKSSEENWNILAEEILIGPRIGSGSFGTVYRAHWHGPVAVKTLNVKTPSPAQLQAFKNEVAMLKKTRHCNILLFMGCVSKPSLAIVTQWCEGSSLYKHVHVSETKFKLNTLIDIGRQVAQGMDYLHAKNIIHRDLKSNNIFLHEDLSVKIGDFGLATAKTRWSGEKQANQPTGSILWMAPEVIRMQELNPYSFQSDVYAFGIVMYELLAECLPYGHISNKDQILFMVGRGLLRPDMSQVRSDAPQALKRLAEDCIKYTPKDRPLFRPLLNMLENMLRTLPKIHRSASEPNLTQSQLQNDEFLYLPSPKTPVNFNNFQFFGSAGNI

SEQ ID NO: 13599 - protein, 971 aa, Drosophila simulans
MSSNNNAPASAPDTGSTNANDPISGSLSVDSNLVIIQDMIDLSANHLEGLRTQCAISSTLTQQEIRCLESKLVRYFSELLLAKMRLNERIPANGLVPHATGNELRQWLRVVGLSQGTLTACLARLTTLEQSLRLSDEEIRQLLADSPSQREEEELRRLTRAMQNLRKCMESLESGTAASNNDPEQWHWDSWDRPIHIHRGSVGNIGLGHNSTASPRTHHRQHGVKGKNSALANSTNFTSSKSGRQSPSATEELNSTQGSQLTLTLTPSPPNSPFTPSSGLSSSLNGTPQRSRGTPPPARKHQTLLSQSQSHVQVDGEQLARNRLPTDPSPDSHSSTSSDIFVDANTNASSGGSSSNVLMVPCSPGVGHVGMGHAIKHRFTKALGFMATCTLCQKQVFHRWMKCTDCKYICHKSCAPHVPPSCGLPREYVDEFRHIKEQGGYASLPHVHGATKGSPLVKKSTLGKPLHQQHGDSSSPSSSCTSSTPSSPALFQQRERELDQAGSSSSANLLPTPSLGKHQPSQFNFPNVTVTSSGGSGGVSLISNEPVAEQFPTAPVTANGGLDSLVSSSNGHMSSLIGSQTSNASSAATLTGSLVNSTTTTSTSSFFPRKLSTAGVDKRTPFTSEYTDTHKSNDSDKTVSLSGSASTDSDRTPVRVDSTEDGDSGQWRQNSISLKEWDIPYGDLLLLERIGQGRFGTVHRALWHGDVAVKLLNEDYLQDEHMLETFRSEVANFKNTRHENLVLFMGACMNPPYLAIVTSLCKGNTLYTYIHQRREKFAMNRTLLIAQQIAQGMGYLHAREIIHKDLRTKNIFIENGKVIITDFGLFSSTKLLYCDMGLGVPHNWLCYLAPELIRALQPEKPRGECLEFTPYSDVYSFGTVWYELICGEFTFKDQPAESIIWQVGRGMKQSLANLQSGRDVKDLLMLCWTYEKEHRPQFARLLSLLEHLPKKRLARSPSHPVNLSRSAESVF

SEQ ID NO: 13600 - protein, 308 aa, Drosophila sp.
LGLCHILSRPCPASLPQTAAPDVGFGPQLRDKYEIPRSEIQVVRKVGRRNFGEVFYGKWRNSIDVAVKTLRAGTMSTAAFLQEAAIMKKFRHNRLVALYAVCSQEEPIYIVQEYMSKGSLLDFLREGDDRYLHFEDLIYMHTQVTTGMKYLESKQVIHRDLTTRNVLIGENNVAKICDFGLARVIADDEYRPKQGSRFPVKWTAPEAIIYGKFSIKSDVWSYGILLTELFTYGQVPYPGLHSREVIENIERGFRMPKPTNHYLPDNIYQLLLQCWDAVPEKRPTFEFLNHYLESFSVTSEVPYREVQD

SEQ ID NO: 13601 - protein, 1003 aa, Drosophila virilis
MSSSAAAQLTAPPVSNSNSSSSNNNTTTTASESNLIIIQDMIDLSANHLEGLRTQCATSATLTQQEIRCLESKLVRYFSELLLTKTRLNERIPANGLLPHHQATGNELRQWLRVVGLSPESLNACLARLTTLEQTLQLSDEELKQLLAHNSSTQLDEELRRLTKAMHNLRKCMETLDSSGAVASNVDPEQWHWDSWDRPHPHHMHRGSIGNIGLGLSSASPRAHHRQHQHQHANSKPKIVNNSASSSRSEQQPLTGSQLTLTLTPSPPNSPFTPASGTASASGTPQRSRSTTTAAGTPPPAKKHQTLLMHNSSASETALAEQPPRPPRSRLPTDPSPDSHSSASSSDIFVDGGSINSSNVLLVPPSPGVAHVGMGHTIKHRFSKWFGFMATCKLCQKQMMSHWFKCTDCKYICHKSCAPHVPPSCGLPPEYVHEFRQTQVGGRWDPAQHSSSKASPVPRKSTLGKPQLQQPQLQHGDSSSPSSSCTSSTPSSPALFQQQQLQLATPSACQPKPAPAAVAAAATQQGQQSQFNFPNVTITSINACNSNASAAQTLISNEPQAHMATTESTLTNGNNNSSSNNGSSANNNSSSSSSCSNGHLHSLTGSQVSTHSATSQVSNVSGSSSATYTSSLVNSGSFFPRKLSNAGVDKRVPFTSEYTDTHKSNDSDKTVSLSGSASTDSDRTPVRLDSTEDGDSGQWRQNSISLKEWDIPYGDLHLLERIGQGRFGTVHRALWHGDVAVKLLNEDYLQDEHMLESFRNEVANFKKTRHENLVLFMGACMNPPYLAIVTALCKGNTLYTYIHQRREKFAMNRTLLIAQQIAQGMGYLHARDIIHKDLRTKNIFIENGKVIITDFGLFSSTKLLYCDMGLGVPQNWLCYLAPELIRALQPCKPPGECLEFTSYSDVYSFGTVWYELICGEFTFKDQPAESIIWQVGRGMKQSLANLQSGRDVKDLLMLCWTYEKEHRPDFARLLSLLEHLPKKRLARSPSHPVNLSRSAESVF

SEQ ID NO: 13602 - protein, 511 aa, Strongylocentrotus purpuratus
MGCVNSTSKSKGDNYRPGQGQTTSPSHNQQSFPDHNTSRTSQFDRAPPGMIIPPANKPKAVAHPYTALYDYDARSEDDLDFKKGDILDVTKTEGDWWLARSQKTGKEGYIPSNYVAPVDSMKREDWYFGKCARKDAEKKLIAIGINKGQFIVRDGEANPGTFSLSVRDNDPQKGDHVKHYRIRKMDGGNGFFITQRSVFPTLSELVRHYQSNIDGLCCILSRACPKENPNTIGLGKDRWEIPRESLRMTRRLGHGQFGEVWQGVWNGNTPVAVKTLKEGTMSPAAFLAEANVMKKVRHERLVQLYAVCSDREPIYIVTELMSNGSLLDYLKDGTGKDTKLTTHVDMGAQIASGMAYLESMNFVHRDLAARNVLVGEGNVVKVADFGLARLIEEDEYMARVGAKFPIKWTAPEAALHGRFTIKSDVWSFGILMTEIVTFGRIPYPGMTNREVLDQVDLGYRMPKMHHCPDSLYEIMLKCWHKDPQQRPTFEFLHFCLDDYFVSTEPNYKEAD

SEQ ID NO: 13603 - protein, 542 aa, Halocynthia roretzi
MPNIFNKFGEELSLDERSAKTFLSRRLQANTASHFEEIQQGNLERECYEELCSFEEAREVFETNIQDLNEFWAKYTGVNNNKSEDNVVGMIIGIMLGVLGFIILIIAVYVVWKKRKGQLDREVMHGSQPYAPFPIHVLYPQNQNGRKDNHYERPIIDAYDSDLALGISECYLERERLQIGELITSGNFGEVHEGQLRMRDGTWLEVAVKNLITLDDKDDIEKFLREGVMMRGLDHKNVLALIGVCVEDDDMRRSPLIVLPFMKHGDLRTFLRDGNNVLTVMHLLTFCSDVAHGMQYLAEKKFVHRDLAARNCMVNESWCVKVADFGLSRDLFDRDYYTSSVKTQLPLKWMPPESIKFGRYDEKSDVWAYGIVCWEIMTRGAIPYPTVQAVAILQYLSDGNRMEKPECSPSKLYSVMKSCWEDEPQDRPTFKELVQGTNEVLKDARRVSGRRTKGSNASSSTHGGSTYHNSDLERSSVRRDRSNGRGREEKRQPKPKPRTKSRKDYDGGRSRESRRSKVSEVAEYLDPDDGSSSGDVGNSVRV

SEQ ID NO: 13604 - protein, 353 aa, Lethenteron reissneri
EVCSGRLKLPGKREMAVAIKTLKAGYTERQRRDFLSEASIMGQFDHPNVIHLEGVVTKSRPVMIITEFMENGSLDSFLRQNDGQFTVIQLVGMLRGIAAGMKYLADMSYVHRDLAARNILVNSNLVCKVSDFGLSRFLEDDTSDPTYTSAMGGKIPIRWTAPEAIQYRKFTTASDVWSYGIVMWEVMSYGERPYWDMSNQDVINAIEQDYRLPAPMDCPAALHQLMLDCWQKERNERPKFGQIVNTLDKLIRTPASLKTVACVTPGISQPLLDRSVPDFASFGSVDEWLDAIKMGRYKDNFASAGFTSFDLVSRMTAEDILRIGVTLAGHQKKILNSIQTMRVQMNQIQTVQV

SEQ ID NO: 13605 - protein, 349 aa, Eptatretus burgeri
EVCRGRLRIPNEPEVAVAIKTLKAGYSEKQRRDFLSEASIMGQFEHPNIIRLEGVVTKSKPVMIITEHMENGSLDSFLKKNDGQFTVIQLLGMLRGIAAGMKYLSDMNYIHRDLAARNVLVNGNLMCKVSDFGLSRGLEDDPQAVYTTHGGKIPIRWTAPEAIAFRKFTSASDVWSFGIVMWEVMSYGERPYWDINNQDVIQSIEEGYRLPAPMDCPIALHQLMLDCWQKDRAERPSFMELLAYLDKLLQTPAALKAPPGTPQGPTGSLLERKPPEYTMFCSVSEWLEAIKMGRYKENFTNAGYVAWTSVAQMTLEDLQRVGVTLAGHQKRILTSIQALRAQLANVVQA

SEQ ID NO: 13606 - protein, 542 aa, Torpedo californica
MGCVQCKDKETTKTTVEERAGSIPQNPGYRYGPDPSPQHYPNFSVTGIPNYNSFHGTGGQTLTVFGGVHTSSHTGTLRTRGGGSLTVGVTLFVALYDYDARTDDDLSFHKGEKFQILNNTEGDWWEARSLQTGGTGYIPSNYVAPVDSIQAEEWYFGKLGRKEAERQLLSVCNPRGTFLIRESETTKGAYSLSIRDWDDTKGDHVKHYKIRKLDSGGYYITTRAQFETLQQLVQHYAERAAGLCCRLVVPCHKGMPRLADLSVKTKDVWEISRESLQLIKRLGNGQFGEVWMGTWNGTTKVAVKTLKPGTMSPESFLEEAQIMKKLRHDKLVQLYAVVSEEPIYIVTEYMSKGSLLDFLKDGEGRVLKLPNLVDMAAQVAAGMAYIERMNYIHRDLRSANILVGDNLVCKIADFGLARLIEDNEYTARQGAKFPIKWTAPEAALYGRFTIKSDVWSFGILLTELVTKGRVPYPGMNNREVLEQVERGYRMASPQDCPSSLHELMIQCWKKDPEERPTFEYLQAFLEDYFTATEPQYQPGDNL

SEQ ID NO: 13607 - protein, 539 aa, Torpedo californica
MGCVHCKEKGTAKSQADDGDGLFNQNTNPRYGPDPTNQAQTAVFTRIPDFNSFHENTSTALNPFGGPVGYSAGSLTSRVGGVTGGVTMFIALYNYDARTEDDLTFRKGEKFHIINSSEGDWWEARSLTTGSTGYIPSNYVAPVDSIQAEEWYFGKMGRKDTERMLLCPGNPRGTFLIRESETTKGAYSLSIRDWDEVKGDHVKHYKIRKLDNGGYYITTRAQFETVPQLVHHYTERAAGLCCRLVVPCHKGMPKLADLSVKTKDVWEIPRESLQLIKKLGNGQFGEVWMGTWNGTTKVAVKTLKPGTMSPEAFLEEAQIMKRLRHDKLVQLYAVVSEEPIYIVTEFMTQGSLLDFLKDGDGRILKLPQLVDMAAQIAAGMAYIERMNYIHRDLRAANILVGENLVCKIADFGLARLIEDNEYTARQGAKFPIKWTAPEAALYGKFTIKSDVWSFGILLTELATKGRVPYPGMNNREVLEQVERGYRMPCPNACPVSLHELMIQCWKKDPEERHTFEYLQSFLEDYFTATEPQYQPGENL

SEQ ID NO: 13608 - protein, 371 aa, Danio rerio
MTGIVHSATGQRVSPDLTEHTTNSQRECQYEMSSLSASFVQIPFDDIRFYENCGGGSFGSVYRAHWVPQDKEVAVKKLLKIDAEAEILSVLSHKNIIQFYGAILEAPNDGIVTEYASRGSLYEYLSSADSEEMDMDQVMTWAMEIAKGMHYLHAEAPLKVIHRDLKSRNVVLTADNVLKICDFGASKMVSHTTHMSLVGTFPWMAPEVIQSLPVSETCDTYSYGVVLWEMLTREVPFKGFEGLQVAWLVVEKHERPTIPSSCPASFADLMRRCWNAEPKERPQFKQILGTLETMKNDSRLPDQCNSFLHNKAEWRCEIEETLERLKQLERELSCKEQELEERERRLTEWENRLMERSRSCTPVSLASEELI

SEQ ID NO: 13609 - protein, 643 aa, Danio rerio
MEQLQGAWRTVTNGLLTKDSVFESSYVSPVIKSPAPCQSRSSDDSKTSRTIRVFLPNQQRTVVNVRPGMTLHSCLIKALKVRGLQPECCAVFSLHPGQRSKKSRMEWSTDSTSLIGEELLVEVLDHVPLTTHNFVRKTFLKLAFCDICQKFLLNGFRCQRCGYKFHEHCSTKVPTMCVDWTNIRQLLLFPTPGESGAPSLPSLTSRRMRESLTRIPSSSVHRYSNPHVSNYTSPYPPSGAALTQRLRSTSTPNVTMLSTTVPVDSSLIELDTSPSSWCQQFSLKRRDAIRVHSSAGSSPNQSPTGWNQASAHIPASALNPQEKVKIRPREKRDSSYYWEIEANEVVLLSRIGSGSFGTVHKGKWHGDVAVKVLKVTNPTPEQFQAFRNEVAVLRKTRHVNILLFMGYMTKGNLAIVTQWCEGSSLYKHLHVLETNFQMFQLIDIARQTAQGMDYLYMRKHIHRDMKSNNIFLHEGLTVKIGDFGLATVKARWSGSQQVEQPSGSILWMAPEVIRMQDNNPYSFQSDVYSYGIVLFELMTGELPYSQIGNRDQIIFMVGRGYLSPDLSKLYKRCPKAMKRLVADCIKKSKDERPLFPQILSSIELLQHSLPKINRSASEPSLHRASQSEDISSCTLTSMKLPVF

SEQ ID NO: 13610 - protein, 307 aa, Danio rerio
ITGDRTNEVVLLSRIGSGSFGTVHKGKWHGDVAVKVLKVTNPTPEQFQAFRNEVAVLRKTRHVNILLFMGYMTKGNLAIVTQWCEGSSLYKHLHVLETNFQMFQLIDIARQTAQGMDYLYMRKHIHRDMKSNNIFLHEGLTVKIGDFGLATVKARWSGSQQVEQPSGSILWMAPEVIRMQDNNPYSFQSDVYSYGIVLFELMTGELPYSQIGNRDQIIFMVGRGYLSPDLSKLYKRCPKAMKRLVADCIKKSKDERPLFPQILSSIELLQHSLPKINRSASEPSLHRASQSEDISSCTLTSMKLPVF

SEQ ID NO: 13611 - protein, 616 aa, Danio rerio
MYPRVILKETLYKKSQQKRRTSPCNYKERTFILNTQDLAYFEQRPGKKPTQKGCIELSHIKCVEIVRSDVPIPCDYKYPFQIIHDSYYLYVFAPDNDCRLKWVKALKEAIQNNSLFLKYHPDFWGEGKWRCCQQTEKLATGCSEYYPNGAKPLPPTPDPSRRSSEPEERIVVALRNFIPKEHTDLPLQKDEEYFIVDCSEPNWWTVKDKDGNVGSVPCIYVTEKLSNNIEKFEWYNKDINRTEAEDLLMQENKDGGFMVRNSKHAGVYTVSIFTRVSGSNGEKCPQVKHYQIKVQSEGEKVLYYLAEKYLFPTIPELIRYHQHNPAGLITRLRHCVSRNVPNSARIKELSSDKWEIHPDEVKLSVELGSGQFGLVWKGSWQDREVAVKTVREGFMSEEEFKEEAQVMMKLSHNRLVQLYGVVTQRSPIYLVFEFMENGCLTEFLRAKKGKLSQKALLEMCLDVSEGMAYLESSNFIHRDLAARNCLVSENSVVKIADFGMTRFVLDDQYTSSHGSKFPVRWSSPEVIKFGKYSSKSDVWSFGVFMWEVYSEGRTPYDNRSNSEVVETLNAGHRLLKPRLCPQSVYELMQWSWKEKPEDRPSFALLLHELACLDQEP

SEQ ID NO: 13612 - protein, 525 aa, Danio rerio
MGCACCKQRKASKAVSNQNSCDAFNGTQASEPSRYIPDPTFNSGIPNFNDFSNPLTPPTSIINPARPPGLTGGGVTLFIALYEYDARTEDDLSFQKGEKFHIINNTEGDWWEARSLDTGKSGYIPSNYVAPVDSIQAEEWYFGKMGRKDAERQLLAQNNPRGTFLIRESETTKGAYSLSIRDWDDAKGDHVKHYKIRKLDNGGYYITTRTQFDTVQQLVEHYTGSNDGLCCYLTKACPNTTPQTMGLGRDAWEIARDTLKLNRKLGQGCFGDVWMGMWNGTTKVAVKTLKPGTMSPEAFLDEAQIMKRLRHDKLVQLYAVVSEEPIYIITEFMSQGSLLDFLKDGDGRNLKLPQLVDMAAQIAAGMAYIERMNYIHRDLRAANILVGDGLVCKIADFGLARLIEDNEYTARQGAKFPIKWTAPEAALYGKFTIKSDVWSFGILLTELITKGRVPYPGMNNREVLEQVERGYRMPCPQGSPASLHELMLQCWRKDPDERHTFEYLQSFLEDYFTATEPQYQPGENL

SEQ ID NO: 13613 - protein, 976 aa, Danio rerio
MATLWIYPSLLFFLFPSLTPSQALRNYPENEVTLLDTMSALGDLGWEAYPAEGWEEISVMDERNTPMRSYQVCNVMEASQNNWFRTRHIAREGAQRVYIEIKFTLRDCNSLPGVPGTCKETFNMYYYESNNPNLWFIKESQYIKIDTIAADESFTQTDVGDRVMRLNTEIRDINNLSKKGFYLAFQDVGACIALVSLRVFYKKCPLAVLNLAQFPDTVTGGDSALVEVRGSCVNDSEEFEAPRMYCSGDGGWLVPIGRCVCKPGFEENKDYCQACRPGTYKASSMDAYCSKCPPHSFSHQEKASECSCEKGFYRADMDPRSMACTRPPSAPENPISTLNDTSVTLEWSPPRDSGGRGDVTYSIHCRKCAGDGRICSPCSNNVHFVPRQFGLSIPKVLITDLLSNTNYTFSVEAVNGVSDLSPTPKQLVTVNITTSQTVNVILKERKSKDSITLAWQGPDRPNGVIVEYEVIYYEKNQRDQNYTVLKTKGHMMTVEGLKPGTTYVFRVRARTDGGYGNYGGEIELETSHEDMLAIGGPNQSTILAVSIAGGIVLLTFLVACFVVSGRHCGYIKAKQDPDEEKMQFQNGRVKLPGSRTYIHPHTYEDPNQAVRDFAKEIDASTIRIERVIGAGEFGEVCSGRLKLPSKREIYVAIKSLKAGYSEKQRRDFLSEASIMGQFDHPNIIRLEGVVTRCKPVMIITEYMENGSLDTFLKKHDGQFTVIQLVGMMRGIASGMKYLSDMSYVHRDLAARNILVNSNLVCKVSDFGLSRVLEDDPEAAYTTRGGKIPIRWTAPEAIAYRKFTSASDVWSYGIVMWEVISYGERPYWEMSNQDVIKAIDEGYRLPAPMDCPVVLHQLMLDCWEKSRSERPKFGQIVNTLDKLIRNPNSLKELANSSVWEDPTTPEFSVSTVDEWLDAINMGQYKDNFANAGYVSLDSILYISMCELSKMDVTLVGHQKKILSAVQSLHAQGTHVQV

SEQ ID NO: 13614 - protein, 981 aa, Danio rerio
MALFRIYSFLAPFHILVLCQALRNYPDNEVTLLDSMSAPGDLGWEAYPSEGWEEISVMDERNIPMRTYQVCNVMEANQNNWLRTGLIQREGAQRVYVEIKFTLRDCNSLPGVPGTCKETFNVYYHESNNAVAAPLRHIRESQYIKIDTIAADESFTQTDVGDRVMKLNTEVRDISGLSKRGLYLAFQDLGACIALVSVRVFYKRCPLAVLNLARFPDTVTGGDSALVEVRGTCVEDAEELEGPRMFCSADGGWLVPIGRCVCRPGFEEVDGHCQPCRSGFYKASAMDAYCVKCPPHSYSHQDKASECVCERGFYRAESDPRSMACTRPPSAPGNPISMVNETAVTLEWSPPRDSGGRGDVSYSVHCRKCSGETGASERCVPCGSGAHFNPRQFGLTHPRVLVTELQPHTNYTFSVEALNGVSDLSPSPRQLVSVNVTTSQTVSVILKERKGTDSVTLAWQGPEPVDGTVVEYEVTYYEKNQQDQNYTVLKTKSNSMTVDGLKPGTTYIFRVRARTDGGYGNYKGEIELETSHEDMLAVGDPNQQTILAISVAGGAVLLVLLVACFIVSGRRCGYIKAKQDPEEEKMQFQHGRVKLPETRTYIHPHTYEDPNQAVRDFAKEIEVSNIRIERVIGAGEFGEVCSGRLRLPSKREIQVAIKSLKAGYSEHQRRDFLSEASIMGQFDHPNIIRLEGVVTRCKPVMIVTEYMENGSLDTFLKKHDGQFTVIQLLGMLRGIAAGMQYLSEMNYVHRDLAARNILVNRNLVCKVSDFGLSRVLEDDPEAAYTTRGGKIPIRWTAPEAITYRKFTSASDVWSYGIVMWEVISYGERPYWEMSNQDVIKAVDEGYRLPAPMDCPVVLHQLMLDCWEKNRSDRPKFGQIVNTLDRLIRNPSSLKQLANSAVWEDPVTPEAAVNTVEDWLDLIKMGQYKEHFSSAGYVTLDSVLYVSSSELDKMGVELAGHQKKILSSIQCLQAHHGTQVQV

SEQ ID NO: 13615 - protein, 515 aa, Danio rerio
ECVSRQHYRKHKGVKLTNLGPGNYSVRVRATSLAGNGSWTEPIAFSVHQLEQSSYDPVIFIAILPALLLIAGLVVFGYTWMNKNRNNDRLGNGVLYASVNPEYFSAAEMYVPDEWEVEREKITMCRELGQGSFGMVYEGIAKGVVKDEPETRVAIKTVNESASLHERIEFLNEASVMKEFNCHHVVRLLGVVSQGQPTLVIMELMTRGDLKSYLRSLRSVENTSSLPLPPLKKMIQMAGEIADGMAYLNANKFVHRDLAARNCMVAEDFIVKIGDFGMTRDIYETDYYRKGGKGLLPVRWMSPESLKDGVFTTMSDVWSFGVVLWEIATLAEQPYQGMSNEQVLRFVMEGGLLDKPDNCPDMLFELMRMCWQYNPKMRPSFLEIISSIKEDLEAGFKETSFFYSEENKPPDTEELDMENVGTMENVPLEPSSSLQPLAPSISPPQQCTAAAQSCSSPSSPPSSPSSTDKHPLPTSAANGPSMVLRGPFEEGQPYAHMNGGRKNERALPLPQSSAC

SEQ ID NO: 13616 - protein, 439 aa, Danio rerio
GYTWMNKNRNNDRLGNGVLYASVNPEYFSAAEMYVPDEWEVEREKITMCRELGQGSFGMVYEGIAKGVVKDEPETRVAIKTVNESASLHERIEFLNEASVMKEFNCHHVVRLLGVVSQGQPTLVIMELMTRGDLKSYLRSLRSVENTSSLPLPPLKKMIQMAGEIADGMAYLNANKFVHRDLAARNCMVAEDFIVKIGDFGMTRDIYETDYYRKGGKGLLPVRWMSPESLKDGVFTTMSDVWSFGVVLWEIATLAEQPYQGMSNEQVLRFVMEGGLLDKPDNCPDMLFELMRMCWQYNPKMRPSFLEIISSIKEDLEAGFKETSFFYSEENKPPDTEELDMENVGTMENVPLEPSSSLQPLAPSISPPQQCTAAAQSCSSPSSPPSSPSSTDKHPLPTSAANGPSMVLRGPFEEGQPYAHMNGGRKNERALPLPQSSAC

SEQ ID NO: 13617 - protein, 490 aa, Danio rerio
KSNSMTVDGLKPGTTYIFRVRARTDGGYGNYKGEIELETSHEDMLAVGDPNQQTILAISVAGGAVLLVLLVACFIVSGRRCGYIKAKQDPEEEKMQFQHGRVKLPETRTYIHPHTYEDPNQAVRDFAKEIEVSNIRIERVIGAGEFGEVCSGRLRLPSKREIQVAIKSLKAGYSEHQRRDFLSEASIMGQFDHPNIIRLEGVVTRCKPVMIVTEYMENGSLDTFLKKHDGQFTVIQLLGMLRGIAAGMQYLSEMNYVHRDLAARNILVNGNLVCKVSDFGLSRVLEDDPEAAYTTRGGKIPIRWTAPEAITYRKFTSASDVWSYGIVMWEVISYGERPYWEMSNQDVIKAVDEGYRLPAPMDCPVVLHQLMLDCWEKNRSDRPKFGQIVNTLDRLIRNPSSLKQLANSAVWEDPVTPEAAVNTVEDWLDLIKMGQYKEHFSSAGYVTLDSVLYVSSSELDKMGVELAGHQKKILSSIQCLQAHHGTQVQV

SEQ ID NO: 13618 - protein, 669 aa, Carassius auratus
LHNAIFTPRPPDRRRRDLFGVANATSLHTLLAGNWNLTEGNFSDNEPPRQEFSFIEKKVKERSADIGGLHPFTVYRIDVHACNKEVRHCSVAAFIFSRTRAAERADDIPGPVTWEHLEGSVFLKWPEPQKPNGLILLYEIQYRLGTEPDKHECVSRQHYREHKGVKLSNLGAGNYSARVRATSLSGNGSWTDRIPFYVNQVEQSNYEHYLSYIIIPIFLICVLGAGMAFFCFNKRRNSDRLGNGVLYASVNPEYFSAAEMYVPDEWEVEREKITMCRELGQGSFGMVYEGIAKGVVKDEPETKVAIKTVNESASLHERIEFLNEASVMKEFNCHHVVRLLGVVSQGQPTLVIMELMTRGDLKSYLRSLRSAENTSSLPLPPLKKMIQMAGEIADGMAYLHANKFVHRDLAARNCMVAEDFTVKIGDFGMTRDIYETDYYRKGGKGLLPVRWMSPESLKDGVFTTMSDVWSFGVVLWEIATLAEQPYQGMSNEQVLRFVMEGGLLDKPDNCPDMLFELMRMCWQYNPKMRPSFLEIISSIKDDLEAGFKEMSFFYSEENKPPDTEELDMENVGAMENVPLEPPSSLQPLAPSLASPQQCAPASQGSSSPAGPSSPPPPPAPRTSTRSPASAANGPSMVLRASFDERQPYAHMNGGRKNERALPLPQSSAC

SEQ ID NO: 13619 - protein, 537 aa, Xiphophorus hellerii
MGCVQCKDKEATKLTDDRDASISQGAGYRYGADPTPQHYPSFGVTAIPNYNNFHAPVGQGVTVFGGVNTSSHTGTLRTRGGTGVTLFVALYDYEARTEDDLSFRKGERFQILNSTEGDWWDARSLTTGGSGYIPSNYVAPVDSIQAEDWYFGKLGRKDAERQLLSTGNPRGTYLIRESETTKGAFSLSIRDWDDEKGDHVKHYKIRKLDSGGYYITTRAQFDTLQQLVQHYSDRAAGLCCRLVVPCHKGMPRLADLSVKTKDVWEIPRESLQLIKRLGNGQFGEVWMGTWNGTTKVAVKTLKPGTMSPESFLEEAQIMKKLRHDKLVQLYAVVSEEPIYIVTEYMSKGSLLDFLKDGEGRALKLPNLVDMAAQVAAGMAYIERMNYIHRDLRSANILVGDNLVCKIADFGLARLIEDNEYTARQGAKFPIKWTAPEAALYGRFTIKSDVWSFGILLTELVTKGRVPYPGMNNREVLEQVERGYRMPCPQDCPASLHELMLQCWKKDPEERPTFEYLQAFLEDYFTATEPQYQPGDNL

SEQ ID NO: 13620 - protein, 544 aa, Xiphophorus hellerii
MGCVRSKEAKGPALKYQPDNSNVVPVSAHLGHYGPEPTIMGQSPAMKTQNNSHPTALSPFGGVSSPMTPFGGASTSFTSVTVNNPFPAVITGGVTFFVALYDYEARTSDDLSFRKGDRFQIINNTEGDWWEARSINTGENGYIPSNYVAPADSIQSEEWYFGKLSRKDTERLLLLPGNERGTFLIRESETTKGAYSLSLRDWDETKGDNCKHYKIRKLDNGGYYITTRTQFMSLQMLVKHYTEHVDGLCYKLTTVCPQVKPQTQGIAKDAWEIPRESLRLDVRLGQGCFGEVWMGTWNGTTKVAIKTLKPGTMSPEAFLEEAQIMKKLRHDKLVPLYAVVSEEPIYIVTEFMGKGSLLDFLKEGDGKHLKLPQLVDMASQIADGMAFIERMNYIHRDLRAANILVADNLVCKIADFGLARLIEDNEYTARQGAKFPIKWTAPEAALYGRFTIKSDVWSFGILLTELVTKGRVPYPGMVNREVLEQVDRGYRMPCPQGCPESLHEMMRQCWKKEPDERPTFEYIQSFLEDYFTATEPQYQPGDNL

SEQ ID NO: 13621 - protein, 527 aa, Xiphophorus xiphidium
MGGSKSKPKDVAQRNRSLDSNISSGGGAGSLHHNSAQQSATPNRSTIVDTDPQLVTNNAGLVLFGGVDNNRITPTGVTAFVALYDYESRTETDLSFKKGERLQILNNTEGDWWLANSLTTGKSGYIPSNYVAPSDSIQAEEWFFAKITRRDSERMLLALENRRGTFVVRESETTKGAYCLSVLDCDNTRGLNVKHYKIRKLDSGGFYITSRTPFATLQQLVQSYGKHADGLCHTLTDVCPVLKPQTQGLSKDAWEIPRESLRLEVKMGQGCFGEVWRGTWNGTTQVAIKTLKPGTMSPEAFLQEAQVMKKLRHEKLVQLYAVVSEEPIYIVTEFMDQGSLLEFLKGQYSTMLRLPQLVDFASQIASGMAYVERMNYVHRDLRAANILVGDNLVCKVADFGLARLIEDNEYTARQGAKFPIKWTAPEAALYGRFTIKSDVWSFGILLVELATKGRVPYPGMVNREVLDQVERGYRMPCPSECPASLHELMLNCWRKEAEERPTFEYLQGFLEDYFTSTEPQYQPGDNL

SEQ ID NO: 13622 - protein, 635 aa, Seriola quinqueradiata
MEHLQGAWKTLSNGFGMKDSAFEGPCLSPTMVQGFPCQRRSSDDSKMPDSKTSSTIRVYLPNQQRTVVNVRPGMTLHNCLIKALKVRGLQPQCCAVFRLHPGQRSKKLRMDWNTDSTSLIGQELLVEVLDHVPLTTHNFVRKTYLKLAFCDICQKFLLNGFRCQTCGYKFHEHCSTKVPTMCVDWSNIRQLLLCPTPGESGAPSLPPLTSRRMRESLTRFPSSAHRYSTPHAFNYTTPYPPTGGGLSQRQRSTSTPNVHMVSTTLPVDSSVIEDAMRDHDSAGSSPSQSPTGWSQSKAPAPAQRERAPSFNTHEKNKIRPRDKRDSSYYWEIEASEVYLNSRIGSGSFGTVYKGKWHGDVAVKILKVTDPTPEQFQAFRNEVAVLRKTRHVNILLFMGYMTKDNLAIVTQWCEGSSLYKHIHVLETNFKMIQLIDIARQTAQGMDYLHAKNIIHRDMKSNNIFLHEGLTVKIGDFGLATVKARWSGSHQVEQPSGSILWMAPEVIRMQDNNPYSFQSDVYSYGIVLFELMTGELPYSQIANRDQIIFMVGRGYLSPDLSKLYKNCPKAMKRLVADCIKKSKDERPLFPQILSSIELLQHALPKINRSASEPSLHRASHTEDINACTLTSTRLPVF

SEQ ID NO: 13623 - protein, 285 aa, Seriola quinqueradiata
VYKGKWHGDVAVKILKVTDPTPEQFQAFRNEVAVLRKTRHVNILLFMGYMTKDNLAIVTQWCEGSSLYKHIHVLETNFKMIQLIDIARQTAQGMDYLHAKNIIHRDMKSNNIFLHEGLTVKIGDFGLATVKARWSGSHQVEQPSGSILWMAPEVIRMQDNNPYSFQSDVYSYGIVLFELMTGELPYSQIANRDQIIFMVGRGYLSPDLSKLYKNCPKAMKRLVADCIKKSKDERPLFPQILSSIELLQHALPKINRSASEPSLHRASHTEDINACTLTSTRLPVF

SEQ ID NO: 13624 - protein, 1418 aa, Paralichthys olivaceus
MRSRTERNRLTLFWGLMLGLSSLLRPATAEICGPSIDIGNDIREFSRLENCTVVEGYLQILLIGDKNNNNINLEDFRSLSFPKLTMITDYLLLFRVSGLDSLSALFPNLAVIRGRNLFYNYALVIFEMTSLKDIGLYNLRNITRGAIRIEKNPELCYLDSIDWSLIMDAEFNNYIAGNKQSKECSDVCPGIMENSPQCKKTMFNNNYNYRCWNSNHCQKECPEKCVRRACTADGECCHPQCLGSCTAPYSDTACAACMHYYHQGRCVADCPPGTYKFEGWRCISAELCSKVHLPEFDSFIIHSGECMPECPSGYTRTTPNSMNCTACDGLCDKVCEEKVIDSMDAAQSLKGCTVIKGNLHINIRRGHNMVAELESFTCLIQRVTGYVGSRHSHTLSSLASLRSLRYTDGEDLLDDMYASSAFDNQQLQYLWDWKQRNLTIKTGKLSFRANPKLCRSEIRNMWDKTGIQGRFDEGDFRYNGDRASCESTILNFKSNTTSSTRIKLTWQRYRPPDYRDLISFIVYYKEAPFQNITEFEGQDGCGSNSWNMVDVELRLDKDSDPGVLLSALKPWTQYAIFVKAIMLKVEDKHMPTAKSKVVYIRTSPSVPSMPQDVRAYSNSTTQLVVRWSPPIAPNGNQTYYLVRWQQQAEDRELYQHNYCSKELKIPIRIAAIGVGDQEEDTKPTKPDPEGGDKGPCCPCPKSVEDLEAEAADASYRKVFENFLHKSIFTPRPPDRRRRDLFGIAKSTHSRRNRLHTNSSNVPPHQAAGNSSNLADVEPADREFEFMEQAVTERELLISGLQPFTVYRIDIHACNRQVQRCSAAEFVFSRTKPAEKADDIPGQVTVEGHEDWVFLRWPGPPHPNGLILMYEIKFKLASETEKHECVSGQMYQAQRGVRLSNLSPGNYSVRVRATSLAGNGSWTHIVDLYVAERYENVLYAMIFIPIAIILFICLLVTMLVAFNKKRNSDRLGNGVLYALVNPEYFSAAEMDVPDEWEVVREKIVLSRELGQGSFGMVYEGLAKGVVKDEPETRVAIKTVNESASMRERIEFLNEASVMKEFNCHHVVRLLGVVSQGQPTLVIMELMTRGDLKSYLRSLRPKEQQWSSLSLPPLKKMLQMAGQIADGMAYLNANKFVHRDLAARNCMVAEDFIVKIGDFGMTRDIYETDYYRKGGKGLLPVRWMSPESLKDGVFTTNSDVWSFGVVLWEISTLAEQPYQGLSNEQVLRFVMEGGLLEKPQNCPDMLFELMRMCWQYNPKMRPSFVEIISSLKDELEVSFKEVSFFYSADNKPSEEQQVHLDKMDNIEDVPADQPSSTQPQQAQVPQQTPPSPSSEAPPAPSLSPSSPSSPCTSTAAMDKQASGQQAANGLSGPSLAAGSGLGTGAGGTMRPSLEELPPYAHMNGGRKNERAMPLPQSSAC

SEQ ID NO: 13625 - protein, 1363 aa, Cynops pyrrhogaster
MTPGAGRRSLTLRCGFTLLVCIVHLWPANGEICWPGYDIRNSVDELKRLENCTVIEGYLQILLISNAKPDDFRNIRFPKLTVITDYLLLFRVSGLESLSDLFPNLTVIRGRNLFYNYALVIFEMTNLKEIGLHSLQSIPRGGLRIEKNSDLCYLSTVDWTLILDAVYNNYIVGNKPPKECGDLCPGAMEAKPLCEKTSINYEYSRRCWSANHCQKVCPPECGKGACTDQKQCCHAECLGSCSMPDNDTACVACRHFFYEGRCLATCPPHTYMFEGWRCVSREFCARVPSSDTDYEPYVIHKGECMPECPSGFTRNGSQSMFCSPCEGPCPKICEEEKTIDSVTSAQNLQGCTVLKGNLLINIRKGNNIASELENFMGLIETVTGYVKIRHSHALVSLSFLKSLRRIMGEKQLDGNYSFYAVDNQNLQQLWDWNYHNLTIDEGKMYFAVNPKLCLSEITRMEEVTGTKGRQSTGDINPKNNGERASCKTYKLKFISNTTMKNRIKLTWEWYRPQDFRDLISFTVYYKEAPIQNVTEFDGQDACGSNSWNMVDVDLPQNKEINPGVLLQGLKPWTQYAIYVKAVTLTLMESNDIHGAKSEVIYIRTSAAVPSTPLDVLSASNSSTQLIVKWKPPSLPNGNLSYYIVRWQQQPQDSYLYLHNYCSKDKIPVRKYSNQSIDADENSESSKTDSGGTERGQCCACPKTEAEKQAEKEEAEYRKVFENFLHNSIFVPRPDRKRRDVFSIANSTAPSSSSRNTTIPDHYANMSDYTEIDYPFYETKVENGERTLISNLQPFTLYRIDIHSCNHEADAHGCSASNFVFARTMPAMGADDIPGPVTWEGGEDNAVIMKWNEPVSPNGLILMYYVEFKLQGEGEMQRECVSRQAYREVGGAKLIRLNPGNYSSQVQAISLSGTGALTEPIFFYVQAKPPDYGKYLLTAIMVPLLALLLLSATILTVCYFNKKRNSDRLGNGVLYASVNPEYFSAAEMYVPDEWEVAREKITMNRELGQGSFGMVYEGIAKGVVKDEPETRVAIKTVNESASMRERIEFLNEASVMKEFNCHHVVRLLGVVSQGQPTLVIMELMTRGDLKSYLRSLRTDAESHPGQSPPTLKKMIQMAGEIADGMSYLNANKFVHRDLAARNCMVTEDFTVKIGDFGMTRDIYETDYYRKGGKGLLPVRWMSPESLKDGVFTTHSDVWSFGVVLWEIATLAEQPYQGMTNEQVLRFVMEGGLLEKPDNCPDMLFELMRMCWQYNPKMRPSFLEIINSIKDELDPSFKEVSFFYSDENKPPDMEELDLEAENMESIPLDPSSTLQHTDKHSGHTTENGPGVVVLRASFDERQSYAHMNGGRKNERSRPLPQSSAC

SEQ ID NO: 13626 - protein, 638 aa, Xenopus laevis
MEHIQGAWKTLSNGFGFKESVFEGSSCMSPTIVHQFGYQRRASDDGKLSDTSKTSSTMRVYLPNKQRTVVNVRSGMSLHDCLMKSLKVRGLQPECCAVFRLIQDPKGKLRLDWNTDAMSLVGAELQVDFLDHVPLTTHNFVRKTFLKLAFCDICQKFLLNAFRCQTCGYKFHEHCSTKVPTMCVDWSNIRQLLLFPNPNNIEGGSHTLPSLTMRRIGESVRIPVSSQQRYSTPHPFSFSTPSPVSECSLSQRQRSTSTPNVHMVSTTMAVDSRVIEDALRSHSESGSPNNLSPTGWSNAKAPAPTHRERAASSTGQEKNKIRARGQRDSSYYWEIIASEVMLSSRIGSGSFGTVYKGKWHGDVAVKILKVTDPTPEQLQAFRNEVAVLRKTRHVNILLFMGYMTKDNLAIVTQWCEGSSLYYHLHVLDTKFQMFQLIDIARQTAQGMDYLHAKNIIHRDMKSNNIFLHEGLTVKIGDFGLATVKTRWSGSQQVEQLTGSILWMAPEVIRMQDNNPFSFQSDVYSYGIVLYELMTGELPYSHIRDRDQIIFLVGRGGVVPDLSKLYKNCPKAMKRLVADSIKKLRDERPLFPQILSSIELLQHSLPKINRSALEPSLHRAAHTEDISSCALTSTRLPVF

SEQ ID NO: 13627 - protein, 638 aa, Xenopus laevis
MEHIQGAWKTLSNGFGFKESVFEGSSCMSPTIVHQFGYQRRASDDGKLSDTSKTSSTMRVYLPNKQRTVVNVRSGMSLHDCLMKSLKVRGLQPECCAVFRLIQDPKGKLRLDWNTDAMSLVGAELQVDFLDHVPLTTHNFVRKTFLKLAFCDICQKFLLNAFRCQTCGYKFHEHCSTKVPTMCVDWSNIRQLLLFPNPNNIEGGSHTLPSLTMRRIGESVRIPVSSQQRYSTPHPFSFSTPSPVSECSLSQRQRSTSTPNVHMVSTTMAVDSRVIEDALRSHSESGSPNNLSPTGWSNAKAPAPTHREKAASSTGQEKNKIRARGQRDSSYYWEIIASEVMLSSRIGSGSFGTVYKGKWHGDVAVKILKVTDPTPEQLQAFRNEVAVLRKTRHVNILLFMGYMTKDNLAIVTQWCEGSSLYYHLHVLDTKFQMFQLIDIARQTAQGMDYLHAKNIIHRDMKSNNIFLHEGLTVKIGDFGLATVKTRWSGSQQVEQLTGSILWMAPEVIRMQDNNPFSFQSDVYSYGIVLYELMTGELPYSHIRDRDQIIFLVGRGGVVPDLSKLYKNCPKAMKRLVADSIKKLRDERPLFPQILSSIELLQHSLPKINRSALEPSLHRAAHTEDISSCALTSTRLPVF

SEQ ID NO: 13628 - protein, 615 aa, Xenopus laevis
MSATSADMIETPPVLNFEEIDYKEIEVEEVVGRGTFGVVCKAKWRGKDVAIKQIESESERKAFIVELRQLSRVNHPNIVKLYGACLNPVCLVMEYAEGGSLYNVLHGAEPLPYYTAAHAMSWCLQCAQGVAYLHSMKPKALIHRDLKPPNLLLVAGGTVLKICDFGTACDIQTHMTNNKGSAAWMAPEVFEGSNYSEKCDVFSWGIILWEVITRRKPFDEIGGPAFRIMWAVHNGTRPPLIKNLPKPIESLMTRCWSKDPPQRPSMEEIVKIMTHLKQYFPGADVSLQYPCQYSDEGQSNSATSTGSCTDITSTNTSNKSEINIEPGDFQASTSNDTIKRIESKLAQTLKNQSKQGGETGRLSLPPSRGSSVESLSEIRGRPPSTLGTSEGKRMSADMSELEARISASTAFAKPKRGHRKTASFGNILDVPEIIITGNGQQRRRSVQDLTILGTESSQESRNSSRSSSPSVRMITTSGPTPDKPPRGLPWAPDESSDTNGSDNSIPMAYLTLDHQLQPLAPCPNSKESMAVFEQHCKMAQEYMKVQTEIALLLQRKQELIAELDQDEKDQQNTSRLVQEHKKLLDENKSLSTYYQQCKKQLEVIRSQQQKRQGTS

SEQ ID NO: 13629 - protein, 616 aa, Xenopus laevis
MSATSAEMIETPPVLNFEEIDYKEIEVEEVVGRGTFGVVCKAKWRGKDVAIKQIESESERKAFIVELRQLSRVNHPNIVKLYGACLNPVCLVMEYAEGGSLYNVLHGAEPLPYYTAAHAMSWCLQCAQGVAYLHSMKPKALIHRDLKPPNLLLVAGGTVLKICDFGTACDIQTHMTNNKGSAAWMAPEVFEGSNYSEKCDVFSWGIILWEVITRRKPFDEIGGPAFRIMWAVHNGTRPPLIKNLPKPIESLMTRCWSKDPPQRPSMEEIVKIMTHLMQYFPGADVSLQYPCQYSDEGQSNSATSTGSCIDITSTNTSNKSDIHIEPGDFQASASNDTIKRIESKLAQHLKNQAKQTGESGRLSLPPSRGSSVESLSEIRGRPPSTLGTSEGKRMSADMSELEARISASTAYVKPKRGHRKTASFGNILDVPEIIITAGNGQQRRRSVQDLTIVGTESSQESRNSSRSSSPSVRMITTSGPTPDKPPRGLPWAPDESSDTNGSDNSIPMAYLTLDHQLQPLAPCPNSKESMAVFEQHCKMAQEYMKVQTEIALLLQRKQELIAELDQDEKDQQNTSRLVQEHKKLLDENKSLSTYYQQCKKQLEVIRSQQQKRQGTS

SEQ ID NO: 13630 - protein, 537 aa, Xenopus laevis
MGCVQCKDKEATKLTDERDNSLTQSLGYRYGTDPTPQHYPSFTVTTIPNYNNFHATAGQGLTVFGGVNSSSHTGTLRTRGGTGVTLFVALYDYEARTEDDLSFQKGEKFQILNSSEGDWWEARSLTTGGTGYIPSNYVAPVDSIQAEEWYFGKLGRKDAERQLLSFGNPRGTYLIRESETTKGAYSLSIRDWDDMKGDHVKHYKIRKLDNGGYYITTRAQFETLQQLVQHYSERAAGLCCRLVVPCHKGMPRLTDLSVKTKDVWEIPRESLQLIKRLGNGQFGEVWMGTWNGNTKVAIKTLKPGTMSPESFLEEAQIMKKLKHDKLVQLYAVVSEEPIYIVTEYMSKGSLLDFLKDGEGRALKLPNLVDMAAQVARGMAYIERMNYIHRDLRSANILVGNGLICKIADFGLARLIEDNEYTARQGAKFPIKWTAPEAALYGRFTIKSDVWSFGILLTELVTKGRVPYPGMNNREVLEQVERGYRMPCPQDCPISLHELMLNCWKKDPEERPTFEYLQGFLEDYFTATEPQYQPGDNL

SEQ ID NO: 13631 - protein, 519 aa, Xenopus laevis
MGCKQCKEDEVAKAEESALENPQRYCPDPTSQMPFRTQETHTPFINTGIGGVMSGPSHRGMGVGVTAGATLFIALYDYDARTEDDLTFQKGEKFHIINNSEGDWWEARSLSSGNTGYIPSNYVAPMNSIQSKDWFFGKIGRKDAERLLLSEGNPRGTFMIRESETTKGAYSLSVRDWDASRGDHAKHYKIRKLDSGGFYITTRVQFNTVEELVEHYGEFNDGLCHLLTSPCINQKPQTLGLAKDAWEITRDSISLDKKLGQGCFGDVWKGTWNGTTNVAVKTLKPGTMSPEAFLEEAQIMKKLRHDKLVQLYAVVSEEPIYIVTEFMTKGSLLDYLKDGEGHFLKLPQLVDMSAQIASGMAYIERMNYIHRDLRAANILVGDNLICKIADFGLARLIEDNEYTARQGAKFPIKWTAPEAALYGRFTIKSDVWSFGIMVCELVTKGRIPYPGMSNREVLEQVERGYRMPAPPGCPPSLHELKLQCWRGDPEERPTFEYLQSFLEDYFTATEPQYQPGDNI

SEQ ID NO: 13632 - protein, 537 aa, Xenopus laevis
MGCVQCKDKEATKLTDERDNSLTQSLGYRYGTDPTPQHYPSFTVTTIPNYNNFHATAGQGLTVFGGVNSSSHTGTLRTRGGTGVTLFVALYDYEARTEDDLNFQKGEKFQILNSSEGDWWEARSLTTGGTGYIPSNYVAPVDSIQAEEWYFGKLGRKDAERQLLSFGNPRGTYLIRESETTKGAYSLSIRDWDDMKGDHVKHYKIRKLDNGGYYITTRAQFEALQQLVQHYSERAAGLCCRLVVPCHKGMPRLTDLSVKTKDVWEIPRESLQLIKRLGNGQFGEVWMGTWNGNTKVAIKTLKPGTMSPESFLEEAQIMKKLKHDKLVQLYAVVSEEPIYIVTEYMSKGSLLDFLKDGEGRALKLPNLVDMAAQVAAGMAYIERMNYIHRDLRSANILVGNGLICKIADFGLARLIEDNEYTARQGAKFPIKWTAPEAALYGRFTIKSDVWSFGILLTELVTKGRVPYPGMNNREVLEQVERGYRMPCPQDCPNSLHELMLNCWKKDPEERPTFEYLQGFLEDYFTATEPQYQPGDNL

SEQ ID NO: 13633 - protein, 532 aa, Xenopus laevis
MGATKSKPREGGPRSRSLDIAEGSHQPFTSLSASQTPSKSLDSHRPSGQPFGGNCDLTPFGGVNFSDTITSPQRTGPLAGGVTTFVALYDYESRTETDLSFRKGERLQIVNNTEGDWWLARSLSSGQTGYIPSNYVAPSDSIQAEEWYLGKITRREAERLLLSLENPRGTFLVRESETTKGAYCLSVSDYDASRGLNVKHYKIRKLDSGGFYITSRTQFSSLQQLVAYYSKHADGLCHRLTAVCPTAKPQTQGLSKDAWEIPRDSLRLELKLGQGCFGEVWMGTWNGTTRVAIKTLKPGTMSPEAFLQEAQVMKKLRHEKLVQLYAVVSEEPIYIVTEYMSKGSLLDFLKGEMGRYLRLPQLVDMAAQIASGMAYVERMNYVHRDLRAANILVGENLVCKVADFGLARLIEDNEYTARQGAKFPIKWTAPEAALYGRFTIKSDVWSFGILLTELTTKGRVPYPGMVNREVLDQVERGYRMPCPPDCPESLHDLMFQCWRKDPEERPTFEYLQAFLEDYFTATEPQYQPGDNL

SEQ ID NO: 13634 - protein, 902 aa, Xenopus laevis
HRVYVEMRFTVRDCSSLPNVPGSCKETFNLYYYETDSNIDNKISTFWNESPYLKVDTIAADESFSQVDFGGRLMKVNTEVRSFGPLTRSGFYLAFQDYGACMSLLSVRVFFKKCPSVVQNFAVFPETMTGAESTSLVIARGTCIPNAEEVDVPIKLYCNGDGEWMVPIGKCTCKAGYEPENHVVCKACPAAMFKANQGMGICAQCPANSRSTSEASPICICRNGYYRADFDTPEAPCTSVPSGPRNVISIVNETAITLEWHPPRETGGRDDVNYNIICKKCQSDRRGCSHCDDNVDFVPRQLGLTDTRVFISNLWVHTPYTFEIQAVNGVTNKSPFPPQHVSVNITTNQAAPSSVPIMHQVKATMKSITLSWPQPEQPNGIILDYEIRYYEKDHHEFNSSLARSQTNTASIEGLRPGVVYVVQVRARTVAGYGKFSSKMCFQTLTEEDYKSELREQLPLIAGSAAAGVVFIVSLVAISIVCSRKRTYSKEAVYSDKLQHYSTGRGSPGMKIYIDPFTYEDPNEAVREFAKEIDVSFVKIEEVIGAGEFGEVYKGRLKLPSKREISVAIKTLKAGYSEKQRRDFLSEASIMGQFDHPNIIRLEGVVTKSRPVMIITEFMENGALDSFLRQNDGQFTVIQLVGMLRGIAAGMKYLSEMNYVHRDLAARNILVNSNLVCKVSDFGLSRYLQDDTSDPTYTSSLGGKIPVRWTAPEAIRYRKFTSASDVWSYGIVMWEVMSYGERPYWDMSNQDVINAIEQDYRLPPPMDCPAALHQLMLDCWQKDRNSRPRFGEIVNTLDKMIRNPASLKTVATIPAVPSQPLLDRSIPDISAFTSVDDWLSAIKMGQYRDNFLSSGFTSLHVVAQMTSEDLLRIGITLAGHQKKILNSIQSMRVQISQSPTSIA

SEQ ID NO: 13635 - protein, 532 aa, Xenopus laevis
MGATKSKPREGGPRSRSLDIVEGSHQPFTSLSASQTPNKSLDSHRPPAQPFGGNCDLTPFGGINFSDTITSPQRTGPLAGGVTTFVALYDYESRTETDLSFKKGERLQIVNNTEGDWWLARSLSSGQTGYIPSNYVAPSDSIQAEEWYLGKITRREAERLLLSLENPRGTFLVRESETTKGAYCLSVSDYDANRGLNVKHYKIRKLDSGGFYITSRTQFSSLQQLVAYYSKHADGLCHRLTAVCPTAKPQTQGLSRDAWEIPRDSLRLELKLGQGCFGEVWMGTWNGTTRVAIKTLKPGTMSPEAFLQEAQVMKKLRHEKLVQLYAVVSEEPIYIVTEYMSKGSLLDFLKGEMGRYLRLPQLVDMAAQIASGMAYVERMNYVHRDLRAANILVGENLVCKVADFGLARLIEDNEYTARQGAKFPIKWTAPEAALYGRFTIKSDVWSFGILLTELTTKGRVPYPGMVNREVLDQVERGYRMPCPPDCPESLHDLMFQCWRKDPEERPTFEYLQAFLEDYFTATEPQYQPGDNL

SEQ ID NO: 13636 - protein, 537 aa, Xenopus laevis
MGATKSKPREGGPRSRSLDIAEGSHQPFTSLSASQTPSKSLDSHRPPGQPFGGNCDLTPFGGVNFSDTITSPQRTGPLAGGVTTFVALYDYESRTETDLSFRKGERLQIVNNTRPDMREGDWWLARSLSSGQTGYIPSNYVAPSDSIQAEEWYLGKITRREAERLLLSLENPRGTFLVRESETTKGAYCLSVSDYDASRGLNVKHYKIRKLDSGGFYITSRTQFSSLQQLVAYYSKHADGLCHRLTAVCPTAKPQTQGLSKDAWEIPRDSLRLELKLGQGCFGEVWMGTWNGTTRVAIKTLKPGTMSPEAFLQEAQVMKKLRHEKLVQLYAVVSEEPIYIVTEYMSKGSLLDFLKGEMGRYLRLPQLVDMAAQIASGMAYVERMNYVHRDLRAANILVGENLVCKVADFGLARLIEDNEYTARQGAKFPIKWTAPEAALYGRFTIKSDVWSFGILLTELTTKGRVPYPGMVNREVLDQVERGYRMPCPPDCPESLHDLMFQCWRKDPEERPTFEYLQAFLEDYFTATEPQYQPGDNL

SEQ ID NO: 13637 - protein, 532 aa, Xenopus laevis
MGATKSKPREGGPRSRSLDIVEGSHQPFTSLSASQTPNKSLDSHRPPAQPFGGNCDLTPFGGINFSDTITSPQRTGPLAGGVTTFVALYDYESRTETDLSFKKGERLQIVNNTEGDWWLARSLSSGQTGYIPSNYVAPSDSIQAEEWYLGKITRREAERLLLSLENPRGTFLVRESETTKGAYCLSVSDYDANRGLNVKHYKIRKLDSGGFYITSRTQFISLQQLVAYYSKHADGLCHRLTTVCPTAKPQTQGLSRDAWEIPRDSLRLELKLGQGCFGEVWMGTWNGTTRVAIKTLKPGTMSPEAFLQEAQVMKKLRHEKLVQLYAVVSEEPIYIVTEYISKGSLLDFLKGEMGRYLRLPQLVDMAAQIASGMAYVERMNYVHRDLRAANILVGENLVCKVADFGLARLIEDNEYTARQGAKFPIKWTAPEAALYGRFTIKSDVWSFGILLTELTTKGRVPYPGMVNREVLDQVERGYRMPCPPDCPESLHDLMFQCWRKDPEERPTFEYLQAFLEDYFTATEPQYQPGDNL

SEQ ID NO: 13638 - protein, 537 aa, Xenopus laevis
MGCIKSKEDKGPSIKYRTEPKPDPGSQYGADPTQATQSPGIKGPAPNFNSHSMTPFGGSSGITPFGGASSIFSPTPVPYPGGLTGGVTVFVALYDYEARTTEDLSFRKGERFQIINNTEGDWWEARSIATGKTGYIPSNYVAPADSIQAEEWYFGKMGRKDAERLLLNPGNQRGTFLVRESETTKGAYSLSIRDWDEVRGDNVKHYKIRKLDNGGYYITTRAQFESLQKLVKHYSEHADGLCYRLTTVCPTVKPQTQGLAKDAWEIPRESLRLDVKLGQGCFGEVWIGTWNGTTKVAIKTLKPGTMMPEAFLQEAQIMKKLRHDKLVPLYAVVSEEPIYIVTEYMIKGSLLDFLKEGNGKYLKLPQLVDMAAQIADGMAYIERMNYIHRDLRAANILVGDNLVCKIADFGLARLIEDNEYTARQGAKFPIKWTAPEAALYGRFTIKSDVWSFGILLTELVAKGRVPYPGMVNREVLEQVERGYRMPCPQRCPESLHELMKLCWKKDPDERPTFEYIQSFLEDYFTATEPQYQPGDNL

SEQ ID NO: 13639 - protein, 537 aa, Xenopus laevis
MGCIKSKEDKGPSIKYRTEPKPDPGSQYGADPTQATQSPGIKGPAPNFNSHSMTPFGGSSGITPFGGASSIFSPTPVPYPGGLTGGVTVFVALYDYEARTTEDLSFRKGERFQIINNTEGDWWEARSIATGKTGYIPSNYVAPADSIQAEEWYFGKMGRKDAERLLLNPGNQRGTFLVRESETTKGAYSLSIRDWDEVRGDNVKHYKIRKLDNGGYYITTRAQFESLQKLVKHYSEHADGLCYRLTTVCPSVKPQTQGLAKDAWEIPRESLRLDVKLGQGCFGEVWIGTWNGTTKVAIKTLKPGTMMPEAFLQEAQIMKKLRHDKLVPLYAVVSEEPIYIVTEYMIKGSLLDFLKEGNGKYLKLPQLVDMAAQIADGMAYIERMNYIHRDLRAANILVGDNLVCKIADFGLARLIEDNEYTARQGAKFPIKWTAPEAALYGRFTIKSDVWSFGILLTELVAKGRVPYPGMVNREVLEQVERGYRMPCPQRCPESLHELMKLCWKKDPDERPTFEYIQSFLEDYFTATEPQYQPGDNL

SEQ ID NO: 13640 - protein, 615 aa, Xenopus laevis
MRLMLLCCSWSEEHMGEEEGNVLPLCASCGQSIYDGCYLQALALDWHSDCFRCSDCGVSLSHRYYEKDGRLFCKKHYWTRFGGMCQGCSENITKGLVMVAGEHKYHPECFMCSRCKAYIGDGETYALVERSKLYCGPCYYQFSVTPVIDSPGSRSPHTVTLVSLPASDGKRGLSVSITPSCAEHSHTVRVTELDADFLGPDIQSSIHIGDRILEINGTPIRSVPLDEIDVLIQETSRLLQLTIEHDPHETPTMPSPCAEIAVRRQRPVMRSCSIDRSPGSSCVGSPSCSRRDMSRSESVRTVTGVHRIFRPSDLIPGEVLGRGCFGQAIKVTHRVTGEVMVMKELIRFDEETQRTFLKEVKVMRCLEHPHVLKFIGVLYKDKRLNFITEYIPGGTLRRVIKSMDTHCPWNQRVSFARDIAAGMTYLHSMNIIHRDLNSHNCLVREDGGLVVANFGLSRLIPEETRDLRKDRRKRYTVVGNPYWMAPEMINGRSYDESVDVFSFGIVICEIIGLVNADPDYLPRTMDFGLNVRAFLDRFCPPNCPPGFFPSAVLCCDLDPEKRPRFSQLQLWLDSLLRHLNLQLPLSSHIEQLEQNFWENYRRGDSTLHVHPEIPE

SEQ ID NO: 13641 - protein, 985 aa, Xenopus laevis
MELNVLLLLLCLSGGQVGAVEETLMDTRTATAELGWTANPSSGWEEVSGYDENLNTIRTYQVCNVFGPKQNNWLLTTFIPRRGAHRVYVEMRFTVRDCSSLPNVPGSCKETFNLYYYETDSNIENKISTFWNESPYLKVDTIAADESFSQVDFGGRLMKVNTEVRSFGPLTRSGFYLAFQDYGACMSLLSVRVFFKEMPSVVQNLLVFPETMTGAESTSLVIARGTCIPNAEEVDVPIKLYCNGDGEWMVPIGKCTCKAGYEPENHVVCKACPAAMFKANQGMGICAQCPANSRSTSEASPICICRNGYYRADFDTPEAPCTSVPSGPRNVISIVNETAITLEWHPPRETGGRDDVDYNIVCKKCRADRRACSRCDDNVDFVPRQLGLTDTRVFISNLWAHTPYTFETQAVNGVTNKSPFPPQHVSVNITTNQAAPSSVPIMHQVKATMKSITLSWPQQEQPNGIILDYEIRYYEKDHHEFNSSLARSQTNTARRTGGRVWMFMSVQVRARTVAGYGKFSSKCGFQTLTAEDYKSELREQLPLTGSAAAGVVFIVSLVAISIVCSRKRTYSKEAVYSDKLQHYSTGRGSPGMKIYIDPFTYEDPNEAVREFAKEIDVSFVKIEEVIGAGEFGEVYKGRLKLPSKREISVAIKTLKAGYSEKQRRDFLSEASIMGQFDHPNIIRLEGVVTKSRPVMIITEFMENGALDSFLRQNDGQFTVIQLVGMLRGIAAGMKYLSEMNYVHRDLAARNILVNSNLVCKVSDFGLSRYLQDDTSDPTYTSSLGGKIPVRWTAQEAIAYRKFTSASDVWSYGIVMWEVMSYGERPYWTMSNQDVINAIEQDYRLPPPMDCPAALHQLMLDCWQKDRNSRPRLAEIVNTLRPMIRNPASLKTVATIPAVPSQPLLDRSIPDISAFTSVDDWLSAIKMGQYRDNFLSSGFTSLQLVAQMTSEDLLRIGITLAGHQKKILNSIQSMRVQITQSPTSIA

SEQ ID NO: 13642 - protein, 450 aa, Xenopus laevis
MSVVQAPWQAGIECIANYDFQGKAEQDLDFSKGEVLTIVAVTKDPNWYKAKNKVGRVGFIPANYVQKREGVKSGTKLSLMPWFHGKITREQAELLLCPPETGLFLVRESTNYPGDYTLCVSCEGKVEHYRIIYSSGKLSIDEEEYFENLMQLVEHYTNDADGLCTNLIKPKLMEGTVAAQDEFSRSGWALKMRDLKLQHTIGKGEFGDVMLGEHQGVKVAVKCIKNDATAQAFIAEAMVMTQLQHKNLVQLLGVIVEDKSGLFIVTEFMAKGSLVDYLRSRGRSVLGGECLLKFSLDVSEGMEYLESNNFVHRDLAARNVLVSEENIAKVSDFGLTKEASAIQDTSKLPVKWTAPEALREKLFSTKSDVWSFGILLWEIYSFGRVPYPRIALKEVVPKVENGYKMDAPDGCPPVVYDLMKQCWHLDPKQRPTFRNLREQLEHIKAKELYH

SEQ ID NO: 13643 - protein, 658 aa, Xenopus laevis
PYREDGPVISTTLLYKPSLILTPWRSIEVPFNEKLIKLEGLEPKTEYKVCVQLRRPGEGGAGHPGPDTVFRTDPPCLPSPKGLMLLSKSQHSLNLTWMAELENNDDRAYEVECSKVNTTESPQYIQVRGIQTGIIIDGLEPRSLYQCRVRQRTNSQGEWSEMLLAWTYSDKIPPAPGNINIFNITDSSAVITWSFEEGHSISSVIIRYKIYGNTEYNHDIKIRNITIVHYQLKGLEANTPYLVEMCAENNIGQSFPNPVRELKTHEEIKGVHESKDGNMLLIAILGSAGMTCLTILLAFIIMLQLKRANFQNRMAQAFQNGVREEPVVQFNSGSLNQIRKAKNSPDPLDYPVLEWHNIKFKDVIGEGNFGQVLKARIKKDGLRMDAAIKRMKEYASKDDHRDFAGELEVLSKLGSHPNIINLLGACEHRGYLYLAIEYAPHGNLLDFLRKSRVLETDPAFAIANSTASTLSSQQLLCFAADVARGMDYLSQKQFIHRDLAARNILVGENFLAKIADFGLSRGQEVYVKKTMGRLPVRWMAIESLNYSVYTSNSDVWSFGVLLWEIVSLGGTPYCGLTCAELYEKLPQGYRLEQPLNCDDEVYDLMRQCWREKPYERPSFAKIVVSLNRMLEERKTYVNTTLYEKFTYAGIDCSAEEAA

SEQ ID NO: 13644 - protein, 806 aa, Gallus gallus
MAALSSGSSAEGASLFNGDMEPEPPPPVLGACYAGSGGGDPAIPEEVWNIKQMIKLTQEHIEALLDKFGGEHNPPSIYLEAYEEYTSKLDALQQREQQLLESMGNGTDFSVSSSASTDTVASSSSSSLSVAPSSLSVYQNPTDMSRNNPKSPQKPIVRVFLPNKQRTVVPARCGVTVRDSLKKALMMRGLIPECCAVYRIQDGEKKPIGWDTDISWLTGEELHVEVLENVPLTTHNFVRKTFFTLAFCDFCRKLLFQGFRCQTCGYKFHQRCSTEVPLMCVNYDQLDLLFVSKFFEHHPISQEETTLGETTPASGSYPSVPPSDSVGPPILPSPSPSKSIPIPQPFRPADEDHRNQFGQRDRSSSAPNVHINTIEPVNIDDLIRDQGVRGEGAPLNQLMRCLRKYQSRTPSPLLHSVPSEIVFDFEPGPVFRGSTAGLSATPPASLPGSLTNVKALQKSPGPQRERKSSSSSEDRNRMKTLGRRDSSDDWEIPDGQITVGQRIGSGSFGTVYKGKWHGDVAVKMLNVTAPTPQQLQAFKNEVGVLRKTRHVNILLFMGYSTKPQLAIVTQWCEGSSLYHHLHIIETKFEMIKLIDIARQTAQGMDYLHAKSIIHRDLKSNNIFLHEDLTVKIGDFGLATVKSRWSGSHQFEQLSGSILWMAPEVIRMQDKNPYSFQSDVYAFGIVLYELMTGQLPYSNINNRDQIIFMVGRGYLSPDLSKVRSNCPKAMKRLMAECLKKKRDERPLFPQILASIELLARSLPKIHRSASEPSLNRAGFQTEDFSLYACASPKTPIQAGGYGGFPVH

SEQ ID NO: 13645 - protein, 712 aa, Gallus gallus
KLTQEHIEALLDKFGGEHNPPSIYLEAYEEYTSKLDALQQREQQLLESMGNGTDFSVSSSASTDTVASSSSSSLSVAPSSLSVYQNPTDMSRNNPKSPQKPIVRVFLPNKQRTVVPARCGVTVRDSLKKALMMRGLIPECCAVYRIQDGEKKPIGWDTDISWLTGEELHVEVLENVPLTTHNFVRKTFFTLAFCDFCRKLLFQGFRCQTCGYKFHQRCSTEVPLMCVNYDQLDLLFVSKFFEHHPISQEETTLGETTPASGSYPSVPPSDSVGPPILPSPSPSKSIPIPQPFRPADEDHRNQFGQRDRSSSAPNVHINTIEPVNIDDLIRDQGVRGEGGSTAGLSATPPASLPGSLTNVKALQKSPGPQRERKSSSSSEDRNRMKTLGRRDSSDDWEIPDGQITVGQRIGSGSFGTVYKGKWHGDVAVKMLNVTAPTPQQLQAFKNEVGVLRKTRHVNILLFMGYSTKPQLAIVTQWCEGSSLYHHLHIIETKFEMIKLIDIARQTAQGMDYLHAKSIIHRDLKSNNIFLHEDLTVKIGDFGLATVKSRWSGSHQFEQLSGSILWMAPEVIRMQDKNPYSFQSDVYAFGIVLYELMTGQLPYSNINNRDQIIFMVGRGYLSPDLSKVRSNCPKAMKRLMAECLKKKRDERPLFPQILASIELLARSLPKIHRSASEPSLNRAGFQTEDFSLYACASPKTPIQAGGYGGFPVH

SEQ ID NO: 13646 - protein, 410 aa, Gallus gallus
PLVMAVVNRERDGQTGSGGRARGLCYTCGSPTMPVDSRIIEDAIRNHSESASPSASSGSPNNMSPTGWSQPKTPVPAQRERAPGTNTQEKNKIRPRGQRDSSYYWEIEASEVLLSTRIGSGSFGTVYKGKWHGDVAVKILKVVDPTPEQFQAFRNEVAVLRKTRHVNILLFMGYMTKDNLAIVTQWCEGSSLYKHLHVQETKFQMFQLIDIARQTAQGMDYLHAKNIIHRDMKSNNIFLHEGLTVKIGDFGLATVKSRWSESQQVEQPTGSILWMAPEVIRMQDSNPFSFQSDVYSYGIVLYELMTGELPYSHINNRDQIIFMVGRGYASPDLSKLYKNCPKAMKRLVADCLKKVREERPLFPQILSSIALLQHSLPKINRSASEPSLHRASHTEDINSCTLTSTRLPVF

SEQ ID NO: 13647 - protein, 647 aa, Gallus gallus
MEHIQGAWKTISNGFGLKDSVFDGPNCISPTIVQQFGYQRRASDDGKISDTSKTSNTIRVFLPNKQRTVVNVRNGMTLHDCLMKALKVRGLQPECCAVFRLVTEPKGKKVRLDWNTDAASLIGEELQVDFLDHVPLTTHNFARKTFLKLAFCDICQKFLLNGFRCQTCGYKFHEHCSTKVPTMCVDWSNIRQLLLFPNSNISDSGVPALPPLTMRRMRESVSRIPVSSQHRYSTPHVFTFNTSNPSSEGTLSQRQRSTSTPNVHMVSTTMPVDSRIIEDAIRNHSESASPSALSGSPNNMSPTGWSQPKTPVPAQRERAPGTNTQEKNKIRPRGQRDSSYYWEIEASEVMLSTRIGSGSFGTVYKGKWHGDVAVKILKVVDPTPEQFQAFRNEVAVLRKTRHVNILLFMGYMTKDNLAIVTQWCEGSSLYKHLHVQETKFQMFQLIDIARQTAQGMDYLHAKNIIHRDMKSNNIFLHEGLTVKIGDFGLATVKSRWSGSQQVEQPTGSILWMAPEVIRMQDSNPFSFQSDVYSYGIVLYELMTGELPYSHINNRDQIIFMVGRGYASPDLSKLYKNCPKAMKRLVADCLKKVREERPLFPQILSSIELLQHSLPKINRSASEPSLHRASHTEDINSCTLTSTRLPVF

SEQ ID NO: 13648 - protein, 420 aa, Gallus gallus
SQHRYSTPHVFTFNTSNPSSEGTLSQRQRSTSTPNVHMVSTTMPVDSRIIEDAIRNHSESASPSALSGSPNNMSPTGWSQPKTPVPAQRERAPGTNTQEKNKIRPRGQRDSSYYWEIEASEVMLSTRIGSGSFGTVYKGKWHGDVAVKILKVVDPTPEQFQAFRNEVAVLRKTRHVNILLFMGYMTKDNLAIVTQWCEGSSLYKHLHVQETKFQMFQLIDIARQTAQGMDYLHAKNIIHRDMKSNNIFLHEGLTVKIGDFGLATVKSRWSGSQQVEQPTGSILWMAPEVIRMQDSNPFSFQSDVYSYGIVLYELMTGELPYFHINNRDQIIFMVGRGYASPDLSKLYKNCPKAMKRLVADCLKKVREERPLFPQILSSIELLQHSLPKINRSASEPSLHRASHTEDINSCTLTSTRLPVF

SEQ ID NO: 13649 - protein, 536 aa, Gallus gallus
MGCVHCKEKISGKGQGGSGTGTPAHPPSQYDPDPTQLSGAFTHIPDFNNFHAAAVSPPVPFSGPGFYPCNTLQAHSSITGGGVTLFIALYDYEARTEDDLSFQKGEKFHIINNTEGDWWEARSLSSGATGYIPSNYVAPVDSIQAEEWYFGKIGRKDAERQLLCHGNCRGTFLIRESETTKGAYSLSIRDWDEAKGDHVKHYKIRKLDSGGYYITTRAQFDTIQQLVQHYIERAAGLCCRLAVPCPKGTPKLADLSVKTKDVWEIPRESLQLLQKLGNGQFGEVWMGTWNGTTKVAVKTLKPGTMSPEAFLEEAQIMKRLRHDKLVQLYAVVSEEPIYIVTEFMSQGSLLDFLKDGDGRYLKLPQLVDMAAQIAAGMAYIERMNYIHRDLRAANILVGDNLVCKIADFGLARLIEDNEYTARQGAKFPIKWTAPEAALFGKFTIKSDVWSFGILLTELVTKGRVPYPGMNNREVLEQVERGYRMQCPGGCPPSLHDVMVQCWKREPEERPTFEYLQSFLEDYFTATEPQYQPGDNQ

SEQ ID NO: 13650 - protein, 533 aa, Gallus gallus
MGSSKSKPKDPSQRRRSLEPPDSTHHGGFPASQTPNKTAAPDTHRTPSRSFGTVATEPKLFGGFNTSDTVTSPQRAGALAGGVTTFVALYDYESRTETDLSFKKGERLQIVNNTEGDWWLAHSLTTGQTGYIPSNYVAPSDSIQAEEWYFGKITRRESERLLLNPENPRGTFLVRESETTKGAYCLSVSDFDNAKGLNVKHYKIRKLDSGGFYITSRTQFSSLQQLVAYYSKHADGLCHRLTNVCPTSKPQTQGLAKDAWEIPRESLRLEVKLGQGCFGEVWMGTWNGTTRVAIKTLKPGNMSPEAFLQEAQVMKKLRHEKLVQLYAVVSEEPIYIVTEYMSKGSLLDFLKGEMGKYLRLPQLVDMAAQIASGMAYVERMNYVHRDLRAANILVGENLVCKVADFGLARLIEDNEYTARQGAKFPIKWTAPEAALYGRFTIKSDVWSFGILLTELTTKGRVPYPGMVNREVLDQVERGYRMPCPPECPESLHDLMCQCWRKDPEERPTFEYLQAFLEDYFTSTEPQYQPGENL

SEQ ID NO: 13651 - protein, 453 aa, Gallus gallus
  unsure (1)..(453): unsure at all Xaa locations
GGVTTFVALYDYESRTETDLSFKKGERLQIVNNTEGDWWLAHSLTTGQTGYIPSNYVAPSDSIQAEEWYFGKITRRESERLLLNPENPRGTFLVRESETTKGAYCLSVSDFDNAKGLNVKHYKIRKLDSGGFYITSRTQFSSLQQLVAYYSKHADGLCHRLTNVCPTSKPQTQGLAKDAWEIPRESLRLEVKLGQGCFGEVWMGTWNGTTRVAIKTLKPGNMSPEAFLQEAQVMKKLRHEKLVQLYAVVSEEPIYIVTEYMSKGSLLDFLKGEMGKYLRLPQLVDMAAQIASGMAYVERMNYVHRDLRAANILVGENLVCKVADFGLGRLIEDNEYTARQGAKFPIKWTAPEAALYGRFTIKSDVWSFGILLTELTTKGRVPYPGMVNREVLDQVERGYRMPCPPECPESLHDLMCQCWRKDPEERPTFEYLQAFLEDYFTSTEPQXQPGENL

SEQ ID NO: 13652 - protein, 533 aa, Gallus gallus
MGSSKSKPKDPSQRRRSLEPPDSTHHGGFPASQTPNKTAAPDTHRTPSRSFGTVATEPKLFGGFNTSDTVTSPQRAGALAGGVTTFVALYDYESRTETDLSFKKGERLQIVNNTEGDWWLAHSLTTGQTGYIPSNYVAPSDSIQAEEWYFGKITRRESERLLLNPENPRGTFLVRESETTKGAYCLSVSDFDNAKGLNVKHYKIRKLDSGGFYITSRTQFSSLQQLVAYYSKHADGLCHRLTNVCPTSKPQTQGLAKDAWEIPRESLRLEVKLGQGCFGEVWMGTWNGTTRVAIKTLKPGTMSPEAFLQEAQVMKKLRHEKLVQLYAVVSEEPIYIVTEYMSKGSLLDFLKGEMGKYLRLPQLVDMAAQIASGMAYVERMNYVHRDLRAANILVGENLVCKVADFGLARLIEDNEYTARQGAKFPIKWTAPEAALYGRFTIKSDVWSFGILLTELTTKGRVPYPGMVNREVLDQVERGYRMPCPPECPESLHDLMCQCWRKDPEERPTFEYLQAFLEDYFTSTEPQYQPGENL

SEQ ID NO: 13653 - protein, 534 aa, Gallus gallus
MGCVQCKDKEATKLTDERDGSLTQSSGYRYGTDPTPQHYPSFGVTSIPNYNNFHATGGQGLTVFGGVNSSSHTGTLRTRGGTGVTLFEALYDYEARTEDDLSFHKGEKFQILNSSEGDWWEARSLTTGETGYIPSNYVAPVDSIQAEEWYFGKLGRKDAERQLLSFGNPRGTFLIRESETTKGAYSLSIRDWDDMKGDHVKHYKIRKLDNGGYYITTRAQFETLQQLVQHYSEKADGLCFNLTVIATNNTPQTVGLAKDAWEVARDSLFLEQKLGQGCFAEVWRGTWNGNTKVAIKTLKPGTMSPESFLEEAQIMKKLKHDKLVQLYAVVSRRPIYIVTEYMSKGSLLDFLKDGEGRALKLPNLVDMAAQVAAGMAYIERMNYIHRDLRSANILVGNGLICKIADFGLARLIEDNEYTARQGAKFPIKWTAPEAALYGRFTIKSDVWSFGILLTELVTKGRVPYPGMNNREVLEQVERGYRMPCPQDCPISLHELMIHCWKKDPEERPTFEYLQGFLEDYFTATEPQYQPGDNL

SEQ ID NO: 13654 - protein, 533 aa, Gallus gallus
MGSSKSKPKDPSQRRRSLEPPDSTHHGGFPASQTPNKTAAPDTHRTPSRSFGTVATEPKLFGGFNTSDTVTSPQRAGALAGGVTTFVALYDYESRTETDLSFKKGERLQIVNNTEGDWWLAHSLTTGQTGYIPSNYVAPSDSIQAEEWYFGKITRRESERLLLNPENPRGTFLVRESETTKGAYCLSVSDFDNAKGLNVKHYKIRKLDSGGFYITSRTQFSSLQQLVAYYSKHADGLCHRLTNVCPTSKPQTQGLAKDAWEIPRESLRLEVKLGQGCFGEVWMGTWNGTTRVAIKTLKPGTMSPEAFLQEAQVMKKLRHEKLVQLYAVVSEEPIYIVTEYMSKGSLLDFLKGEMGKYLRLPQLVDMAAQIASGMAYVERMNYVHRDLRAANILVGENLVCKVADFGLARLIEDNEYTARQGAKFPIKWTAPEAALYGRFTIKSDVWSFGILLTELTTKGRVPYPGMVNREVLDQVERGYRMPCPPECPESLHDLMCQCWRRDPEERPTFEYLQAFLEDYFTSTEPQYQPGENL

SEQ ID NO: 13655 - protein, 534 aa, Gallus gallus
MGCVQCKDKEATKLTDERDGSLTQSSGYRYGTDPTPQHYPSFGVTSIPNYNNFHATGGQGLTVFGGVNSSSHTGTLRTRGGTGVTLFEALYDYEARTEDDLSFHKGEKFQILNSSEGDWWEARSLTTGETGYIPSNYVAPVDSIQAEEWYFGKLGRKDAERQLLSFGNPRGTFLIRESETTKGAYSLSIRDWDDMKGDHVKHYKIRKLDNGGYYITTRAQFETLQQLVQHYSEKADGLCFNLTVIATNNTPQTVGLAKDAWEVARDSLFLEQKLGQGCFAEVWRGTWNGNTKVAIKTLKPGTMSPESFLEEAQIMKKLKHDKLVQLYAVVSRRPIYIVTEYMSKGSLLIFLKDGEGRALKLPNLVDMAAQVAAGMAYIERMNYIHRDLRSANILVGNGLICKIADFGLARLIEDNEYTARQGAKFPIKWTAPEAALYGRFTIKSDVWSFGILLTELVTKGRVPYPGMNNREVLEQVERGYRMPCPQDCPISLHELMIHCWKKDPEERPTFEYLQGFLEDYFTATEPQYQPGDNL

SEQ ID NO: 13656 - protein, 541 aa, Gallus gallus
MGCIKSKEDKGPAMKYRTDNTPEPISSHVSHYGSDSSQATQSPAIKGSAVNFNSHSMTPFGGPSGMTPFGGASSSFSAVPSPYPSTLTGGVTVFVALYDYEARTTDDLSFKKGERFQIINNTEGDWWEARSIATGKTGYIPSNYVAPADSIQAEEWYFGKMGRKDAERLLLNPGNQRGIFLVRESETTKGAYSLSIRDWDEVRGDNVKHYKIRKLDNGGYYITTRAQFESLQKLVKHYREHADGLCHKLTTVCPTVKPQTQGLAKDAWEIPRESLRLEVKLGQGCFGEVWMGTWNGTTKVAIKTLKPGTMMPEAFLQEAQIMKKLRHDKLVPLYAVVSEEPIYIVTEFMTKGSLLDFLKEGEGKFLKLPQLVDMAAQIADGMAYIERMNYIHRDLRAANILVGDNLVCKIADFGLARLIEDNEYTARQGAKFPIKWTAPEAALYGRFTIKSDVWSFGILLTELVTKGRVPYPGMVNREVLEQVERGYRMPCPQGCPESLHELMKLCWKKDPDERPTFEYIQSFLEDYFTATEPQYQPGDNL

SEQ ID NO: 13657 - protein, 541 aa, Gallus gallus
MGCIKSKEDKGPAMKYRTDNTPEPISSHVSHYGSDSSQATQSPAIKGSAVNFNSHSMTPFGGPSGMIHPLRASSSFSAVPSQYPSTLTGGVTVFVALYDYEARTTDDLSFKKGERFQIINNTEGDWWEARSIATGKTGYIPSNYVAPADSIQAEEWYFGKMGRKDAERLLLNPGNQRGIFLVRESETTKGAYSLSIRDWDEVRGDNVKHYKIRKLDNGGYYITTRAQFESLQKLVKHYREHADGLCHKLTTVCPTVKPQTQGLAKDAWEIPRESLRLEVKLGQGCFGEVWMGTWNGTTKVAIKTLKPGTMMPEAFLQEAQIMKKLRHDKLVPLYAVVSEEPIYIVTEFMTKGSLLDFLKEGEGKFLKLPQLVDMAAQIADGMAYIERMNYIHRDLRAANILVGDNLVCKIADFGLARLIEDNEYTARQGAKFPIKWTAPEAALYGRFTIKSDVWSFGILLTELVTKGRVPYPGMVNREVLEQVERGYRMPCPQGCPESLHELMKLCWKKDPDERPTFEYIQSFLEDYFTATEPQYQPGDNL

SEQ ID NO: 13658 - protein, 662 aa, Gallus gallus
MRLMLLCCTWRDEPMGEEEGTDLPVCASCGQGIFDGQYLQALNADWHADCFRCGECGASLSHQYYEKDGRLYCKKDYWARFGELCHGCAEQITKGLVMVAGEQKYHPECFSCLNCRAFIGDGDTYALVERSKLYCGHCYYQMVVTPVIEQILPDSPGSRIPHTVTLVSIPACSDGKRGFSVSIDPHCGAQGCGAEHSRTVRVREVDPDCISPDVKNSIHVGDRILEINGTPIGHVPLDEIDLLIQETSRLLQLTIEHDPHEPLPRDLALPCSPLPDPHSPLRSPVPAPHGDLGTMRQRAVMRSCSTDKSPGSSSVGSPASQRKDIGRSESLRVVSRAHRIFRPSDLIHGEVLGKGCFGQAIKVTHRETGEVMVMKELIRFDEETQRTFLKEVKVMRCLEHPNVLKFIGVLYKEKRLNFITEYIKGGTLRGLIKSMDSHYPWSQRVSFAKDIAAGMAYLHSMNIIHRDLNSHNCLVRENKSVVVADFGLARLMVDEKNQPEHLQNLKKPDRKKRYTVVGNPYWMAPEMINGRSYDEKVDIFSFGIVLCEIIGRVSADPDYLPRTTDFGLNVRGFLERYCPPACPPSFFPIAACCCDLDPEKRPSFSKLEQWLETLRMHLDIRLPLSSQLEQLTCAFWETHRRGEGGLPPHPELPDTAPHLHPL

SEQ ID NO: 13659 - protein, 1002 aa, Gallus gallus
MDSNADISARRVSGMDWLWLVCFFHLVTSLEEILLDTTGETSEIGWTSHPPDGWEEVSVRDDKERQIRTFQVCNMDEPGQNNWLRTHFIERRGAHRVHVRLHFSVRDCASMRTVASTCKETFTLYYHQSDVDIASQELPEWHEGPWTKVDTIAADESFSQVDRTGKVVRMNVKVRSFGPLTKHGFYLAFQDSGACMSLVAVQVFFYKCPAVVKGFASFPETFAGGERTSLVESLGTCVANAEEASTTGSSGVRLHCNGEGEWMVATGRCSCKAGYQSVDNEQACQACPIGSFKASVGDDPCLLCPAHSHAPLPLPGSIECVCQSHYYRSASDNSDAPCTGIPSAPRDLSYEIVGSNVLLTWRLPKDLGGRKDVFFNVICKECPTRSAGTCVRCGDNVQFEPRQVGLTESRVQVSNLLARVQYTFEIQAVNLVTELSSEAPQYATINVSTSQSVPSAIPMMHQVSRATSSITLSWPQPDQPNGVILDYQLRYFDKAEDEDNSFTLTSETNMATILNLSPGKIYVFQVRARTAVGYGPYSGKMYFQTLMAGEHSEMAQDRLPLIVGSALGGLAFLVIAAIAILAIIFKSKRRETPYTDRLQQYISTRGLGVKYYIDPSTYEDPNEAIREFAKEIDVSFIKIEEVIGSGEFGEVCFGRLKHPGKREYTVAIKTLKSGYTDEQRREFLSEASIMGQFEHPNVIHLEGVVTKSRPVMIVTEFMENGSLDSFLRQKEGQFSVLQLVGMLRGIAAGMRYLSDMNYVHRDLAARNILVNSNLVCKVSDFGLSRFLEDDASNPTYTGALGCKIPIRWTAPEAVQYRKFTSSSDVWSYGIVMWEVMSYGERPYWDMSNQDVINAIDQDYRLPPPPDCPTVLHLLMLDCWQKDRVQRPKFEQIVSALDKMIRKPSALKATGTGSSRPSQPLLSNSPPDFPSLSNAHEWLDAIKMGRYKENFDQAGLITFDVISRMTLEDLQRIGITLVGHQKKILNSIQLMKVHLNQLEPVEV

SEQ ID NO: 13660 - protein, 612 aa, Gallus gallus
VRCGDNVQFEPRQVGLTESRVQVSNLLARVQYTFEIQAVNLVTELSSEAPQYATINVSTSQSVPSAIPMMHQVSRATSSITLSWPQPDQPNGVILDYQLRYFDKAEDEDNSFTLTSETNMATILNLSPGKIYVFQVRARTAVGYGPYSGKMYFQTLMAGEHSEMAQDRLPLIVGSALGGLAFLVIAAIAILAIIFKSKRRETPYTDRLQQYISTRGLGVKYYIDPSTYEDPNEAIREFAKEIDVSFIKIEEVIGSGEFGEVCFGRLKHPGKREYTVAIKTLKSGYTDEQRREFLSEASIMGQFEHPNVIHLEGVVTKSRPVMIVTEFMENGSLDSFLREKEGQFSVLQLVGMLRGIAAGMRYLSDMNYVHRDLAARNILVNSNLVCKVSDFGLSRFLEDDASNPTYTGALGCKIPIRWTAPEAVQYRKFTSSSDVWSYGIVMWEVMSYGERPYWDMSNQDVINAIDQDYRLPPPPDCPTVLHLLMLDCWQKDRVQRPKFEQIVSALDKMIRKPSALKATGTGSSRPSQPLLSNSPPDFPSLSNAHEWLDAIKMGRYKENFDQAGLITFDVISRMTLEDLQRIGITLVGHQKKILNSIQLMKVHLNQLEPVEV

SEQ ID NO: 13661 - protein, 657 aa, Gallus gallus
MASIILESIFLKRSQQKKKTSPLNFKKRLFLLTESKLSYYEYDFERGRRGSKKGSVDIEKITCVETVVPENNPPPERQVPKKGEDYNMEQISIIERFPYPFQVVYDEGPLYVFSPTEELRKRWIHQLKSVIRYNSDLVQKYHPCFWIDGQYLCCSQTAKNAMGCKILESRNGSLKAGRSHRKTKKPLPPTPEEDTMVMKPLPPEPAPSAAGEMKKVVALYNYVPMNVQDLQLQKGEDYLILEESHLPWWKARDKNGREGYIPSNYVTATSNSLEIYEWYSKNITRSQAEQLLKQEGKEGGFIVRDSTSKTGKYTVSVYAKSAVDPQGMIRHYVVCCTPQNQYYLAEKHLFNTIPELITYHQHNSAGLISRLKYPVSRHQKSAPSTAGLGYGSWEIDPKDLTFLKELGTGQFGVVKYGKWRGQYNVAIKMIREGSMSEDEFIDEAKVMMNLSHEKLVQLYGVCTKQRPIFIITEYMANGCLLNFLRETQRRFQPAELLEMCKDVCEAMEYLESKQFLHRDLAARNCLVNDQGIVKVSDFGLSRYVLDDEYTSSMGSKFPVRWSPPEVLLYSKFSSKSDVWSFGVLMWEVYSLGKMPYERFNNSETTEHVIQGLRLYRPQQASERVYAIMYSCWHEKAEERPTFSALLGSIVDITDEEP

SEQ ID NO: 13662 - protein, 456 aa, Gallus gallus
MSPPCSPLQDKLVVALYDYEPTHDGDLGLKQGEKLRVLEESGEWWRAQSLTTGQEGLIPHNFVAMVNSLEPEPWFFKNLSRKNAEARLLASGNTHGSFLIRESETSKGSYSLSVRDFDQNQGETVKHYKIRNMDNGGYYISPRVTFSSLHELVEYYSSSSDGLCTRLGKPCRTQKPQKPWWQDEWEVPRESLKLVEKLGAGQFGEVWMGFYNGHTKVAIKNLKQGSMSPSAFLAEANLMKNLQHPRLVRLYAVVTKEPIYIITEYMEKGSLVDFLKTSEGIKLSINKLLDMAAQIAEGMAFIEAKNYIHRDLRAANILVSEALCCKIADFGLARLIEDNEYTAREGAKFPIKWTAPEAINYGTFTIKSDVWSFGILLTEIVTYGRIPYPGMTNPEVIQNLERGYRMPQPDNCPQELYELMMQCWKEQPEERPTFEYMKSVLEDFFTATEGQYQQQP

SEQ ID NO: 13663 - protein, 507 aa, Gallus gallus
MGCCCSSDYDEDWIENIDICEHCNYPIDPDSKRQLIRNVSEVRDPLVSYEAMSPPCSPLQDKLVVALYDYEPTHDGDLGLKQGEKLRVLEESGEWWRAQSLTTGQEGLIPHNFVAMVNSLEPEPWFFKNLSRKNAEARLLASGNTHGSFLIRESETSKGSYSLSVRDFDQNQGETVKHYKIRNMDNGGYYISPRVTFSSLHELVEYYSSSSDGLCTRLGKPCRTQKPQKPWWQDEWEVPRESLKLVEKLGAGQFGEVWMGFYNGHTKVAIKNLKQGSMSPSAFLAEANLMKNLQHPRLVRLYAVVTKEPIYIITEYMEKGSLVDFLKTSEGIKLSINKLLDMAAQIAEGMAFIEAKNYIHRDLRAANILVSEALCCKIADFGLARLIEDNEYTAREGAKFPIKWTAPEAINYGTFTIKSDVWSFGILLTEIVTYGRIPYPGMTNPEVIQNLERGYRMPQPDNCPQELYELMMQCWKEQPEERPTFEYMKSVLEDFFTATEGQYQQQP

SEQ ID NO: 13664 - protein, 508 aa, Gallus gallus
MGCCCSSDYDEDWIENIDICEHCNYPIDPDSKRQQLIRNVSEVRDPLVSYEAMSPPCSPLQDKLVVALYDYEPTHDGDLGLKQGEKLRVLEESGEWWRAQSLTTGQEGLIPHNFVAMVNSLEPEPWFFKNLSRKNAEARLLASGNTHGSFLIRESETSKGSYSLSVRDFDQNQGETVKHYKIRNMDNGGYYISPRVTFSSLHELVEYYSSSSDGLCTRLGKPCRTQKPQKPWWQDEWEVPRESLKLVEKLGAGQFGEVWMGFYNGHTKVAIKNLKQGSMSPSAFLAEANLMKNLQHPRLVRLYAVVTKEPIYIITEYMEKGSLVDFLKTSEGIKLSINKLLDMAAQIAEGMAFIEAKNYIHRDLRAANILVSEALCCKIADFGLARLIEDNEYTAREGAKFPIKWTAPEAINYGTFTIKSDVWSFGILLTEIVTYGRIPYPGMTNPEVIQNLERGYRMPQPDNCPQELYELMMQCWKEQPEERPTFEYMKSVLEDFFTATEGQYQQQP

SEQ ID NO: 13665 - protein, 824 aa, Gallus gallus
MGFGPELWCPKGHSELLRLQDSELRLLELMKKWMSQRAKSDREYAGMLHHMFSQLEKQEGLGHLRATDHSSQIGESWWVLASQTETLSQTLRRHAEELAAGPLAKLSILIRDKQQLRKAFSEQWQQLSQEYARTTQQEMEKLKAQYRSLVRDSTQAKRKYQEASKDKEREKAKEKYVRSLWKLYALHNQYVLAVRAAALHHHHHYQRALPTLHESLYSLQQEMVLVLKEILGEYCSISSLVQEDVLAIHQEVAHAVEMIDPATEYSSFVQCHRYDSEVPPAVTFDESLLEETESLEPGELQLNELTIESVQHSLTSIEEELLASREAVSSKEQRVWELQVELRGEELALSPGERVHLLGKRQGLQEAQQQLQGLVCAQAKLQAQRDMLANKLAELGSEEPPPALPLQEDRQSVCSTDQERSGVTALETIKNHISGIFSPRFSLPPPVPLIPEVQKPLCQQAWYHGAIPRSEVQELLKCSGDFLVRESQGKQEYVLSVLWDGQPRHFIIQAADNLYRLEGDGFPTIPLLIDHLLQSQQPITRKSGIVLTRAVLKDKWVLNHEDVLLGERIGRGNFGEVFSGRLRADNTPVAVKSCRETLPPELKAKFLQEARILKQYNHPNIVRLIGVCTQKQPIYIVMELVQGGDFLSFLRSEGPHLKMKELIKMMENAAAGMEYLESKHCIHRDLAARNCLVTEKNTLKISDFGMSRQEEDGVYASTGGMKQIPVKWTAPEALNYGRYSSESDVWSFGILLWEAFSLGAVPYANLSNQQTREAIEQGVRLEPPEQCPEDVYRLMQRCWEYDPRRRPSFGAVHQDLIAIRKRHR

SEQ ID NO: 13666 - protein, 827 aa, Gallus gallus
MGLRGGGGRAGGPAPGWTCLLLCAALRSLLASPGSEVNLLDSRTVMGDLGWIAYPKNGWEEIGEVDENYAPIHTYQVCKVMEQNQNNWLLTSWISNEGRPASSFELKFTLRDCNSLPGGLGTCKETFNMYYFESDDEDGRNIRENQYIKIDTIAADESFTELDLGDRVMKLNTEVRDVGPLTKKGFYLAFQDVGACIALVSVRVYYKKCPSVIRNLARFPDTITGADSSQLLEVSGVCVNHSVTDEAPKMHCSAEGEWLVPIGKCLCKAGYEEKNNTCQAPSPVSSVKKGKITKNSISLSWQEPDRPNGIILEYEIKYFEKDQETSYTIIKSKETAITADGLKPGSAYVFQIRARTAAGYGGFSRRFEFETSPVLAASSDQSQIPIIVVSVTVGVILLAVVIGFLLSGRRCGYSKAKQDPEEEKMHFHNGHIKLPGVRTYIDPHTYEDPNQAVHEFAKEIEASCITIERVIGAGEFGEVCSGRLKLQGKREFPVAIKTLKVGYTEKQRRDFLGEASIMGQFDHPNIIHLEGVVTKSKPVMIVTEYMENGSLDTFLKKNDGQFTVIQLVGMLRGIASGMKYLSDMGYVHRDLAARNILINSNLVCKVSDFGLSRVLEDDPEAAYTTRGGKIPIRWTAPEAIAFRKFTSASDVWSYGIVMWEVMSYGERPYWEMTNQDVIKAVEEGYRLPSPMDCPAALYQLMLDCWQKDRNSRPKFDEIVSMLDKLIRNPSSLKTLVNASSRVSNLLVEHSPVGSGAYRSVGEWLEAIKMGRYTEIFMENGYSSMDSVAQVTLEDLRRLGVTLVGHQKKIMNSLQEMKVQLVNGMVPL

SEQ ID NO: 13667 - protein, 991 aa, Gallus gallus
MGLRGGGGRAGGPAPGWTCLLLCAALRSLLASPGSEVNLLDSRTVMGDLGWIAYPKNGWEEIGEVDENYAPIHTYQVCKVMEQNQNNWLLTSWISNEGRPASSFELKFTLRDCNSLPGGLGTCKETFNMYYFESDDEDGRNIRENQYIKIDTIAADESFTELDLGDRVMKLNTEVRDVGPLTKKGFYLAFQDVGACIALVSVRVYYKKCPSVIRNLARFPDTITGADSSQLLEVSGVCVNHSVTDEAPKMHCSAEGEWLVPIGKCLCKAGYEEKNNTCQVCRPGFFKASPHSPSCSKCPPHSYTLDEASTSCLCEEHYFRRESDPPTMACTRPPSAPRSAISNVNETSVFLEWIPPADTGGRKDVSYYIACKKCNSHSGLCEACGSHVRYLPQQTGLKNTSVMMVDLLAHTNYTFEIEAVNGVSDQNPGARQFVSVNVTTNQAAPSPVSSVKKGKITKNSISLSWQEPDRPNGIILEYEIKYFEKDQETSYTIIKSKETAITADGLKPGSAYVFQIRARTAAGYGGFSRRFEFETSPVLAASSDQSQIPIIVVSVTVGVILLAVVIGFLLSGRRCGYSKAKQDPEEEKMHFHNGHIKLPGVRTYIDPHTYEDPNQAVHEFAKEIEASCITIERVIGAGEFGEVCSGRLKLQGKREFPVAIKTLKVGYTEKQRRDFLGEASIMGQFDHPNIIHLEGVVTKSKPVMIVTEYMENGSLDTFLKKNDGQFTVIQLVGMLRGIASGMKYLSDMGYVHRDLAARNILINSNLVCKVSDFGLSRVLEDDPEAAYTTRGGKIPIRWTAPEAIAFRKFTSASDVWSYGIVMWEVMSYGERPYWEMTNQDVIKAVEEGYRLPSPMDCPAALYQLMLDCWQKDRNSRPKFDEIVSMLDKLIRNPSSLKTLVNASSRVSNLLVEHSPVGSGAYRSVGEWLEAIKMGRYTEIFMENGYSSMDSVAQVTLEDLRRLGVTLVGHQKKIMNSLQEMKVQLVNGMVPL

SEQ ID NO: 13668 - protein, 1013 aa, Gallus gallus
MGLRGGGGRAGGPAPGWTCLLLCAALRSLLASPGSEVNLLDSRTVMGDLGWIAYPKNGWEEIGEVDENYAPIHTYQVCKVMEQNQNNWLLTSWISNEGRPASSFELKFTLRDCNSLPGGLGTCKETFNMYYFESDDEDGRNIRENQYIKIDTIAADESFTELDLGDRVMKLNTEVRDVGPLTKKGFYLAFQDVGACIALVSVRVYYKKCPSVIRNLARFPDTITGADSSQLLEVSGVCVNHSVTDEAPKMHCSAEGEWLVPIGKCLCKAGYEEKNNTCQVCRPGFFKASPHSPSCSKCPPHSYTLDEASTSCLCEEHYFRRESDPPTMACTRPPSAPRSAISNVNETSVFLEWIPPADTGGRKDVSYYIACKKCNSHSGLCEACGSHVRYLPQQTGLKNTSVMMVDLLAHTNYTFEIEAVNGVSDQNPGARQFVSVNVTTNQAAPSPVSSVKKGKITKNSISLSWQEPDRPNGIILEYEIKYFEKDQETSYTIIKSKETAITADGLKPGSAYVFQIRARTAAGYGGFSRRFEFETSPVLAASSDQSQIPIIVVSVTVGVILLAVVIGFLLSGSCCDHGCGWASSLRAVAYPSLIWRCGYSKAKQDPEEEKMHFHNGHIKLPGVRTYIDPHTYEDPNQAVHEFAKEIEASCITIERVIGAGEFGEVCSGRLKLQGKREFPVAIKTLKVGYTEKQRRDFLGEASIMGQFDHPNIIHLEGVVTKSKPVMIVTEYMENGSLDTFLKKNDGQFTVIQLVGMLRGIASGMKYLSDMGYVHRDLAARNILINSNLVCKVSDFGLSRVLEDDPEAAYTTRGGKIPIRWTAPEAIAFRKFTSASDVWSYGIVMWEVMSYGERPYWEMTNQDVIKAVEEGYRLPSPMDCPAALYQLMLDCWQKDRNSRPKFDEIVSMLDKLIRNPSSLKTLVNASSRVSNLLVEHSPVGSGAYRSVGEWLEAIKMGRYTEIFMENGYSSMDSVAQVTLEDLRRLGVTLVGHQKKIMNSLQEMKVQLVNGMVPL

SEQ ID NO: 13669 - protein, 490 aa, Gallus gallus
YVFQIRARTAAGYGGFSRRFEFETSPVLAASSDQSQIPIIVVSVTVGVILLAVVIGFLLSGSCCDHGCGWASSLRAVAYPSLIWRCGYSKAKQDPEEEKMHFHNGHIKLPGVRTYIDPHTYEDPNQAVHEFAKEIEASCITIERVIGAGEFGEVCSGRLKLQGKREFPVAIKTLKVGYTEKQRRDFLGEASIMGQFDHPNIIHLEGVVTKSKPVMIVTEYMENGSLDTFLKKNDGQFTVIQLVGMLRGIASGMKYLSDMGYVHRDLAARNILINSNLVCKVSDFGLSRVLEDDPEAAYTTRGGKIPIRWTAPEAIAFRKFTSASDVWSYGIVMWEVMSYGERPYWEMTNQDVIKAVEEGYRLPSPMDCPAALYQLMLDCWQKDRNSRPKFDEIVSMLDKLIRNPSSLKTLVNASSRVSNLLVEHSPVGSGAYRSVGEWLEAIKMGRYTEIFMENGYSSMDSVAQVTLEDESPCEKWSLTLHPLFPTGYQT

SEQ ID NO: 13670 - protein, 984 aa, Gallus gallus
  unsure (1)..(984): unsure at all Xaa locations
ETLMDTRTATAELGWTANPPSGWEEVSGYDENLNTIRTYQVCNVFEPNQNNWLLTTFINRRGAHRIYTEMRFTVRDCSSLPNVPGSCKETFNLYYYETDSVIATKKSAFWTEAPYLKVDTIAADESFSQVDFGGRLMKGXXXXXXXXXXXXXXXXXXXXXXXXXXXXXXXXXFFKKCPSVVQNFAIFPETMTGAESTSLVTARGTCIPNAEEVDVPIKLYCNGDGEWMVPIGRCTCKAGYEPENNVACRACPAGTFKASQGAGLCARCPPNSRSSAEASPLCACRNGYFRADLDPPTAACTSVPSGPRNVISIVNETSIILEWNPPRETGGRDDVTYNIVCKKCRADRRACSRCDDNVEFVPRQLGLTETRVFISSLWAHTPYTFEIQAVNGVSNKSPFPPQHVSVNITTNQAAPSTVPIMHQVSATMRSITLSWPQPEQPNGIILDYELRYYEKLSRICTPDVSGTVGSRPAADHNEYNSSVARSQTNTARLEGLRPGMVYVVQVRARTVAGYGKYSGKMCFQTLTDDDYKSELREQLPLIAGSAAAGVVFIVSLVAISIVCSRKRAYSKEVVYSDKLQHYSTGRGSPGMKIYIDPFTYEDPNEAVREFAKEIDVSFVKIEEVIGAGEFGEVYKGRLKLPGKREIYVAIKTLKAGYSEKQRRDFLSEASIMGQFDHPNIIRLEGVVTKSRPVMIITEFMENGALDSFLRQNDGQFTVIQLVGMLRGIAAGMKYLAEMNYVHRDLAARNILVNSNLVCKVSDFGLSRYLQDDTSDPTYTSSLGGKIPVRWTAPEAIAYRKFTSASDVWSYGIVMWEVMSFGERPYWDMSNQDVINAIEQDYRLPPPMDCPAALHQLMLDCWQKDRNTRPRLAEIVNTLDKMIRNPASLKTVATITAVPSQPLLDRSIPDFTAFTSVEDWLSAVKMSQYRDNFLSAGFTSLQLVAQMTSEDLLRIGVTLAGHQKKILNSIQSMRVQMSQSPTSMA

SEQ ID NO: 13671 - protein, 952 aa, Gallus gallus
  unsure (1)..(952): unsure at all Xaa locations
ETLMDTRTATAELGWTANPPSGWEEVSGYDENLNTIRTYQVCNVFEPNQNNWLLTTFINRRGAHRIYTEMRFTVRDCSSLPNVPGSCKETFNLYYYETDSVIATKKSAFWTEAPYLKVDTIAADESFSQVDFGGRLMKGXFFKKCPSVVQNFAIFPETMTGAESTSLVTARGTCIPNAEEVDVPIKLYCNGDGEWMVPIGRCTCKAGYEPENNVACRACPAGTFKASQGAGLCARCPPNSRSSAEASPLCACRNGYFRADLDPPTAACTSVPSGPRNVISIVNETSIILEWNPPRETGGRDDVTYNIVCKKCRADRRACSRCDDNVEFVPRQLGLTETRVFISSLWAHTPYTFEIQAVNGVSNKSPFPPQHVSVNITTNQAAPSTVPIMHQVSATMRSITLSWPQPEQPNGIILDYELRYYEKLSRICTPDVSGTVGSRPAADHNEYNSSVARSQTNTARLEGLRPGMVYVVQVRARTVAGYGKYSGKMCFQTLTDDDYKSELREQLPLIAGSAAAGVVFIVSLVAISIVCSRKRAYSKEVVYSDKLQHYSTGRGSPGMKIYIDPFTYEDPNEAVREFAKEIDVSFVKIEEVIGAGEFGEVYKGRLKLPGKREIYVAIKTLKAGYSEKQRRDFLSEASIMGQFDHPNIIRLEGVVTKSRPVMIITEFMENGALDSFLRQNDGQFTVIQLVGMLRGIAAGMKYLAEMNYVHRDLAARNILVNSNLVCKVSDFGLSRYLQDDTSDPTYTSSLGGKIPVRWTAPEAIAYRKFTSASDVWSYGIVMWEVMSFGERPYWDMSNQDVINAIEQDYRLPPPMDCPAALHQLMLDCWQKDRNTRPRLAEIVNTLDKMIRNPASLKTVATITAVPSQPLLDRSIPDFTAFTSVEDWLSAVKMSQYRDNFLSAGFTSLQLVAQMTSEDLLRIGVTLAGHQKKILNSIQSMRVQMSQSPTSMA

SEQ ID NO: 13672 - protein, 450 aa, Gallus gallus
MSGMQAVWPSGTECIAKYNFHGTAEQDLPFSKGDVLTIVAVTKDPNWYKAKNKVGREGIIPANYVQKREGVKAGIKLSLMPWFHGKITREQAERLLYPPETGLFLVRESTNYPGDYTLCVSCEGKVEHYRIIYSSSKLSIDEEVYFENLMQLVEHYTTDADGLCSRLIKPKVMEGTVAAQDEFSRSGWALNMKDLKLLQIIGKGEFGDVMLGDYRGNKVAVKCIKNDATAQAFLAEASVMTQLRHSNLVQLLGVIVEEKSGLYIVTEYMAKGSLVDYLRSRGRSVLGGDCLLKFSLDVCEAMEYLEANNFVHRDLAARNVLVSEDNIAKVSDFGLTKEASSTQDTGKLPVKWTAPEALREKKFSTKSDVWSFGILLWEIYSFGRVPYPRIPLKDVVPRVEKGYKMDPPDGCPAIVYEVMKKCWTLDPGHRPSFHQLREQLVHIKEKELYL

SEQ ID NO: 13673 - protein, 1053 aa, Gallus gallus
MAAAYLDPNLNHTPSSSAKTHLGTGMERSPGAMERVLKVFHYFENSSEPTTWASIIRHGDATDVRGIIQKIVDCHKVKNVACYGLRLSHLQSEEVHWLHLDMGVSNVREKFELAHPPEEWKYELRIRYLPKGFLNQFTEDKPTLNFFYQQVKNDYMLEIADQVDQEIALKLGCLEIRRSYGEMRGNALEKKSNYEVLEKDVGLRRFFPKSLLDSVKAKTLRKLIQQTFRQFANLNREESILKFFEILSPVYRFDKECFKCALGSSWIISVELAIGPEEGISYLTDKGANPTHLADFNQVQTIQYSNSEDKDRKGMLQLKIAGAPEPLTVTAPSLTIAENMADLIDGYCRLVNGATQSFIIRPQKEGERALPSIPKLANNEKQGVRSHTVSVSETDDYAEIIDEEDTYTMPSTRDYEIQRERIELGRCIGEGQFGDVHQGIYMSPENPAMAVAIKTCKNCTSDSVREKFLQEALTMRQFDHPHIVKLIGVITENPVWIIMELCTLGELRSFLQVRKFSLDLASLILYAYQLSTALAYLESKRFVHRDIAARNVLVSATDCVKLGDFGLSRYMEDSTYYKASKGKLPIKWMAPESINFRRFTSASDVWMFGVCMWEILMHGVKPFQGVKNNDVIGRIENGERLPMPPNCPPTLYSLMTKCWAYDPSRRPRFTELKAQLSTILEEEKLQQEERMRMESRRQVTVSWDSGGSDEAPPKPSRPGYPSPRSSEGFYPSPQHMVQPNHYQVSGYSGSHGIPAMAGSIYPGQASLLDQTDSWNHRPQEVSAWQPNMEDSGTLDVRGMGQVLPTHLMEERLIRQQQEMEEDQRWLEKEERFLVMKPDVRLSRGSIEREDGGLQGPAGNQHIYQPVGKPDHAAPPKKPPRPGAPHLGSLASLNSPVDSYNEGVKIKPQEISPPPTANLDRSNDKVYENVTGLVKAVIEMSSKIQPAPPEEYVPMVKEVGLALRTLLATVDESLPVLPASTHREIEMAQKLLNSDLAELINKMKLAQQYVMTSLQQEYKKQMLTAAHALAVDAKNLLDVIDQARLKMISQSRPH

SEQ ID NO: 13674 - protein, 1028 aa, Gallus gallus
MERSPGAMERVLKVFHYFENSSEPTTWASIIRHGDATDVRGIIQKIVDCHKVKNVACYGLRLSHLQSEEVHWLHLDMGVSNVREKFELAHPPEEWKYELRIRYLPKGFLNQFTEDKPTLNFFYQQVKNDYMLEIADQVDQEIALKLGCLEIRRSYGEMRGNALEKKSNYEVLEKDVGLRRFFPKSLLDSVKAKTLRKLIQQTFRQFANLNREESILKFFEILSPVYRFDKECFKCALGSSWIISVELAIGPEEGISYLTDKGANPTHLADFNQVQTIQYSNSEDKDRKGMLQLKIAGAPEPLTVTAPSLTIAENMADLIDGYCRLVNGATQSFIIRPQKEGERALPSIPKLANNEKQGVRSHTVSVSETDDYAEIIDEEDTYTMPSTRDYEIQRERIELGRCIGEGQFGDVHQGIYMSPENPAMAVAIKTCKNCTSDSVREKFLQEALTMRQFDHPHIVKLIGVITENPVWIIMELCTLGELRSFLQVRKFSLDLASLILYAYQLSTALAYLESKRFVHRDIAARNVLVSATDCVKLGDFGLSRYMEDSTYYKASKGKLPIKWMAPESINFRRFTSASDVWMFGVCMWEILMHGVKPFQGVKNNDVIGRIENGERLPMPPNCPPTLYSLMTKCWAYDPSRRPRFTELKAQLSTILEEEKLQQEERMRMESRRQVTVSWDSGGSDEAPPKPSRPGYPSPRSSEGFYPSPQHMVQPNHYQVSGYSGSHGIPAMAGSIYPGQASLLDQTDSWNHRPQEVSAWQPNMEDSGTLDVRGMGQVLPTHLMEERLIRQQQEMEEDQRWLEKEERFLVMKPDVRLSRGSIEREDGGLQGPAGNQHIYQPVGKPDHAAPPKKPPRPGAPHLGSLASLNSPVDSYNEGVKIKPQEISPPPTANLDRSNDKVYENVTGLVKAVIEMSSKIQPAPPEEYVPMVKEVGLALRTLLATVDESLPVLPASTHREIEMAQKLLNSDLAELINKMKLAQQYVMTSLQQEYKKQMLTAAHALAVDAKNLLDVIDQARLKMISQSRPH

SEQ ID NO: 13675 - protein, 983 aa, Gallus gallus
MDRRRLPLLLLCAALGSAGRLSARPGNEVNLLDSKTIQGELGWISYPSHGWEEISGVDEHYTPIRTYQESNVMDHSQNNWLRTNWIPRNSAQKIYVELKFTLRDCNSIPLVLGTCKETFNLYYMESDDDHLAKFREHQFTKIDTIAADESFTQMDLGDRILKLNTEVREVGPVSKKGFYLAFQDVGACVALVSVRVYFKKCPFTVKNLAMFPDTVPMDSQSLVEVRGSCVNHSKEEEPPKMYCSTEGEWLVPIGKCLCNAGYEERGFACQACRPGFYKASAGNVKCAKCPPHSSTYEDASLNCRCEKNYFRSEKDPPSMACTRPPSAPRNVISNINETSVILDWSWPLDTGGRKDVTFNIICKKCGGSSKICEPCSDNVRFLPRQTGLTNTTVTVVDLLAHTNYTFEIDAVNGVSDLSTLSRQFAAVSITTNQAAPSPITVIRKDRTSRNSVSLSWQEPEHPNGIILDYEVKYYEKQEQETSYTILRAKSTNVTISGLKPDTTYVFQIRARTAARYGTSSRKFEFETSPDSFSISSENSQVVMIAISAAVAIILLTVVVYVLIGRFCGYKKSKHGTDEKRLHFGNGHLKLPGLRTYVDPHTYEDPNQAVHEFAKELDASNISIDKVVGAGEFGEVCSGRLKLPSKKEISVAIKTLKAGYTEKQRRDFLGEASIMGQFDHPNIIRLEGVVTKSKPVMIVTEYMENGSLDSFLRKHDAQFTVIQLVGMLRGIASGMKYLSDMGYVHRDLAARNILINSNLVCKVSDFGLSRVLEDDPEAAYTTRGGKIPIRWTSPEAIAYRKFTSASDAWSYGIVLWEVMSYGERPYWEMSFQDVIKAVDEGYRLPPPMDCPAALYQLMLDCWQKDRNNRPKFEQIVSILDKLIRNPSSLKIITNAAARPSNLLLDQSNIDISAFRTAGDWLNGFRTGQCKGIFTGVEYSSCDTIAKISTDDMKKVGVTVVGPQKKIVSSIKTLETHTKNSPVPV

SEQ ID NO: 13676 - protein, 452 aa, Gallus gallus
MDDIFTQCREGNAVAVRLWLDNTENDLNQGDDHGFSPLHWACREGRSNVVDMLIMRGARINVMNRGDDTPLHLAASHGHRDIVQKLIQFKADINAVNEHGNTPLHYACFWGHDTVAEDLVGNGALVSIANKYSETPIDKAKMPLREILKERAEKLGQNLTKIPYKDTFWKGTTRTRPRNGTLNKLAGIDFKQLSLSQKLNENQSGELWKGRWQGNDIVIKMLKIRDWTTRKSRDFNEEYPKLRIFSHPNVLPVLGACQSPPAPHPIVISHWMPYGSLYNVLHEGTNFVVDQMQAVKFAFDIARGMAFLHTLEPLIPRHHLNSRSIMIDEDMTARISMADVKFSFQCPGRMYAPAWVAPEALQKKPEEINRRSADMWSFAVLLWELVTREVPFADLSNMEIGMKVALEGLRPTIPPGISPHICKLMKICMNEDPAKRPKFDMIVPILEKMQDK

SEQ ID NO: 13677 - protein, 1004 aa, Gallus gallus
MGPLWFCCLPLALLPLLAAVEETLMDSTTATAELGWMVHPPSGWEEVSGYDENMNTIRTYQVCNVFESSQNNWLRTKYIRRRGAHRIHVEMKFSVRDCSSIPNVPGSCKETFNLYYYESDFDSATKTFPNWMENPWMKVDTIAADESFSQVDLGGRVMKINTEVRSFGPVSKNGFYLAFQDYGGCMSLIAVRVFYRKCPRVIQNGAVFQETLSGAESTSLVAARGTCISNAEEVDVPIKLYCNGDGEWLVPIGRCMCRPGYESVENGTVCRGCPSGTFKASQGDEGCVHCPINSRTTSEGATNCVCRNGYYRADADPVDMPCTTIPSAPQAVISSVNETSLMLEWTPPRDSGGREDLVYNIICKSCGSGRGACTRCGDNVQFAPRQLGLTEPRIYISDLLAHTQYTFEIQAVNGVTDQSPFSPQFASVNITTNQAAPSAVSIMHQVSRTVDSITLSWSQPDQPNGVILDYELQYYEKNLSELNSTAVKSPTNTVTVQNLKAGTIYVFQVRARTVAGYGRYSGKMYFQTMTEAEYQTSVQEKLPLIIGSSAAGLVFLIAVVVIIIVCNRRRGFERADSEYTDKLQHYTSGHSTYRGPPPGLGVRLFVMTPGMKIYIDPFTYEDPNEAVREFAKEIDISCVKIEQVIGAGEFGEVCSGHLKLPGKREIFVAIKTLKSGYTEKQRRDFLSEASIMGQFDHPNVIHLEGVVTKSSPVMIITEFMENGSLDSFLRQNDGQFTVIQLVGMLRGIAAGMKYLADMNYVHRDLAARNILVNSNLVCKVSDFGLSRFLEDDTSDPTYTSALGGKIPIRWTAPEAIQYRKFTSASDVWSYGIVMWEVMSYGERPYWDMTNQDVINAIEQDYRLPPPMDCPNALHQLMLDCWQKDRNHRPKFGQIVNTLDKMIRNPNSLKAMAPLSSGVNLPLLDRTIPDYTSFNTVDEWLDAIKMSQYKESFASAGFTTFDIVSQMTVEDILRVGVTLAGHQKKILNSIQVMRAQMNQIQSVEV

SEQ ID NO: 13678 - protein, 995 aa, Gallus gallus
MPGPERTMGPLWFCCLPLALLPLLAAVEETLMDSTTATAELGWMVHPPSGWEEVSGYDENMNTIRTYQVCNVFESSQNNWLRTKYIRRRGAHRIHVEMKFSVRDCSSIPNVPGSCKETFNLYYYESDFDSATKTFPNWMENPWMKVDTIAADESFSQVDLGGRVMKINTEVRSFGPVSKNGFYLAFQDYGGCMSLIAVRVFYRKCPRVIQNGAVFQETLSGAESTSLVAARGTCISNAEEVDVPIKLYCNGDGEWLVPIGRCMCRPGYESVENGTVCRGCPSGTFKASQGDEGCVHCPINSRTTSEGATNCVCRNGYYRADADPVDMPCTTIPSAPQAVISSVNETSLMLEWTPPRDSGGREDLVYNIICKSCGSGRGACTRCGDNVQFAPRQLGLTEPRIYISDLLAHTQYTFEIQAVNGVTDQSPFSPQFASVNITTNQAAPSAVSIMHQVSRTVDSITLSWSQPDQPNGVILDYELQYYEKNLSELNSTAVKSPTNTVTVQNLKAGTIYVFQVRARTVAGYGRYSGKMYFQTMTEAEYQTSVQEKLPLIIGSSAAGLVFLIAVVVIIIVCNRRRGFERADSEYTDKLQHYTSGHMTPGMKIYIDPFTYEDPNEAVREFAKEIDISCVKIEQVIGAGEFGEVCSGHLKLPGKREIFVAIKTLKSGYTEKQRRDFLSEASIMGQFDHPNVIHLEGVVTKSSPVMIITEFMENGSLDSFLRQNDGQFTVIQLVGMLRGIAAGMKYLADMNYVHRDLAARNILVNSNLVCKVSDFGLSRFLEDDTSDPTYTSALGGKIPIRWTAPEAIQYRKFTSASDVWSYGIVMWEVMSYGERPYWDMTNQDVINAIEQDYRLPPPMDCPNALHQLMLDCWQKDRNHRPKFGQIVNTLDKMIRNPNSLKAMAPLSSGVNLPLLDRTIPDYTSFNTVDEWLDAIKMSQYKESFASAGFTTFDIVSQMTVEDILRVGVTLAGHQKKILNSIQVMRAQMNQIQSVEV

SEQ ID NO: 13679 - protein, 767 aa, Coturnix coturnix
MAALSSGSSAEGASLFNGDMEPEPPPPVLGACYAGSGGGDPAIPEEVWNIKQMIKLTQEHIEALLDKFGGEHNPPSIYLEAYEEYTSKLDALQQREQQLLESMGNGTDFSVSSSASTDTVASSSSSSLSVAPSSLSVYQNPTDMSRNNPKSPQKPIVRVFLPNKQRTVVPARCGVTVRDSLKKALMMRGLIPECCAVYRIQDGEKKPIGWDTDISWLTGEELHVEVLENVPLTTHNFVRKTFFTLAFCDFCRKLLFQGFRCQTCGYKFHQRCSTEVPLMCVNYDQLDLLFVSKFFEHHPISQEETTLGETTPASGSYPSVPPSDSVGPPILPSPSPSKSIPIPQPFRPADEDHRNQFGQRDRSSSAPNVHINTIEPVNIDDLIRDQGVRGEGGSTAGLSATPPASLPGSLTNVKALQKSPGPQRERKSSSSSEDRNRMKTLGRRDSSDDWEIPDGQITVGQRIGSGSFGTVYKGKWHGDVAVKMLNVTAPTPQQLQAFKNEVGVLRKTRHVNILLFMGYSTKPQLAIVTQWCEGSSLYHHLHIIETKFEMIKLIDIARQTAQGMDYLHAKSIIHRDLKSNNIFLHEDLTVKIGDFGLATVKSRWSGSHQFEQLSGSILWMAPEVIRMQDKNPYSFQSDVYAFGIVLYELMTGQLPYSNINNRDQIIFMVGRGYLSPDLSKVRSNCPKAMKRLMAECLKKKRDERPLFPQILASIELLARSLPKIHRSASEPSLNRAGFQTEDFSLYACASPKTPIQAGGYGEFAAFK

SEQ ID NO: 13680 - protein, 807 aa, Coturnix japonica
MAALSSGSSAEGASLFNGDMEPEPPPPVLGACYAGSGGGDPAIPEEVWNIKQMIKLTQEHIEALLDKFGGEHNPPSIYLEAYEEYTSKLDALQQREQQLLESMGNGTDFSVSSSASTDTVASSSSSSLSVAPSSLSVYQNPTDMSRNNPKSPQKPIVRVFLPNKQRTVVPARCGVTVRDSLKKALMMRGLIPECCAVYRIQDGEKKPIGWDTDISWLTGEELHVEVLENVPLTTHNFVRKTFFTLAFCDFCRKLLFQGFRCQTCGYKFHQRCSTEVPLMCVNYDQLDLLFVSKFFEHHPISQEETTLGETTPASGSYPSVPPSDSVGPPILPSPSPSKSIPIPQPFRPADEDHRNQFGQRDRSSSAPNVHINTIEPVNIDDLIRDQGVRGEGAPLNQLMRCLRKYQSRTPSPLLHSVPSEIVFDFEPGPVFRGSTAGLSATPPASLPGSLTNVKALQKSPGPQRERKSSSSSEDRNRMKTLGRRDSSDDWEIPDGQITVGQRIGSGSFGTVYKGKWHGDVAVKMLNVTAPTPQQLQAFKNEVGVLRKTRHVNILLFMGYSTKPQLAIVTQWCEGSSLYHHLHIIETKFEMIKLIDIARQTAQGMDYLHAKSIIHRDLKSNNIFLHEDLTVKIGDFGLATVKSRWSGSHQFEQLSGSILWMAPEVIRMQDKNPYSFQSDVYAFGIVLYELMTGQLPYSNINNRDQIIFMVGRGYLSPDLSKVRSNCPKAMKRLMAECLKKKRDERPLFPQILASIELLARSLPKIHRSASEPSLNRAGFQTEDFSLYACASPKTPIQAGGYGEFAAFK

SEQ ID NO: 13681 - protein, 369 aa, Macaca fascicularis
MHFHNGHIKLPGVRTYIDPHTYEDPNQAVHEFAKEIEASCITIERVIGAGEFGEVCSGRLKLPGKRELPVAIKTLKVGYTEKQRRDFLGEASIMGQFDHPNIIHLEGVVTKSKPVMIVTEYMENGSLDTFLKKNDGQFTVIQLVGMLRGIAAGMKYLSDMGYVHRDLAARNILINSNLVCKVSDFGLSRVLEDDPEAAYTTRGGKIPIRWTAPEAIAFRKFTSASDVWSYGIVMWEVVSYGERPYWEMTNQDVIKAVEEGYRLPSPMDCPAALYQLMLDCWQKDRNSRPKFDEIVNMLDKLIRNPSSLKTLVNASCRVSNLLAEHSPLGSGAYRSVGEWLEAIKMGRYTEIFMENGYSSMDAVAQVTLE

SEQ ID NO: 13682 - protein, 504 aa, Macaca fascicularis
MGCMKSKFLQAGGNTFSKTETSANPHCPVYVPDPTSTIKPGPNSNNRNTPGIGEGSEDIIVVALYDYEAIHHEDLSFQKGDQMVVLEESGEWWKARSLATRKEGYIPSNYVARVDSLETEEWFFKGISRKDAERQLLAPGNMLGSFMIRDSETTKGSYSLSVRDYDPRQGDTVKHYKIRTLDNGGFYISPRSTFSTLQELVDHYKKGSDGLCQKLSVPCVSSKPQKPWEKDAWEIPRESLKLEKKLGAGQFGEVWMATYNKHTKVAVKTMKPGSMSVEAFLAEANLMKTLQHDKLVKLHAVVTKEPIYIITEFMAKGSLLDFLKSDEGSKQPLPKLIDFSAQIAEGMAFIEQRNYIHRDLRAANILVSASLVCKIADFGLARIIEDNEYTAREGAKFPIKWTAPEAINFGSSTIKSDVWSFGILLMEIVTYGRIPYPGMSNPEVIRALERGYRMPRPENCPEELYNIMMRCWKNRPEERPTFEYIQSVLDDFYTATESQYQQQP

SEQ ID NO: 13683 - protein, 301 aa, Papio hamadryas
EVMLSTRIGSGSFGTVYKGKWHGDVAVKILKVVDPTPEQFQAFRNEVAVLRKTRHVNILLFMGYMTKDNLAIVTQWCEGSSLYKHLHVQETKFQMFQLIDIARQTAQGMDYLHAKNIIHRDMKSNNIFLHEGLTVKIGDFGLATVKSRWSGSQQVEQPTGSVLWMAPEVIRMQDNNPFSFQSDVYSYGIVLYELMTGELPYSHINNRDQIIFMVGRGYASPDLSKLYKNCPKAMKRLVADCVKKVKEERPLFPQILSSIELLQHSLPKINRSASEPSLHRAAHTEDINACTLTTSPRLPVF

SEQ ID NO: 13684 - protein, 1066 aa, Homo sapiens
PLPYWTAVFEYEAAGEDELTLRLGDVVEVLSKDSQVSGDEGWWTGQLNQRVGIFPSNYVTPRSAFSSRCQPGGEDPSCYPPIQLLEIDFAELTLEEIIGIGGFGKVYRAFWIGDEVAVKAARHDPDEDISQTIENVRQEAKLFAMLKHPNIIALRGVCLKEPNLCLVMEFARGGPLNRVLSGKRIPPDILVNWAVQIARGMNYLHDEAIVPIIHRDLKSSNILILQKVENGDLSNKILKITDFGLAREWHRTTKMSAAGTYAWMAPEVIRASMFSKGSDVWSYGVLLWELLTGEVPFRGIDGLAVAYGVAMNKLALPIPSTCPEPFAKLMEDCWNPDPHSRPSFTNILDQLTTIEESGFFEMPKDSFHCLQDNWKHEIQEMFDQLRAKEKELRTWEEELTRAALQQKNQEELLRRREQELAEREIDILERELNIIIHQLCQEKPRVKKRKGKFRKSRLKLKDGNRISLPSDFQHKFTVQASPTMDKRKSLINSRSSPPASPTIIPRLRAIQLTPGESSKTWGRSSVVPKEEGEEEEKRAPKKKGRTWGPGTLGQKELASGDEGSPQRREKANGLSTPSESPHFHLGLKSLVDGYKQWSSSAPNLVKGPRSSPALPGFTSLMEMALLAASWVVPIDIEEDEDSEGPGSGESRLQHSPSQSYLCIPFPRGEDGDGPSSDGIHEEPTPVNSATSTPQLTPTNSLKRGGAHHRRCEVALLGCGAVLAATGLGFDLLEAGKCQLLPLEEPEPPAREEKKRREGLFQRSSRPRRSTSPPSRKLFKKEEPMLLLGDPSASLTLLSLSSISECNSTRSLLRSDSDEIVVYEMPVSPVEAPPLSPCTHNPLVNVRVERFKRDPNQSLTPTHVTLTTPSQPSSHRRTPSDGALKPETLLASRSPSSNGLSPSPGAGMLKTPSPSRDPGEFPRLPDPNVVFPPTPRRWNTQQDSTLERPKTLEFLPRPRPSANRQRLDPWWFVSPSHARSTSPANSSSTETPSNLDSCFASSSSTVEERPGLPALLPFQAGPLPPTERTLLDLDAEGQSQDSTVPLCRAELNTHRPAPYEIQQEFWS

SEQ ID NO: 13685 - protein, 823 aa, Canis familiaris
MGFGSDLKNSHEAVLKLQDWELRLLETVKKFMALRIKSDKEYASTLQNLCNQVDKESTVQMNYVSNVSKSWLLMIQQTEQLSRIMKTHAEDLNSGPLHRLTMMIKDKQQVKKSFIGVHQQIEAEMIKVTKTELEKLKSSYRQLIKEMNSAKEKYKEALAKGKETEKAKERYDKATMKLHVLHNQYVLALKGAQLHQNQYYDTTLPLLLDSLQKMQEEMIKALKGIFDEYSQITSLVTEEIVNVHKEIQMSVEQIDPSTEYNNFIDVHRTTAAKEQEIEFDTSLLEENENLQANEIMWNNLTAESLQVMLKTLAEELIQTQQMLVNKEEAVLELEKRIEESSKTCEKKSDIVLLLSQKQTLEELKQSVQQLRCTEAKFTAQKELLEQKVQENEGKEPPPVVNYEEDARSVTSMERKERLSKFESIRHSIAGIIRSPKSALGSSTFSDTIPISEKPLAEQDWYHGAIPRIEAQDLLKQQGDFLVRESHGKPGEYVLSVYSDGQRRHFIIQFVDNLYRFEGTGFSNIPQLIDHHYTTKQVITKKSGVVLLNPIPKDKKWVLNHEDVTLGELLGKGNFGEVYKGILKDKTAVAVKTCKEDLPQELKIKFLQEAKILKQYDHPNIVKLIGVCTQRQPIYIIMELVPGGDFLSFLRKKKDEIKLKQLVKFSLDAASGMSYLESKNCIHRDLAARNCLVGENNVLKISDFGMSRQEDGGVYSSSGLKQIPIKWTAPEALNYGRYSSESDVWSFGILLWETFSLGVCPYPGMTNQQATEQVERGYRISAPQHCPEDIFKIMMKCWDYKPENRPKFSELQKELTVIKKKVTQ

SEQ ID NO: 13686 - protein, 539 aa, Canis familiaris
MGCIKSKEDKGPAIKYRNTPEPVSVSHYGAEPTQATPWPSSSGWGTAFNFSSLSMTGFGGSSGVTPFGGASSSFSVVPSPYPAGLTGGVTIFVALYDYEARTTEDLSFKGGERFQIINNTEGDWWEARSIATGKNGYIPSNYVAPADSIAAEEWYFGKMGRKDAERLLLNPGNQRGIFLVRESETTKGAYSLSIRDWDEIRGDNVKHYKIRKLDNGGYYITTRAQFDTLQKLVKHSTEHADGLCHKLTTVCPTVKPQTQGLAKDAWEIPRESLRLEVKLGQGCFGEVWMGTWNGTTKVAIKTLKLGTMMPEAFLQEAQIMKKLRHDKLVPLYAVVSEEPIYIVTEFMSKGSLLDFLKEGDGKYLKLPQLVDMAAQIADGMAYIERMNYIHRDLRAANILVGENLVCKIADFGLARLIEDNEYTARQGAKFPIKWTAPEAALYGRFTIKSDVWSFGILQTELTTKGRVPYPGMVNREVLEQVERGYRMPCPQGCPESLHELMNLCWKKDPDERPTFEYIQSFLEDYFTAAEPQYQPGENL

SEQ ID NO: 13687 - protein, 820 aa, Felis catus
MGFSSELCSPQGHGAVQQMQEAELRLLEGMRKWMAQRVKSDREYAGLLHHMSLQDGGGRGTGPYSPISQSWAEITSQTEGLSRLLRQHAEDLNSGPLSKLGLLIRERQQLRKTYSEQWQQLQQELTKTHNQDIEKLKSQYRALARDSAQARRKYQEASKDKDRDKAKDKYVRSLWKLFAHHNRYVLGVRAAQLHHHHHHQLMLPGLLQSLQDLHQEMACILKEILQEYLEISSLVQDEVVAIHLEMAAAVARIQPEAEYQGFLRQYGSTPDVPPCVTFDESLLEEGEPLEPGELQLNELTVESVQHTLTSVTDELTVATQTVLSRQEAVAQLQRELQNEEQNTHPRERVQLLAKKQVLQEALQALQVALCSQAKLQAQRELLQAKLEQLGPGEPPPVLLLQDDRHSTSSSEQEREGGRTPTLEILKSHISGIFRPKFSLPPPLQLVPEVQKPLHEQLWYHGALPRAEVAELLTHSGDFLVRESQGKQEYVLSVLWDGQPRHFIIQSADNLYRLEGDGFASIPLLVDHLLRSQQPLTKKSGIVLNRAVPKDKWVLNHEDLVLGEQIGRGNFGEVFSGRLRADNTLVAVKSCRETLPPDIKAKFLQEAKILKQYSHPNIVRLIGVCTQKQPIYIVMELVQGGDFLTFLRTEGARLRMKTLLQMVGDAAAGMEYLESKCCIHRDLAARNCLVTEKNVLKISDFGMSREEADGIYAASGGLRQVPVKWTAPEALNYGRYSSESDVWSFGILLWETFSLGASPYPNLSNQQTREFVEKGGRLPCPELCPDAVFRLMEQCWAYEPGQRPSFSAIYQELQSIRKRHR

SEQ ID NO: 13688 - protein, 820 aa, Felis catus
MGFSSELCSPQGHGAVQQMQEAELRLLEGMRKWMAQRVKSDREYAGLLHHMSLQDGGGRGTGPYSPISQSWAEITSQTEGLSRLLRQHAEDLNSGPLSKLGLLIRERQQLRKTYSEQWQQLQQELTKTHNQDIEKLKSQYRALARDSAQARRKYQEASKDKDRDKAKDKYVRSLWKLFAHHNRYVLGVRAAQLHHHHHHQLMLPGLLQSLQDLHQEMACILKEILQEYLEISSLVQDEVVAIHLEMAAAVARIQPEAEYQGFLRQYGSTPDVPPCVTFDESLLEEGEPLEPGELQLNELTVESVQHTLTSVTDELTVATQTVLSRQEAVAQLQRELQNEEQNTHPRERVQLLAKKQVLQEALQALQVALCSQAKLQAQRELLQAKLEQLGPGEPPPVLLLQDDRHSTSSSEQEREGGRTPTLEILKSHISGIFRPKFSLPPPLQLVPEVQKPLHEQLWYHGALPRAEVAELLTHSGDFLVRESQGKQEYVLSVLWDGQPRHFIIESADNLYRLEGDGFASIPLLVDHLLRSQQPLTKKSGIVLNRAVPKDKWVLNHEDLVLGEQIGRGNFGEVFSGRLRADNTLVAVKSCRETLPPDIKAKFLQEAKILKQYSHPNIVRLIGVCTQKQPIYIVMELVQGGDFLTFLRTEGARLRMKTLLQMVGDAAAGMEYLESKCCIHRDLAARNCLVTEKNVLKISDFGMSREEADGIYAASGGLRQVPVKWTAPEALNYGRYSSESDVWSFGILLWETFSLGASPYPNLSNQQTREFVEKGGRLPCPELCPDAVFRLMEQCWAYEPGQRPSFSAIYQELQSIRKRHR

SEQ ID NO: 13689 - protein, 606 aa, Sus scrofa
MEPPRGPPANGAEPSRAVGTVKVYLPNKQRTVVTVRDGMSVYDSLDKALKVRGLNQDCCVVYRLIKGRKTVTAWDTAIAPLDGEELIVEVLEDVPLTMHNFVRKTFFSLAFCDFCLKFLFHGFRCQTCGYKFHQHCSSKVPTVCVDMSTNRRQFYHSVQDLSGGSRQHETPSNRPLNEPLTPQGPSSCTQHRDPEHFPFPAPANAPLQRIRSTSTPNVHMVSTTAPMDSGLVQLTAQSFNTDAAGNRGGGDGAPRGSPSPASVSSGRKSPHSKSPSEQRERKSLADDKKKVKNLGYRDSGYYWEVPPSEVQLLKRIGTGSFGTVFRGRWHGDVAVKVLKVAQPTAEQAQAFKNEMQVLRKTRHVNILLFMGFMTRPGFAIITQWCEGSSLYHHLHVADTRFDMVQLIDVARQTAQGMDYLHAKNIIHRDLKSNNIFLHEGLTVKIGDFGLATVKTRWSGAQPLEQPSGSVLWMAAEVIRMQDPNPYSFQSDVYAYGVVLYELMTGSLPYSHIGSRDQIIFMVGRGYLSPDLSKISSNCPKAMRRLLSDCLKFQREERPLFPQILATIELLQRSLPKIERSASEPSLHRTQADELPACLLSAARLVP

SEQ ID NO: 13690 - protein, 1367 aa, Sus scrofa
MKSGSGGGSPTSLWGLLFFSAALSLWPTSGEICGPGIDIRNDYQQLKRLENCTVIEGYLHILLISKAEDYRSYRFPKLTVITEYLLLFRVAGLESLGDLFPNLTVIRGWKLFYNYALVIFEMTNLKDIGLYNLRNITRGAIRIEKNADLCYLSTVDWSLILDAVSNNYIVGNKPPKECGDLCPGTLEEKPLCEKTTINNEYNYRCWTTNRCQKMCPSVCGKRACTENHECCHPECLGSCSAPDNDTACVACRHYYYAGVCVPSCPPNTYRFEGWRCVDRDFCANIPSAESSDSEGFVIHDGECMQECPSGFIRNGSQSMYCIPCEGPCPKVCEEEKKTKTIDSVTSAQMLQGCTIFKGNLLINIRRGNNIASELENFMGLIEVVTGYVKIRHSHALVSLSFLKNLRQILGEEQLEGNYSFYVLDNQNLQQLWDWDHRNLTIKAGKMYFAFNPKLCVSEIYRMEEVTGTKGRQSKGDINTRNNGERASCESDVLHFTSTTTWKNRIIITWHRYRPPDYRDLISFTVYYKEAPFKNVTEYDGQDACGSNSWNMVDVDLPPNKDVEPGILLHGLKPWTQYAVYVKAVTLTMVENDHIRGAKSEILYIRTNASVPSIPLDVLSASNSSSQLIVKWNPPSLPNGNLSYYIVRWQRQPQDSYLYRHNYCSKDKIPIRKYADGTIDVEEATENPKTEVCGGEKGPCCACPKTEAEKQAEKEEAEYRKVFENFLHNAIFVPRPERKRREVMQVANTTMSSRSRNTTVVDTYNVTDPEELETEYPFFESRVDNKERTVISNLRPFTLYRIDIHSCNHEAEKLGCSASNFVFARTMPAEGADDIPGPVTWEPRPENSIFLKWPEPENPNGLILMYEIKYGSQVEDQRECVSRQEYRKYGGAKLNRLNPGNYTARIQATSLSGNGSWTEPVFFYVQAKTTYENFIHLIIALPVAVLLIVGGLVIMLYVFHRKRNNSRLGNGVLYASVNPEYFSAADVYVPDEWEVAREKITMSRELGQGSFGMVYEGVAKGVVKDEPETRVAIKTVNEAASMRERIEFLNEASVMKEFNCHHVVRLLGVVSQGQPTLVIMELMTRGDLKSYLRSLRPEMENNPVLAPPSLSKMIQMAGEIADGMAYLNANKFVHRDLAARNCMVAEDFTVKIGDFGMTRDIYETDYYRKGGKGLLPVRWMSPESLKDGVFTTHSDVWSFGVVLWEIATLAEQPYQGLSNEQVLRFVMEGGLLDKPDNCPDMLFELMRMCWQYNPKMRPSFLEIISSIKDEMEPGFREVSFYYSEENKPPEPEELDLEPENMESVPLDPSASSSSLPLPDRHSGHKAENGPGPGVLVLRASFDERQPYAHMNGGRKNERALPLPQSSTC

SEQ ID NO: 13691 - protein, 1125 aa, Bos taurus
MDSLAGLVLCGVSLLLSATVDGAMDLILINSLPLVSDAETSLTCIASGWRPHEPITIGRDFEALMNQHQDPLEVTQDATREWAKKVVWKREKASKINGAYFCEGRVRGQAIRIRTMKMRQQASFLPATLTMTVDRGDNVNISFKKVLIKEEDAVIYKNGSFIHSVPRHEVPDILEVQVPHAQPQDAGVYSARYIGGNLFTSAFTRLIVRRCEAQKWGPECNRICTACMNNGICHEDTGECICPPGFMGRTCEKACEPHTFGRTCKERCSEPEGCKSFVFCLPDPYGCSCATGWKGLQCNEACQPGYYGPDCKLRCSCTNGEKCDRFQGCLCSPGRQGLQCEKEGVPRMTPKIEDLPDHIEVNSGKFNPICKASGWPRPANEEMTLVKPDGTVLRPKDFNHTGHLSVATFTINRILPPDSGVWVCSVNTVSGMVEKPFNISVKVLPKPLNAPKVIDTGHNFAVINISSEPYFGDGPIKSKKLLYKPVNHYEAWRHIQVTNEIVTLNYLEPRTEYELCVQLVRRGEGGEGHPGPVRRFTTASIGLPPPRGLSLLPKSQTTLNLTWQPIFPSSEDDFYVEVERRSVQMNSDQQNIKVPGNLTSVLLNNLHPREQYIVRARVNTKAQGEWSEDLIAWTLSDIVPPQPENIKIFNITDSSAVISWTILDGYSISAIIIRYKVQGKNEDQHIDVKIKNATITQYQLKGLEPQTVYQVDIFAENNIGSSNPTSSHELTTLSESQAPADLGGRKMLLIAILGSAGMTCLTVLLAFLIMLQLKRANVQRRMAQAFQNVREEPAVQFNSGTLALNRKAKNNPDPTIYPVLDWNDIKFQDVIGEGNFGQVLKARIKKDGLRMDAAIKRMKEYASKDDHRDFAGELEVLCKLGHHPNIINLLGACEHRGYLYLAIEYAPHGNLLDFLRKSRVLETDPAFAIANSTASTLSSQQLLHFAADVARGMDYLSQKQFIHRDLAARNILVGENYVAKIADFGLSRGQEVYVKKTMGRLPVRWMAIESLNYSVYTTNSDVWSYGVLLWEIVSLGGTPYCGMTCAELYEKLPQGYRLEKPLNCDDEVYDLMRQCWREKPYERPSFAQILVSLNRMLEERKTYVNTTLYEKFTYAGIDCSAEEAA

SEQ ID NO: 13692 - protein, 168 aa, Arabidopsis thaliana
MQEQATSSLAASSLPSSSERSSSSAPHLEIKEGIESDEEIRRVPEFGGEAVGKETSGRESGSATGQERTQATVGESQRKRGRTPAEKENKRLKRLLRNRVSAQQARERKKAYLSELENRVKDLENKNSELEERLSTLQNENQMLRHILKNTTGNKRGGGGGSNADASL

SEQ ID NO: 13693 - protein, 149 aa, Arabidopsis thaliana
MSLQRPNGNSSSSSSHKKHKTEESDEELLMVPDMEAAGSTCVLSSSADDGVNNPELDQTQNGVSTAKRRRGRNPVDKEYRSLKRLLRNRVSAQQARERKKVYVSDLESRANELQNNNDQLEEKISTLTNENTMLRKMLINTRPKTDDNH

SEQ ID NO: 13694 - protein, 203 aa, Oryza sativa (japonica cultivar-group)
MAAQEQEQEKQQVKTSTTSSLPSSSERSSSSAPNNLKEGGGVESDEEIRRVPEMGGGGGSASSGAGADERQGKEDGKQQGGGGGGAAAAGGGQEQAPPARKRGRSAGDKEQNRLKRLLRNRVSAQQARERKKAYMTELEAKAKDLELRNAELEQRVSTLQNENNTLRQILKNTTAHAGKRGGGGGGKGGDGGGGGKKHHFTKS

SEQ ID NO: 13695 - protein, 203 aa, Oryza sativa; identical to SEQ ID NO: 13694

SEQ ID NO: 13696 - protein, 88 aa, Triticum aestivum
  unsure (1)..(88): unsure at all Xaa locations
XLKRLLRNRVSAQQARERKKAYMTELEVKAKDLELRNAELEQKVSTLQNENNTLRQILKNTTAHAGKKPSGGKGGDSGKKHHHHFGKG

SEQ ID NO: 13697 - protein, 109 aa, Brassica rapa subsp. pekinensis
GTESDEEIRRVPEFGGEATGKEISGSVTGQDQTQATVGGESQRKRGRTPAEKETKRLKRLLRNRVSAQQARERKKAYLGELENRVKDLENRNSELEERLSTLQNENQML

SEQ ID NO: 13698 - protein, 618 aa, Hordeum vulgare subsp. vulgare
MKREYQDGGGSGGGGDEMGSSRDKMMVSSSEAGEGEEVDELLAALGYKVRASDMADVAQKLEQLEMAMGMGGPAPDDGFATHLATDTVHYNPTDLSSWVESMLSELNAPPPPLPPAPPQLNASTSSTVTGGGGYFDLPPSVDSSSSTYALRPIISPPVAPADLSADSVRDPKRMRTGGSSTSSSSSSSSSLGGGAARSSVVEAAPPVAAAAAAPALPVVVVDTQEAGIRLVHALLACAEAVQQENLSAAEALVKQIPLLAASQGGAMRKVAAYFGEALARRVFRFRPQPDSSLLDAAFADLLHAHFYESCPYLKFAHFTANQAILEAFAGCRRVHVVDFGIKQGMQWPALLQALALRPGGPPSFRLTGVGPPQPDETDALQQVGWKLAQFAHTIRVDFQYRGLVAATLADLEPFMLQPEGEEDPNEEPEVIAVNSVFEMHRLLAQPGALEKVLGTVRAVRPRIVTVVEQEANHNSGSFLDRFTESLHYYSTMFDSLEGGSSGGPSEVSSGGAAPAAAAGTDQVMSEVYLGRQICNVVACEGTERTERHETLGQWRNRLGNAGFETVHLGSNAYKQASTLLALFAGGDGYKVEEKEGCLTLGWHTRPLIATSAWRLAAP

SEQ ID NO: 13699 - protein, 535 aa, Madia sativa
ERKKEAKTTSSVPDSGGMDELLEVLGYKVKSTDMADVAQKLEQLEMVMGEDGVLQLSDTVHYNPSDLSGWVQSMLLVLNEDNNNTLDDDVSDHILLPGNSSTTMIDFSSSRTETVNRKHGSKMLEDDPYDLRAIAGGAIYRPESEGIGNGMKRMKTTAAGSEVVDVQPESPRPVVLVDSQEAGIRLVHTLMACAEAIQHNDLKLADALVKHVGILVASQAGAMAKVATYFAGALAQRIYNIYPQNALETSCNENLQMHFYETCPYLKFAHFTANQAILEAFAGATRVHVIDFSLNQGMQWPALMQALALRSGGPPAFRLTGIGPPQPDNSDALQQVGWKLAQLADTIGVEFEFRGFVANSIADIDANMLDIRASETEVVAVNSVFEVHRLLARPGSVEKVLSSITGMKPKIVTLVEQESNHNGAVFMERFNEALHYYSTMFDSLESSALTLPNSQDDLVMSEVYLGRQICNVVACEGTDRVERHETLTQWRVRMNSAGFEPVHLGSNAFKQASMLLALFSGGDGYRVEENDGCLM

SEQ ID NO: 13700 - protein, 380 aa, Anisocarpus madioides
MKRSRERKKEASSVPDSGGMDELLEVLGYKVKSTDMADVAQKLEQLEMVMGEDGILQLSDTVHYNPSDLSGWVQSMLLVLNDNNTTTTADDSGHILLPGDSSTTMIDFSSETVVHGKPGSKIHQDDDLRAIAGGAIYRSESESSMPGNANPNGNGVKRMKTTAAGSEVVDVQPESPRPVVLVDSQEAGIRLVHTLMACAEAIQHNDLKLADALVKHVGILVASQAGAMAKVATYFAGALAQRIYNIYPQNALETSCYEILQMHFYETCPYLKFAHFTANQAILEAFAGAKRVHVIDFSLNQGMQWPALMQALALRSGGPPAFRLTGIGPPQPDNSDALQQVGWKLAQLADTIGVEFEFRGFVANSIADIDANMLDIRLPE

SEQ ID NO: 13701 - protein, 143 aa, Anisocarpus madioides
RPGAVEKVLSAITKMKPKIVTLVEQESNHNGALFMERFNEALHYYSTMFDSLESSALTLPNSPDDLVMSEVYLGRQICNVVACEGTDRVERHETLTQWRVRMNSAGFEPVHLGSNAFKQASMLLALFADGDGYRVEENDGCLM

SEQ ID NO: 13702 - protein, 540 aa, Calycadenia multiglandulosa
ERKKEAKASTSSSSSMAPAAKAKDLQNPPDSGGMDELLEVLGYKVKSTDMDDVAQKLEQLEMVMGEDGILQLSDTVHYNPSDLSGWVQSMLSELNNSGGDSDIGIGIPAGGESSTTMIDFSNNKEKQPEDPYDLRAIAGGAIYGEGSESSGNGIKRMKMKSTAEGSGAVDVPPESPPRPVVLVDSQEAGIRLVHTLMACAEAVQNNDMKLAEALVKHVGILVASQAGAMAKVATYFAGALAQRIYKIYPQDGGLETSCWEILQMHFYESCPYLKFAHFTANQAILEAFAGAARVHVIDFSLNQGMQWPALMQALALRPGGPPAFRLTGIGPPQPDNTDALQQVGWKLAQLADTIGVEFEFRGFVAASIADIDAAMLDIRLDEVVAVNSVFELHRLLARPGAVEKVLSSITSMKPKIVTLVEQESNHNGVVFMDRFNEALHYYSTMFDSLESSALTQPNSQQDLVMSEVYLGRQICNVVACEGPDRVERHETLTQWRTRMISAGFEPVHLGSNAFKQASMLLALFAGGDGYRVEENDGCLM

SEQ ID NO: 13703 - protein, 124 aa, Gossypium herbaceum
IEKVVSSIKAMKPKIVTVVEQEANHNGPVFLDRFTEALHYYSTLFDSLEGSGVAPPSQDLAMSELYLGRQICNVVACEGMDRVERHEPLTQWRTRMETAGFSPVHLGSNAYKQASMLLALFASG

SEQ ID NO: 13704 - protein, 124 aa, Gossypium barbadense
IEKVVSSIKAMKPKIVTVVEQEANHNGPVFLDRFTEALHYYSTLFDSLEGSGVAPASQDLAMSELYLGRQICNVVACEGMDRVERHEPLTQWRTRMETAGFSTVHLGSNAYKQASMLLALFASG

SEQ ID NO: 13705 - protein, 537 aa, Gossypium hirsutum
MKRDHQEISGSGSNPAESSSIKGKLWEEDPDAGGMDDELLAVLGYKVRSSDMADVAQKLEMLEKVMGTAQEDGISQLGDTVHFNPSDLSGWVQNLLIEFNGSTTTPDPNFNDDSEYDLRAIPGVAAYPPVKSDPGLEITRKRAKTESSSSSSSTTTRPVVLIDSQEAGVRLVHTLMACAEAVQQDNLKLADALVKHIGLLASSQTGAMRKVATYFAEALARRIYRIFPPDSLDPSYNDKLQIPFYETCPYLKFAHFTANQAILEAFSMASRVHVIDFGLKQGMQWPALMQALALRPGGPPAFRLTGIGPPQPDNTDALQQVGWKLAQLAERIGIEFEFRGFVANSLADLEPEMLDIRPPEIEVVAVNAVFELHPLLARPGGIEKVVSSIKAMKPKIVTVVEQEANHNGPVFLDRFTEALHYYSTLFDSLEGSGVAPASQDLAMSELYLGRQICNVVACEGMDRVERHEPLTQWRTRMETAGVSPVHLGSNAYKQASMLLALFASGDGYRVEENNGCLMLGWHTRPLIAHLGLATRWY

SEQ ID NO: 13706 - protein, 490 aa, Arabidopsis thaliana
MYKQPRQELEAYYFEPNSVEKLRYLPVNNSRKRFCTLEPFPDSPPYNALSTATYDDTCGSCVTDELNDFKHKIREIETVMMGPDSLDLLVDCTDSFDSTASQEINGWRSTLEAISRRDLRADLVSCAKAMSENDLMMAHSMMEKLRQMVSVSGEPIQRLGAYLLEGLVAQLASSGSSIYKALNRCPEPASTELLSYMHILYEVCPYFKFGYMSANGAIAEAMKEENRVHIIDFQIGQGSQWVTLIQAFAARPGGPPRIRITGIDDMTSAYARGGGLSIVGNRLAKLAKQFNVPFEFNSVSVSVSEVKPKNLGVRPGEALAVNFAFVLHHMPDESVSTENHRDRLLRMVKSLSPKVVTLVEQESNTNTAAFFPRFMETMNYYAAMFESIDVTLPRDHKQRINVEQHCLARDVVNIIACEGADRVERHELLGKWRSRFGMAGFTPYPLSPLVNSTIKSLLRNYSDKYRLEERDGALYLGWMHRDLVASCAWK

SEQ ID NO: 13707 - protein, 597 aa, Arabidopsis thaliana
MRLSVFIIPLVESRQASGIINKQSTSLLIRFSLYLEASISTKSFFSKSQRISQTQSPICLSANYYQPDNLDMEATQKHMIQEGSSMFYHQPSSVKQMDLSVQTFDSYCTLESSSGTKSHPCLNNKNNSSSTTSFSSNESPISQANNNNLSRFNNHSPEENNNSPLSGSSATNTNETELSLMLKDLETAMMEPDVDNSYNNQGGFGQQHGVVSSAMYRSMEMISRGDLKGVLYECAKAVENYDLEMTDWLISQLQQMVSVSGEPVQRLGAYMLEGLVARLASSGSSIYKALRCKDPTGPELLTYMHILYEACPYFKFGYESANGAIAEAVKNESFVHIIDFQISQGGQWVSLIRALGARPGGPPNVRITGIDDPRSSFARQGGLELVGQRLGKLAEMCGVPFEFHGAALCCTEVEIEKLGVRNGEALAVNFPLVLHHMPDESVTVENHRDRLLRLVKHLSPNVVTLVEQEANTNTAPFLPRFVETMNHYLAVFESIDVKLARDHKERINVEQHCLAREVVNLIACEGVEREERHEPLGKWRSRFHMAGFKPYPLSSYVNATIKGLLESYSEKYTLEERDGALYLGWKNQPLITSCAWR

SEQ ID NO: 13708 - protein, 587 aa, Arabidopsis thaliana
VESRQASGIINKQSTSLLIRFSLYLEASISTKSFFSKSQRISQTQSPICLSANYYQPDNLDMEATQKHMIQEGSSMFYHQPSSVKQMDLSVQTFDSYCTLESSSGTKSHPCLNNKNNSSSTTSFSSNESPISQANNNNLSRFNNHSPEENNNSPLSGSSATNTNETELSLMLKDLETAMMEPDVDNSYNNQGGFGQQHGVVSSAMYRSMEMISRGDLKGVLYECAKAVENYDLEMTDWLISQLQQMVSVSGEPVQRLGAYMLEGLVARLASSGSSIYKALRCKDPTGPELLTYMHILYEACPYFKFGYESANGAIAEAVKNESFVHIIDFQISQGGQWVSLIRALGARPGGPPNVRITGIDDPRSSFARQGGLELVGQRLGKLAEMCGVPFEFHGAALCCTEVEIEKLGVRNGEALAVNFPLVLHHMPDESVTVENHRDRLLRLVKHLSPNVVTLVEQEANTNTAPFLPRFVETMNHYLAVFESIDVKLARDHKERINVEQHCLAREVVNLIACEGVEREERHEPLGKWRSRFHMAGFKPYPLSSYVNATIKGLLESYSEKYTLEERDGALYLGWKNQPLITSCAWR

SEQ ID NO: 13709 - protein, 526 aa, Arabidopsis thaliana
MEATQKHMIQEGSSMFYHQPSSVKQMDLSVQTFDSYCTLESSSGTKSHPCLNNKNNSSSTTSFSSNESPISQANNNNLSRFNNHSPEENNNSPLSGSSATNTNETELSLMLKDLETAMMEPDVDNSYNNQGGFGQQHGVVSSAMYRSMEMISRGDLKGVLYECAKAVENYDLEMTDWLISQLQQMVSVSGEPVQRLGAYMLEGLVARLASSGSSIYKALRCKDPTGPELLTYMHILYEACPYFKFGYESANGAIAEAVKNESFVHIIDFQISQGGQWVSLIRALGARPGGPPNVRITGIDDPRSSFARQGGLELVGQRLGKLAEMCGVPFEFHGAALCCTEVEIEKLGVRNGEALAVNFPLVLHHMPDESVTVENHRDRLLRLVKHLSPNVVTLVEQEANTNTAPFLPRFVETMNHYLAVFESIDVKLARDHKERINVEQHCLAREVVNLIACEGVEREERHEPLGKWRSRFHMAGFKPYPLSSYVNATIKGLLESYSEKYTLEERDGALYLGWKNQPLITSCAWR

SEQ ID NO: 13710 - protein, 526 aa, Arabidopsis thaliana
MEATQKHMIQEGSSMFYHQPSSVKQMDLSVQTFDSYCTLESSSGTKSHPCLNNKNNSSSTTSFSSNESPISQANNNNLSRFNNHSPEENNNSPLSGSSATNTNETELSLMLKDLETAMMEPDVDNSYNNQGGFGQQHGVVSSAMYRSMEMISRGDLKGVLYECAKAVENYDLEMTDWLISQLQQMVSVSGEPVQRLGAYMLEGLVARLASSGSSIYKALRCKDPTGPELLTYMHILYEACPYFKFGYESANGAIAEAVKNESFVHIIDFQISQGGQWVSLIRALGARPGGPPNVRITGIDDPRSSFARQGGLELVGQRLGKLAEMCGVPFEFHGAALCCTEVEIEKLGVRNGEALAVNFPLVLHHMPDESVTVENHRDRLLRLVKHLSPNVVTLVEQEANTNTAPFLPRFVETMNHYLAVFESIDVKLARDHKERINVEQHCLAREVVNLIACEGVEREERHEPLGKWRSRFHMAGFKPYPLSSYVNATIEGLLESYSEKYTLEERDGALYLGWKNQPLITSCAWR

SEQ ID NO: 13711 - protein, 411 aa, Arabidopsis thaliana
MMGPDSLDLLVDCTDSFDSTASQEINGWRSTLEAISRRDLRADLVSCAKAMSENDLMMAHSMMEKLRQMVSVSGEPIQRLGAYLLEGLVAQLASSGSSIYKALNRCPEPASTELLSYMHILYEVCPYFKFGYMSANGAIAEAMKEENRVHIIDFQIGQGSQWVTLIQAFAARPGGPPRIRITGIDDMTSAYARGGGLSIVGNRLAKLAKQFNVPFEFNSVSVSVSEVKPKNLGVRPGEALAVNFAFVLHHMPDESVSTENHRDRLLRMVKSLSPKVVTLVEQESNTNTAAFFPRFMETMNYYAAMFESIDVTLPRDHKQRINVEQHCLARDVVNIIACEGADRVERHELLGKWRSRFGMAGFTPYPLSPLVNSTIKSLLRNYSDKYRLEERDGALYLGWMHRDLVASCAWK

SEQ ID NO: 13712 - protein, 413 aa, Arabidopsis thaliana
MDNVRGSIMLQPLPEIAESIDDAICHELSMWPDDAKDLLLIVEAISRGDLKLVLVACAKAVSENNLLMARWCMGELRGMVSISGEPIQRLGAYMLEGLVARLAASGSSIYKSLQSREPESYEFLSYVYVLHEVCPYFKFGYMSANGAIAEAMKDEERIHIIDFQIGQGSQWIALIQAFAARPGGAPNIRITGVGDGSVLVTVKKRLEKLAKKFDVPFRFNAVSRPSCEVEVENLDVRDGEALGVNFAYMLHHLPDESVSMENHRDRLLRMVKSLSPKVVTLVEQECNTNTSPFLPRFLETLSYYTAMFESIDVMLPRNHKERINIEQHCMARDVVNIIACEGAERIERHELLGKWKSRFSMAGFEPYPLSSIISATIRALLRDYSNGYAIEERDGALYLGWMDRILVSSCAWK

SEQ ID NO: 13713 - protein, 529 aa, Arabidopsis thaliana
MQTSQKHHSAAGLHMLYPQVYCSPQFQAKDNKGFSDIPSKENFFTLESSTASGSLPSYDSPSVSITSGQSPFSPQGSQSCISDLHHSPDNVYGSPLSGVSSLAYDEAGVKSKIRELEVSLLSGDTKVEEFSGFSPAAGKSWNWDELLALTPQLDLKEVLVEAARAVADGDFATAYGFLDVLEQMVSVSGSPIQRLGTYMAEGLRARLEGSGSNIYKSLKCNEPTGRELMSYMSVLYEICPYWKFAYTTANVEILEAIAGETRVHIIDFQIAQGSQYMFLIQELAKRPGGPPLLRVTGVDDSQSTYARGGGLSLVGERLATLAQSCGVPFEFHDAIMSGCKVQREHLGLEPGFAVVVNFPYVLHHMPDESVSVENHRDRLLHLIKSLSPKLVTLVEQESNTNTSPFLSRFVETLDYYTAMFESIDAARPRDDKQRISAEQHCVARDIVNMIACEESERVERHEVLGKWRVRMMMAGFTGWPVSTSAAFAASEMLKAYDKNYKLGGHEGALYLFWKRRPMATCSVWKPNPN

SEQ ID NO: 13714 - protein, 306 aa, Arabidopsis thaliana
GTSPTGPELLTYMHILYEACPYFKFGYESANGAIAEAVKNESFVHIIDFQISQGGQWVSLIRALGARPGGPPNVRITGIDDPRSSFARQGGLELVGQRLGKLAEMCGVPFEFHGAALCCTEVEIEKLGVRNGEALAVNFPLVLHHMPDESVTVENHRDRLLRLVKHLSPNVVTLVEQEANTNTAPFLPRFVETMNHYLAVFESIDVKLARDHKERINVEQHCLAREVVNLIACEGVEREERHEPLGKWRSRFHMAGFKPYPLSSYVNATIKGLLESYSEKYTLEERDGALYLGWKNQPLITSCAWR

SEQ ID NO: 13715 - protein, 504 aa, Glycine max
MQASEQHRNSSMYYQPLQQIEAYCFAVSDTKSAAILPYGGHGTQFSTPSSSELYCTLESSSVALYNSPCGSCITDDLSSFNLKHKLRELESVMLGPDSDNLDSYDSAISNGNNFVPLEMDGWKQTMVAISSKNLKHILIACAKAISDDDLLMAQWLMDELRQMVSVSGDPFQRLGAYMLEGLVARLAASGSSIYKSLRCKEPESAELLSYMHILYEVCPYFKFGYMSANGAIAEAMKDEDRVHIIDFQIGQGSQWITLIQAFAARPGGPPHIRITGIDDSTSAYARGGGLHIVGRRLSKLAEHFKVPFEFHAAAISGCDVQLHNLGVRPGEALAVNFAFMLHHMPDESVSTQNHRDRLLRLVRSLSPKVVTLVEQESNTNTAAFFPRFLETLDYYTAMFESIDVTLSREHKERINVEQHCLARDLVNIIACEGVERVERHEVLGKWRSRFAMAGFTPYPLSSLVNGTIKKLLENYSDRYRLQERDGALYLGWMNRDLVASCAWK

SEQ ID NO: 13716 - protein, 522 aa, Glycine max
  unsure (1)..(522): unsure at all Xaa locations
MQTSQNHKISYGSGGFYAEPTAAKQPTXSVQTLEQYCTLESASTGNSFPNQNSPPALSFSSNNSPLSKLESNSYVLRPQHSLEIASGSPEDDSYLTHDLXXDLTHKIRELETAMLGPNADNIYGTVIPEPDSFLLEAEKWKKLMEISSRGDLKEMLYMCAKAMAVNDMETTDWLVSELRKMVSISGNPIQRLGAYILESFVARIGASGSTIYKSLKCSEPTGNELLSYMNVLYEICPYFKFGYMSANGAIAEALKEESEVHIVDFQIGQGTQWVSLIQALAHRPGGPPKIRISGVDDSYSAYARGGGLDIVGKRLSAHAQSCHVPFEFNAVRVPASQVQLEDLELLPYEAVAVNFAISLHHVPDESVNSHNHRDRLLRLAKRLSPKVVTLVEQEFNTNNAPFLQRFDETMKYYLAVFESIDTVLPREHKERINVEQHCLAREVVNLIACEGEERVERHELLNKWKMRFTKAGFTPYPLSSVINSSIKDLLQSYHGHYTLEERDGALFLGWMNQVLIASCAWS

SEQ ID NO: 13717 - protein, 522 aa, Glycine max
  unsure (1)..(522): unsure at all Xaa locations
MQTPQNHKISYGSGGFYVEPTAAKQPTXSVQTLEQYCTLESASTGNSFPSQNSPPALSFSSNNSLLSKLESNSYVLRPQHSLEIASGSPEDDSYLTHDLDXXLTHKIRELETAMLGPNADNIYGTVNPEPDSFLLEAEKWKKMMEISSRGDLKEMLYMCAKAMAVNDMETTDWLVSELRKMVSISGNPIQRLGAYILESFVARIGASGSTIYKSLKCSEPTGNELLSYMNVLYEICPYFKFGYMSANGAIAEALREESEVHIVDFQIGQGTQWVSLIQALARRPVGPPKIRISGVDDSYSAYARRGGLDIVGKRLSALAQSCHVPFEFNAVRVPATEVQLEDLELRPYEAVAVNFAISLHHVPDESVNSHNHRDRLLRLAKQLSPKVVTLVEQEFSTNNAPFLQRFVETMNYYLAVFESIDTVLPREHKERINVEQHCLAREVVNLIACEGEERVERHELLNKWRMRFTKAGFTPYPLSSVINSSIKDLLQSYHGHYTLEERDGALFLGWMNQVLVASCAWR

SEQ ID NO: 13718 - protein, 636 aa, Glycine max
  unsure (1)..(636): unsure at all Xaa locations
MQTSKKHPTSAGIHLYLQPAQDIDPYTSSQGTTISFETSKEQYFTLESSPAINDLIGCDSPSYASVSSNRSPFSPQASXXSDQHQSSDNTYGSPTSAHSRYDDDGYELKNKLRELEISLLGPDSDIVDSWHCSYKGGRHRASSPTAKHNWDQIVEMIPKLDLKEVLIRCAQAVADDDIETAVGFMNNVLAKMVSVGGDPIQRLGAYMLEGLRARLESSGSIIYKALKCEQPTSNDLMTYMHILYQICPYWKFAYTSANAVIGEAMLNESRIHIIDFQVAQGTQWLLLIQALASRPGGAPFIRVTGVDDSQSFHARGGGLHIVGKRLSDYAKSCGVPFEFHSAAMCGSELELENLVIQPGEALVVNFPFVLHHMPDESVSTENHRDRLLRLVKSLSPKVVTLVEQESNTNTSPFFQRFVETLSYYTAMFESIDVALPRDDKQRINAEQHCVARDIVNMVACEGDERLERHELLGKWRSRFSMAGFAPCPLSSSVTAAVRNMLNEFNENYRLQHRDGALYLGWKSRAMCTSSAWRCYXLIVIVIGICIFFYPQILFVSNILAFISGEFEPITSPHSHHWYMHIFLLVNFFPFYDIKSLFSGIRCFSIGLIRDLAFFQRVSFTFCGFSLVFKLSCTCQY

SEQ ID NO: 13719 - protein, 559 aa, Glycine max
  unsure (1)..(559): unsure at all Xaa locations
LPRLKTRSNNNSAVFRLSMCQDLFCSSSXYQRTGXFSMQTSQNHKISYGSGGFYAEPTAAKQPTXSVQTLEQYCTLESASTGNSFPNQNSPPALSFSSNNSPLSKLESNSYVLRPQHSLEIASGSPEDDSYLTHDLXXDLTHKIRELETAMLGPNADNIYGTVIPEPDSFLLEAEKWKKMMEISSRGDLKEMLYMCAKAMAVNDMETTDWLVSELRKMVSISGNPIQRLGAYILESFVARIGASGSTIYKSLKCSEPTGNELLSYMNVLYEICPYFKFGYMSANGAIAEALREESEVHIVDFQIGQGTQWVSLIQALARRPVGPPKIRISGVDDSYSAYARRGGLDIVGKRLSAHAQSCHVPFEFNAVRVPASQVQLEDLELLPYEAVAVNFAISLHHVPDESVNSHNHRDRLLRLAKRLSPKVVTLVEQEFNTNNAPFLQRFDETMKYYLAVFESIDTVLPREHKERINVEQHCLAREVVNLIACEGEERVERHELLNKWKMRFTKAGFTPYPLSSVINSSIKDLLQSYHGHYTLEERDGALFLGWMNQVLIASCAWS

SEQ ID NO: 13720 - protein, 634 aa, Glycine max
  unsure (1)..(634): unsure at all Xaa locations
NHKNKSPHACQFLVAFTCKSAKSLHQFSIVLASKFRSCFPFHLRISXILRTLLMSXXGIGVKCGQRSRTLNRXXYLLFVVQKKREIRKFRSVYTRQTFWCYLHIFKAPVTFQMQMSQKHKMSYDSSRFSIEPAQTMQPTXSVCIFEQYCTLESSTNNXXFPSLNSPSTVSFSPNNSPVSKLQSKPNVLSSQNSLEIVNESLENKSFLTLNDDELRHKIRELESAMLGHDTDNTYDTIIPEESDSFLKEAERWKRMMEMISRGDLKEMLCTCAKAVAGNDMETTEWLMSELRKMVSVSGNPIQRLGAYMLEALVARLASSGSTIYKVLKCKEPTGSELLSHMHLLYEICPYLKFGYMSANGAIAEVMKEESEVHIIDFQINQGIQWVSLIQAVAGRPGAPPKIRITGFDDSTSAYAREGGLEIVGARLSRLAQSYNVPFEFHAIRAAPTEVELKDLALQPGEAIAVNFAMMLHHVPDECVDSRNHRDRLVRLAKCLSPKIVTLVEQESHTNNLPFFPRFVETMNYYLAIFESIDVALPREHKERINVEQHCLAREVVNLIACEGAERVERHELLKKWRSRFTMAGFTPYPLNSFVTCSIKNLQQSYQGHYTLEERDGALCLGWMNQVLITSCAWR

SEQ ID NO: 13721 - protein, 585 aa, Glycine max
  unsure (1)..(585): unsure at all Xaa locations
ILRTLLMSSWNWSKMWTTITDLKXKYLLFVVQKKREIRKFRSVYTRQTFWCYLHIFKAPVTFQMQMSQKHKMSYDSSRFSIEPAQTMQPTXSVCIFEQYCTLESSTNNXXFPSLNSPSTVSFSPNNSPVSKLQSKSNVLSSQNSLEIVNESLENESFLTLNDDELRHKIRELESAMLGHDTDNTYDTIIPEESDSFLKEAERWKRMMEMISRGDLKEMLCTCAKAVAGNDMETTEWLMSELRKMVSVSGNPIQRLGAYMLEALVARLASSGSTIYKVLKCKEPTGSELLSHMHLLYEICPYLKFGYMSANGAIAEVMKEESEVHIIDFQINQGIQWVSLIQAVAGRPGAPPKIRITGFDDSTSAYAREGGLEIVGARLSRLAQSYNVPFEFHAIRAAPTEVELKDLALQPGEAIAVNFAMMLHHVPDECVDSRNHRDRLVRLAKCLSPKIVTLVEQESHTNNLPFFPRFVETMNYYLAIFESIDVALPREHKERINVEQHCLAREVVNLIACEGEERVERHELLKKWRSRFTMAGFAPYPLNSFITCSIKNLQRSYRGHYTLEERDGALCLGWMNQVLITSCAWR

SEQ ID NO: 13722 - protein, 548 aa, Glycine max
  unsure (1)..(548): unsure at all Xaa locations
MQTSQKHPSSAGVHFYHQPVQGIYQMLQSNLCHDSSSPCKEQYFTLESCPAPTTLDCDDSPSYASVSSKRTPFSPQGSQSCYSDHQQSSDNTYGSPISGLSSVXXDGHELKHKLRELEISLLGPDNQTVAAAASSRVASRDHLSWLNXNWDQIAENVAQFDLKGVLRVCAQAVSDDDVPTARGWMDNVLGKLVSVSGDPIQRLGAYLLEGLRARLESSGNLIYKSLKCEQPTSKELMSYMHILYQICPYWKFAYISANAVIQETMANESRIHIIDFQIAQGTQWHLLIQALAHRPGGPPSLRVTGVDDSQSIHARGGGLQIVGERLSDFARSCGVPFEFRSAAISGCEVVRGNIEVLPGEALAVSFPYVLHHMPDESVSTENHRDRLLRLVKRLSPKVVTIVEQESNTNTSPFFHRFVETLDYYTAMFESIDVACPRDDKKRISAEQHCVARDIVNMIACEGVERVERHELLGKWRSRLSMAGFKQCQLSSSVMVAIQNLLKEFSQNYRLEHRDGALYLGWMNRHMATSSAWRXNSLIREFASFLTFN

SEQ ID NO: 13723 - protein, 435 aa, Glycine max
  unsure (1)..(435): unsure at all Xaa locations
XSTADDSYELKNKLRELEISLLGPDSDIVDSCRCSYNGGSKYNWDQIVEMIPKLNLKEVLIRCAQAVADDDIETAVGFMNNAREMVSVGGDPIQRLGAYMLEGLRARLESSGSIIYKALKCEQPTSNDLMTYMHILYQICPYWKFAYTSANAVIAEAVLNDSRIRIIDVLGSSSSRWLLLIQALASRPGGPPFVHVTGVDDSQSFHARGGGLHIVGKRLSDYAKSCGVPFEFHSAAMCGSEVELENLVIQPGEALVVNFPFVLHHMPDESVSTENHRDRLLRLVKSLSPKVVTLVEQESNTNTSPFFQRFAETLSYYTAMFESIDVALPRDDKQRINAEQHCVARDIVNMVACEGDERVERHELLGKWRSRFSMAGFAPCPLSSLVTDAVRNMLNEFNENYRLGYRDGALYLGWKNRAMCTSSAWRCYXLIVIAS

SEQ ID NO: 13724 - protein, 819 aa, Pisum sativum
MAACALFNGVGGGNTTPDETNNNSTSNSSNISTEDFHNMPQQQPHHSERKLLRKRMASEMELQLHNNNNNNDYHRFSRRTNNTSSLNCSLPATTQKGVTTTTTTTLASSGNNNNNNNNNNNYHYHNNNNNSIINNNNNNVALSRDNVAIQNFPTVTVTTNYSTMLLPSSCSSNLNNSSTSAANYTHYQQPLVEEQNTLPEICGFSGLPLFPSQNNQTNRTNNNSSNNRNNTNTVVDVVSSSPSMEETSATTNWIDGILKDLIHTSNSVSIPQLINNVREIIYPCNPNLALVLEHRLRLLTEPNTCVPERKRNSTEQSGVNVNGNVLAASNVNNSSVKLMNRVDDVVPTSLHFSDSSTLLNQNQNQNMFPNWGATQINNNNNPSVSLVTLPSQPLSTQQDQQHQLQQHPEDLAPATTTTTTSAELALARKKKEEIKEQKKKDEEGLHLLTLLLQCAEAVSAENLEQANKMLLEISQLSTPFGTSAQRVAAYFSEAISARLVSSCLGIYATLPVSSHTPHNQKVASAFQVFNGISPFVKFSHFTANQAIQEAFEREERVHIIDLDIMQGLQWPGLFHILASRPGGPPYVRLTGLGTSMETLEATGKRLSDFANKLGLPFEFFPVAEKVGNIDVEKLNVSKSEAVAVHWLQHSLYDVTGSDTNTLWLLQRLAPKVVTVVEQDLSNAGSFLGRFVEAIHYYSALFDSLGSSYGEESEERHVVEQQLLSREIRNVLAVGGPSRSGEIKFHNWREKLQQCGFRGVSLAGNAATQASLLLGMFPSEGYTLVEDNGILKLGWKDLCLLTASAWRPPYHTNTIIPHHN

SEQ ID NO: 13725 - protein, 428 aa, Lycopersicon esculentum
MLGSFGSSSSQSHPHHDEESSDHHQQRRFTATATTITTTTITTSPAIQIRQLLISCAELISQSDFSAAKRLLTILSTNSSPFGDSTERLVHQFTRALSLRLNRYISSTTNHFMTPVETTPTDSSSSSSLALIQSSYLSLNQVTPFIRFTQLTANQAILEAINGNHQAIHIVDFDINHGVQWPPLMQALADRYPAPTLRITGTGNDLDTLRRTGDRLAKFAHSLGLRFQFHPLYIANNNHDHDEDPSIISSIVLLPDETLAINCVFYLHRLLKDREKLRIFLHRVKSMNPKIVTIAEKEANHNHPLFLQRFIEALDYYTAVFDSLEATLPPGSRERMTVEQVWFGREIVDIVAMEGDKRKERHERFRSWEVMLRSCGFSNVALSPFALSQAKLLLRLHYPSEGYQLGVSSNSFFLGWQNQPLFSISSWR

SEQ ID NO: 13726 - protein, 538 aa, Dubautia arborea
MKRSRERKKEAKTTSSVPDSGGMDELLEVLGYKVKSTDMADVAQKLEQLEMVMGEDGVLQLSDTVHYNPSDLSGWVQSMLSVLNENTPPSDHIVLSGDSSTTMIDFSNSSEIVVHGKQGSKMHEDDPYDLRAIAGGAIYGGESESSVRGNGNGNGIKRMKSTAVGSVDVQPESPRRVVLVDSQEAGIRLVHTLMACAEAIQHNDLKLADALVKHVGILVASQAGAMAKVATYFAGALAQRIYNIYPQNALETSCYEILQMHFYETCPYLKFAHFTANQAILEAFAGATRVHVIDFSLKQGMQWPALMQALALRSGGPPAFRLTGIGPPQPDNSDALQQVGWKLAQLADTIGVEFEFRGFVANSIADIDANMLNIRASETEVVAVNSVFEVHRLLARPGAVEKVLSGITKMKPKIVTLVEQESNHNGAVFMERFNEALHYYSTMFDSLESSALTLPNSQDDLVMSEVYLGRQICNVVACEGADRVERHETLTQWRVRMNSAGFEPVHLGSNAFKQASMLLALFAGGDGYRVEENDGCLM

SEQ ID NO: 13727 - protein, 540 aa, Dubautia arborea
MKRSRERKKEAKTTSSVPDSGGMDELLEVLGYKVKSTDMADVAQKLEQLEMVMGEDGVLQLSDTVHYNPSDLSGWVQSMLSVLNENNNTPPSDHIVLSGDSSTTMIDFSNSSEIVVHGKQGSKMHEDDPYDLRAIAGGAIYGGESESSVRGNGNGNGIKRMKSTAVGSVDVQPESPRRVVLVDSQEAGIRLVHTLMACAEAIQHNDLKLADALVKHVGILVASQAGAMAKVATYFAGALAQRIYNIYPQNALETSCYEILQMHFYETCPYLKFAHFTANQAILEAFAGATRVHVIDFSLKQGMQWPALMQALALRSGGPPAFRLTGIGPPQPDNSDALQQVGWKLAQLADTIGVEFEFRGFVANSIADIDANMLNIRASETEVVAVNSVFEVHRLLARPGAVEKVLSGITKMKPKIVTLVEQESNHNGAVFMERFNEALHYYSTMFDSLESSALTLPNSQDDLVMSEVYLGRQICNVVACEGADRVERHETLTQWRVRMNSAGFEPVHLGSNAFKQASMLLALFAGGDGYRVEENDGCLM

SEQ ID NO: 13728 - protein, 534 aa, Dubautia arborea
ERKKEAKTTSSVPDSGGMDELLEVLGYKVKSTDMADVAQKLEQLEMVMGEDGILQLSDTVHYNPSDLSGWVQSMLLVLNDNNTNNTAHDSGHILLPGDSSTTMIDFSSEIVVHGKPGSKIHLDDDLRAIAGGAIYRSESESSMPGNGNGVKRMKTTVAGSEVVDVQPESPRPVVLVDSLEAGIRLVHTLMACAEAIQHNDLKLADALVKHVGILVASQAGAMAKVATYFAGALAQRIYNIYPQNALETSCYEILQMHFYETCPYLKFAHFTANQAILEAFAGATRVHVIDFSLNQGIQWPALMQALALRSGGPAAFRLSGIGPPQPDNSDALQQVGWKLAQLADTIGVEFEFRGFVANSIADIDANILDIRAPETEVVAVNSVFEVHRLLARPGAVEKVLSSITGMKPKIVTLVEQESNHNGNVFMERFNEALHYYSTMFDSLESSALTLPNSQDDLVMSEVYLGRQICNVVACEGTDRVERHETLTQWRVRMNSAGFEPVHLGSNAFKQASMLLALFADGDGYRVEENDGCLM

SEQ ID NO: 13729 - protein, 537 aa, Dubautia menziesii
ERKKEAKTTSSVPDSGGMDVLLEVLGYKVKSTDMADVAQKLEQLEMVMGEDGILQLSDTVHYNPSDLSGWVQSMLLVLNDNNNNTAHDSGHILLPGDSSTTMIDFSSEIVVHGKPGSKIHLDDDLRAIAGGAIYRSESESSMPGNGNPNGNGVKRMKTTVAGSEVVDVQPESPRPVVLVDSQEAGIRLVHTLMACAEAIQHNDLKLADALVKHVGILVASQAGAMAKVATYFAGALAQRIYNIYPQNALETSCYEILQMHFYETCPYLKFAHFTANQAILEAFAGATRVHVIDFSLNQGMQWPALMQALALRSGGPPAFRLTGIGPPQPDNSDALQQVGWKLAQLADTIGVEFEFRGFVANSIADIDANILDIRAPETEVVAVNSVFEVHRLPRRPGAVEKVLSSITGMKPKIVTLVEQESNHNGNVFKERFNEALHYYATMFDSLESSALTLPNSQDDLVMSEVYLGRQICNVVACEGTDRVERHETLTQWRVRMNSAGFEPVHLGSNAFKQASMLLALFADGDGYRVEENDGCLM

SEQ ID NO: 13730 - protein, 536 aa, Dubautia menziesii
MKRSRERKKEAKTTSSVPDSGGMDELLEVLGYKVKSTDMADVAQKLEQLEMVMGEDGVLQLSDTVHYNPSDLSGWVQSMLSVLNDNTPPSDHIVLSGDSSTTMIDFSNSSEIVVHGKQGSKMHEDDPYDLRAIAGGAIYGGESESSVRGNGNGIKRMKSTAVGSVDVQPESPRPVVLVDSQEAGIRLVHTLMACAEAIQHNDLKLADALVKLVGILVASQAGAMAKVATYFAGALAQRIYNIYPQNALETSCYEILQMHFYETCPYLKFAHFTANQAILEAFAGATRVHVIDFSLKQGMQWPALMQALALRSGGPPAFRLTGIGPPQPDNSDALQQVGWKLAQLADTIGVEFEFRGFVANSIADIDANMLDIRASETEVVAVNSVFEVHRLLARPGAVEKVLSGITKMKPKIVTLVEQESNHNGAVFMERFNEALHYYSTMFDSLESSALTLPNSQDDLVMSEVYLGRQICNVVACEGADRVERHETLTQWRVRMNSAGFEPVHLGSNAFKQASMLLALFAGGDGYRVEENDGCLM

SEQ ID NO: 13731 - protein, 548 aa, Carlquistia muirii
MKRSRERKKEAKTTSSVPDSGGMDELLEVLGYKVKSTDMADVAQKLEQLEMVMGEDGVLQLSDTVHYNPSDLSGWVQSMLLVLNDDNNNNNTADDSDHIFLPGNSLTTMIDFSNSTETVVHGKQRSKLHEDDPYDLRAIAGGAIYRSESESSIRGNGNPNGNGMKRMKTTAAGSEVVDVQPESPRPVVLVDSQEAGIRLVHTLMACAEAIQHNDLKLADALVKHVGILVASQAGAMAKVATYFAGALAQRIYNIYPQNAIETSCYEILQMHFYETCPYLKFAHFTANQAILEAFAGATRVHVIDFSLNQGMQWPALMQALALRSGGPPAFRLTGIGPPQPDNSDVLQQVGWKLAQLADTIGVEFEFRGFVANSIADIDVSMLDIRAPDTEVVAVNSVFEVHRLLARPGAVEKVLSSITGMKPKIVTLVEQESNHNGAVFMERFNEALHYYSTMFDSLESSALTLPNNQDDLVMSEVYLGRQICNVVACEGTERVERHETLTQWRVRMNLAGFEPVHLGSNAFKQASMLLALFAGGDGYKVEENDGCLM

SEQ ID NO: 13732 - protein, 548 aa, Carlquistia muirii
MKRSREHKKEAKSTSSVPDSGGMDELLEVLGYKVKSTDMADVAQKLEQLEMVMGEDGVLQLSDTVHYNPSDLSGWVQSMLLVLNDDNNNNNTADDSDHIFLPGNSLTTMIDFSNSTETVVHGKQRSKLHEDDPYDLRAIAGGAIYRSESESSMRGNGNPNGNGMKRMKTTAAGSEVVDVQPESPRPVVLVDSQEAGIRLVHTLMACAEAIQHNDLKLADALVKHVGILVASQAGAMAKVATYFAGALAQRIYNIYPQNAIETSCYEILQMHFYETCPYLKFAHFTANQAILEAFAGATRVHVIDFSLNQGMQWPALMQALALRSGGPPAFRLTGIGPPQPDNSDVLQQVGWKLAQLADTIGVEFEFRGFVANSIADIDVSMLDIRAPDTEVVAVNSVFEVHRLLARPGAVEKVLSSITGMKPKIVTLVEQESNHNGAVFMERFNEALHYYSTMFDSLESSALTLPNNQDDLVMSEVYLGRQICNVVACEGTERVERHETLTQWRVRMNSAGFEPVHLGSNAFKQASMLLALFAGGDGYKVEENDGCLM

SEQ ID NO: 13733 - protein, 538 aa, Wilkesia gymnoxiphium
MKRSRERKKEAKTTSSVPDSGGMDELLEVLGYKVKSTDMADVAQKLEQLEMVMGEDGVLQLSDTVHYNPSDLSGWVQSMLSVLNDNNNTPPSDHIVLSGDSSTTMIDFSNSSEIVVHGKQGSKMHEDDPYDLRAIAGGAIYGGESESLVRGNGNGIKRMKSTAVGSVDVQPESPRPVVLVDSQEAGIRLVHTLMACAEAIQHNDLKLADALVKHVGILVASQAGAMAKVATYFAGALAQRIYNIYPQNALETSCYEILQMHFYETCPYLKFAHFTANQAILEAFAGATRVHVIDFSLKQGMQWPALMQALALRSGGPPAFRLTGIGPPQPDNTDALQQVGWKLAQLADTISVEFEFRGFVANSIADIDANMLDIRPSETEVVAVNSVFEVHRFLARPGDVEKVLSGITKMKPKIVTLVEQESNHNGAVFMERFNEALHYYSTMFDSLESSALTLPNSQDDLVMSEVYLGRQICNVVACEGADRVERHETLTQWRVRMNSAGFEPVHLGSNAFKQASMLLALFAGGDGYRVEENDGCLM

SEQ ID NO: 13734 - protein, 473 aa, Oryza sativa
  unsure (1)..(473): unsure at all Xaa locations
MVLILPIALHLLTASLLLAGAPCLIMIATQTTRTIPLQFNRTCASCVTEITDLQIKLRELENAILGPXXLDIAYDSPDALQPNIMATPENWRQLLGINTGDLKQVIIACGKAVAENDVRLTELLISELGQMVSVSGDPLQRLGAYMLEGLVARLSSSGSKIYKSLXXCKEPTSSELISFXHLLYEICPFFKFGYMSANGAIAEAIKGENFVHIIDFQIAQGSQWMTLIQALAARPGGPPFLRITGIDDSNSAYARGGGLDIVGMRLYKVAQSFGLPFEFNAVPAASHEVYLEHLDIRVGEVIVVNFAYQLHHTPDESVSTENHRDRILRMVKSLSPRLVTLVEQESNTNTRPFFPRYLETLDYYTAMFESIDVALPRDDKRRMSAEQHCVARDIVNLIACEGAERVERHEVFGKWKARLTMAGFRPYPLSSVVNSTIKTLLHTYNSFYRLEERDGVLYLGWKNRVLVVSSAWC

SEQ ID NO: 13735 - protein, 266 aa, Tripsacum dactyloides
ASADPSTDSAREPKRMRTGGGSTSSSSSSSSSMDGGRTRSSVVEAAPPATQASAAANGPAVPVVVVDTQEAGIRLVHALLACAEAVQQENFSAAEVLVKQIPMLASSQGGAMRKVAAYFGEALARRVYRFRPPPDSSLLDAAFADLLHAHFYESCPYLKFAHFTANQAILEAFAGCRRVHVADFGIKQGMQWPALLQALALRPGGPPSFRLTGVGPPQPDETDALQQVGWKLAQFAHTIRVDFQYRGLVAATLADLEPFMLQPEGD

SEQ ID NO: 13736 - protein, 364 aa, Triticum aestivum
  unsure (1)..(364): unsure at all Xaa locations
XGKAVAANDMYATELLISELGQLVSVSGDPMQRLGAYMLEGLVARLSFSGSKLYKSLKCKEPTSSELMSYMHLLCEICPFYKFGYMSANGAIAEAIKGENFVHIIDFQIAQGSQWITIIQALAARPGGPPFLRITGIDDSNSAYARGGGLDMVGTRLHSVSASCGLPFEFNAVHAASHEVYIQHLDTRPGEAIVVDFAYQLHPPPRESVSVENHRDRIIRMIKSLSPRVVTLVEQESNTNTSAFLPRYLETLDYYTAMFESIDVALPRDDKRRISTEQHCVARDIVNLIACEGAERVERHEVFGKWKARFAMAGFRPYPLSSVVNNTIKTLLDSYHSCYRLEERDGVLYLGWKGRVLVVSSAWC

SEQ ID NO: 13737 - protein, 365 aa, Triticum aestivum
  unsure (1)..(365): unsure at all Xaa locations
XRNAARSTPPYLPAPAAMETLLSPSALLGPLRGSCTRMPEAPAALLSFSRRELXAGFACCEPTGCGLRCYMHLLCEGCAFAEFPLALALAPAPAPVAAAEFVVLIDGPPAQGSVWVSRMRAHPASPGGPPFLRITGIDDSNSAYAXRGGGLDMVGTRLHSISASCGLPFEFNAVHAASHEVYIQHLDIRPGEAIVVNFAYQLHHTPRESVSVENHRDRIIRMIKSLSPRVVTLVEQESNTNTSAFLPRYLETLDYYTAMFESRDVALPRDDKRRISTEQHCVARDIVNLIACEGAERVERHEVFGKWKARFAMAGFRPYPLSSVVNNTIKTLLDSYHSCYRLEERDGVLYLGWKGRVLVVSSAWC

SEQ ID NO: 13738 - protein, 245 aa, Triticum aestivum
  unsure (1)..(245): unsure at all Xaa locations
XALAARASGPPYLRITGIDDSDSAYARGGGLDIVGRRLCNIAQSCCLPFEFNAVNAASHEVTLEHLDIRMGEAIAVNFAYQLHHTPDESVCIENHRDRILRMVKSLSPRVVTLVEQEANTNTAPFFSRYMETLDYYTAMFEAIDVACPRDDKVRMSTEQHCVARDIVNLIACEGAERVERHEPFGKWRSRLAMAGFRPYPLSALVNNTIRTLLNDYNSYYKLEEKDGVIYLGWKNRKLVVSSAWR

SEQ ID NO: 13739 - protein, 581 aa, Zea mays subsp. mays
MKREYQDAGGSGGDMGSSKDKMMAAAAGAGEQEEEDVDELLAALGYKVRSSDMADVAQKLEQLEMAMGMGGVGGAGATADDGFVSHLATDTVHYNPSDLSSWVESMLSELNAPPAPLPPATPAPRLASTSSTVTSGAAAGAGYFDLPPAVDSSSSTYALKPIPSPVAAPSADPSTDSAREPKRMRTGGGSTSSSSSSSSSMDGGRTRSSVVEAAPPATQASAAANGPAVPVVVVDTQEAGIRLVHALLACAEAVQQENFSAAEALVKQIPMLASSQGGAMRKVAAYFGEALARRVYRFRPPPDSSLLDAAFADLLHAHFYESCPYLKFAHFTANQAILEAFAGCRRVHVVDFGIKQGMQWPALLQALALRPGGPPSFRLTGVGPPQPDETDALQQVGWKLAQFAHTIRVDFQYRGLVAATLADLEPFMLQPEGDDTDDEPEVIAVNSVFELHRLLAQPGALEKVLGTVRAVRPRIVTVVEQEANHNSGTFLDRFTESLHYYSTMFDSLEGAGAGSGQSTDASPAAAGGTDQVMSEVYLGRQICNVVACEGAERTERHETLGQWRSRLGGSGFAPVHLSSNA

SEQ ID NO: 13740 - protein, 124 aa, Gossypioides kirkii
IEKVVSSIKAMKPKIVTVVEQEANHNGPVFLDRFTEALHYYSTLFDSLEGSGVAPPSQDLAMSELYLGRQICNVVACEGMDRVERHEPLTQWRTRMETAGFSPVHLGSNAYKQASMLLALFAGG

SEQ ID NO: 13741 - protein, 142 aa, Brassica rapa subsp. pekinensis
KNLGVRPGEALAVNFAFVLHHMSDESVSTENHRDRLLRMVKSLSPKVVTLVEQESNTNTAAFFPRFKETMDYYDAMFESIDVTLPRNHKQRINVEQHCLARDVVNIIACEGADRVERHELLGKWRSRFGMAGFTPYPLSPLV

SEQ ID NO: 13742 - protein, 538 aa, Argyroxiphium kauense
MKRSRERKKEAKTTSSVPDSGGMDELLEVLGYKVKSTDMADVAQKLEQLEMVMGEDGVLQLSDTVHYNPSDLSGWVQSMLSVLNDNNNTPPSDHIVLSGDSSTTMIDFSNSSEIVVHGKQGSKMHEDDPYDLRAIAGGAIYGGESESSVRGNGNGIKRVKSTAVGSVDVQPESPRPVVLVDSQEAGIRLVHTLMACAEAVQHNDLKLADALVKHVGILVALQAGAMAKVATYFAGALAQRIYNIYPQNALETSCYEILQMHFYETCPYLKFAHFTANQAILEAFAGATRVHVIDFSLKQGMQWPALMQALALRSGGPPAFRLTGIGPPQPDNSDALQQVGWKLAQLADTIGVEFEFRGFVANSIADIDANILDIRAPETEVVAVNSVFEVHRLLARPGAVEKVLSGITKMKPKIVTLVEQESNHNSAVFMERFNEALHYYSTMFDSLESSALTLPNSQDDLVMSEVYLGRQICNVVACEGADRVERHETLTQWRVRMNSAGFEPVHLGSNAFKQASMLLALFAGGDGYRVEENDGCLM

SEQ ID NO: 13743 - protein, 542 aa, Argyroxiphium kauense
MKRSRERKKEAKTTSSVPDSGGMDELLEVLGYKVKSTDMADVAQKLEQLEMVMGEDGILQLSDTVHYNPSDLSGWVQSMLLVLNDNNNNTAHDSGHILLPGDSSTTMIDFSSEIVVHGKPGSKIHLDDDLRAIAGGAIYRSESESSMPGNGNPNENGVKRMKTTAAGSEVVDVQPESPRPVVLVDSQEAGIRLVHTLLACAEAIQHNDLKLADALVKHVGILVALQAGAMAKVATYFAGALAQRIYNIYPQNALETSCYEILQMHFYETCPYLKFAHFTANQAILEAFADATRVHVIDFSLNQGMQWPALMQALALRSGGPPAFRLTGIGPPQPDNSDALQQVGWKLAQLADTIGVEFEFRGFVANSIADIDANILDIRAPETEVVAVNSVFEVHRLLARPGAVEKVLSSITGMKPKIVTLVEQESNHNGNVFMERFNEALHYYSTMFDSLEGSALTLPNSQDDLVMSEVYLGRQICNVVACEGTDRVERHETLTQWRVRMNSAGFEPVHLGSNAFKQASMLLALFADGDGYRVEENDGCLM

SEQ ID NO: 13744 - protein, 544 aa, Argyroxiphium kauense
MKRSRERKKEAKTTSSVPDSGGMDELLEVLGYKVKSTDMADVAQKLEQLEMVMGEDGILQLSDTVHYNPSDLSGWVQSMLLVLNDNNNNNNTAHDSGHILLPGDSSTTMIDFSSEIVVHGKPGSKIHLDDDLRAIAGGAIYRSESESSMPGNGNPNENGVKRMKTTAAGSEVVDVQPESPRPVVLVDSQEAGIRLVHTLLACAEAIQHNDLKLADALVKHVGILVALQAGAMAKVATYFAGALAQRIYNIYPQNALETSCYEILQMHFYETCPYLKFAHFTANQAILEAFADATRVHVIDFSLNQGMQWPALMQALALRSGGPPAFRLTGIGPPQPDNSDALQQVGWKLAQLADTIGVEFEFRGFVANSIADIDANILDIRAPETEVVAVNSVFEVHRLLARPGAVEKVLSSITGMKPKIVTLVEQESNHNGNVFMERFNEALHYYSTMFDSLEGSALTLPNSQDDLVMSEVYLGRQICNVVACEGTDRVERHETLTQWRVRMNSAGFEPVHLGSNAFKQASMLLALFADGDGYRVEENDGCLM

SEQ ID NO: 13745 - protein, 538 aa, Argyroxiphium sandwicense subsp. macrocephalum
MKRSRERKKEAKTTSSVPDSGGMDELLEVLGYKVKSTDMADVAQKLEQLEMVMGEDGVLQLSDTVHYNPSDLSGWVQSMLSVLNDNNNTPPSDHIVLSGDSSTTMIDFSNSSEIVVHGKQGSKMHEDDPYDLRAIAGGAIYGGESESSVRGNGNGIKRMKSTAVGSVDVQPESPRPVVLVDSQEAGIRLVHTLMACAEAIQHNDLKLADALVKHVGILVASQAGAMAKVATYFAGALAQRIYNIYPQNALETSCYEILQMHFYETCPYLKFAHFTANQAILEAFAGATRVHVIDFSLKQGMQWPALMQALALRSGGPPAFRLTGIGPPQPDNSDALQQVGWKLAQLADTIGVEFEFRGFVANSIADIDANMLDIRPSETEVVAVNSVFEVHRLLARPGAVEKVLSGITKMKPKIVTLVEQESNHNGAVFMERFNEALHYYSTMFDSLESSALTLPNSQDDLVMSEVYLGRQICNVVACEGADRVERHETLTQWRVRMNSAGFEPVHLGSNAFKQASMLLALFAGGDGYRVEENDGCLM

SEQ ID NO: 13746 - protein, 537 aa, Argyroxiphium sandwicense subsp. macrocephalum
MKRSRERKKEAKTTSSVPDSGGMDELLEVLGYKVKSTDMADVAQKLEQLEMVMGEDGVLQLSDTVHYNPSDLSGWVQSMLSVLNDNNTPPSDHIVLSGDSSTTMIDFSNSSEIVVHGKQGSKMHEDDPYDLRAIAGGAIYGGESESSVRGNGNGIKRMKSTAVGSVDVQPESPRPVVLVDSQEAGIRLVHTLMACAEAIQHNDLKLADALVKHVGILVASQAGAMAKVATYFAGALAQRIYNIYPQNALETSCYEILQMHFYETCPYLKFAHFTANQAILEAFAGATRVHVIDFSLKQGMQWPALMQALALRSGGPPAFRLTGIGPPQPDNSDALQQVGWKLAQLADTIGVEFEFRGFVANSIADIDANMLDIRPSETEVVAVNSVFEVHRLLARPGAVEKVLSGITKMKPKIVTLVEQESNHNGAVFMERFNEALHYYSTMFDSLESSALTLPNSQDDLVMSEVYLGRQICNVVACEGADRVERHETLTQWRVRMNSAGFEPVHLGSNAFKQASMLLALFAGGDGYRVEENDGCLM

SEQ ID NO: 13747 - protein, 542 aa, Argyroxiphium sandwicense subsp. macrocephalum
MKRSRERKKEAKTTSSVPDSGGMDELLEVLGYKVKSTDMADVAQKLEQLEMVMGEDGILQLSDTVHYNPSDLSGWVQSMLLVLNDNNNNTAHDSGHILLPGDSSTTMIDFSSEIVVHGKPGSKIHLDDDLRAIAGGAIYRSESESSMPGNGNPNENGVKRMKTTAAGSEVVDVQPESPRPVVLVDSQEAGIRLVHTLLACAEAIQHKDLKLADALVKHVGILVASQAGAMAKVATYFAGALAQRIYNIYPQNALETSCYEILQMHFYETCPYLKFAHFTANQAILEAFADATRVHVIDFSLNQGMQWPALMQALALRSGGPPAFRLTGIGPPQPDNSDALQQVGWKLAQLADTIGVEFEFRGFVANSIADINANILDIRAPETEVVAVNSVFEVHRLLARPGAVEKVLSSITGMKPKIVTLVEQESNHNGNVFMERFNEALHYYSTMFDSLESSALTLPNSQDDLVMSEVYLGRQICNVVACEGTDRVERHETLTQWRVRMNSAGFEPVHLGSNAFKQASMLLALFADGDGYRVEENDGCLM

SEQ ID NO: 13748 - protein, 541 aa, Argyroxiphium sandwicense subsp. macrocephalum
MKRSRERKKEAKTTSSVPDSGGMDELLEVLGYKVKSTDMADVAQKLEQLEMVMGEDGILQLSDTVHYNPSDLSGWVQSMLLVLNDNNNTAHDSGHILLPGDSSTTMIDFSSEIVVHGKPGSKIHLDDDLRAIAGGAIYRSESESSMPGNGNPNENGVKRMKTTAAGSEVVDVQPESPRPVVLVDSQEAGIRLVHTLLACAEAIQHKDLKLADALVKHVGILVASQAGAMAKVATYFAGALAQRIYNIYPQNALETSCYEILQMHFYETCPYLKFAHFTANQAILEAFADATRVHVIDFSLNQGMQWPALMQALALRSGGPPAFRLTGIGPPQPDNSDALQQVGWKLAQLADTIGVEFEFRGFVANSIADIDANILDIRAPETEVVAVNSVFEVHRLLARPGAAEKVLSSITGMKPKIVTLVEQESNHNGNVFMERFNEALHYYSTMFDSLESSALTLPNSQDDLVMSEVYLGRQICNVVACEGTDRVERHETLTQWRVRMNSAGFEPVHLGSNAFKQASMLLALFADGDGYRVEENDGCLM

SEQ ID NO: 13749 - protein, 536 aa, Dubautia ciliolata subsp. glutinosa
MKRSRERKKEAKTTSSVPDSGGMDELLEVLGYKVKSTDMADVAQKLEQLEMVMGEDGVLQLSDTVHYNPSDLSGWVQSMLSVLNDNTPPSDHMVLSGDSSTTMIDFSNSSKIVVHGKQGSKMHEDDPYDLRAIAGGAIYGGESESSVRGNGNGHKRMKSTAVGSVDVQPESPRPVVLVDSQEAGIRLVHTLMACAEAIQHNDLKLADALVKHVGILVASQAGAMAKVATYFAGALAQRIYNIYPQNALETSCYEILQMHFYETCPYLKFAHFTANQAILEAFAGATRVHVIDFSLKQGMQWPALMQALALRSGGPPAFRLTGIGPPQPDNSDALQQVGWKLAQLADTIGVEFEFRGFVANSIADIDANMLNIRASETEVVAVNSVFEVHRLLARPGAVEKVLSGITKMKPKIVTLVEQESNHNGAVFMERFNEALHYYSTMFDSLESSALTLPNSQDDLVMSEVYLGRQICNVVACEGADRVERHETLTQWRVRMNSAGFEPVHLGSNAFKQASMLLALFAGGDGYRVEENDGCLM

SEQ ID NO: 13750 - protein, 536 aa, Dubautia ciliolata subsp. glutinosa
MKRSRERKKEAKTTSSVPDSGGMDELLEVLGYKVKSTDMADVAQKLEQLEMVMGEDGVLQLSDTVHYNPSDLSGWVQSMLSVLNDNTPPSDHMVLSGDSSTTMIDFSNSSEIVVHGKQGSKMHEDDPYDLRAIAGGAIYGGESESSVRGNGNGHKRMKSTAVGSVDVQPESPRPVVLVDSQEAGIRLVHTLMACAEAIQHNDLKLADALVKLVGILVASQAGAMAKVATYFAGALAQRIYNIYPQNALETSCYEILQMHFYETCPYLKFAHFTANQAILEAFAGATRVHVIDFSLKQGMQWPALMQALALRSGGPPAFRLTGIGPPQPDNSDALQQVGWKLAQLADTIGVEFEFRGFVANSIADIDANMLNIRASETEVVAVNSVFEVHRLLARPGAVEKVLSGITKMKPKIVTLVEQESNHNGAVFMERFNEALHYYSTMFDSLESSALTLPNSQDDLVMSEVYLGRQICNVVACEGADRVERHETLTQWRVRMNSAGFEPVHLGSNAFKQASMLLALFAGGDGYRVEENDGCLM

SEQ ID NO: 13751 - protein, 537 aa, Dubautia knudsenii
ERKKEAKTTSSVPDSGGMDELLEVLGYKVKSTDMADVAQKLEQLEMVMGEDGILQLSDTVHYNPSDLSGWVQTMLLVLNDDNNNTADDSGHILLPGDSSTTMIDFSSEIVVHGKPGSKIHLDDDLRAIAGGAIYRSESESLMPGNGNPNGNGVKRMKTTVAGSEVVDVQPESPRPVVLVDSQEAGIRLVHTLMACAEAIQRNELKLADALVKHVGILVASQAGAMAKVATYFAGALAQRIYNIYPQNALETSCYEILQMHFYETCPYLKFAHFTANQAILEAFAGATRVHVIDFSLNQGMQWPAFMQALALRYGGPPAFRLTGIGPPQPDNSDALQQVGWKLAQLANTIGVEFEFRGFVANSIADIDANILDIRAPETEVLAVNSVFEVHRLLARPGAVEKVLSSITGMKPKIVTLVEQESNHNGNVFMERFNEALHYYSTMFDSLESSALTLPNSQDDLVMSEVYLGRQICNVVACEGTDRVERHETLTQWRVRMNSAGFEPVHLGSNAFKQASMLLALFADGDGYRVEENDGCLM

SEQ ID NO: 13752 - protein, 537 aa, Dubautia microcephala
ERKKEAKTTSSVPDSGGMDELLEVLGYKVKSTDMADVAQKLEQLEMVMGEDGILQLSDTVHYNPSDLSGWVQTMLLVLNDDNNNAADDSSHILLPGDSSTTMIDFSSEIVVHGKPGSKIHLDDDLRAIAGGAIYRSESESLMPGNGNPNGNGVKRMKTTVAGSEVVDVQPESPRPVVLVDSHEAGIRLVHTLMACAEAIQRNDLKLADALVKHVGILVASQAGAMAKVATYFAGALAQRIYNIYPQNALETSCYEILQMHFYETCPYLKFAHFTANQAILEAFAGATRVHVIDFSLNQGMQWPAFMQALALRSGGPPAFRLTGIGPPQPDNSDALQQVGWKLAQLANMIGVEFEFRGFVANSIADIDANILDIRAPETEVVAVNSVFEVHRLLARPGAVEKVLSSITGMKPKIVTLVEQESNHNGNVFMERFNEALHYYSTMFDSLESSALTLPNSQDDLVMSEVYLGRQICNVVACEGTDRVERHETLTQWRVRMNSAGFEPVHLGSNAFKQASMLLALFADGDGYRVEENDGCLM

SEQ ID NO: 13753 - protein, 539 aa, Dubautia raillardioides
ERKKEAKTTSSVPDSGGMDELLEVLGYKVKSTDMADVAQKLEQLEMVMGEDGILQLSDTVHYNPSDLSGWVQTMLLVLNDDNNTTADDSGHILLPGDSSTTMIDFSNSSETVVHGKPGSKIHLDDDLRAIAGGAIYRSESESSMPGNGNPNGNGVKRMKTTVAGSEVVDVQPESPRPVVLVDSQEAGIRLVHTLMACAEAIQHNDLKLADALVKHVGILVASQAGAMAKVATYFAGALAQRIYNIYPQNALETSCYEILQMHFYETCPYLKFAHFTANQAILEAFAGATRVHVIDFSLNQGMQWPALMQALALRSGGPPAFRLTGIGPPQPDNSDALQQVGWKLAQLANTIGVEFEFRGFVANSIADIDANILDIRAPETEVVAVNSVFEVHRLLARPGAVEKVLSSITGMKPKIVTLVEQESNHNGNVFMERFNEALHYYSTMFDSLESSALTLPNSQDDLVMSEVYLGRQICNVVACEGTDRVERHETLTQWRVRMNSAGFEPVHLGSNAFKQASMLLALFADGDGYRVEENDGCLM

SEQ ID NO: 13754 - protein, 538 aa, Dubautia raillardioides
MKRSRERKKEAKITSSVPDSGGMDELLEVLGYKVKSTDMADVAQKLEQLEMVMGEDGVLQLSDTVHYNPSDLSGWVQSMLSVLNDYNNTPPSDHIVLSGDSSTTMIDFSNSSEIVVHGKQGSKMHEDDPYDLRAIAGGAIYGGESESSVRGNGNGIKRMKSTAVGSVDVQPESPRPVVLVDSQEAGIRLVHTLMACAEAIQHNDLKLADALVKHVVILVASQAGAMAKVSTYFAGALAQRIYNIYPQNALETSCYEILQMHFYETCPYLKFAHFTANQAILEAFAGATRVHVIDFSLKQGMQWPALMQALALRYDGPPAFRLTGIGPPQPDNSDALQQVGWKLAQLADTIGVEFEFRGFVANSIADIDADMLDIRASETEVVTVNSVFEVHRLLARPGAVEKVLSGITKMKPKIVTLVEQESNHNGAVFMERFNEALHYYSTMFDSLESSALTLPNSQDDLVMSEVYLGRQICNVVACEGADRVERHETLTQWRVRMNSAGFEPVHLGSNAFKQASMLLALFAGGDGYRVEENDGCLM

SEQ ID NO: 13755 - protein, 447 aa, Capsella rubella
MLTSFKSSSSSSEDATTETPPPPFCQLASSSSSSAATSASHHLRRLLFTAADFVSQSNFTAARNLLSILSLNSSPYGDSTQRLAHLFTKALSLRINRLQQEQDPTVATCTTNEMTMSTNSTVFTSSVCKEQFLFRTKNNNSDFESCYYLWLNQLTPFIRFGHLTANQAILDATETNDNGALHILDLDISQGLQWPPLMQALAERSSSPNSPPPSLRITGCGRDVTGLNRTGDRLTRFANSLGLQFQFHKLVIVDEDLPGLLLQIRLLALSAVQGETIAVNCVHFLYKFFNDDADLIGHFLTVIKSLNPRIVTMAEREANHGDHSFLIRFSEALDHYVAIFDSLEATLPPNSRERLTLEQRWFGKEIMDVVAAEATERKQRHRRFEIWGEMMKRFGFVNVPIGSFALSQAKLLLRLHYPSEGYNLQFLNDSLFLGWQNRLLFSVSSWK

SEQ ID NO: 13756 - protein, 531 aa, Arabidopsis thaliana
MDTLFRLVSLQQQQQSDSIITNQSSLSRTSTTTTGSPQTAYHYNFPQNDVVEECFNFFMDEEDLSSSSSHHNHHNHNNPNTYYSPFTTPTQYHPATSSTPSSTAAAAALASPYSSSGHHNDPSAFSIPQTPPSFDFSANAKWADSVLLEAARAFSDKDTARAQQILWTLNELSSPYGDTEQKLASYFLQALFNRMTGSGERCYRTMVTAAATEKTCSFESTRKTVLKFQEVSPWATFGHVAANGAILEAVDGEAKIHIVDISSTFCTQWPTLLEALATRSDDTPHLRLTTVVVANKFVNDQTASHRMMKEIGNRMEKFARLMGVPFKFNIIHHVGDLSEFDLNELDVKPDEVLAINCVGAMHGIASRGSPRDAVISSFRRLRPRIVTVVEEEADLVGEEEGGFDDEFLRGFGECLRWFRVCFESWEESFPRTSNERLMLERAAGRAIVDLVACEPSDSTERRETARKWSRRMRNSGFGAVGYSDEVADDVRALLRRYKEGVWSMVQCPDAAGIFLCWRDQPVVWASAWRPT

SEQ ID NO: 13757 - protein, 478 aa, Arabidopsis thaliana
CFNFFMDEEDLSSSSSHHNHHNHNNPNTYYSPFTTPTQYHPATSSTPSSTAAAAALASPYSSSGHHNDPSAFSIPQTPPSFDFSANAKWADSVLLEAARAFSDKDTARAQQILWTLNELSSPYGDTEQKLASYFLQALFNRMTGSGERCYRTMVTAAATEKTCSFESTRKTVLKFQEVSSWATFGHVAANGAILEAVDGEAKIHIVDISSTFCTQWPTLLEALATRSDDTPHLRLTTVVVANKFVNDQTASHRMMKEIGNRMEKFARLMGVPFKFNIIHHVGDLSEFDLNELDVKPDEVLAINCVGAMHGIASRGSPRDAVISSFRRLRPRIVTVVEEEADLVGEEEGGFDDEFLRGFGECLRWFRVCFESWEESFPRTSNERLMLERAAGRAIVDLVACEPSDSTERRETARKWSRRMRNSGFGAVGYSDEVADDVRALLRRYKEGVWSMVQCPDAAGIFLCWRDQPVVWASAWRPT

SEQ ID NO: 13758 - protein, 580 aa, Glycine max
  unsure (1)..(580): unsure at all Xaa locations
LTHSHCLFDVGRVDTLFRLVSFHQQQQPQQQXXDPSLNSTTSRTSSSSRSSRQNYYPYSHQEEEECFNFYMDEEDLSSSSSKHYYHPYQXPSSSTTQXYPTFLQTPSAPPLTLITPTPXSFSPTQPVQDFNFEFSSPNWSHNLLLESARAVADNNSTRLHHLLWMLNELSSPYGDTEQKLAAYFLRALFSRVTEAGDRTYRSLASASEKTCSFESTRKTVLKFQEVSPWTTFGHVGIHGAILEALEGNSQMHILDISNTYCTQWPMLLEALATRSEETPHLCLTTIVTGSRIGNNVQRVMKEIGTRMEKFARLMGVPFKFNVVHHYGDLSEFNFSELDIKDDEALAVNCVNSLHSVSALGNNRDALISALQALQPRIVTVVEEEADLDVGIDDEFVKGFEESLRWFRVYFEALDESFVKTSNERLMLERAAGRAVVDLVACSPADSVERRETAARWAARLHNGGLNAAPFSDEVCDDVRALLRRYKEGWSMAACSDAGIFLSWKDTPVVWASAWRPXRKDRIIIVSFGFDMGESLARVLGFFGTCGRIYIDGVFFLLFSIINYYYYWALFPIFVLLVKYI

SEQ ID NO: 13759 - protein, 568 aa, Glycine max
  unsure (1)..(568): unsure at all Xaa locations
XDTLFRLVSFHQQQQPQQQXXDPSLNSTTSRTSSSSRSSRQNYYPYSHQEEEECFNFYMDDHASAHASAHXRPTTLINPIIINNTTYPTFLQTPSAPPLTLITPTPXSFSPTQPVQDFNFEFSSPNWSHNLLLESARAVADNNSTRLHHLLWMLNELSSPYGDTEQKLAAYFLRALFSRVTEAGDRTYRSLASASEKTCSFESTRKTVLKFQEVSPWTTFGHVASNGAILEALEGNSKLHILDISNTYCTQWPMLLEALATRSEETPHLCLTTIVTGSRIGNNVQRVMKEIGTRMEKFARLMGVPFKFNVVHHYGDLSEFNFSELDIKDDEALAVNCVNSLHSVSALGNNRDALISALQALQPRIVTVVEEEADLDVGIDDEFVKGFEESLRWFRVYFEALDESFVKTSNERLMLERAAGRAVVDLVACSPADSVERRETAARWAARLHNGGLNAAPFSDEVCDDVRALLRRYKEGWSMAACSDAGIFLSWKDTPVVWASAWRPXRKDRIIIVSFGFDMGESLARVLGFFGTCGRIYIDGVFFLLFSIINYYYYWALFPIFVLLVKYI

SEQ ID NO: 13760 - protein, 446 aa, Glycine max
  unsure (1)..(446): unsure at all Xaa locations
KAEXQYIHHNRNXASRYISPYTTPKKLSPHSNNHNNIIADEAAALLDHNNMHRSNHSHTSTSRSSDSSEPSEDGKWAPKLLRECAKAISERDSSKTHHHLWMLNELASPYGDCDQKLASYFLQALFCRATESGERCYKTLSSVAEKNHSFDSARRLILKFQEVSPWTTFGHVASNGALLEALEGEPKLHIIDLSSTLCTQWPTLLEALATRNDETPHLKLTVVAIAGSVMKEVGQRMEKFARLMGVPFEFNVISGLSQITKEGLGVQEDEAIAVNCVGALRRVQVEERENLIRVFKSLGPKVVTVVEEEADFCSXEGGXFFKCFEECLKFYTLYFEMLKESFPPTSNERLMLERECSRSIVRVLACCEFDCCERRERGIQWCERLRNAFSPSGFSDDVVDDVKALLKRYQSGWSLVVTQDISGIYLTWKEEPVVWASAWKPXNILT

SEQ ID NO: 13761 - protein, 276 aa, Glycine max
  unsure (1)..(276): unsure at all Xaa locations
MDTTLFRVVSSFQHQXXNPITINPSXNSTTSSSSRSSRQQQNYPYPQEDEECFNFFMDEEDLSSSSSKHYXXPYQPHPPSTXXPSTTPSXPTPCDFEFSGKWAQDILLETARAVADKNTTRLQQLMWMLNELSSPYGDTDQKLASYFLQAFFSRISQAGDRTYRTLASASEKTCSFESTRKTVLKFQEVSPWTTFGHVASNGAILEALEGEPKLHIIDISNTYCTQWPTLFEALATRNDDTPHLRLTSVVTADXXTAQKLMKEIGARMEKFARLMX

SEQ ID NO: 13762 - protein, 155 aa, Glycine max
AVISSLRRLKPRIVTVVEEEADLDIGLEGFEFVKGFEECLRWFRVYFEALDESFPRTSNERLMLERAAGRAVVDLVACSPADSVERREKAARWARRMRGGGFNTVAFSEEVCDDVRALLRRYREGWAMTQCSDAGIFLTWKEQPVVWASAWRALT

SEQ ID NO: 13763 - protein, 629 aa, Oryza sativa (japonica cultivar-group)
MEKASKAKAEAAKGAHTHCRCLLLLPPMDTLFRLVSLQAASEQQQQQQQSASYNSRSTTSSGSRSSSHQTNASYSYYHHSSNSGGGGGGGGGYYYGGQQPPPSQYYYLEPYQEECGNAPHHQLYMDEDFSSSSSSRHFHHGARVQQQQPPASSTPTGTAPTPPLSTSSTAAGAGHGLFEAADLSFPPDLNLDFSSPASSSGGGTASSGAVGGGGGGRWASQLLLECARSVAARDSQRVQQLMWMLNELASPYGDVEQKLASYFLQGLFARLTASGPRTLRTLAAASDRNTSFDSTRRTALRFQELSPWSSFGHVAANGAILESFLEVAAAASSETQRFHILDLSNTFCTQWPTLLEALATRSADETPHLSITTVVSAAPSAPTAAVQRVMREIGQRMEKFARLMGVPFRFRAVHHSGDLAELDLDALDLREGGATTALAVNCVNSLRGVVPGRARRRDAFAASLRRLDPRVVTVVEEEADLVASDPDASSATEEGGDTEAAFLKVFGEGLRFFSAYMDSLEESFPKTSNERLALERGAGRAIVDLVSCPASESMERRETAASWARRMRSAGFSPVAFSEDVADDVRSLLRRYREGWSMREAGTDDSAAGAGVFLAWKEQPLVWASAWRP

SEQ ID NO: 13764 - protein, 545 aa, Oryza sativa
  unsure (1)..(545): unsure at all Xaa locations
MDTLFRLVSLQAASEQQQQQQQSASYNSRSTTSSGSRSSSHQTNASYSYYHHSSNSLYMDEDFSSSSSSRHFHHGARVQQQQPPASSTPTGTAPTPPLSTSSTAAGAAACSRRRTCRSRRTSTSTSRPRRPGAVGGGGGGRWASQLLLECARSVAARDSQRVQQLMWMLNELASPYGDVEQKLASYFLQGLFARLTASGPRTLRTLAAASDRNTSFDSTRRTALRFQELSPWSSFGHVAANGAILESFLEVAAAXVVGDAAVXHILDLSNTFCTQWPTLLEALATRSADETPHLSITTVVSAAPSAPTAAVQRVMREIGQRMEKFARLMGVPFRFRAVHHSGDLAELDLDALDLREGGATTALAVNCVNSLRGVAGRARRRDAFAASLRRLDPRVVTVVEEEADLVAEEGGDTEAAFLKVFGEGLRFFSAYMDSLEESFPKTSNERLALERGAGRAIVDLVSCPASESMERRETAASWARRMRSAGFSPVAFSEDVADDVRSLLRRYREGWSMREAGTDDSAAGAGVFLAWKEQPLVWASAWRPX

SEQ ID NO: 13765 - protein, 574 aa, Oryza sativa
  unsure (1)..(574): unsure at all Xaa locations
MEKASKAKAEAAKGAHTHCRCLLLLPPMDTLFRLVSLQAASEQQQQQQQSASYNSRSTTSSGSPPSQYYYLEPYQEECGNAPHHQLYMDEDFSSSSSSRHFHHGARVQQQQPPASSTPTGTAPTPPLSTSSTAAGAAACSRRRTCRSRRTSTSTSRPRRPGAVGGGGGGRWASQLLLECARSVPARDSQRVQQLMWMLNELASPYGDVEQKLASYFLQGLFARLTASGPRTLRTLAAASDRNTSFDSTRRTALRFQELSPWSSFGHVAANGAILESFLEVAAAXVVGDAAVXHILDLSNTFCTQWPTLLEALATRSADETPHLSITTVVSAAPSAPTAAVQRVMREIGQRMEKFARLMGVPFRFRAVHHSGDLAELDLDALDLREGGATTALAVNCVNSLRGVAGRARRRDAFAASLRRLDPRVVTVVEEEADLVAEEGGDTEAAFLKVFGEGLRFFSAYMDSLEESFPKTSNERLALERGAGRAIVDLVSCPASESMERRETAASWARRMRSAGFSPVAFSEDVADDVRSLLRRYREGWSMREAGTDDSAAGAGVFLAWKEQPLVWASAWRPX

SEQ ID NO: 13766 - protein, 547 aa, Oryza sativa
  unsure (1)..(547): unsure at all Xaa locations
MDTLFRLVSLQAASEQQQQQQQSASYNSRSTTSSGSPPSQYYYLEPYQEECGNAPHHQLYMDEDFSSSSSSRHFHHGARVQQQQPPASSTPTGTAPTPPLSTSSTAAGAAACSRRRTCRSRRTSTSTSRPRRPGAVGGGGGGRWASQLLLECARSVPARDSQRVQQLMWMLNELASPYGDVEQKLASYFLQGLFARLTASGPRTLRTLAAASDRNTSFDSTRRTALRFQELSPWSSFGHVAANGAILESFLEVAAAXVVGDAAVXHILDLSNTFCTQWPTLLEALATRSADETPHLSITTVVSAAPSAPTAAVQRVMREIGQRMEKFARLMGVPFRFRAVHHSGDLAELDLDALDLREGGATTALAVNCVNSLRGVAGRARRRDAFAASLRRLDPRVVTVVEEEADLVAEEGGDTEAAFLKVFGEGLRFFSAYMDSLEESFPKTSNERLALERGAGRAIVDLVSCPASESMERRETAASWARRMRSAGFSPVAFSEDVADDVRSLLRRYREGWSMREAGTDDSAAGAGVFLAWKEQPLVWASAWRPX

SEQ ID NO: 13767 - protein, 520 aa, Oryza sativa
  unsure (1)..(520): unsure at all Xaa locations
MDTLFRLVSLXXTITTTSTXASPSPPDQPHKSYPSSRGSTSSPSSHHTHNHTYYHHSHSHYNNNSNTNYYYQASSSSRQFHSGTGAPSSAPVPPPPSATTSSAGGHGLFEAADFSFPQVDISLDFSSSGRWAAQLLMECARAVAGRDSQRVQQLMWMLNELASPYGDVDQKLASYFLQGLFARLTTSGPRTLRTLATASDRNASFDSTRRTALKFQELSPWTPFGHVAANGAILESVDAAARLHILDLSNTFCTQWPTLLEALATRSSDDTPHLSITTVVPTAAPSAAAQRVMREIGQRLEKFARLMGVPFSFRAVHHSGDLADLDLAALDLREGGATAALAVNCVNALRGVARGRDAFVASLRRLEPRVVTVVEEEADLAAPEADASSEADTDAAFVKVFGEGLRFFSAYMDSLEESFPKTSNERLSLERAVGRAIVDLVSCPASQSAERRETAASWARRMRSAGFSPAAFSEDVADDVRSLLRRYKEGWSMRDAGAAAGAFLAWKEQPVVWASAWKPX

SEQ ID NO: 13768 - protein, 520 aa, Oryza sativa; identical to SEQ ID NO: 13767
  unsure (1)..(520): unsure at all Xaa locations

SEQ ID NO: 13769 - protein, 191 aa, Triticum aestivum
  unsure (1)..(191): unsure at all Xaa locations
XGIAVNCMNSLRGVVPGGARRRGAFAASLRRLEPRVVTVVEEEADLVATDPDASDEGGDTEAAFLKVFGEGLRFFSAYMDSLEESFPKTSNERLALERGAGRAIVDLVSCPASESMERRETAAAWARRLRSAGFSPVPFSEDVADDVRSLLRRYREGWSMREAGTDDSAAGAGVFLAWKEQPLVWASAWRP

SEQ ID NO: 13770 - protein, 144 aa, Triticum aestivum
CCPLAVAYMDTLFRLVSLQASEQQQQQSASYNSRSTTSSGSRSSSHQTNASYNYYHHSSSSGGGGGGGGGQYYYSQQQPQQSYYLEPYQEECGGNAHQHHLYMDEDFSSSSSSRQHFHSHGGAAHPPTSSATPTAPTPPLSTSA

SEQ ID NO: 13771 - protein, 375 aa, Arabidopsis thaliana
MEATVKIFYYGTGVKSKIRELEVSLLSGDTKVEEFSGFSPAAGKSWNWDELLALTPQLDLKEVLVEAARAVADGDFATAYGFLDVLEQMVSVSGSPIQRLGTYMAEGLRARLEGSGSNIYKSLKCNEPTGRELMSYMSVLYEICPYWKFAYTTANVEILEAIAGETRVHIIDFQIAQGSQYMFLIQELAKHPGGPPLLRVTGVDDSQSTYARGGGLSLVGERLATLAQSCGVPFEFHDAIMSGCKVQREHLGLEPGFAVVVNFPYVLHHMPDESVSVENHRDRLLHLIKSLSPKLVTLVEQESNTNTSPFLSRFVETLDYYTAMFESIDAARPRDDKQRISAEQHCVARDIVNMIACEESERVERHEVLGNGGSE

SEQ ID NO: 13772 - protein, 351 aa, Glycine max
  unsure (1)..(351): unsure at all Xaa locations
XLMSELRKMVSVSGDPIQRLGAYMLEALVARLASSGSTIYKVLXXCKEPTGSELLSHMHLLYEICPYLKFGYMSANGAIAEAMKEESEVHIIDFQINQGIQWVSLIQALAGRPGGPPKIRITGFDDSTSAYAREGGLEIVGARLSTLAQSYNVPFEFHAIRASPTEVELKDLALQPGEAIAVNFAMMLHHVPDESVDSGNHRDRLVRLAKCLSPKIVTLVEQESHTNNLPFFPRFVETMNYYLAIFESIDVALPREHKERINVEQHCLAREVVNLIACEGEERVERHELLKKWRSRFTMAGFAPYPLNSFITCSIKNLQRSYRGHYTLEERDGALCLGWMNQVLITSCAWR

SEQ ID NO: 13773 - protein, 365 aa, Glycine max
  unsure (1)..(365): unsure at all Xaa locations
LAVSDDDVPTARGWIDNVLGKLVSVSGDPIQRLGAYLLEGLRARLESSGNLIYKSLKCEQPTSKELMSYMHILYQICPYWKFAYISANAVIQETMANESRIHIIDFQIAQGTQWHLLIQALAHRPGGPPSLRVTGVDDSQSTHARGGGLWIVGERLSDFARSCGVPFEFHSAAISGCEVVRGNIEIRAGEALXAVNFPYVLHHMPDESVSTENHRDRLLRLVKSLSPKVVTFVEQESNTNTSPFFQRFVETLDYYTAMFESIDVACPRDDKKRISAEQHCVXARDMVNMIACEGVERVERHELFGKWRSRLSMAGFKQCQLSSSVMVATQNLLKEFSQNYRLEHRDGALYLGWMNRHMATSSAWR

SEQ ID NO: 13774 - protein, 524 aa, Oryza sativa (japonica cultivar-group)
MPYYNNSVPSGGNGRFYITQNHQDAHYASSDDGSQKIGSSPQAFEAPYCTLESSSANGAHPAHSSASSHSISPISGSPLSHHDSHSDHTYNSPPSASCVTEITDLQIKLRELENAILGPELDIAYDSPESALQPNIMATPENWRQLLGINTGDLKQVIIACGKAVAENDVRLTELLISELGQMVSVSGDPLQRLGAYMLEGLVARLSSSGSKIYKSLKCKEPTSSELMSYMHLLYEICPFFKFGYMSANGAIAEAIKGENFVHIIDFQIAQGSQWMTLIQALAARPGGPPFLRITGIDDSNSAYARGGGLDIVGMRLYKVAQSFGLPFEFNAVPAASHEVYLEHLDIRVGEVIVVNFAYQLHHTPDESVSTENHRDRILRMVKSLSPRLVTLVEQESNTNTRPFFPRYLETLDYYTAMFESIDVALPRDDKRRMSAEQHCVARDIVNLIACEGAERVERHEVFGKWKARLTMAGFRPYPLSSVVNSTIKTLLHTYNSFYRLEERDGVLYLGWKNRVLVVSSAWC

SEQ ID NO: 13775 - protein, 397 aa, Oryza sativa
  unsure (1)..(397): unsure at all Xaa locations
MPYYNNSVPSGGNGRFYITQNHQDAHYASSDDGSQKIGSSPQAFEAPYCTLESSSANGAHPAHSSASSHSISPISGSPLYDSHSDHTYNSPPSASCVTEITDLQIKLRELENAILGPXXLDIAYDSPDALQPNIMATPENWRQLLGINTGDLKQVIIACGKAVAENDVRLTELLISELGQMVSVSGDPLQRLGAYMLEGLVARLSSSGTNGAIAEAIKGENFVHIIDFQIAQGSQWMTLIQALAARPGGPPFLRITGIDDSNSAYARGGGLDIVGMRLYKVAQSFGLPFEFNAVPAASHEVYLEHLDIRVGEVIVVNFAYQLHHTPDESESNTNTRPFFPRYLETLDYYTAMFESIDVALPRDDKRRMSAEQHCVARDIVNLIACEGAERVERHEAX

SEQ ID NO: 13776 - protein, 137 aa, Calycadenia multiglandulosa
MKRPRERKKEAKASTSSSSSMAPAAKAKDLQNPPDSGGMDELLEVLGYKVKSTDMDDVAQKLEQLEMVMGEDGILQLSDTVHYNPSDLSGWVQSMLSELNNSGGDSDIGIGIPAGGESSTTMIDFSNNKEKQPEDPY

SEQ ID NO: 13777 - protein, 590 aa, Vitis vinifera
MKREYHHPHHPTCSTSPTGKGKMWDADPQQDAGMDELLAVLGYNVKASDMAEVAQKLEQLEEVIVNAQEDGLSHLASETVHYNPSDLSNWLGSMLSEFNPTPNCALDNPFLPPISPLDYTNCSTQPKQEPSIFDSPSLDYDLKAIPGKALYSHIEQPPQQPPAPPLYQRDNKRLKPTTSATANSVSSVIGGWGVPTESARPVVLVDSQETGIRLVHTLMACAEAVQQENLKLAEALVKQIGFLAVSQAGAMRKVATYFAEGLARRIYRLYPDKPLDSSFSDILQMHFYETCPYLKFAHFTANQAILEAFEGKKRVHVIDFSMKQGMQWPALMQALALRPGGPPSFRLTGIGPPSTDNTDHLHEVGWKLAQLAETIHVEFEYRGFVANSLADLDASMLELRDGESVAVNSVFELHSLLARPGGIERVLSAVKDMKPDIVTIVEQEANHNGPVFLDRFTESLHYYSTLFDSLEGCGVSPVNTQDKLMSEVYLGQQICNVVACEGPERVERHETLAQWRARLGSAGFDPVNLGSNAFKQASMLLALFAGGDGYRVEENNGCLMLGWHTRPLIATSAWQLANKPALPSSTPASN

SEQ ID NO: 13778 - protein, 587 aa, Arabidopsis thaliana
MKRDHHQFQGRLSNHGTSSSSSSISKDKMMMVKKEEDGGGNMDDELLAVLGYKVRSSEMAEVALKLEQLETMMSNVQEDGLSHLATDTVHYNPSELYSWLDNMLSELNPPPLPASSNGLDPVLPSPEICGFPASDYDLKVIPGNAIYQFPAIDSSSSSNNQNKRLKSCSSPDSMVTSTSTGTQIGGVIGTTVTTTTTTTTAAAESTRSVILVDSQENGVRLVHALMACAEAIQQNNLTLAEALVKQIGCLAVSQAGAMRKVATYFAEALARRIYRLSPPQNQIDHCLSDTLQMHFYETCPYLKFAHFTANQAILEAFEGKKRVHVIDFSMNQGLQWPALMQALALREGGPPTFRLTGIGPPAPDNSDHLHEVGCKLAQLAEAIHVEFEYRGFVANSLADLDASMLELRPSDTEAVAVNSVFELHKLLGRPGGIEKVLGVVKQIKPVIFTVVEQESNHNGPVFLDRFTESLHYYSTLFDSLEGVPNSQDKVMSEVYLGKQICNLVACEGPDRVERHETLSQWGNRFGSSGLAPAHLGSNAFKQASMLLSVFNSGQGYRVEESNGCLMLGWHTRPLITTSAWKLSTAAH

SEQ ID NO: 13779 - protein, 587 aa, Arabidopsis thaliana
MKRDHHQFQGRLSNHGTSSSSSSISKDKMMMVKKEEDGGGNMDDELLAVLGYKVRSSEMAEVALKLEQLETMMSNVQEDGLSHLATDTVHYNPSELYSWLDNMLSELNPPPLPASSNGLDPVLPSPEICGFPASDYDLKVIPGNAIYQFPAIDSSSSSNNQNKRLKSCSSPDSMVTSTSTGTQIGGVIGTTVTTTTTTTTAAGESTRSVILVDSQENGVRLVHALMACAEAIQQNNLTLAEALVKQIGCLAVSQAGAMRKVATYFAEALARRIYRLSPPQNQIDHCLSDTLQMHFYETCPYLKFAHFTANQAILEAFEGKKRVHVIDFSMNQGLQWPALMQALALREGGPPTFRLTGIGPPAPDNSDHLHEVGCKLAQLAEAIHVEFEYRGFVANSLADLDASMLELRPSDTEAVAVNSVFELHKLLGRPGGIEKVLGVVKQIKPVIFTVVEQESNHNGPVFLDRFTESLHYYSTLFDSLEGVPNSQDKVMSEVYLGKQICNLVACEGPDRVERHETLSQWGNRFGSSGLAPAHLGSNAFKQASMLLSVFNSGQGYRVEESNGCLMLGWHTRPLITTSAWKLSTAAY

SEQ ID NO: 13780 - protein, 587 aa, Arabidopsis thaliana
MKRDHHQFQGRLSNHGTSSSSSSISKDKMMMVKKEEDGGGNMDDELLAVLGYKVRSSEMAEVALKLEQLETMMSNVQEDGLSHLATDTVHYNPSELYSWLDNMLSELNPPPLPASSNGLDPVLPSPEICGFPASDYDLKVIPGNAIYQFPAIDSSSSSNNQNKRLKSCSSPDSMVTSTSTGTQIGGVIGTTVTTTTTTTTAAGESTRSDILVDSQENGVRLVHALMACAEAIQQNNLTLAEALVKQIGCLAVSQAGAMRKVATYFAEALARRIYRLSPPQNQIDHCLSDTLQMHFYETCPYLKFAHFTANQAILEAFEGKKRVHVIDFSMNQGLQWPALMQALALREGGPPTFRLTGIGPPAPDNSDHLHEVGCKLAQLAEAIHVEFEYRGFVANSLADLDASMLELRPSDTEAVAVNSVFELHKLLGRPGGIEKVLGVVKQIKPVIFTVVEQESNHNGPVFLDRFTESLHYYSTLFDSLEGVPNSQDKVMSEVYLGKQICNLVACEGPDRVERHETLSQWGNRFGSSGLAPAHLGSNAFKQASMLLSVFNSGQGYRVEESNGCLMLGWHTRPLITTSAWKLSTAAY

SEQ ID NO: 13781 - protein, 587 aa, Arabidopsis thaliana
MKRDHHQFQGRLSNHGTSSSSSSISKDKMMMVKKEEDGGGNMDDELLAVLGYKVRSSEMAEVALKLEQLETMMSNVQEDGLSHLAADTVHYNPSELYSWLDNMLSELNPPPLPASSNGLDPVLPSPEICGFPASDYDLEVIPGNAIYQFPAIDSSSSSNNQNKRLKSCSSPDSMVTSTSTGTQIGGVIGTTVTTTTTTTTAAAESTRSVILVDSQENGVRLVHALMACAEAIQQNNLTLAEALVKQIGCLAVSQAGAMRKVATYFAEALARRIYRLSPPQNQIDHCLSDTLQMHFYETCPYLKFAHFTANQAILEAFEGKKRVHVIDFSMNQGLQWPALMQALALREGGPPTFRLTGIGPPAPDNSDHLHEVGCKLAQLAEAVHVEFEYRGFVANSLADLDASMLELRPSDTEAVAVNSVFELHKLLGRPGGIEKVLGVVKQIKPVIFTVVEQESNHNGPVFLDRFTESLHYYSTLFDSLEGVPNSQDKVMSEVYLGKQICNLVACEGPDRVERHETLSQWGNRFGSSGLAPAHLGSNAFKQASMLLSVFNSGQGYRVEESNGCLMLGWHTRPLITTSAWKLSTAAY

SEQ ID NO: 13782 - protein, 532 aa, Arabidopsis thaliana
MKRDHHHHHQDKKTMMMNEEDDGNGMDELLAVLGYKVRSSEMADVAQKLEQLEVMMSNVQEDDLSQLATETVHYNPAELYTWLDSMLTDLNPPSSNAEYDLKAIPGDAILNQFAIDSASSSNQGGGGDTYTTNKRLKCSNGVVETTTATAESTRHVVLVDSQENGVRLVHALLACAEAVQKENLTVAEALVKQIGFLAVSQIGAMRKVATYFAEALARRIYRLSPSQSPIDHSLSDTLQMHFYETCPYLKFAHFTANQAILEAFQGKKRVHVIDFSMSQGLQWPALMQALALRPGGPPVFRLTGIGPPAPDNFDYLHEVGCKLAHLAEAIHVEFEYRGFVANTLADLDASMLELRPSEIESVAVNSVFELHKLLGRPGAIDKVLGVVNQIKPEIFTVVEQESNHNSPIFLDRFTESLHYYSTLFDSLEGVPSGQDKVMSEVYLGKQICNVVACDGPDRVERHETLSQWRNRFGSAGFAAAHIGSNAFKQASMLLALFNGGEGYRVEESDGCLMLGWHTRPLIATSAWKLSTN

SEQ ID NO: 13783 - protein, 533 aa, Arabidopsis thaliana
MKRDHHHHHHQDKKTMMMNEEDDGNGMDELLAVLGYKVRSSEMADVAQKLEQLEVMMSNVQEDDLSQLATETVHYNPAELYTWLDSMLTDLNPPSSNAEYDLKAIPGDAILNQFAIDSASSSNQGGGGDTYTTNKRLKCSNGVVETTTATAESTRHVVLVDSQENGVRLVHALLACAEAVQKENLTVAEALVKQIGFLAVSQIGAMRKVATYFAEALARRIYRLSPSQSPIDHSLSDTLQMHFYETCPYLKFAHFTANQAILEAFQGKKRVHVIDFSMSQGLQWPALMQALALRPGGPPVFRLTGIGPPAPDNFDYLHEVGCKLAHLAEAIHVEFEYRGFVANTLADLDASMLELRPSEIESVAVNSVFELHKLLGRPGAIDKVLGVVNQIKPEIFTVVEQESNHNSPIFLDRFTESLHYYSTLFDSLEGVPSGQDKVMSEVYLGKQICNVVACDGPDRVERHETLSQWRNRFGSAGFAAAHIGSNAFKQASMLLALFNGGEGYRVEESDGCLMLGWHTRPLIATSAWKLSTN

SEQ ID NO: 13784 - protein, 532 aa, Arabidopsis thaliana
MKRDHHHHHQDKKTMMMNEEDDGNGMDELLAVLGYKVRSSEMADVAQKLEQLEVMMSNVQEDDLSQLATETVHYNPAELYTWLDSMLTDLNPPSSNAEYDLKAIPGDAILNQFAIDSASSSNQGGGGDTYTTNKRLKCSNGVVETTTATAESTRHVVLVDSQENGVRLVHALLACAEAVQKENLTVAEALVKQIGFLAVSQIGAMRQVATYFAEALARRIYRLSPSQSPIDHSLSDTLQMHFYETCPYLKFAHFTANQAILEAFQGKKRVHVIDFSMSQGLQWPALMQALALRPGGPPVFRLTGIGPPAPDNFDYLHEVGCKLAHLAEAIHVEFEYRGFVANTLADLDASMLELRPSEIESVAVNSVFELHKLLGRPGAIDKVLGVVNQIKPEIFTVVEQESNHNSPIFLDRFTESLHYYSTLFDSLEGVPSGQDKVMSEVYLGKQICNVVACDGPDRVERHETLSQWRNRFGSAGFAAAHIGSNAFKQASMLLALFNGGEGYRVEESDGCLMLGWHTRPLIATSAWKLSTN

SEQ ID NO: 13785 - protein, 547 aa, Arabidopsis thaliana
MKRGYGETWDPPPKPLPASRSGEGPSMADKKKADDDNNNSNMDDELLAVLGYKVRSSEMAEVAQKLEQLEMVLSNDDVGSTVLNDSVHYNPSDLSNWVESMLSELNNPASSDLDTTRSCVDRSEYDLRAIPGLSAFPKEEEVFDEEASSKRIRLGSWCESSDESTRSVVLVDSQETGVRLVHALVACAEAIHQENLNLADALVKRVGTLAGSQAGAMGKVATYFAQALARRIYRDYTAETDVCAAVNPSFEEVLEMHFYESCPYLKFAHFTANQAILEAVTTARRVHVIDLGLNQGMQWPALMQALALRPGGPPSFRLTGIGPPQTENSDSLQQLGWKLAQFAQNMGVEFEFKGLAAESLSDLEPEMFETRPESETLVVNSVFELHRLLARSGSIEKLLNTVKAIKPSIVTVVEQEANHNGIVFLDRFNEALHYYSSLFDSLEDSYSLPSQDRVMSEVYLGRQILNVVAAEGSDRVERHETAAQWRIRMKSAGFDPIHLGSSAFKQASMLLSLYATGDGYRVEENDGCLMIGWQTRPLITTSAWKLA

SEQ ID NO: 13786 - protein, 547 aa, Arabidopsis thaliana
MKRGYGETWDPPPKPLPASRSGEGPSMADKKKADDDNNNSNMDDELLAVLGYKVRSSEMAEVAQKLEQLEMVLSNDDVGSTVLNDSVHYNPSDLSNWVESMLSELNNPASSDLDTTRSCVDRSEYDLRAIPGLSAFPKEEEVFDEEASSKRIRLGSWCESSDESTRSVVLVDSQETGVRLVHALVACAEAIHQENLNLADALVKRVGTLTGSQAGAMGKVATYFAQALARRIYRDYTAETDVCAAVNPSFEEVLEMHFYESCPYLKFAHFTANQAILEAVTTARRVHVIDLGLNQGMQWPALMQALALRPGGPPSFRLTGIGPPQTENSDSLQQLGWKLAQFAQNMGVEFEFKGLAAESLSDLEPEMFETRPESETLVVNSVFELHRLLARSGSIEKLLNTVKAIKPSIVTVVEQEANHNGIVFLDRFNEALHYYSSLFDSLEDSYSLPSQDRVMSEVYLGRQILNVVAAEGSDRVERHETAAQWRIRMKSAGFDPIHLGSSAFKQASMLLSLYATGDGYRVEENDGCLMIGWQTRPLITTSAWKLA

SEQ ID NO: 13787 - protein, 511 aa, Arabidopsis thaliana
MKREHNHRESSAGEGGSSSMTTVIKEEAAGVDELLVVLGYKVRSSDMADVAHKLEQLEMVLGDGISNLSDETVHYNPSDLSGWVESMLSDLDPTRIQEKPDSEYDLRAIPGSAVYPRDEHVTRRSKRTRIESELSSTRSVVVLDSQETGVRLVHALLACAEAVQQNNLKLADALVKHVGLLASSQAGAMRKVATYFAEGLARRIYRIYPRDDVALSSFSDTLQIHFYESCPYLKFAHFTANQAILEVFATAEKVHVIDLGLNHGLQWPALIQALALRPNGPPDFRLTGIGYSLTDIQEVGWKLGQLASTIGVNFEFKSIALNNLSDLKPEMLDIRPGLESVAVNSVFELHRLLAHPGSIDKFLSTIKSIRPDIMTVVEQEANHNGTVFLDRFTESLHYYSSLFDSLEGPPSQDRVMSELFLGRQILNLVACEGEDRVERHETLNQWRNRFGLGGFKPVSIGSNAYKQASMLLALYAGADGYNVEENEGCLLLGWQTRPLIATSAWRINRVE

SEQ ID NO: 13788 - protein, 662 aa, Arabidopsis thaliana
MEEVSSEMEVEVQNRQLSDSSPAQNVKKFGLKNSIQTNFGSDYVFQIVPKIDWTAIAVSLSTNTVKLYSPVTGQYYGECKGHSDTVNQIAFSSDSAASPHVLHSCSSDGTIRSWDTRSFQQVSRIDTGNDQEIFSFSYGGAADNLLAGGCKEQREHNHRESSAGEGGSSSMTTVIKEEAAGVDELLVVLGYKVRSSDMADVAHKLEQLEMVLGDGISNLSDETVHYNPSDLSGWVESMLSDLDPTRIQEKPDSEYDLRAIPGSAVYPRDEHVTRRSKRTEIESELSSTRSVVVLDSQETGVRLVHALLACAEAVQQNNLKLADALVKHVGLLASSQAGAMRKVATYFAEGLARRIYRIYPRDDVASSSFSDTLQIHFYESCPYLKFAHFTANQAILEVFATAEKVHVIDLGLNHGLQWPALIQALALRPNGPPDFRLTGIGYSLTDIQEVGWKLGQLASTIGVNFEFKSIALNNLSDLKPEMLDIRPGLESVAVNSVFELHRLLAHPGSIDKFLSTIKSIRPDIMTVVEQEANHNGTVFLDRFTESLHYYSSLFDSLEGPPSQDRVMSELFLGRQILNLVACEGEDRVERHETLNQWRNRFGLGGFKPVSIGSNAYKQASMLLALYAGADGYNVEENEGCLLLGWQTRPLIATSAWRINRVE

SEQ ID NO: 13789 - protein, 523 aa, Arabidopsis thaliana
MKRSHQETSVEEEAPSMVEKLENGCGGGGDDNMDEFLAVLGYKVRSSDMADVAQKLEQLEMVLSNDIASSSNAFNDTVHYNPSDLSGWAQSMLSDLNYYPDLDPNRICDLRPITDDDECCSSNSNSNKRIRLGPWCDSVTSESTRSVVLIEETGVRLVQALVACAEAVQLENLSLADALVKRVGLLAASQAGAMGKVATYFAEALARRIYRIHPSAAAIDPSFEEILQMNFYDSCPYLKFAHFTANQAILEAVTTSRVVHVIDLGLNQGMQWPALMQALALRPGGPPSFRLTGVGNPSNREGIQELGWKLAQLAQAIGVEFKFNGLTTERLSDLEPDMFETRTESETLVVNSVFELHPVLSQPGSIEKLLATVKAVKPGLVTVVEQEANHNGDVFLDRFNEALHYYSSLFDSLEDGVVIPSQDRVMSEVYLGRQILNLVATEGSDRIERHETLAQWRKRMGSAGFDPVNLGSDAFKQASLLLALSGGGDGYRVEENDGSLMLAWQTKPLIAASAWKLAAELRR

SEQ ID NO: 13790 - protein, 601 aa, Glycine max
  unsure (1)..(601): unsure at all Xaa locations
MGFPQSKPEXRPRHGHCSGEPNGKAKMWEEEQQQQQGMDELLAALGYKVRASDMADVAQKLEQLEMVMGCAQEEGISHLASDTVHYDPTDLYSWVQTMLTELNPEPNNNLDXHLLSXSTTTTTSSTAQPXVFNDDSEYDLRAIPGIAAYXSSSSSRQQQQQQPPRRNXKRLTTSTSASSXSPAESADSAASEPTRHVVLVDHQEAGVRLVHTLLACAEAVQQENLKLADALVKHVGILAASQAGAMRKVASYFAQALARRIYGIFPEETLDSSFSDVLHMHFYESCPYLKFAHFTANQAILEAFATAGKVHVIDFGLKQGMQWPALMQALALRPGGPPTFRLTGIGPPQPDNTDALQQVGLKLAQLAQIIGVQFEFRGFVCNSLADLDPNMLEIRPGEAVAVNSVFELHRMLARSGSVDKVLDTVKKINPQIVTIVEQEANHNGPGFLDRFTEALXHYYSSLFDSLEGSSSSSTGLGSPSQDLLMSELYLGRQICNVVAYEGPDRVERHETLTQWRGRLDSAGFDPVHLGSNAFKQASMLLALFAGGDGYRVEENNGCLMLGWHTRPLIATSAWKLPSSSESSGLTQXMXNYRLIGLVPVN

SEQ ID NO: 13791 - protein, 543 aa, Glycine max
  unsure (1)..(543): unsure at all Xaa locations
MKRERQXXLGSNAGTSSCGYSSGKSNLWEEEGGMDELLAVVGYKVRSSDMAEVAQKLERLEEAMGNVQDDLTDLSNDAVHYNPSDISNWLQTMLSNFDPLPSEEPEKDSASSDYDLKAIPGKAIYGGGSDALPNPKXRENRXXSTRAVVVVDLQENGIRLVHSLMACAEAGENNNLALAEALVKQIGFLALSQVGAMRKVATYFAEALARRIYRVFPQQXXSLSDSLQIHFYETCPYLKFAHFTANQAILEAFQGKNRVHVIDFGINQGMQWPALMQALALRNDGPPVFRLTGIGPPAADNSDHLQEVGWKLAQLAERIHVQFEYRGFVANSLADLDASMLDLREDESVAVNSVFEFHKLLARPGAVEKVLSVVRQIRPEILTVVEQEANHNGLSFVDRFTESLHYYSTLFDSLEGSPVNPNDKAMSEVYLGKQICNVVACEGMDRVERHETLNQWRNRFGSTGFSPVHLGSNAYKQASMLLSLFGGGDGYRVEENNGCLMLGWHTRPLIATSVWQLATKSVVAAHXVDSPIPQPAFSFYFLF

SEQ ID NO: 13792 - protein, 554 aa, Glycine max
  unsure (1)..(554): unsure at all Xaa locations
MKREREXXLGSIAGTSSCGYSSGKSNLWEEEGGMDELLAVVGYKVRSSDMAEVAQKLERLEEAMGNVQDDLPEISNDVVHYNPSDISNWLETMLSNFDPLPSEEPEKDSASSDYDLKAIPGKAIYGASDALPNXXKRVKXXDESRRAVVVVDSQENGIRLVHSLMACAEAVENNNLAVAEALVKQIGFLAVSQVGAMRKVAIYFAEALARRIYRVFPLQHSLSDSLQIHFYETCPYLKFAHFTANQVILEAFQGKNRVHVIDFGINQGMQWPALMQALAVRTGGPPVFRLTGIGPPAADNSDHLQEVGWKLAQLAEEINVQFEYRGFVANSLADLDASMLDLREGEAVAVNSVFEFHKLLARPGAVEKVLSVVRQIRPEIVTVVEQEANHNRLSFVDRFTESLHYYSTLFDSLEGSPVNPNDKAMSEVYLGKQICNVVACEGMDRVERHETLNQWRNRFVSTGFSSVHLGSNAYKQASMLLALFAGGDGYRVEENNGCLMLGWHTRPLIATSAWQLAATRXVDSPIPQPAFFFCFNFIIISIHAHRKKKGNLWG

SEQ ID NO: 13793 - protein, 536 aa, Glycine max
  unsure (1)..(536): unsure at all Xaa locations
MKREREXXLGSIAGTSSCGYSSGKSNLWEEEGGMDELLAVVGYKVRSSDMAEVAQKLERLEEAMGNVQDDLPEISNDVVHYNPSDISNWLQTMLSNFDPLPSEEPEKDSASSDYDLKAIPGKAIYGASDALPNXXKRVKXXDESRRAVVVVDSQENGIRLVHSLMACAEAVENNNLAVAEALVKQIGFLAVSQVGAMRKVATYFAEALARRIYRVFPQQXXSLSDSLQIHFYETCPYLKFAHFTANQAILEAFQGKNRVHVIDFGINQGMQWPALMQALALRNDGPPVFRLTGIGPPAADNSDHLQEVGWKLAQLAERIHVQFEYRGFVANSLADLDASMLDLREDESVAVNSVFEFHKLLARPGAVEKVLSVVRQIRPEILTVVEQEANHNGLSFVDRFTESLHYYSTLFDSLEGSPVNPNDKAMSEVYLGKQICNVVACEGMDRVERHETLNQWRNRFVSTGFSSVHLGSNAYKQASMLLALFAGGDGYRVEENNGCLMLGWHTRPLIATSAWQLAATRXVDSPIPQPAFFFLF

SEQ ID NO: 13794 - protein, 588 aa, Glycine max
  unsure (1)..(588): unsure at all Xaa locations
TSLSLETPQPHFPFCSSMPSNGKANMWEEQQQQQQGMDELLAALGYKVRACDMADVAHKLELVXEMVMGCSHVEASFFPPVTPHGXRSPRSFPXXATHLFTELNPEPNNNNNSSLGPFSPYTTTTPSLVPTSIPNMTSEPILLXXSLPLNSXXRGTTKIAAAPDEIETANNINKRLKPSPVESADSASEPTRTVLLVDHQEAGVRLVHTLLACAEAVQQENLKLADALVKHVGILAASQAGAMRKVASYFAQALARRIYGIFPEETLDSSFSDVLHMHFYESCPYLKFAHFTANQAILEAFATAGRVHVIDFGLRQGMQWPALMQALALRPGGPPTFRLTGIGPPQPDNTDALQQVGWKLAQLAQNIGVQFEFRGFVCNSLADLDPKMLEIRPGEAVAVNSVFELHRMLARPGSVDKVLDTVKKIKPKIVTIVEQEANHNGXPGFLDRFTEALHYYSSLFDSLEGSSSSTGSNQDLLMSELYLGRQICNVVANEGADRVERHETLSQWRGRLDSAGFDPVHLGSNAFKQASMLLALFAGGDGYRVEENNGCLMLGWHTRPLIATSAWKLPSPNDLHCKLXINWLLDGW

SEQ ID NO: 13795 - protein, 438 aa, Glycine max
  unsure (1)..(438): unsure at all Xaa locations
RTRGRTRGRTRGRTRGLISDNPNTSVSGGNFGGDAVAVVGGNREANGGFGXVTLPNLALYLPTSQPTMAMATQASLFTPPLSGLKPSDRATAPWKQSSTLSFSTSKPLKKKATYFAEALARRIYRVFPQQHSLSDSLQIHFYETCPYLKFAHFTANQAILEAFQGKNRVHVIDFGINQGXMQWPALMQALALRNDGPPVFRLTGIGPPAADNSDHLQEVGWKLAQLAERIHVQFEYRGFVANSLADLDASMLXXLREDESVAVNSVFEFHKLLARPGAVEKVLSVVRQIRPEILTVVEQEANHNGLSFVDRFTESLHYYSTLFDSLEGSPVNPNDKAMSEVYLGKQICNVVACEGMDRVERHETLNQWRNRFGSTGFSPVHLGSNAYKQASMLLSLFGGGDGYRVEENNGCLMLGWHTRPLIATSVWQLATKSVVAAH

SEQ ID NO: 13796 - protein, 625 aa, Oryza sativa (japonica cultivar-group)
MKREYQEAGGSSGGGSSADMGSCKDKVMAGAAGEEEDVDELLAALGYKVRSSDMADVAQKLEQLEMAMGMGGVSAPGAADDGFVSHLATDTVHYNPSDLSSWVESMLSELNAPLPPIPPAPPAARHASTSSTVTGGGGSGFFELPAAADSSSSTYALRPISLPVVATADPSAADSARDTKRMRTGGGSTSSSSSSSSSLGGGASRGSVVEAAPPATQGAAAANAPAVPVVVVDTQEAGIRLVHALLACAEAVQQENFAAAEALVKQIPTLAASQGGAMRKVAAYFGEALARRVYRFRPADSTLLDAAFADLLHAHFYESCPYLKFAHFTANQAILEAFAGCHRVHVVDFGIKQGMQWPALLQALALRPGGPPSFRLTGVGPPQPDETDALQQVGWKLAQFAHTIRVDFQYRGLVAATLADLEPFMLQPEGEADANEEPEVIAVNSVFELHRLLAQPGALEKVLGTVHAVRPRIVTVVEQEANHNSGSFLDRFTESLHYYSTMFDSLEGGSSGQAELSPPAAGGGGGTDQVMSEVYLGRQICNVVACEGAERTERHETLGQWRNRLGRAGFEPVHLGSNAYKQASTLLALFAGGDGYRVEEKEGCLTLGWHTRPLIATSAWRVAAA

SEQ ID NO: 13797 - protein, 136 aa, Dubautia arborea
MKRSRERKKEAKTTSSVPDSGGMDELLEVLGYKVKSTDMADVAQKLEQLEMVMGEDGILQLSDTVHYNPSDLSGWVQSMLLVLNDNNNNNTAHDSGHILLPGDSSTTMIDFSSEIVVHGKPGSKIHLDDDLRAIAG

SEQ ID NO: 13798 - protein, 625 aa, Oryza sativa; identical to SEQ ID NO: 13796

SEQ ID NO: 13799 - protein, 623 aa, Triticum aestivum
MKREYQDAGGSGGGGGGMGSSEDKMMVSAAAGEGEEVDELLAALGYKVRASDMADVAQKLEQLEMAMGMGGVGAGAAPDDSFATHLATDTVHYNPTDLSSWVESMLSELNAPPPPLPPAPQLNASTSSTVTGSGGYFDLPPSVDSSSSIYALRPIPSPAGATAPADLSADSVRDPKRMRTGGSSTSSSSSSSSSLGGGARSSVVEAAPPVAAAANATPALPVVVVDTQEAGIRLVHALLACAEAVQQENLSAAEALVKQIPLLAASQGGAMRKVAAYFGEALARRVFRFRPQPDSSLLDAAFADLLHAHFYESCPYLKFAHFTANQAILEAFAGCRRVHVVDFGIKQGMQWPALLQALALRPGGPPSFRLTGVGPPQPDETDALQQVGWKLAQFAHTIRVDFQYRGLVAATLADLEPFMLQPEGEEDPNEEPEVIAVNSVFEMHRLLAQPGALEKVLGTVRAVRPRIVTVVEQEANHNSGTFLDRFTESLHYYSTMFDSLEGGSSGGGPSEVSSGAAAAPAAAGTDQVMSEVYLGRQICNVVACEGAERTERHETLGQWRNRLGNAGFETVHLGSNAYKQASTLLALFAGGDGYKVEEKEGCLTLGWHTRPLIATSAWRLAGP

SEQ ID NO: 13800 - protein, 623 aa, Triticum aestivum; identical to SEQ ID NO: 13799

SEQ ID NO: 13801 - protein, 406 aa, Triticum aestivum
ARSLAALLSLLLLPPSSSPTPRPPTLDPNPDSFATHLATDTVHYNPTDLSSWVESMLSELNAPPPPLPPAPQQLNASTSSTVTGGGYFDLPPSVDSSCSTYALRPIPSPAGAVAPADLSADSVVRDPKRMRTGGSSTSSSSSSSSSLGGGARSSVVEAAPPVAAGASAPALPVVVVDTQEAGIRLVHALLACAEAVQQENFSAAEALVKQIPLLAASQGGAMRKVAAYFGEALARRVFRFRPQPDSSLLDAAFADLLHAHFYESCPYLKFAHFTANQAILEAFAGCRRVHVVDFGIKQGMQWPALLQALALRPGGPSSFRLTGVGPPQPDETDALQQVGWKLAQFAHTIRVDFQYRGLVAATLADLEPFMLQPEGEEDPNEEPEVIAVNSVLEMHRLLAQTGALEK

SEQ ID NO: 13802 - protein, 581 aa, Zea mays subsp. mays
MKREYQDAGGSGGDMGSSKDKMMAAAAGAGEQEEEDVDELLAALGYKVRSSDMADVAQKLEQLEMAMGMGGVGGAGATADDGFVSHLATDTVHYNPSDLSSWVESMLSELNAPPAPLPPATPAPRLASTSSTVTSGAAAGAGYFDLPPAVDSSSSTYALKPIPSPVAAPSADPSTDSAREPKRMRTGGGSTSSSSSSSSSMDGGRTRSSVVEAAPPATQASAAANGPAVPVVVVDTQEAGIRLVHALLACAEAVQQENFSAAEALVKQIPMLASSQGGAMRKVAAYFGEALARRVYRFRPPPDSSLLDAAFADLLHAHFYESCPYLKFAHFTANQAILEAFAGCRRVHVVDFGIKQGMQWPALLQALALRPGGPPSFRLTGVGPPQPDETDALQQVGWKLAQFAHTIRVDFQYRGLVAATLADLEPFMLQPEGDDTDDEPEVIAVNSVFELHRLLAQPGALEKVLGTVRAVRPRIVTVVEQEANHNSGTFLDRFTESLHYYSTMFDSLEGAGAGSGQSTDASPAAAGGTDQVMSEVYLGRQICNVVACEGAERTERHETLGQWRSRLGGSGFAPVHLGSNA

SEQ ID NO: 13803 - protein, 581 aa, Zea mays subsp. mays
MKREYQDAGGSGGDMGSSKDKMMAAAAGAGEQEEEDVDELLAALGYKVRSSDMADVAQKLEQLEMAMGMGGVGGAGATADDGFVSHLATDTVHYNPSDLSSWVESMLSELNAPPAPLPPATPAPRLASTSSTVTSGAAAGAGYFDLPPAVDSSSSTYALKPIPSPVAAPSADPSTDSAREPKRMRTGGGSTSSSSSSSSSMDGGRTRSSVVEAAPPATQASAAANGPAVPVVVVDTQEAGIRLVHALLACAEAVQQENFSAAEALVKQIPMLASSQGGAMRKVAAYFGEALARRVYRFRPPPDRSLLDAAFADLLHAHFYESCPYLKFAHFTANQAILEAFAGCRRVHVVDFGIKQGMQWPALLQALALRPGGPPSFRLTGVGPPQPDETDALQQVGWKLAQFAHTIRVDFQYRGLVAATLADLEPFMLQPEGDDTDDEPEVIAVNSVFELHRLLAQPGALEKVLGTVRAVRPRIVTVVEQEANHNSGTFLDRFTESLHYYSTMFDSLEGAGAGSGQSTDASPAAAGGTDQVMSEVYLGRQICNVVACEGAERTERHETLGQWRSRLGGSGFAPVHLGSNA

SEQ ID NO: 13804 - protein, 581 aa, Zea mays subsp. mays
MKREYQDAGGSGGDMGSSKDKMMAAAAGAGEQEEEDVDELLAALGYKVRSSDMADVAQKLEQLEMAMGMGGVGGAGATADDGFVSHLATDTVHYNPSDLSSWVESMLSELNAPPAPLPPATPAPRLASTSSTVTSGAAAGAGYFDLPPAVDSSSSTYALKPIPSPVAAPSADPSTDSAREPKRMRTGGGSTSSSSSSSSSMDGGRTRSSVVEAAPPATQASAAANGPAVPVVVVDTQEAGIRLVHALLACAEAVQQENFSAAEALVKQIPMLASSQGGAMRKVAAYFGEALARRVYRFRPPPDSSLLDAAFADLLHAHFYESCPYLKFAHFTANQAILEAFAGCRRVHVVDFGIKQGMQWPALLQALALRPGGPPSFRLTGVGPPQPDETDALQQVGWKLAQFAHTIRVDFQYRGLVAATLADLEPFMLQPEGDDTDDEPEVIAVNSVFELHRLLAQPGALEKVLGTVRAVRPRIVTVVEQEANHDSGTFLDRFTESLHYYSTMFDSLEGAGAGSGQSTDASPAAAGGTDQVMSEVYLGRQICNVVACEGAERTERHETLGQWRSRLGGSGFAPVHLGSNA

SEQ ID NO: 13805 - protein, 581 aa, Zea mays subsp. mays
MKREYQDAGGSGGDMGSSKDKMMAAAAGAGEQEEEDVDELLAALGYKVRSSDMADVAQKLEQLEMAMGMGGVGGAGATADDGFVSHLATDTVHYNPSDLSSWVESMLSELNAPPAPLPPATPAPRLASTSSTVTSGAAAGAGYFDLPPAVDSSSSTYALKPIPSPVAAPSADPSTDSAREPKRMRTGGGSTSSSSSSSSSMDGGRTRSSVVEAAPPATQASAAANGPAVPVVVVDTQEAGIRLVHALLACAEAVQQENFSAAEALVKQIPMLASSQGGAMRKVAAYFGEALARRVYRFRPPPDSSLLDAAFADLLHAHFYESCPYLKFAHFTANQAILEAFAGCRRVHVVDFGIKQGMQWPALLQALALRPGGPPSFRLTGVGPPQPDETDALQQVGWKLAQFAHTIRVDFQYRGLVAATLADLEPFMLQPEGDDTDDEPEVIAVNSVFELHRLLAQPGALEKVLGTVRAVRPRIVTVVEQEANHNSGTFLDRFTESLHHYSTMFDSLEGAGAGSGQSTDASPAAAGGTDQVMSEVYLGRQICNVVACEGAERTERHETLGQWRSRLGGSGFAPVHLGSNA

SEQ ID NO: 13806 - protein, 581 aa, Zea mays subsp. mays
MKREYQDAGGSGGDMGSSKDKMMAAAAGAGEQEEEDVDELLAALGYKVRSSDMADVAQKLEQLEMAMGMGGVGGAGATADDGFVSHLATDTVHYNPSDLSSWVESMLSELNAPPAPLPPATPAPRLASTSSTVTSGAAAGAGYFDLPPAVDSSSSTYALKPIPSPVAAPSADPSTDSAREPKRMRTGGGSTSSSSSSSSSMDGGRTRSSVVEAAPPATQASAAANGPAVPVVVVDTQEAGIRLVHALLACAEAVHQENFSAAEALVKQIPMLASSQGGAMRKVAAYFGEALARRVYRFRPPPDSSLLDAAFADLLHAHFYESCPYLKFAHFTANQAILEAFAGCRRVHVVDFGIKQGMQWPALLQALALRPGGPPSFRLTGVGPPQPDETDALQQVGWKLAQFAHTIRVDFQYRGLVAATLADLEPFMLQPEGDDTDDEPEVIAVNSVFELHRLLAQPGALEKVLGTVRAVRPRIVTVVEQEANHNSGTFLDRFTESLHYYSTMFDSLEGAGAGSGQSTDASPAAAGGTDQVMSEVYLGRQICNVVACEGAERTERHETLGQWRSRLGGSGFAPVHLGSNA

SEQ ID NO: 13807 - protein, 581 aa, Zea mays subsp. mays
MKREYQDAGGSGGDMGSSKDKMMAAAAGAGEQEEEDVDELLAALGYKVRSSDMADVAQKLEQLEMAMGMGGVGGAGATADDGFVSHLATDTVHYNPSDLSSWVESMLSELNAPPAPLPPATPAPRLASTSSTVTSGAAAGAGYFDLPPAVDSSSSTYALKPIPSPVAAPSADPSTDSAREPKRMRTGGGSTSSSSSSSSSMDGGRTRSSVVEAAPPATQASAAANGPAVPVVVVDTQEAGIRLVHALLACAEAVQQENFSAAEALVKQIPMLASSQGGAMRKVAAYFGEALARRVYRFRPPPDSSLLDAAFADLLHAHFYESCPYLKFAHFTANQAILEAFAGCRRVHVVDFGIKQGMQWPALLQALALRPGGPPSFRLTGVGPPQPDETDALQQVGWKLAQFAHTIRVDFQYRGLVAATLADLEPFMLQPEGDDTDDEPEVIAVNSVFELHRLLAQPGALEKVLGTVRAVRPRTVTVVEQEANHNSGTFLDRFTESLHYYSTMFDSLEGAGAGSGQSTDASPAAAGGTDQVMSEVYLGRQICNVVACEGAERTERHETLGQWRSRLGGSGFAPVHLGSNA

SEQ ID NO: 13808 - protein, 581 aa, Zea mays subsp. mays
MKREYQDAGGSGGDMGSSKDKMMAAAAGAGEQEEEDVDELLAALGYKVRSSDMADVAQKLEQLEMAMGMGGVGGAGATADDGFVSHLATDTVHYNPSDLSSWVESMLSELNAPPAPLPPATPAPRLASTSSTVTSGAAAGAGYFDLPPAVDSSSSTYALKPIPSPVAAPSADPSTDSAREPKRMRTGGGSTSSSSSSSSSMDGGRTRSSVVEAAPPATQASAAANGPAVPVVVVDTQEAGIRLVHALLACAEAVQQENFSAAEALVKQIPMLASSQGGAMRKVAAYFGEALARRVYRFRPPPDSSLLDAAFADLLHAHFYESCPYLKFAHFTANQAILEAFAGCRRVHVVDFGIKQGMQWPALLQALALRPGGPPSFRLTGVGPPQPDEIDALQQVGWKLAQFAHTIRVDFQYRGLVAATLADLEPFMLQPEGDDTDDEPEVIAVNSVFELHRLLAQPGALEKVLGTVRAVRPRIVTVVEQEANHNSGTFLDRFTESLHYYSTMFDSLEGAGAGSGQSTDASPAAAGGTDQVMSEVYLGRQICNVVACEGAERTERHETLGQWRSRLGGSGFAPVHLGSNA

SEQ ID NO: 13809 - protein, 581 aa, Zea mays subsp. mays
MKREYQDAGGSGGDMGSSKDKMMAAAAGAGEQEEEDVDELLAALGYKVRSSDMADVAQKLEQLEMAMGMGGVGGAGATADDGFVSHLATDTVHYNPSDLSSWVESMLSELNAPPAPLPPATPAPRLASTSSTVTSGAAAGAGYFDLPPAVDSSSSTYALKPIPSPVAAPSADPSTDSAREPKRMRTGGGSTSSSSSSSSSMDGGRTRSSVVEAAPPATQASAAANGPAVPVVVVDTQEAGIRLVHALLACAEAVQQENFSAAEALVKQIPMLASSQGGAMRKVAAYFGEALARRVYRFRPPPDSSLLDAAFADLLHAHFYESCPYLKFAHFTANQAILEAFAGCRRVHVVDFGIKQGMQWPALLQALALRPGGPPSFRLTGVGPPQPDETDALQQVGWKLAQFAHTIRVDFQYRGLVAATLADLEPFMLQPEGDDTDDEPEVIAVNSVFELHRLLAQPGALEKVLGTVRAVRPRIVTVVEQEANHNSGTFLDRFTESLHYYSTMFDSLEGAGAGSGQSTDASPAAAGGTDQVKSEVYLGRQICNVVACEGAERTERHETLGQWRSRLGGSGFAPVHLGSNA

SEQ ID NO: 13810 - protein, 581 aa, Zea mays subsp. mays
MKREYQDAGGSGGDMGSSKDKMMAAAAGAGEQEEEDVDELLAALGYKVRSSDMADVAQKLEQLEMAMGMGGVGGAGATADDGFVSHLATDTVHYNPSDLSSWVESMLSELNAPPAPLPPATPAPRLASTSSTVTSGAAAGAGYFDLPPAVDSSSSTYALKPIPSPVAAPSADPSTDSAREPKRMRTGGGSTSSSSSSSSSMDGGRTRSSVVEAAPPATQASAAANGPAVPVVVVDTQEAGIRLVHALLACAEAVQQENFSAAEALVKQIPMLASSQGGAMRKVAAYFGEALARRVYRFRPPPDSSLLDAAFADLLHAHFYESCPYLKFAHFTANQAILEAFAGCRRVHVVDFGIKQGMQWPALLQALALRPGGPPSFRLTGVGPPQPDETDALQQVGWKLAQFAHTIRVDFQYRGLVAATLADLEPFMLQPEGDDTDDEPEVIAVNSVFELHRLLAQPGALEKVLGTVRAVRPRIVTVVEQEANHNSGTFLDRFTESLHYYSTMSDSLEGAGAGSGQSTDASPAAAGGTDQVMSEVYLGRQICNVVACEGAERTERHETLGQWRSRLGGSGFAPVHLGSNA

SEQ ID NO: 13811 - protein, 581 aa, Zea mays subsp. mays
MKREYQDAGGSGGDMGSSKDKMMAAAAVAGEQEEEDVDELLAALGYKVRSSDMADVAQKLEQLEMAMGMGGVGGAGATADDGFVSHLATDTVHYNPSDLSSWVESMLSELNAPPAPLPPATPAPRLASTSSTVTSGAAAGAGYFDLPPAVDSSSSTYALKPIPSPVAAPSADPSTDSAREPKRMRTGGGSTSSSSSSSSSMDGGRTRSSVVEAAPPATQASAAANGPAVPVVVVDTQEAGIRLVHALLACAEAVQQENFSAAEALVKQIPMLASSQGGAMRKVAAYFGEALARRVYRFRPPPDSSLLDAAFADLLHAHFYESCPYLKFAHFTANQAILEAFAGCRRVHVVDFGIKQGMQWPALLQALALRPGGPPSFRLTGVGPPQPDETDALQQVGWKLAQFAHTIRVDFQYRGLVAATLADLEPFMLQPEGDDTDDEPEVIAVNSVFELHRLLAQPGALEKVLGTVRAVRPRIVTVVEQEANHNSGTFLDRFTESLHYYSTMFDSLEGAGAGSGQSTDASPAAAGGTDQVMSEVYLGRQICNVVACEGAERTERHETLGQWRSRLGGSGFAPVHLGSNA

SEQ ID NO: 13812 - protein, 582 aa, Zea mays subsp. mays
MKREYQDAGGSGGGDMGSSKDKMMAAAAGAGEQEEEDVDELLAALGYKVRSSDMADVAQKLEQLEMAMGMGGVGGAGATADDGFVSHLATDTVHYNPSDLSSWVESMLSELNAPPAPLPPATPAPRLASTSSTVTSGAAAGAGYFDLPPAVDSSSSTYALKPIPSPVAAPSADPSTDSAREPKRMRTGGGSTSSSSSSSSSMDGGRTRSSVVEAAPPATQASAAANGPAVPVVVVDTQEAGIRLVHALLACAEAVQQENFSAAEALVKQIPMLASSQGGAMRKVAAYFGEALARRVYRFRPPPDSSLLDAAFADLLHAHFYESCPYLKFAHFTANQAILEAFAGCRRVHVVDFGIKQGMQWPALLQALALRPGGPPSFRLTGVGPPQPDETDALQQVGWKLAQFAHTIRVDFQYRGLVAATLADLEPFMLQPEGDDTDDEPEVIAVNSVFELHRLLAQPGALEKVLGTVRAVRPRIVTVVEQEANHNSGTFLDRFTESLHYYSTMFDSLEGAGAGSGQSTDASPAAAGGTDQVMSEVYLGRQICNVVACEGAERTERHETLGQWRSRLGGSGFAPVHLGSNA

SEQ ID NO: 13813 - protein, 581 aa, Zea mays subsp. mays
MKREYQDAGGSGGDMGSSKDKMMAAAAVAGEQEEEDVDELLAALGYKVRSSDMADVAQKLEQLEMAMGMGGVGGAGATADDGFVSHLATDTVHYNPSDLSSWVESMLSELNAPPAPLPPATPAPRLASTSSTVTSGAAAGAGYFDLPPAVDSSSSTYALKPIPSPVAAPSADPSTDSAREPKRMRTGGGSTSSSSSSSSSMDGGRTRSSVVEAAPPATQASAAANGPAVPVVVVDTQEAGIRLVHALLACAEAVQQENFSAAEALVKQIPMLASSQGGAMRKVAAYFGEALARRVYRFRPPPDSSLLDAAFADLLHAHFYESCPYLKFAHFTANQAILEAFAGCRRVHVVDFGIKQGMQWPALLQALALRPGGPPSFRLTGVGPPQPDETDALQQVGWKLAQFAHTIRVDFQYRGLVAATLADLEPFMLQPEGDDTDDEPEVIAVNSVFELHRLLAQPGALEKVLGTVRAVRPRIVTVVKQEANHNSGTFLDRFTESLHYYSTMFDSLEGAGAGSGQSTDASPAAAGGTDQVMSEVYLGRQICNVVACEGAERTERHETLGQWRSRLGGSGFAPVHLGSNA

SEQ ID NO: 13814 - protein, 581 aa, Zea mays subsp. mays
MKREYQDAGGSGGDMGSSKDKMMAAAAVAGEQEEEDVDELLAALGYKVRSSDMADVAQKLEQLEMAMGMGGVGGAGATADDGFVSHLATDTVHYNPSDLSSWVESMLSELNAPPAPLPPATPAPRLASTSSTVTSGAAAGAGYFDLPPAVDSSSSTYALKPIPSPVAAPSADPSTDSAREPKRMRTGGGSTSSSSSSSSSMDGGRTRSSVVEAAPPATQASAAANGPAVPVVVVDTQEAGIRLVHALLACAEAVQQENFSAAEALVKQIPMLASSQGGAMRKVAAYFGEALARRVYRFRPPPDSSLLDAAFADLLHAHFYESCPYLKFAHFTANQAILEAFAGCRRVHVVDFGIKQGMQWPALLQALALRPGGPPSFRLTGVGPPQPDETDALQQVGWKLAQFAHTIRVDFQYRGLVAATLADLEPFMLQPEGDDTDDEPEVIAVNSVFELHRLLAQPGALEKVLGTVRAVRPRIVTVVEQEASHNSGTFLDRFTESLHYYSTMFDSLEGAGAGSGQSTDASPAAAGGTDQVMSEVYLGRQICNVVACEGAERTERHETLGQWRSRLGGSGFAPVHLGSNA

SEQ ID NO: 13815 - protein, 166 aa, Brassica rapa subsp. pekinensis
HFTANQAILEAFEGKKRVHVIDFSMNQGLQWPALMQALALREGGPPVFRLTGIGPPAADNSDHLHEVGCKLAQLAEAIHVEFEYRGFVANSLADLDASMLELRPSEIEAVAVNSVFELHKLLGRTGGIEKVLGVVKQIKPVIFTVVEQESSHNGPVFLDRFTESLH

SEQ ID NO: 13816 - protein, 593 aa, Arabidopsis thaliana
MVEQTVVREHIKARVMSLVRSAEPSSYRNPKLYTLNENGNNNGVSSAQIFDPDRSKNPCLTDDSYPSQSYEKYFLDSPTDEFVQHPIGSGASVSSFGSLDSFPYQSRPVLGCSMEFQLPLDSTSTSSTRLLGDYQAVSYSPSMDVVEEFDDEQMRSKIQELERALLGDEDDKMVGIDNLMEIDSEWSYQNESEQHQDSPKESSSADSNSHVSSKEVVSQATPKQILISCARALSEGKLEEALSMVNELRQIVSIQGDPSQRIAAYMVEGLAARMAASGKFIYRALKCKEPPSDERLAAMQVLFEVCPCFKFGFLAANGAILEAIKGEEEVHIIDFDINQGNQYMTLIRSIAELPGKRPRLRLTGIDDPESVQRSIGGLRIIGLRLEQLAEDNGVSFKFKAMPSKTSIVSPSTLGCKPGETLIVNFAFQLHHMPDESVTTVNQRDELLHMVKSLNPKLVTVVEQDVNTNTSPFFPRFIEAYEYYSAVFESLDMTLPRESQERMNVERQCLARDIVNIVACEGEERIERYEAAGKWRARMMMAGFNPKPMSAKVTNNIQNLIKQQYCNKYKLKEEMGELHFCWEEKSLIVASAWR

SEQ ID NO: 13817 - protein, 352 aa, Arabidopsis thaliana
LSMVNELRQIVSIQGDPSQRIAAYMVEGLAARMAASGKFIYRALKCKEPPSDERLAAMQVLFEVCPCFKFGFLAANGAILEAIKGEEEVHIIDFDINQGNQYMTLIRSIAELPGKRPRLRLTGIDDPESVQRSIGGLRIIGLRLEQLAEDNGVSFKFKAMPSKTSIVSPSTLGCKPGETLIVNFAFQLHHMPDESVTTVNQRDELLHMVKSLNPKLVTVVEQDVNTNTSPFFPRFIEAYEYYSAVFESLDMTLPRESQERMNVERQCLARDIVNIVACEGEERIERYEAAGKWRARMMMAGFNPKPMSAKVTNNIQNLIKQQYCNKYKLKEEMGELHFCWEEKSLIVASAWR

SEQ ID NO: 13818 - protein, 616 aa, Glycine max
  unsure (1)..(616): unsure at all Xaa locations
KIQQDYITERLCLVYYFSSQKFTXVASNRRIMSLVRSADLAPTSYENAKLFSLKGTDVRPGLSSQIFGPDKHRSMYMTDAYSGEGYEKYFHDSQTEELIEPSSSSISGSSIHPDVASSYQLRASSGASMVANNPSDSSFMSTRHHDAYQSNSGSDLMDLDSRDDEGLMRLRLKALERALLDDEEEDIFEAAQSMEIDPDIAEWADSIHNMLLHGSPKESSSSDSNTSSISSTKEISQTSQTPKKLLYECAIALSEGNEVEGSSMINNLRQMVSIQGEPSQRIAAYMVEGLAARLAESGKSIYKALRCKEPPTSDRLAAMQILFEVCPCFKFGFIAANNAITEAVKDDMKIHIIDFDINQGSQYINLIQTLASRSSKPPHVRLTGVDDPESVQRSVGGLRNIGQRLEKLAEALGLPFEFRAVASRTSIVTPSMLNCSPDEALVVNFAFQLHHMPDESVSTVNERDQLLRLVKSLNPKLVTVVEQDVNTNTTPFLPRFVEAYNYYSAVFESLDATLPRESQDRMNVERQCLARDIVNVVACEGEDRIERYEVAGKWRARMTMAGFTSSPMSTNVTDEIRKLIKTVYCDRYKIKEEMGALHFGWEDKNLIVASAWKLPR

SEQ ID NO: 13819 - protein, 606 aa, Glycine max
KVQQDFISEHFKRRTMSLVISTELADTSYGNAKLYTLKGTDVTPDLSSHNFAPDKHRNMYMTKSYSCESYEKYFHDSPTEELIEPSSSSISGNSVHPDGASSYLLRASSGASVIVNNPFDTSIWSTRHRDAYQSNSVSDFVENGSPDGLDFDGEMRLKLQELERALLSDEEEEEQGIFETVQSMEIDPDMVEWANPLQDMLLHDSPKESSSSDSSNLSSISSTTKDTSQNSPQTPKQLLYDCARILSEGNEQEATSMINKLRQMVSIQGDPSQRIAAYMVEGLAARVATSGKCIYQALRCKEPPSNDRLAAMQILFEVCPCFKFGYIAANGAIAEAVRDEKKVHIIDFDISQGTQYITLIQTLASMPGRPPHVRLTGVDDPESVQRSIGGINIIGQRLEKLAEELGLPFEFRAVASGTSNVTQSMLDCRPGEALVVNFAFQLHHMRDETVSTVNERDQLLRMVKSLNPKLVTVVEQDMNTNTSPFLPRFVEAYNYYSAVFNTLDATLPRESQDRMNVERQCLAKDIVNIVACEGEERIERYEVAGKWRARLSMAGFTPSPMSTNVREAIRKLIIKQYCDKFKIKEEMGGLHFGWEDKNLIVASAWK

SEQ ID NO: 13820 - protein, 623 aa, Glycine max
  unsure (1)..(623): unsure at all Xaa locations
KVQQDFISEHLFYYFSRYILKVCLSXVNKRRTMSLVISAELADTSYGNAKLYTLKGTDVTPDLSSHNFAPDKHRNMYMTKSYSCESYEKYFHDSPTEELIEPSSSSISGNSVHPDGASSYLLRASSGASVIVNNPFDTSIWSTRHRDAYQSNSVSDFVENGSPDGLDFDGEMRLKLQELERALLSDEEEEEQGIFETVQSMEIDPDMVEWANPLQDMLLHDSPKESSSSDSSNLSSISSTTKDTSQNSPQTPKQLLYDCARILSEGNEQEATSMINKLRQMVSIQGDPSQRIAAYMVEGLAARVATSGKCIYQALRCKEPPSNDRLAAMQILFEVCPCFKFGYIAANGAIAEAVRDEKKVHIIDFDISQGTQYITLIQTLASMPGRPPHVRLTGVDDPESVQRSIGGINIIGQRLDSSRSSRFGSSEFRAVASGTSNVTQSMLDCRPGEALVVNFAFQLHHMRDETVSTVNERDQLLRMVKSLNPKLVTVVEQDMNTNTSPFLPRFVEAYNYYSAVFNTLDATLPRESQDRMNVERQCLAKDIVNIVACEGEERIERYEVAGKWRARLSMAGFTPSPMSTNVREAIRKLIIKQYCDKFKIKEEMGGLHFGWEDKNLIVASAWK

SEQ ID NO: 13821 - protein, 553 aa, Oryza sativa (japonica cultivar-group)
MSFIRRADPSTTYADNLYIHKFGTPNSNFAARRYASDTQLFRYGPEPYNPENSFYNQQASPMPYMVTADGHSPSSADNSCSDVAKDSPLVSNVSQQNSQSISDNQSSELEVEFDEDDIRMKLQELEHALLDDSDDILYEISQAGSINDEWADPMKNVILPNSPKESESSISCAGSNNGEPRTPKQLLFDCAMALSDYNVDEAQAIITDLRQMVSIQGDPSQRIAAYLVEGLAARIVASGKGIYKALSCKEPPTLYQLSAMQILFEICPCFRFGFMAANYAILEACKGEDRVHIIDFDINQGSQYITLIQFLKNNANKPRHLRITGVDDPETVQRTVGGLKVIGQRLEKLAEDCGISFEFRAVGANIGDVTPAMLDCCPGEALVVNFAFQLHHLPDESVSIMNERDQLLRMVKGLQPKLVTLVEQDANTNTAPFQTRFREVYDYYAALFDSLDATLPRESPDRMNVERQCLAREIVNILACEGPDRVERYEVAGKWRARMTMAGFTPCPFSSNVISGIRSLLKSYCDRYKFEEDHGGLHFGWGEKTLIVSSAWQ

SEQ ID NO: 13822 - protein, 477 aa, Oryza sativa
  unsure (1)..(477): unsure at all Xaa locations
MSFIRRADPSTTYADNLYQNSQSISDNQSSELEVEFDEDDIRMKLQELEHALLDDSDDILYEISQAGSINDEWADPMKNVILPNSPKESESSISCAGSNNGEXXRTPKQLLFDCAMALSDYNVDEAQAXITDLRQMXXNPGDPSQRIAAYLVEGLAARIVASGKGIYKALSCKEPPTLYQLSAMQILFEICPCFRFGFMAANYAILEACKGEDRVHIIDFDINQGSQYITLIQFLKNNANKPRHLRITGVDDPETVQRTVGGLKVIGQRLEKLAEDCGISFEFRAVGANIGDVTPAMLDCRPGEALVVNFAFQLHHLPDESVSIMNERDQLLRMVKGLQPKLVTLVEQDANTNTAPFQTRFREVYDYYAALFDSLDATLPRESPDRMNVERQCLAREIVNILACEGPDRVERYEVAGKWRARMTMAGFTPCPFSSNVISGIRSLLKSYCDRYKFEEDHGGLHFGWGEKTLIVSSAWQ

SEQ ID NO: 13823 - protein, 525 aa, Triticum aestivum
  unsure (1)..(525): unsure at all Xaa locations
MSFVGRVDPSTTYADNIYVHKFGAPNSNFAARRFGSDTQLFRYGPEPFNSEDYGHMGFPEAPSAAFQNSFYNQQASLTPCSDAEKDSPVCSNISQQLSAKITNSRRTMWGIASSGERDRSXRRLRDALLDDGDDRVALALLAFSISDERDCNMSENFGAISAKSYQILGGCAAGYCGLADRPGEPCCAAAAAGAVVVVGDALATCPLRPLLVSIHGDPSHRIAAYLEEGLAARIVASGTGIYKALTCKDPPTLYQLSAMQILFEICPCYRFGFMAANYAILEACKGEXKPRHLRITGVDDHDTVHTTVGGLKVIGQRLEKLAEDCGISFEFRAVGADIGDVTPAMLDCRPGEALVVNFAFQLHHLPDESVSIMNERDQLLRMVKGLQPKLVTLVEQDANTNTAPFQTRFREVYDYYSALFDSLDATLPRESPDRMNVERQCLAREIVNILACEGPDRVERYEVAGKWRARMTMAGFAPCPFSSNVVGGIRSLLSSYCDRDECEEDHGGLHFGWGEKTLIVASAWQ

SEQ ID NO: 13824 - protein, 578 aa, Zea mays subsp. mays
MKREYQDAGGSGGDMGSSKDKMMAAAAGAGEQEEEDVDELLAALGYKVRSSDMADVAQKLEQLEMAMGMGGVGGAGATADDGFVSHLATDTVHYNPSDLSSWVESMLSELNAPPAPLPPATPAPRLASTSSTVTSGAAAGAGYFDLPPAVDSSSSTYALKPIPSPVAAPSADPSTDSAREPKRMRTGGGSTSSSSSSSSSMDGGRTRSSVVEAAPPATQASAAANGPAVPVVVDTQEAGIRLVHALLACAEAVQQENFSAAEALVKQIPMLASSQGGAMRKVAAYFGEALARRVYRFRPPPDSSLLDAAFADLLHAHFYESCPYLKFAHFTANQAILEAFAGCRRVHVVDFGIKQGMQWPALLQALALRPGGPPSFRLTGVGPPQPDETDALQQVGWKLAQFAHTIRVDFQYRGLVAATLADLEPFMLQPEGDDTDDEPEVIAVNSVFELHRLLAQPGALEKVLGTVRAVRPRIVTVVEQEANHNSGTFLDRFTESLHYYSTMFDSLEGAGSGQSADASPAAAGGTDQVMSEVYLGRQICNVVACEGAERTERHETLGQWRSRLGGSGFAPVHLGSNA

SEQ ID NO: 13825 - protein, 579 aa, Zea mays subsp. mays
MKREYQDAGGSGGDMGSSKDKMMAAAAGAGEQEEEDVDELLAALGYKVRSSDMADVAQKLEQLEMAMGMGGVGGAGATADDGFVSHLATDTVHYNPSDLSSWVESMLSELNAPPAPLPPATPAPRLASTSSTVTSGAAAGAGYFDLPPAVDSSSSTYALKPIPSPVAAPSADPSTDSAREPKRMRTGGGSTSSSSSSSSSMDGGRTRSSVVEAAPPATQASAAANGPAVPVVVVDTQEAGIRLVHALLACAEAVQQENFSAAEALVKQIPMLASSQGGAMRKVAAYFGEALARRVYRFRPPPDSSLLDAAFADLLHAHFYESCPYLKFAHFTANQAILEAFAGCRRVHVVDFGIKQGMQWPALLQALALRPGGPPSFRLTGVGPPQPDETDALQQVGWKLAQFAHTIRVDFQYRGLVAATLADLEPFMLQPEGDDTDDEPEVIAVNSVFELHRLLAQPGALEKVLGTVRAVRPRIVTVVEQEANHNSGTFLDRFTESLHYYSTMFDSLEGAGSGQSADASPAAAGGTDQVMSEVYLGRQICNVVACEGAERTERHETLGQWRSRLGGSGFAPVHLGSNA

SEQ ID NO: 13826 - protein, 579 aa, Zea mays subsp. mays
MKREYQDAGGSDGDMGSSKDKMMAAAAGAGEQEEEDVDELLAALGYKVRSSDMADVAQKLEQLEMAMGMGGVGGAGATADDGFVSHLATDTVHYNPSDLSSWVESMLSELNAPPAPLPPATPAPRLASTSSTVTSGAAAGAGYFDLPPAVDSSSSTYALKPIPSPVAAPSADPSTDSAREPKRMRTGGGSTSSSSSSSSSMDGGRTRSSVVEAAPPATQASAAANGPAVPVVVVDTQEAGIRLVHALLACAEAVQQENFSAAEALVKQIPMLASSQGGAMRKVAAYFGEALARRVYRFRPPPDSSLLDAAFADLLHAHFYESCPYLKFAHFTANQAILEAFAGCRRVHVVDFGIKQGMQWPALLQALALRPGGPPSFRLTGVGPPQPDETDALQQVGWKLAQFAHTIRVDFQCRGLVAATLADLEPFMLQPEGDDTDDEPEVIAVNSVFELHRLLAQPGALEKVLGTVRAVRPRIVTVVEQEANHNSGTFLDRFTESLHYYSTMFDSLEGAGSGQSADASPAAAGGTDQVMSEVYLGRQICNVVACEGAERTERHETLGQWRSRLGGSGFAPVHLGSNA

SEQ ID NO: 13827 - protein, 266 aa, Zea mays subsp. mays
PSADPSTDSAREPKRMRTGGGSTSSSSSSSSSMDGGRTRSSVVEAAPPATQASAAANGPAVPVVVVDTQEAGIRLVHALLACAEAVQQENFSAAEALVKQIPMLASSQGGAMRKVAAYFGEALARRVYRFRPPPDSSLLDAAFADLLHAHFYESCPYLKFAHFTANQAILEAFAGCRRVHVVDFGIKQGMQWPALLQALALRPGGPPSFRLTGVGPPQPDETDALQQVGWKLAQFAHTIRVDFQYRGLVAATLADLEPFMLQPEGD

SEQ ID NO: 13828 - protein, 244 aa, Oryza sativa (indica cultivar-group)
MQKALTTLNSEETIYASYCTLTNSFFASQVRAITYSKASLGLDQLAAIGSLYQFIRGGGEGKEAASQEEEQTPKLRSVIAHLVSRKRRRDRINEKLKALQELLPNCTKTDKVSMLDEAIDYLKSLQLQLQMLVMGKGMAPVVPPELQQYMHYITADPSQIPPIRPSEPRPFQITHATQQRQSNVESDFLSQMQNLHPSEPPQNFLRPPKLQLYTPEQQRRGLASSSGHNSGWITERNSSYNFLE

SEQ ID NO: 13829 - protein, 895 aa, Oryza sativa (japonica cultivar-group)
MRTATNCSSAYTCPAPEKCQSLVEVCGTCVTRGGAALFIIEWKQGLAVVLLLLPCCECETVSVVLEPSHHRSASHTARQSCCHARTWSTWAGSPPSKSCFGSSNHRRFCLSRSSLHLHAPQTRTNQTNPRGTAVTRHTVLAIVSLMSCHASALRSALSRRMPELDLAGEYHQVHTSAAAAAAAASAMPTAGHGMEEYPVVFIMMHAAIHRSVCERKRELTSRCPAGRGGEHGFAFGWSSRLCTRSTAANSSFLDFFTLSPRTAQMSDGNDFAELLWENGQAVVHGRKKHPQPAFPPFGFFGGTGGGGGGSSSRAQERQPGGIDAFAKVGGGFGALGMAPAVHDFASGFGATTQDNGDDDTVPWIHYPIIDDEDAAAPAALAAADYGSDFFSELQAAAAAAAAAAPPTDLASLPASNHNGATNNRNAPVATTTTREPSKESHGGLSVPTTRAEPQPQPQLAAAKLPRSSGSGGGEGVMNFSLFSRPAVLARATLESAQRTQGTDNKASNVTASNRVESTVVQTASGPRSAPAFADQRAAAWPPQPKEMPFASTAAAPMAPAVNLHHEMGRDRAGRTMPVHKTEARKAPEATVATSSVCSGNGAGSDELWRQQKRKCQAQAECSASQDDDLDDEPGVLRKSGTRSTKRSRTAEVHNLSERRRRDRINEKMRALQELIPNCNKACYVLQIDKASMLDEAIEYLKTLQLQVQMMSMGTGLCIPPMLLPTAMQHLQIPPMAHFPHLGMGLGYGMGVFDMSNTGALQMPPMPGAHFPCPMIPASSVPPFASLAGLPVRPSGVPQVSGAMANMVQDQQQGIANQQQQCLNKEAIQGANPGDSQMQIIMQRFLVQIMMNYYDTVVYAYKFVSLVRSQDVIFKSVSNYVCPDHLQYGEIVDSDV

SEQ ID NO: 13830 - protein, 417 aa, Oryza sativa (japonica cultivar-group)
MDAGATARSSSSSAMMMNQKKPLSDGELVELLWQDGGVVAHAQTRHRSSDVLARSGVTGEEETASAWFADGGGGGGGDDDALGLGMGRDIYSQLWHSFANVDGHAAGALALATPTPTPRAAARSDDVSSRLDEADLSICGSNAVVAPALPADDDDDIDAAAPREEEEEEEEGPGAARAAGASSSGGSGSGSGSYPLFKRGREELVDSLSEVADETRPSKRPAAKRRTRAAEVHNLSERRRRDRINEKLRALQELVPHCNKTDKASILDEAIEYLKSLQMQVQIMWMTTGIVPMMFPGTHQLMPPMGMGLNTACMPGAQAQGLNQMQRTTYYMNNSLPNQMPQIPSPAMNAPSVPDDMQNDNRIRGPRNPFLHCNDTLTATAQVPGLFTYGSQIAEQNEIQELLSGAVIPSSSDGTIK

SEQ ID NO: 13831 - protein, 217 aa, Oryza sativa
  unsure (1)..(217): unsure at all Xaa locations
KKALRTLHLXASLGLDQLAAIGSLYQFIRGGGEGKEAASQEEEQTPKLRKVNFHNFSERRRRDRINEKLKALQELLPNCTKTDKVSMLDEAIDYLKSLQLQLQMLVMGKGMAPVVPPELQQYMHYITADPSQIPPIRPSEPRPFQITHATQQRQSNVESDFLSQMQNLHPSEPPQNFLRPPKLQLYTPEQQRRGLASSSGHNSGWITERNSSYNFLE

SEQ ID NO: 13832 - protein, 244 aa, Oryza sativa; identical to SEQ ID NO: 13828

SEQ ID NO: 13833 - protein, 171 aa, Oryza sativa
MVEADDRSKQEIPRPASLGLDQLAAIGSLYQFIRGGGEGKEAASQEEEQTPKLRKRRRDRINEKLKALQELLPNCTKTDKVSMLDEAIDYLKSLQLQLQITHATQQRQSNVESDFLSQMQNLHPSEPPQNFLRPPKLQLYTPEQQRRGLASSSGHNSGWITERNSSYNFLE

SEQ ID NO: 13834 - protein, 96 aa, Oryza sativa
MEARRPTPTRRSRSAEFHNFSERRRRDRINEKLKALQELLPNCTKTDKVSMLDEAIDYLKSLQLQLQEQQRRGLASSSGHNSGWITERNSSYNFLE

SEQ ID NO: 13835 - protein, 208 aa, Triticum aestivum
  unsure (1)..(208): unsure at all Xaa locations
GAVEAKGSSARRPRIPKKKKKKKXAGLDKRRKVKKLIKIVDGRRQGSEXRMSIPTRRSRSADFHNFSERRRRDKINEKLKALQELLPNCTKTDKVSMLDEAIDYLKSLQLQLQMLVMGKGMAPVVPPELQQYMHYITTDPAAQLMQMPPSEPPRPFQITHATPQRESDVLSSQQHHLHPSADPPQIFFLPXKLQLYTPEQRGXVGSSX

SEQ ID NO: 13836 - protein, 114 aa, Triticum aestivum
  unsure (1)..(114): unsure at all Xaa locations
GGVKARGSPGQQGDLRYQEERKVKKLIKIADGRRQGFEEDVYPYPQHAGLDQRSRSADFHNFSERRRRDKINEKLKALQELLPNCTKTDKVSMLDEAIDYLKSLQLQLQMLVMX

SEQ ID NO: 13837 - protein, 544 aa, Oryza sativa (japonica cultivar-group)
MADTPTSRMIHPFSNIPSQNLKQFQYSDNPQHPCHPYRAPSDTHVVPHHYGLKSHSPDAGYESQATPNKYTLDSSEGAGCMRHDSPSSQSFTTRSGSPLSQEDSHSDSTDGSPVGASCVTEDPNDLKQKLKDLEAVMLGPDSEIVNSLENSVANQLSLEPEKWVRMMGIPRGNLKELLIACARAVEEKNSFAIDMMIPELRKIVSVSGEPLERLGAYMVEGLVARLASSGISIYKALKCKEPKSSDLLSYMHFLYEACPYFKFGYMSANGAIAEAVKGEDRIHIIDFHISQGAQWISLLQALAARPGGPPTVRITGIDDSVSAYARGGGLELVGRRLSHIASLCKVPFEFHPLAISGSKVEAAHLGVIPGEALAVNFTLELHHIPDESVSTANHRDRLLRMVKSLSPKVLTLVEMESNTNTAPFPQRFAETLDYYTAIFESIDLTLPRDDRERINMEQHCLAREIVNLIACEGEERAERYEPFGKWKARLTMAGFRPSPLSSLVNATIRTLLQSYSDNYKLAERDGALYLGWKSRPLVVSSAWH

SEQ ID NO: 13838 - protein, 721 aa, Petunia x hybrida
MIAIPQGAKGVLGVSSFMPSISSEEQICKKDANFARNDPQICKKDGNFARNEPQICKKEGNFTRNEPVSVLDTRSPSPSSSSCSYAGKVEGQKEELVKELQPFPLVGLEPEKCSLGFGDLDNLLPELCGADQTLLRWISGDMEDPSVSLKQLLLGGNANGFHGSSGFEASAAGSLVHTDNVSFSGSDVSLNANIEKIGSVIDSNGRPSNGFDYLNANLYAKSLPLPPASSFQEQKLGQKPQSFSPNQALFQNASYGNMFDSSSYDDTNQEQPPSKRHNSGTLGSSVGGLLPKVPFFDPSGDLSMRRQLLGEMQQHFNLLPPQQFQPKPLIVPKLEAACGGGNGSLMVPRHQQQEQQFIYDQIFQASELLLAGHFSNAQMILARLNQQLSPIGKPFKRAAFYFKEALQLPFLLPCTSTFLPPRSPTPFDCVLKMDAYKSFSEVSPLIQFMNFTSNQAILEALGDVERIHIIDFDIGFGAQWSSFMQELPSSNRKATSLKITAFASPSTHHSVEIAIMHESLTQFANDAGIRFELEVINLDTFDPKSYPLSSLRSSDCEAIAINFPIWSISSCLFAFPSLLHYMKQLSPKIIVSLERGCERTELPLKHHLLHALQYYEILLASIDAANVTPEIGKKIEKSLLLPSIENMVLGRLRSPDRMPQWRNLFASAGFSPVAFSNLTEIQAECVVKRTQVGGFHVEKRQSSLVLCWKQQELLSALTWRC

SEQ ID NO: 13839 - protein, 469 aa, Oryza sativa
  unsure (1)..(469): unsure at all Xaa locations
MADTPTSRMIHPFSNIXEPKPEAVPVFXXSTAPLPPLCASCVTEDPNDLKQKLKDLEAVMLGPDSEIVNSLENSVANQLSLEPEKWVRMMGIPRGNLKELLIACARAVEEKNSFAIDMMIPELRKIVSVSGEPLERLGAYMVEGLVARLASSGISIYKALXXCKEPKSSDLLSYMHFLYEACPYFKFGYMSANGAIAEAVKGEDRIHIIDFHISQGAQWISLLQALAARPGGPPTVRITGIDDSVSAYARGGGLELVGRRLSHIASLCKVPFEFHPLAISGSKVEAAHLGVIPGEALAVNFTLELHHIPDESVSTANHRDRLLRMVKSLSPKVLTLVEMESNTNTAPXFPQRFAETLDYYTAIFESIDLTLPRDDRERINMEQHCLAREIVNLIACEGEERAERYEPFGKWKARLTMAGFRPSPLSSLVNATIRTLLQSYSDNYKLAERDGALYLGWKSRPLVVSSAWH

SEQ ID NO: 13840 - protein, 458 aa, Oryza sativa
  unsure (1)..(458): unsure at all Xaa locations
MADTPTSRMIHPFSNIPSQNLKQFQYYSHSDSTDGSPVGASCVTEDPNDLKQKLKDLEAVMLGPDSEIVNSLENSVANQLSLEPEKWVRMMXXIPRGNLKELLIACARAVEEKNSFAIDMMIPELRKIVSVSGEPLERLGAYMVEGLVARLASSGISIYKALKCKEPKSSDLLSYMHFLYEACPYFKFGYMSANGAIAEAVKGEDRIHIIDFHISQGAQWISLLQALAARPGGPPTVRITGIDDSVSAYARGGGLELVGRRLSHIASLCKVPFEFHPLAISGSKVEAAHLGVIPGEALAVNFTLELHHIPDEXXMVKSLSPKVLTLVEMESNTNTAPFPQRFAETLDYYTAIFESIDLTLPRDDRERINMEQHCLAREIVNLIACEGEERAERYEPFGKWKARLTMAGFRPSPLSSLVNATIRTLLQSYSDNYKLAERDGALYLGWKSRPLVVSSAWH

SEQ ID NO: 13841 - protein, 291 aa, Triticum aestivum
  unsure (1)..(291): unsure at all Xaa locations
XEACPYFKFGYMSANGAIAEAVKGEDRIHIIDFHIAQGAQWISLLQALAARPGGPPTVRITGLDDSVSAYARGGGLDLVGRRLSHIAGLCNVHVEFHSVAMAGEEVDEGHLGVVRGEALAVNFTLELHHIPDATVSTANHRDRILRLVKCRATRVPTSSPQGTGRSTSAWQQQAPETLDYYAAIFESIDLTLPRDDRERVNMEQHCLAREVVNLIACEGAERVERHEVFGKWKARLTMAGFRPSPLSALVNATISTLLQSYSENYKLAERDGXALYLGWKNKPLVVSSAWH

SEQ ID NO: 13842 - protein, 338 aa, Triticum aestivum
  unsure (1)..(338): unsure at all Xaa locations
MADTPTSRMIHPFSNMQGQNPKQFQFQYSDNPQHPCRPYQPSPDTHVVPQHHYSLKSHSSDASYQLINASYENQVAQMKHTLDSSAAAGCMRHDSPSSHSFTPPSIGSGSGSPSSHDDSHSDSTNGSPVSASCVTVTTEDPNDLKQKLKDLEAEMLGPDAEXXVNSLESSVAKQLSLEPEKWAQMMDFPRGDLKELLLACARAVEEKNMYAVDVMVPELRKMVSVSGTPLERLGAYMVEGLVARLAFXXHFIXKSLXRCKAQXXSDLXLSYMHFLYEACPYFKFXYMSGNGAIXEAXKGXXQVHIIXFHYPXKEQWXSFFKAXQXSPGGXPXXRITRL

SEQ ID NO: 13843 - protein, 181 aa, Triticum aestivum
HLGVIPGEALAVNFTLELHHIPDETVSTANHRDRILRLVKSLRPKVLTLVEQESNTNTAPFPQRFAETLEYYTAIFESIDLTLPRDDKERVNMEQHCLAREVVNLIACEGAERVERHEVFGKWKARLTMAGFRPSPLSSLVNATISTLLQSYSENYKLAERDGALYLGWKNKPLVVSSAWH

SEQ ID NO: 13844 - protein, 449 aa, Glycine max
SPSRPEQPLLHVTYVFIQNHSTTSKKNETRHALLELETALMAPDGEDQITTSSTSLGVGSRSTTNQWRKTLQGFPSCNLKQLLIVCAKALSENNMQHFDQLIEKARSAVSITGEPIQRLGAYLVEGLVARKEASGNNIYHALRCREPEGEELLTYMQLLFEICPYLKFGYMAANGAIAEACRNEDHIHIIDFQIAQGTQWMTLLQALAARPGGAPHVRITGIDDPVSKYARGDGLEVVGKRLALMSEKFGIPVEFHGVPVFAPDVTREMLDIRPGEALAVNFPLQLHHTADESVHVSNPRDGLLRLVRSLSPKVTTLVEQESNTNTTPFFNRFIETLDYYLAIFESIDVTLPRESKERINVEQHCLARDIVNIIACEGKERVERHELLGKWKSRLTMAGFRQYPLSSYMNSVIRSLLRCYSKHYNLVEKDGAMLLGWKDRNLISTSAWY

SEQ ID NO: 13845 - protein, 449 aa, Glycine max
SPTRPKQPLLHVTYVFIQNHSTTSKKNETRHALLELETALMAPDGEDQITTSSTSLGVGSRSTTNQWRKTLQGFPSCNLKQLLIVCAKALSENNMQHFDQLIEKARSAVSITGEPIQRLGAYLVEGLVARKEASGNNIYHALRCREPEGKDLLSYMQLLYEICPYLKFGYMAANGAIAEACRNEDQIHIIDFQIGQGTQWVTLLQALAARPGGAPHVRITGIDDPLSKYVRGDGLEAVGKRLAAISQTFNIRVEFHGVPVLAPDVTKDVLDVRPGEALAVNFPLQLHHTADESVDMSNPRDGLLRLVKSLSPKVTTLVEQESNTNTTPFFNRFIETLDYYLAMFESIDVSLPRKSKVQINMEQHCLARDIVNIIACEGKERVERHELLGKWKSRLTMAGFRQYPLSSYMNSVIRSLLRCYSKHYNLVEKDGAMLLGWKDRNLISTSAWY

SEQ ID NO: 13846 - protein, 397 aa, Glycine max
  unsure (1)..(397): unsure at all Xaa locations
XAAQINIQHSQAFHFQTLHFPPNNLKQLLIACAKALSENNTKDFDQLVGKAKDAVSINGEPIQRLGAYMVEGLVARMQASGNSIYHALRCREPEGEELLTYMQLLFEICPYLKFGYMAANGAIAQACRNEDHIHIIDFQIAQGTQWMTLLXQALAARPGGAPHVRITGIDDPVSKYARGDGLEVVGKRLALMSEKFGIPVEFHGVPVFAPNVTREMLDIRPGEALAVNFPLQLHHTADESVHVSNPRDGLLRLVRSLSPKVTTLVEQESNTNTTPFFNRFIETLDYYLAIFESIDVTLPRDSKERINVEQHCLARDIVNIIACEGKERVERHELFGKWKSRLKMAGFQQCPLSSYVNSVIRSLLRCYSEHYTLVEKDGAMLLGWKDRNLISASAWHC

SEQ ID NO: 13847 - protein, 454 aa, Glycine max
  unsure (1)..(454): unsure at all Xaa locations
PTRPKPQKHSDTTNTNTIDSFPLYSDRNSLLQNASSNQKIQHALLELETALMAPDDDQVTTPNTLALMEEEATLEAFPPNNLKQLLIACAKALSENNMNDFDQLVGRAKDAVSINGEPIQRLGAYMVEGLVARTQASGNSIYKSLRCREPEGEELLTYMQLLXFEICPYLKFGYMAANGAIAQACRNEDHIHIIDFQIAQGTQWMTLLQALSKYGSSIPVIRTXGIDDPVSKYARGDGPEVVGKRLALMSEKFGIPVEFHGVPVFAPNVTREMLDIRPGEALAVNFPLQLHHTADESVHVSNPRDGLLRLVRSLSPKVTTLVEQESNTNTTPFFNRFIETLDYYLAIFESIDVTLPRDSKERINVEQHCLARDIVNIIACEGKERVERHELFGKWKSRLTMAGFRQCPLSSYVNSVIRSLLMCYSEHYTLVEKDGAMLLGWKDRNLISASAWHC

SEQ ID NO: 13848 - protein, 572 aa, Oryza sativa (japonica cultivar-group)
MDLHQLLKYRLTGANVVYEIPTENNLQNSPWQANPLKYEFSDSPYTPLSSQFECDNLSALTNTPDNQSSTETISAQPISPLEADSSYRQAGILLQENIQVGADPLYATSRHNMQHALREIETVLMAPDTDDATTSTKHEFEEIKPAQLVRQRSRTWSHESRQPLPGVGRSQFASGGYPTASYEFRPEKRQRELREDPQIIVKQLLTRCAEALSEDRTEEFHKLVQEARGVVSINGEPIQRLGAYLLEGLVARHGNSGTNIYRALKCREPESKELLSYMRILYNICPYFKFGYMAANGAIAEALRTENNIHIIDFQIAQGTQWITLIQALAARPGGPPRVRITGIDDPVSEYARGEGLDIVGKMLKSMSEEFKIPLEFTPLSVYATQVTKEMLEIRPGEALSVNFTLQLHHTPDESVDVNNPRDGLLPDGERAVPEGDYFGRAGVTHQHNAFLDEVWGDHGVLLRHVRVDRLPTCRGTTRRGSAWSSTASPRHIVNIIACEGKDRVERHELLGKWKSRLTMAGFRPYPLSSYVNSVIRKLLACYSDKYTLDEKDGAMLLGWRSRKLISASAWH

SEQ ID NO: 13849 - protein, 313 aa, Oryza sativa
  unsure (1)..(313): unsure at all Xaa locations
XYRALXXCREPESKELLSYMRILYNICPYFKFGYMAANGAIAEALRTENNIHIIDFQIAQGTQWITLIQALAARPGGPPRVRITGIDDPVSEYARGEGLDIVGKMLKSMSEEFKIPLEFTPLSVYATQVTEEMLEIRPGEALSVNFTLQLHHTPDESVDVNNPRDGLLRMVKGLCPKVTTLVEQESHTNTTPFLMRFGETMEYYSAMFESIDANLPRDNKERISVEQHCLAKDIVNIIACEGKDRVERHELLGKWKSRLTMAGFRPYPLSSYVNSVIRKLLACYSDKYTLDEKDGAMLLGWRSRKLISASAWH

SEQ ID NO: 13850 - protein, 733 aa, Mus musculus
MSGSRQAGSGSAGTSPGSSAASSVTSASSSLSSSPSPPSVAASAATLVSGGVAPAAGSGGLGGPGRPVLVAAAVSGSASAGGAVSAGQSRLSCAARPSAGVGGSSSSLGSSSRKRPLLVPLCNGLLNSYEDKSNDFVCPICFDMIEEAYMTKCGHSFCYKCIHQSLEDNNRCPKCNYVVDNIDHLYPNFLVNELILKQKQRFEEKRFKLDHSVSSTNGHRWQIFQDLLGTDQDNLDLANVNLMLELLVQKKKQLEAESHAAQLQILMEFLKVARRNKREQLEQIQKELSVLEEDIKRVEEMSGLYSPVSEDSTVPQFEAPSPSHSSIIDSTEYSQPPGFSGTSQTKKQPWYNSTLASRRKRLTAHFEDLEQCYFSTRMSRISDDSRTASQLDEFQECLSKFTRYNSVRPLATLSYASDLYNGSSIVSSIEFDRDCDYFAIAGVTKKIKVYEYGTVIQDAVDIHYPENEMTCNSKISCISWSSYHKNLLASSDYEGTVILWDGFTGQRSKVYQEHEKRCWSVDFNLMDPKLLASGSDDAKVKLWSTNLDNSVASIEAKANVCCVKFSPSSRYHLAFGCADHCVHYYDLRNTKQPIMVFKGHRKAVSYAKFVSGEEIVSASTDSQLKLWNVGKPYCLRSFKGHINEKNFVGLASNGDYIACGSENNSLYLYYKGLSKTLLTFKFDTVKSVLDKDRKEDDTNEFVSAVCWRALSDGESNVLIAANSQGTIKVLELV

SEQ ID NO: 13851 - protein, 662 aa, Rosa hybrid cultivar
MEECSTGALVPAVKVEPILSSIGGSVDPCSSDLGRLTEEKGMSEVDKDLLCPICMQIVKDAFLTACGHSFCYMCIITHLSNKSDCPCCAQSLSKNQLFPNFLLDKLLKKTSAQQISKSAPPVEHFRQALQQGCEVSIKELDTLLALLAEKKRKMEQEEAERNMQILLDFLNCLRKQKVQELNEVQSHLQFLKEDISVVERRRMELYRARDRYSVRQRMLGGDDSVNGARNSWPSSIDNNTSALRVRGGTSSWNIQGRGLQRNDALSASDSQYVNQSGLAVARKKRVHALFDELQECYLQKRRQMNQPYSQLERDRTVIPREGYSTGLADFQSVLTTLTRYSRMRVIAELRHEDLFHSANIVSSIEFDRDYELFATAGVSKCIKVFDFSSVVNDPADMHTAVVEMPTRSKLSCLSWNKFTKNHIASTDYEGIVTVWDVDTRQSVMEYEEHEKRAWSVDFSCTEPSMLVSGSDDCKVKVWCTRQEASVLNIDMKANICCVKYNPGSSNCIAVGSADHHIHYYDLRNVSQPLHVFTGHRKAVSYVKFLSNYELASASTDSTLRLWNVKDNIPVRTFKGHTNEKNFVGLTVNSEYIACGSETNEVFVYHKEISKPVTWHRFGSPDMEDTEDDAGSYFISAVCWKSDSPTMLTANSQGTIKVLVLAA

SEQ ID NO: 13852 - protein, 644 aa, Anopheles gambiae str. PEST
SVDDKTNDFLCPICFDIINEAYITRCGHTFCHQCIARSIDVAKKCPKCNYPLASHEHIVPNFLLNELITKHRLKGGGGGGDTLKHFLATESKKLSLSDVNVMLEILTQRKTLLEAESCAAQNRLLHEFLKHLLKQKEQQQLQIANEIALIRSDLLDVEKVLKDVQSSCPTVAEVEQSVRDEKDEHVVAIKREIIQIIDTIDNITVPSNRSLVDDTCSNVTESYEGFNLHGTRRGGHGGSISGGSLSSNPSSFLARKQRMYQHFDDFVQCYFAARSEDLYFGKDRSCSSDSLGVGERSTSNTTRSSGRSSLDTFRESLIKFSKYSALRPLATLNYSNDSNYVSTIVSSIEFDKDSEYFAIAGVTKRIKIFDYYTAIRDAAVDINYPINEMTCNSKISCVIWNSYFKQVLASSDYEGIVTIWDVLTRTRTKTFEEHDKRCWCVDFNEVDTRLLASGSDDARVKLWSLNVDHSVATIEARANVCCVKFNPKSSCHLAFGTADHCVNYYDLRNLKQPLCLFKGHRKAVSYVKFLNTDEIVSASTDGQLKLWNINSPPFCLRSFTGHINEKNFAGLATNNDYLACGSEDNSLCVYYKGLSKQLFNLNGLQSTDMERSNSEGNEFVSAVCWRKQSNIIIAGNSEGVIKIL

SEQ ID NO: 13853 - protein, 1029 aa, Arabidopsis thaliana
MPVMERVAEETVATNNIQLKARVDDVPCNKLDARHNDMVIQSETANSDCPGSSAHRNVDLTKPPPPEEAAGAKLSVEELTLGNYRIVQGSNNTNVDSPRAGKFEHLYRLARGSAFRAGDGDLDSQPRDMDQMLSRIRQQLAGAPSERQNLKPFMSRRSDQNLEAFSERLRAAGENSIMNAPALISEGVQMKTPVSSSNFSQLLLKRAMKGKGVVGKNQETPPEFVSDQDLGSKEKKLDISKSPTPHDVLPLKSSPKGNGMVSHGDGNHSKSSIGISLREFLRSSYAKREKRHGLCLFRQLVELVDSAHSKRLFLLDLRPSLFTLVPSKKLRYIGNFGKNDLESDVDEDLNRRRPVVEESSSGGRDSKKRKMDLHLNSPGNQLQATSTGRPFKRKSPVIDLNMVDARNPDSCELQQQDYIKNLSVSSVSRKQSMSTWLEEQWYTCPEEINGEDIGEKSNIYALGVLLFELLCHCESGEMHAAMMADLRHRILPPTFLSKYPKEAGFCLWLLHPEPSSRPSARDILKSELICEDDSVKSTAAAEEISELLLHFLSSLEVQKKKKASKLLQDIQTLEDDIKEAERRYSSNVSLVRSHGAIEKRVQSSPLDEHCTTSSALFVPTANTDRLMSNIRQLEDAYFFMRSQINLSSSAATARSDKTLKDRDRCSENQNENQDMSTKGKSSDQLEVFFEGLCKFARYSKFETCGTIRSGDLLNSASVVCSLSFDPDEEHIAAAGISKKIKIFDFNAFMNESVGVHYPLVEMVNKSKLSCVCWNSYIKNYLASTDYDGVVQIWDAGTGQGFSQYTEHQKRAWSVDFSPSDPTKFVSGSDDCSVKLWSINEKRSLGTIWSPANVCCVQFSSYSNHLLAFGSADYKVYCYDLRYVKTPWCTLAGHEKAVSYVKFMDSETIVSASTDNSLKLWNLNKTNSSGLSPGACSLTYKGHTNQKNFVGLSVLDGYIACGSETNEVYSYYKSLPMPMTSYKFGSVDPISGNEYFDDNGQFVSSVCWRKKSNMLVAANSTGNMKLLKLV

SEQ ID NO: 13854 - protein, 1040 aa, Arabidopsis thaliana
MDEGSVGDVSRIDEADVAHLQFKNSEQSFKPENIEVREVKEVQVQREADGKNGGDHVELIGNEPCSSRQNTNDEGDVVEELTVKTCEGSSMAIVGRPSSRARLEMNRSQFLHRFPLDGDLPGSSSMSKKVIDRGTVSILRNAGKMSLPETSNGQLAIIAVNGEANEHLTNVERNPVPVEALSHEGIKTKMLSQSGFSQFFVRKTLKGKGVTFRGPPNNRSKARNMDQQTVASSGSALVIANTSAKISSSIPLAAYDDTHRGCGGEGLSLREWLKSERQEVNKAECMYIFRQIVDHVDCSHSQGVVLCDLRPSSFKIFKENAVKYVVSGSQRESFDSNMNKETLSQLENPLVRRRLGDTSSLSIPAKKQKSSGPSSRQWPMFQRAGGVNIQTENNDGAIQEFHFRSSQPHCSTVACPFTSVSEQLEEKWYASPEELRGDMRSASSNIYSLGILLYELLSQFQCERAREAAMSDIRHRILPPKFLSENPKEAGFCLWDILQSEVVNGIPDLYAEGLSLSIEQEDTESELLQHFLFLSQEKRQKHAGNLMEEIASVEADIEEIVKRRCAIGPPSLEEASSSSPASSVPEMRLIRNINQLESAYFAARIDAHLPEARYRLRPDRDLLRNSDNTVAEVENSETWSSDDRVGAFFDGLCKYARYSKFETRGVLRTSELNNTSNVICSLGFDRDEDYFATAGVSKKIKIYEFNSLFNESVDIHYPAIEMPNRSKLSGVCWNNYIRNYLASSDYDGIVKVFEPLKFYVDCLSLDYPFISFGQAISHFIEHEKRAWSVDFSEACPTKLASGSDDCSVKLWNINEACSSILDFVVLIATPTEISGIYTYEYINSTLDYSVNRNCLGTIRNIANVCCVQFSPQSSHLLAFGSSDFRTYCYDLRNLRTPWCILSGHNKAVSYAKFLDNETLVTASTDNTLKLWDLKKTTHGGLSTNACSLTFGGHTNEKNFVGLSTSDGYIACGSETNEVYAYHRSLPMPITSYKFGSIDPISGKEIEEDNNLFVSSVCWRKRSNMVVSASSNGSIKVLQLV

SEQ ID NO: 13855 - protein, 532 aa, Arabidopsis thaliana
MACYCVNYLLVSFSVLILFSLCDRDILKSELICEDDSVKSTAAAEEISELLLHFLSSLEVQKKKKASKLLQDIQTLEDDIKEAERRYSSNVSLVRSHGAIEKRVQSSPLDEHCTTSSALFVPTANTDRLMSNIRQLEDAYFFMRSQINLSSSAATARSDKTLKDRDRCSENQNENQDMSTKGKSSDQLEVFFEGLCKFARYSKFETCGTIRSGDLLNSASVVCSLSFDPDEEHIAAAGISKKIKIFDFNAFMNESVGVHYPLVEMVNKSKLSCVCWNSYIKNYLASTDYDGVVQIWDAGTGQGFSQYTEHQKRAWSVDFSPSDPTKFVSGSDDCSVKLWSINEKRSLGTIWSPANVCCVQFSSYSNHLLAFGSADYKVYCYDLRYVKTPWCTLAGHEKAVSYVKFMDSETIVSASTDNSLKLWNLNKTNSSGLSPGACSLTYKGHTNQKNFVGLSVLDGYIACGSETNEVYSYYKSLPMPMTSYKFGSVDPISGNEYFDDNGQFVSSVCWRKKSNMLVAANSTGNMKLLKLV

SEQ ID NO: 13856 - protein, 589 aa, Glycine max
  unsure (1)..(589): unsure at all Xaa locations
XPEVLNDGVCTFSSNIYSLGVLLFELLCNIEPWEAHSTAMLDLCQRILPPKFLAENPKEAGFCLWLLHPEPSSRPNARMILESEVMRESEESNSVADDEAETEQLLDFLILIKEAKKKREAKLEEELNLLNEDIKEVEKSYSFVTDSVXSFGANEQSXEVRGDNLYFHSDISRSIRRSFGDEERFMSNLNQLENSYFSMRFRVLPKEASSVSSNEKNVMDRWRLPQVENVNKESRRIQSSVGCVGSFFEGLCKFARYSKFEECGRLRNRDLLSSANVMCALSFDRDEDHIAAGGVSKKIKIFDLNAIASDSVDIQYPVIEMSNKSKLSCVCWNTYIKNHLASTDYDGAVQMWDADTGQPLSQYMEHQKRAWSVHFSLSDPKMFASGSDDCSVKLWSISERNSLGTIWKPANICCVQFSAYSTNLLFFGSADYKVYGYDLRHTRIPWCTLAGHGKAVSYVKFIDSEAVVSASTDNSLKLWDLNKTSSSGLSSDACAMTFKGHSNEKNFVGLSVLDGYIACGSESNEVYCYHKSLPVPIATHKFESIDHISGHLNSGDNNGQFVSSVCWRKKSNMLVAANSVGIVKLLQMV

SEQ ID NO: 13857 - protein, 451 aa, Glycine max
  unsure (1)..(451): unsure at all Xaa locations
RRHTFPHGCIESVAKEVAWMHDLGXSXFRTCLQYASSISLQNASIKXSIILNANELESAXFCMRTKILFPESDTATLPDKDILINHDNXSGAIKKKQQHKAKDAIRAVFDSLCKYARYSKFEVRGILRNTDFLQXTKNVLCSLSFDRDEDXYFAAAGISKKIKIFEFNALLNDSIDIHYPVVEMSNRSRLSCVCWNNYIQNYLASTDYDGAVKLWDANTGQGFSRFTEHEKRAWSVDFSLLCPTKFASGSDDCSVKLWNINEKNSLATIRNVANVCCVQFSTHSSHLLAFGSADYSAYCYDLRNLRNPWCVLAGHRKAVSYVKFLDSETLVSASTDNILKIWDLNKTSPVGPSTSACSLTLSGHTNEKNFVGLSVADGYIACGSETNEVYVYHKSLPMPVTSHRFGSIDNWFGDREDALYLCXACPGRWRGYSGMLIAANSSGCVKVLQMV

SEQ ID NO: 13858 - protein, 287 aa, Glycine max
PRVRALFNDSIDIHYPVVEMSNRSRLSCVCWNNYIQNYLASTDYDGAVKLWDANTGQGFSRFTEHEKRAWSVDFSLLGPTKFASGSDDCSVKLWSISERNCLGTIRNAANVCCVQFSAHSSHLLAFGSADYSTYCYDLRNLRSPWCVLAGHRKAVSYVKFLDSETLVSASTDNTLKIWDLNKTSPVGASINACSLTLSGHTNEKNFVGLSVADGYIACGSETNEVYTYYRSLPMPVTSHKFGSIDPISGKDTDDDNGQFVSSVCWRGKSGMLIAANSSGCVKVLQMV

SEQ ID NO: 13859 - protein, 675 aa, Pisum sativum
MEEHSVGPLVPAVVKPEPSKNFSTDTTAAGDVSPVPTMSDLDKDFLCPICMQIIKDAFLTACGHSFCYMCIITHLRNKSDCPCCGHYLTNSNLFPNFLLDKLLKKTSDRQISKTASPVEHFRQAVQKLKQGCEVTMKELDTLLLLLTEKKRKMEQEEAERNMQILLDFLHCLRKQKVDELKKVQTDLQFIKEDIGAVEKHRMDLYRARDRYSVKLRMLDDSGGRKSRHSSMDLNSSGLASSPLNLRGGLSSGSHTKKNDGKSQISSHGHGIQRRDPITGSDSQYINQSGLALVRKKRVHTQFNDLQECYLQKRRQAADKPHGQQERDTNFISREGYSCGLDDFQSVLTTFTRYSRLRVIAEIRHGDIFHSANIVSSIEFDRDDDLFATAGVSRRIKVFDFSAVVNEPTDAHCPVVEMTTRSKLSCLSWNKYAKNQIASSDYEGIVTVWDVTTRKSLMEYEEHEKRAWSVDFSRTDPSMLVSGSDDCKVKVWCTNQEASVLNIDMKANICCVKYNPGSGNYIAVGSADHHIHYYDLRNISRPVHVFTGHKKAVSYVKFLSNDELASASTDSTLRLWDVKQNLPVRTFRGHANEKNFVGLTVSSEYIACGSETNEVFVYHKEISKPLTWHRFGTLDMEDAEDEAGSYFISAVCWKSDRPTILTANSQGTIKVLVLAA

SEQ ID NO: 13860 - protein, 672 aa, Pisum sativum
MEEHSVGPLVPAVVKPEPSKNFSTDTTAAGTFLLVPTMSDLDKDFLCPICMQIIKDAFLTACGHSFCYMCIITHLRNKSDCPCCGHYLTNSNLFPNFLLDKLLKKTSDRQISKTASPVEHFRQAVQKGCEVTMKELDTLLLLLTEKKRKMEQEEAERNMQILLDFLHCLRKQKVDELKEVQTDLQFIKEDIGAVEKHRMDLYRARDRYSVKLRMLDDSGGRKSRHSSMDLNSSGLASSPLNLRGGLSSGSHTKKNDGKSQISSHGHGIQRRDPITGSDSQYINQSGLALVRKKRVHTQFNDLQECYLQKRRQAADKPHGQQERDTNFISREGYSCGLDDFQSVLTTFTRYSRLRVIAEIRHGDIFHSANIVSSIEFDRDDDLFATAGVSRRIKVFDFSAVVNEPTDAHCPVVEMTTRSKLSCLSWNKYAKNQIASSDYEGIVTVWTMTTRKSLMEYEEHEKRAWSVDFSRTDPSMLVSGSDDCKVKVWCTNQEASVLNIDMKANICCVKYNPGSGNYIAVGSADHHIHYYDLRNISRPVHVFTGHKKAVSYVKFLSNDELASASTDSTLRLWDVKQNLPVRTFRGHANEKNFVGLTVRSEYIACGSETNEVFVYHKEISKPLTWHRFGTLDMEDAEDEAGSYFISAVCWKSDRPTILTANSQGTIKVLVLAA

SEQ ID NO: 13861 - protein, 970 aa, Pisum sativum
MEEHSVGPLVPAVVKPEPSKNFSTDTTAAGTFLLVPTMSDLDKDFLCPICMQIIKDAFLTACGHSFCYMCIITHLRNKSDCPCCGHYLTNSNLFPNFLLDKLLKKTSDRQISKTASPVEHFRQAVQKGCEVTMKELDTLLLLLTEKKRKMEQEEAERNMQILLDFLHCLRKQKVDELKEVQTDLQFIKEDIGAVEKHRMDLYRARDRYSVKLRMLDDSGGRKSRHSSMDLNSSGLASSPLNLRGGLSSGSHTKKNDGKSQISSHGHGIQRRDPITGSDSQYINQSGLALVRKKRVHTQFNDLQECYLQKRRQAADKPHGQQERDTNFISREGYSCGLDDFQSVLTTFTRYSRLRVIAEIRHGDIFHSANIVSSIEFDRDDDLFATAGVSRRIKVFDFSALLKKTSDRQISKTASPVEHFRQAVQKGCEVTMKELDTLLLLLTEKKRKMEQEEAERNMQILLDFLHCLRKQKVDELKEVQTDLQFIKEDIGAVEKHRMDLYRARDRYSVKLRMLDDSGGRKSRHSSMDLNSSGLASSPLNLRGGLSSGSHTKKNDGKSQISSHGHGIQRRDPITGSDSQYINQSGLALVRKKRVHTQFNDLQECYLQKRRQAADKPHGQQERDTNFISREGYSCGLDDFQSVLTTFTRYSRLRVIAEIRHGDIFHSANIVSSIEFDRDDDLFATAGVSRRIKVFDFSAVVNEPTDAHCPVVEMTTRSKLSCLSWNKYAKNQIASSDYEGIVTVWTMTTRKSLMEYEEHEKRAWSVDFSRTDPSMLVSGSDDCKVKVWCTNQEASVLNIDMKANICCVKYNPGSGNYIAVGSADHHIHYYDLRNISRPVHVFTGHKKAVSYVKFLSNDELASASTDSTLRLWDVKQNLPVRTFRGHANEKNFVGLTVRSEYIACGSETNEVFVYHKEISKPLTWHRFGTLDMEDAEDEAGSYFISAVCWKSDRPTILTANSQGTIKVLVLAA

SEQ ID NO: 13862 - protein, 968 aa, Pisum sativum
MEEHSVGPLVPAVVKPEPSKNFSTDTTAAGDVSPVPTMSDLDKDFLCPICMQIIKDAFLTACGHSFCYMCIITHLRNKSDCPCCGHYLTNSNLFPNFLLDKLLKKTSDRQISKTASPVEHFRQAVQKGCEVTMKELDTLLLLLTEKKRKMEQEEAERNMQILLDFLHCLRKQKVDELKEVQTDLQFIKEDIGAVEKHRMDLYRARDRYSVKLRMLDDSGGRKSRHSSMDLNSSGLASSPLNLRGGLSSGSHTKKNDGKSQISSHGHGIQRRDPITGSDSQYINQSGLALVRKKRVHTQFNDLQECYLQKRRQAADKPHGQQERDTNFISREGYSCGLDDFQSVLTTFTRYSRLRVIAEIRHGDIFHSANIVSSIEFDRDDDLFATAGVSRRIKVFDFSALLKKTSDRQISKTASPVEHFRQAVQKGCEVTMKELDTLLLLLTEKKRKMEQEEAERNMQILLDFLHCLRKQKVDELKEVQTDLQFIKEDIGAVEKHRMDLYRARDRYSVKLRMLDDSGGRKSRHSSMDLNSSGLASSPLNLRGGLSSGSHTKKNDGKSQISSHGHGIQRRDPITGSDSQYINQSGLALVRKKRVHTQFNDLQECYLQKRRQAADKPHGQQERDTNFISREGYSCGLDDFQSVLTTFTRYSRLRVIAEIRHGDIFHSANIVSSIEFDRDDDLFATAGVSRRIKVFDFSAVVNEPTDAHCPVVEMTTRSKLSCLSWNKYAKNQIASSDYEGIVTVWDVTTRKSLMEYEEHEKRAWSVDFSRTDPSMLVSGSDDCKQVKVWCTNQEASVLNIDMKANICCVKYNPGSGNYIAVGSADHHIHYYDLRNISRPVHVFTGHKKAVSYVKFLSNDELASASTDSTLRLWDVKQNLPVRTFRGHANEKNFVGLTVSSEYIACGSETNEVFVYHKEPLTWHRFGTLDMEDAEDEAGSYFISAVCWKSDRPTILTANSQGTIKVLVLAA

SEQ ID NO: 13863 - protein, 519 aa, Oryza sativa (indica cultivar-group)
ESETNMQILLVFLHCLRKQKLEELNEIQTDLQYIKEDISAVERHRLELYRTKERYSMKLRMLLDEPAASKMWPSPMDKPSGLFPPNSRGPLSTSNPGGLQNKKLDLKGQISHQGFQRRDVLTCSDPPSAPIQSGNVIARKRRVQAQFNELQEYYLQRRRTGAQSRRLEERDIVTINKEGYHAGLEDFQSVLTTFTRYSRLRVIAELRHGDLFHSANIVSSIEFDRDDELFATAGVSKRIKVFEFSTVVNEPSDVHCPVVEMATRSKLSCLSWNKYSKNVIASSDYEGIVTVWDVQTRQSVMEYEEHEKRAWSVDFSRTEPSMLVSGSDDCKVKVWCTKQEASAINIDMKANICSVKYNPGSSHYVAVGSADHHIHYFDLRNPSAPVHVFGGHKKAVSYVKFLSTNELASASTDSTLRLWDVKENCPVRTFRGHKNEKNFVGLSVNNEYIACGSETNEVFVYHKAISKPAANHRFVSSDLDDADDDPGSYFISAVCWKSDSPTMLTANSQGTIKVLVLAP

SEQ ID NO: 13864 - protein, 336 aa, Oryza sativa
  unsure (1)..(336): unsure at all Xaa locations
CPGRASLSGLPPSLCRSSIYEERVMRNLEQLENAYYSMRSTIDTSEANIIKRVDNDALRVRQNFHELHSDANAIDEQADPLGCFFDGLCKYARYSRFEVRGILKNADILNSPNVICSLSFDRDEEYFAAAGVSKKIKIFPGLPLFGERVDIHYPLIEMPSKSKLSWVCWNSYIKNYLASTDYDGTVQLWDASSGQGFTQFTEHRKRAWSVSFSEVXSPTKLASGSDDCCVXKVWSINQKNCTDTIRNVANVCCVQFSPYSSRMLAFGSADYKIYCYDLRNTRIPWCTISGHGKAVSYVRFLDPETLISASTDNTLKIWDLNRANSSGLSTDACSMX

SEQ ID NO: 13865 - protein, 276 aa, Triticum aestivum
  unsure (1)..(276): unsure at all Xaa locations
HSDADAMNGPTDRLGCFFDGLCKYARHSRFEVRGILKNADILNSPNVICSLSFDRDEEYFAAAGVSKKIKIFEFDALLNDHVDIHYPIVEMPSKSKLSCVCWNNYIKNYLASTDYDGTVQLWDASTGQGFTQFTEHXRKRAWSVSFSEVDPTKLASGSDDCCVKVWNINQKNSVDTIRNVANVCCVQFSPYSSRMLAFGSADYKTYCYDLRHTRIPWCTISGHGKAVSYVRFLDAETLISASTDNTLKIWDLNRTNPNGLSTNACSLTLSGHTNEK

SEQ ID NO: 13866 - protein, 731 aa, Homo sapiens
MSGSRQAGSGSAGTSPGSSAASSVTSASSSLSSSPSPPSVAVSAAALVSGGVAQAAGSGGLGGPVRPVLVAPAVSGSGGGAVSTGLSRHSCAARPSAGVGGSSSSLGSGSRKRPLLAPLCNGLINSYEDKSNDFVCPICFDMIEEAYMTKCGHSFCYKCIHQSLEDNNRCPKCNYVVDNIDHLYPNFLVNELILKQKQRFEEKRFKLDHSVSSTNGHRWQIFQDWLGTDQDNLDLANVNLMLELLVQKKKQLEAESHAAQLQILMEFLKVARRNKREQLEQIQKELSVLEEDIKRVEEMSGLYSPVSEDSTVPQFEAPSPSHSSIIDSTEYSQPPGFSGSSQTKKQPWYNSTLASRRKRLTAHFEDLEQCYFSTRMSRISDDSRTASQLDEFQECLSKFTRYNSVRPLATLSYASDLYNGSSIVSSIEFDRDCDYFAIAGVTKKIKVYEYDTVIQDAVDIHYPENEMTCNSKISCISWSSYHKNLLASSDYEGTVILWDGFTGQRSKVYQEHEKRCWSVDFNLMDPKLLASGSDDAKVKLWSTNLDNSVASIEAKANVCCVKFSPSSRYHLAFGCADHCVHYYDLRNTKQPIMVFKGHRKAVSYAKFVSGEEIVSASTDSQLKLWNVGKPYCLRSFKGHINEKNFVGLASNGDYIACGSENNSLYLYYKGLSKTLLTFKFDTVKSVLDKDRKEDDTNEFVSAVCWRALPDGESNVLIAANSQGTIKVLELV

SEQ ID NO: 13867 - protein, 491 aa, Homo sapiens
MLWTILTICILISWESHAAQLQILMEFLKVARRNKREQLEQIQKELSVLEEDIKRVEEMSGLYSPVSEDSTVPQFEAPSPSHSSIIDSTEYSQPPGFSGSSQTKKQPWYNSTLASRRKRLTAHFEDLEQCYFSTRMSRISDDSRTASQLDEFQECLSKFTRYNSVRPLATLSYASDLYNGSSIVSSIEFDRDCDYFAIAGVTKKIKVYEYDTVIQDAVDIHYPENEMTCNSKISCISWSSYHKNLLASSDYEGTVILWDGFTGQRSKVYQEHEKRCWSVDFNLMDPKLLASGSDDAKVKLWSTNLDNSVASIEAKANVCCVKFSPSSRYHLAFGCADHCVHYYDLRNTKQPIMVFKGHRKAVSYAKFVSGEEIVSASTDSQLKLWNVGKPYCLRSFKGHINEKNFVGLASNGDYIACGSENNSLYLYYKGLSKTLLTFKFDTVKSVLDKDRKEDDTNEFVSAVCWRALPDGESNVLIAANSQGTIKVLELV

SEQ ID NO: 13868 - protein, 506 aa, Homo sapiens
MEFLKVARRNKREQLEQIQKELSVLEEDIKRVEEMSGLYSPVSEDSTVPQFEAPSPSHSSIIDSTEYSQPPGFSGSSQAGVQWRYLGSLQPPPPRYKRFSCLTLPSSWDYRRLPPHLTKKQPWYNSTLASRRKRLTAHFEDLEQCYFSTRMSRISDDSRTASQLDEFQECLSKFTRYNSVRPLATLSYASDLYNGSSIVSSIEFDRDCDYFAIAGVTKKIKVYEYDTVIQDAVDIHYPENEMTCNSKISCISWSSYHKNLLASSDYEGTVILWDGFTGQRSKVYQEHEKRCWSVDFNLMDPKLLASGSDDAKVKLWSTNLDNSVASIEAKANVCCVKFSPSSRYHLAFGCADHCVHYYDLRNTKQPIMVFKGHRKAVSYAKFVSGEEIVSASTDSQLKLWNVGKPYCLRSFKGHINEKNFVGLASNGDYIACGSENNSLYLYYKGLSKTLLTFKFDTVKSVLDKDRKEDDTNEFVSAVCWRALPDGESNVLIAANSQGTIKVLELV

SEQ ID NO: 13869 - protein, 310 aa, Homo sapiens
MLELLVQKKKQLEAESHAAQLQNLIQFLKVARRNRREQLGHFQKELSVLEEDIKRVEEMSGLHSPVSEDSTVPQLEAPPASHSSIMDSTEYSQYPDNSVASIEAKADVCCVKFSRSSRCHLAFGCADHCVHYYDLRSTKQPIMVFKGRQKAVSYAKFASGEEIVFASTDSQLTLWNVGKLYCLHSFKGHINEKNFVGLASRGEYIACGSENNSLNLCYKALSKTLLTFKFDTVKSVLDKEGKEDDTNEFVGAACWRAQPDGEFNMLIAANSEGTIKVLELVRRVYSTLNVLDPADIPLQLTMIEETENVM

SEQ ID NO: 13870 - protein, 524 aa, Arabidopsis thaliana
MPLFELFRLTKAKLESAQDRNPSPPVDEVVELVWENGQISTQSQSSRSRNIPPPQANSSRAREIGNGSKTTMVDEIPMSVPSLMTGLSQDDDFVPWLNHHPSLDGYCSDFLRDVSSPVTVNEQESDMAVNQTAFPLFQRRKDGNESAPAASSSQYNGFQSHSLYGSDRARDLPSQQTNPDRFTQTQEPLITSNKPSLVNFSHFLRPATFAKTTNNNLHDTKEKSPQSPPNVFQTRVLGAKDSEDKVLNESVASATPKDNQKACLISEDSCRKDQESEKAVVCSSVGSGNSLDGPSESPSLSLKRKHSNIQDIDCHSEDVEEESGDGRKEAGPSRTGLGSKRSRSAEVHNLSERRRRDRINEKMRALQELIPNCNKVDKASMLDEAIEYLKSLQLQVQIMSMASGYYLPPAVMFPPGMGHYPAAAAAMAMGMGMPYAMGLPDLSRGGSSVNHGPQFQVSGMQQQPVAMGIPRVSGGGIFAGSSTIGNGSTRDLSGSKDQTTTNNNSNLKPIKRKQGSSDQFCGSS

SEQ ID NO: 13871 - protein, 524 aa, Arabidopsis thaliana
MPLFELFRLTKAKLDSAQDRNPSPPVDEVVELVWENGQISTQSQSSRSRNIPPPQANSSRAREIGNGSKTTMVDEIPMSVPSLMTGLSQDDDFVPWLNHHPSLDGYCSDFLRDVSSPVTVNEQESDMAVNQTAFPLFQRRKDGNESAPAASSSQYNGFQSHSLYGSDRARDLPSQQTNPDRFTQTQEPLITSNKPSLVNFSHFLRPATFAKTTNNNLHDTKEKSPQSPPNVFQTRVLGAKDSEDKVLNESVASATPKDNQKACLISEDSCRKDQESEKAVVCSSVGSGNSLDGPSESPSLSLKRKHSNIQDIDCHSEDVEEESGDGRKEAGPSRTGLGSKRSRLAEVHNLSERRRRDRINEKMRALQELIPNCNKVDKASMLDEAIEYLKSLQLQVQIMSMASGYYLPPAVMFPPGMGHYPAAAAAMAMGMGMPYAMGLPDLSRGGSSVNHGPQFQVSGMQQQPVAMGIPRVSGGGIFAGSSTIGNGSTRDLSGSKDQTTTNNNSNLKPIKRKQGSSDQFCGSS

SEQ ID NO: 13872 - protein, 531 aa, Glycine max
  unsure (1)..(531): unsure at all Xaa locations
XVRRSPSCKSLPSHCLPSHSPKARDKDVGYGSYTRLVNEIPMSVPSSEVDFCQDEDVLPWLDYPSIDGSCSDFLPASNSFTLLDKKSNDMAFRDSQKTSEEQGNVFNSSAGQVETARPKASSTSQLFPPSLHQCQTSFVSSRSRASDITENNNTSNASTIMNFSHFARPAAMVRANLHSIGQSKADVNSLLPKSVEQNAVPSKQSEPAGKESAAKIDLTPNQVPGDSGTKGQTAAEKSMEPAVASSSVCSGNGTLLASARPRQNLKRKTKDTDDSECHSEDVEEESAGAKKTAGGRGGAGSKRSRAAEVHNLSERKRRDRINEKMRALQELIPNCNKVDEASMLDEAIEYLKTLQLQVQIMSMGAGLYMPPMIMHAPHMAPFSPMGVGMHMGYGMGFGMGMPDMNGGSSRFPMIQVPQMQGTHIPMPMPPASVFPFSGGPLMNSPAQGLHARGSSGLVETVDSASASGLKDQMQNVDPQVKQSTGGCDSTSQMPTQCEAAAVGFEQSALAHSRGHASKANDNGAVNPDPGR

SEQ ID NO: 13873 - protein, 895 aa, Oryza sativa; identical to SEQ ID NO: 13829

SEQ ID NO: 13874 - protein, 543 aa, Oryza sativa
  unsure (1)..(543): unsure at all Xaa locations
XAGAGPGGGVSPSTHXSAAAAAAAASAMPTAGHGMEESDGNDFAELLWENGQAVVHGRKKHPQPAFPPFGFFGGTGGGGGGSSSRAQERQPGGIDAFAKVGGGFGALGMAPAVHDFASGFGATTQDNGDDDTVPWIHYPIIDDEDAAAPAALAAADYGSDFFSELQAAAAAAAAAAPPTDLASLPASNHNGATNNRNAPVATTTTREPSKESHGGLSVPTTRAEPQPQPQLAAAKLPRSSGSGGGEGVMNFSLFSRPAVLARATLESAQRTQGTDNKASNVTASNRVESTVVQTASGPRSAPAFADQRAAAWPPQPKEMPFASTAAAPMAPAVNLHHEMGRDRAGRTMPVHKTEARKAPEATVATSSVCSGNGAGSDELWRQQKRKCQAQAECSASQDDDLDDEPGVLRKSGTRSTKRSRTAEVHNLSERRRRDRINEKMRALQELIPNCNKIDKASMLDEAIEYLKTLQLQVQMMSMGTGLCIPPMLLPTAMQHLQIPPMAHFPHLGMGLGYGMGVFDMSNTGALQMPPMPGAHFPCPMIPX

SEQ ID NO: 13875 - protein, 197 aa, Oryza sativa
  unsure (1)..(197): unsure at all Xaa locations
XIHRRESYENTLSNKIQSKHALSNQSQAPSQSKARGCSTVQGVQCHREQPRRVDGRADGERASTGVSTKRSRTAEVHNLSERRRRDRINEKMRALQELIPNCNKIDKASMLDEAIEYLKTLQLQVQMMSMGTGLCIPPMLLPTAMQHLQIPPMAHFPHLGMGLGYGMGVFDMSNTGSXXASSVPPFAXLAGLPVRPX

SEQ ID NO: 13876 - protein, 158 aa, Triticum aestivum
  unsure (1)..(158): unsure at all Xaa locations
XSGRDRINEKMRALQELIPNCNKIDKASMLEEAIEYLKTLQLQVQMMSTMGTAGLCMPPMMAMQHMQMPPMAHFHHHHLGAMGFGMGPFDXXASSPPPAXAQFPYPMMPGAPIFGGHAMPPPPPFHQAAVAGAHMAAGPVTNDAATAAQAEQCWSKKK

SEQ ID NO: 13877 - protein, 160 aa, Physcomitrella patens
MSSRGGSDDEDEGTTRKKLRLSKEQSALLEESFKEHSTLNPKQKNALAKQLGLRPRQVEVWFQNRRARTKLKQTEVDCELLKRCYESLKEENRRLQKELLELRAIKVAPPCVISHDYYMPLPAATLTMCPSCERVATVDNRSLTFAKPGFSHLSQSSAAC

SEQ ID NO: 13878 - protein, 173 aa, Physcomitrella patens
IVQDYSSGNMGSCDCEESSLSSILTLQDQREMFRSVFPGRSSDNSQEYDEDDEGSSQKLRFTKAQLRVLEDTFERLQRPNAHQKSTLAMELGVQPRQVEVWFQNRRARGKAKRNESDCEVLRQRCQDLLVENHHLSYLIQTERMGYDSRQLSNEGGPLLQMALCNNCKKLRNC

SEQ ID NO: 13879 - protein, 110 aa, Zinnia elegans
KIWFQNRRARTKLKQTEVDCEFLKRCCENLTEENRRLQKELQELKALKLSPQFYMQMAPPTTLTMCPSCERVGAPPSQKSIDHQHRKLPFYPWPTSASQVVQRQMGALHH

SEQ ID NO: 13880 - protein, 284 aa, Arabidopsis thaliana
MMFEKDDLGLSLGLNFPKKQINLKSNPSVSVTPSSSSFGLFRRSSWNESFTSSVPNSDSSQKETRTFIRGIDVNRPPSTAEYGDEDAGVSSPNSTVSSSTGKRSEREEDTDPQGSRGISDDEDGDNSRKKLRLSKDQSAILEETFKDHSTLNPKQKQALAKQLGLRARQVEVWFQNRRARTKLKQTEVDCEFLRRCCENLTEENRRLQKEVTELRALKLSPQFYMHMSPPTTLTMCPSCEHVSVPPPQPQAATSAHHRSLPVNAWAPATRISHGLTFDALRPRS

SEQ ID NO: 13881 - protein, 284 aa, Arabidopsis thaliana
MMFEKDDLGLSLGLNFPKKQINLKSNPSVSVTPSSSSFGLFRRSSWNESFTSSVPNSDSSQKETRTFIRGIDVNRPPSTAEYGDEDAGVSSPNSTVSSSTGKRSEREEDTDPQGSRGISDDEDGDNSRKKLRLSKDQSAILEETFKDHSTLNPKQKQALAKQLGLRARQVEVWFQNRRARTKLKQTEVDCEFLRRCCENLTEENRRLQKEVTELRVLKLSPQFYMHMSPPTTLTMCPSCEHVSVPPPQPQAATSAHHRSLPVNAWAPATRISHGLTFDALRPRS

SEQ ID NO: 13882 - protein, 283 aa, Arabidopsis thaliana
MMMGKEDLGLSLSLGFSQNHNPLQMNLNPNSSLSNNLQRLPWNQTFDPTSDLRKIDVNSFPSTVNCEEDTGVSSPNSTISSTISGKRSEREGISGTGVGSGDDHDEITPDRGYSRGTSDEEEDGGETSRKKLRLSKDQSAFLEETFKEHNTLNPKQKLALAKKLNLTARQVEVWFQNRRARTKLKQTEVDCEYLKRCVEKLTEENRRLQKEAMELRTLKLSPQFYGQMTPPTTLIMCPSCERVGGPSSSNHHHNHRPVSINPWVACAGQVAHGLNFEALRPRS

SEQ ID NO: 13883 - protein, 282 aa, Arabidopsis thaliana
MMMGKEDLGLSLSLGFAQNHPLQLNLKPTSSPMSNLQMFPWNQTLVSSSDQQKQQFLRKIDVNSLPTTVDLEEETGVSSPNSTISSTVSGKRRSTEREGTSGGGCGDDLDITLDRSSSRGTSDEEEDYGGETCRKKLRLSKDQSAVLEDTFKEHNTLNPKQKLALAKKLGLTARQVEVWFQNRRARTKLKQTEVDCEYLKRCVEKLTEENRRLEKEAAELRALKLSPRLYGQMSPPTTLLMCPSCERVAGPSSSNHNQRSVSLSPWLQMAHGSTFDVMRPRS

SEQ ID NO: 13884 - protein, 282 aa, Arabidopsis thaliana
MMMGKEDLGLSLSLGFAQNHPLQLNLKPTSSPMSNLQMFPWNQTLVSSSDQQKQQFLRKIDVNSLPTTVDLEEEIGVSSPNSTISSTVSGKRRSTEREGTSGGGCGDDLDITLDRSSSRGTSDEEEDYGGETCRKKLRLSKDQSAVLEDTFKEHNTLNPKQKLALAKKLGLTARQVEVWFQNRRARTKLKQTEVDCEYLKRCVEKLTEENRRLEKEAAELRALKLSPRLYGQMSPPTTLLMCPSCERVAGPSSSNHNQRSVSLSPWLQMAHGSTFDVMRPRS

SEQ ID NO: 13885 - protein, 315 aa, Arabidopsis thaliana
MSERDDGLGLSLSLSLGFNQKDPSSRLNPMPLASYASSSHMQHMQQSNYNHPQKIQNTWINMFQSSERNSDMRSFLRGIDVNRAPSTVVVDVEDEGAGVSSPNSTVSSVMSGKKSERELMAAAGAVGGGRVEDNEIERASCSLGGGSDDEDGSGNGDDSSRKKLRLSKEQALVLEETFKEHSTLNPKQKMALAKQLNLRTRQVEVWFQNRRARTKLKQTEVDCEYLKRCCENLTDENRRLQKEVSELRALKLSPHLYMHMKPPTTLTMCPSCERVAVTSSSSSVAPPVMNSSSPMGPMSPWAAMPLRQRPAAGSH

SEQ ID NO: 13886 - protein, 315 aa, Arabidopsis thaliana
MSERDDGLGLSLSLSLGFNQKDPSSRLNPMPLASYASSSHMQHMQQSNYNHPQKIQNTWINMFQSSERNSDMRSFLRGIDVNRAPSTVVVDVEDEGAGVSSPNSTVSSVMSGKKSERELMAAAGAVGGGRVEDNEIERASCSLGGGSDDEDGSGNGDDSSRKKLRLSKEQALVLEETFKEHSTLNPKQKMALAKQLNLRTRQVEVWFQNRRQRTKLKQTEVDCEYLKRCCENLTDENRRLQKEVSELRALKLSPHLYMHMKPPTTLTMCPSCERVAVTSSPSSVAPPVMNSSSPMGPMSPWAAMPLRQRPAAGSH

SEQ ID NO: 13887 - protein, 318 aa, Arabidopsis thaliana
MGERDDGLGLSLSLGNSQQKEPSLRLNLMPLTTSSSSSSFQHMHNQNNNSHPQKIHNISWTHLFQSSGIKRTTAERNSDAGSFLRGFNVNRAQSSVAVVDLEEEAAVVSSPNSAVSSLSGNKRDLAVARGGDENEAERASCSRGGGSGGSDDEDGGNGDGSRKKLRLSKDQALVLEETFKEHSTLNPKQKLALAKQLNLRARQVEVWFQNRRARTKLKQTEVDCEYLKRCCDNLTEENRRLQKEVSELRALKLSPHLYMHMTPPTTLTMCPSCERVSSSAATVTAAPSTTTTPTVVGRPSPQRLTPWTAISLQQKSGR

SEQ ID NO: 13888 - protein, 208 aa, Arabidopsis thaliana
NSTISSTISGKRSEREGISGTGVGSGDDHDEITPDRGYSRGTSDEEEDGGETSRKKLRLSKDQSAFLEETFKEHNTLNPKQKLALAKKLNLTARQVEVWFQNRRARTKLKQTEVDCEYLKRCVEKLTEENRRLQKEAMELRTLKLSPQFYGQMTPPTTLIMCPSCERVGGPSSSNHHHNHRPVSINPWVACAGQVAHGLNFEALRPRS

SEQ ID NO: 13889 - protein, 131 aa, Arabidopsis thaliana
EDTDPQGSRGISDDEDGDNSRKKLRLSKDQSAILEETFKDHSTLNPKQKQALAKQLGLRARQVEVWFQNRRARTKLKQTEVDCEFLRRCCENLTEENRRLQKEVTELRALKLSPQFYMHMSPPTTLTMCPS

SEQ ID NO: 13890 - protein, 224 aa, Phaseolus vulgaris
EQMPEKKHRLSSEQVHLLEKSFEEENKLEPERKTQLAKKLGLQPRQVAVWFQNRRARWKTKQLERDFDVLKSSYDTLLSSYDSLMKDNEKLKSEVVSLNEKLQDQAKEVPEEPFYDKKVDPLPVEDIATIFSTRVEDHQSSGSVGSAVVDEGSPQLVVDSVDSYLPADNPGGCVGPVERIQSEEEDGSDDGRSYMDVFVVSETENQNHEEGEALVWWTNMYYVE

SEQ ID NO: 13891 - protein, 311 aa, Oryza sativa (indica cultivar-group)
MEMMVHGRRDEQYGGLGLGLGLGLSLGVAGGAADDEQPPPRRGAAPPPQQQLCGWNGGGLFSSSSSDHRGRSAMMACHDVIEMPFLRGIDVNRAPAAETTTTTARGPSCSEEDEEPGASSPNSTLSSLSGKRGAPSAATAAAAAASDDEDSGGGSRKKLRLSKDQAAVLEDTFKEHNTLNPKQKAALARQLNLKPRQVEVWFQNRRARTKLKQTEVDCELLKRCCETLTDENRRLHRELQELRALKLATAAAAPHHLYGARVPPPTTLTMCPSCERVASAATTTRNNSGAAPARPVPTRPWPPAAAQRSSA

SEQ ID NO: 13892 - protein, 308 aa, Oryza sativa (indica cultivar-group)
MMDLGLSLGLGLASQGSLTSSTTTTSSPGAGSSSPWAAALNSIVGDVRRDQAAAHAAAAVGVGVGGEEMYQGRASTSPDSAAALSSASGKRERELERSGSGVDDDDGADGAGGRKKLRLSKDQAAVLEECFKTHSTLNPKQKVALANRLGLRPRQVEVWFQNRRARTKLKQTEVDCEYLKRWCERLADENKRLEKELADLRALKAAPSPASASAMQPSSSAAATLTMCPSCRRVATAGAPHQPNHQQCHPKSNTTISSSSTAAAAVAVAGGNVLPSHCQFFPAAAAAADRTSQSTWNAAAPLVTRELF

SEQ ID NO: 13893 - protein, 287 aa, Oryza sativa (indica cultivar-group)
TTTTSSPGAGSSSPWAAALNSIVGDVRRDQAAAHAAAAVGVGVGGEEMYQGRASTSPDSAAALSSASGKRERELERSGSGVDDDDGADGAGGRKKLRLSKDQAAVLEECFKTHSTLNPKQKVALANRLGLRPRQVEVWFQNRRARTKLKQTEVDCEYLKRWCERLADENKRLEKELADLRALKAAPSPASASAMQPSSSAAATLTMCPSCRRVATAGAPHQPNHQQCHPKSNITISSSSTAAAAVAVAGGNVLPSHCQFFPAAAAAADRTSQSTWNAAAPLVTRELF

SEQ ID NO: 13894 - protein, 311 aa, Oryza sativa (japonica cultivar-group)
MEMMVHGRRDEQYGGLRLGLGLGLSLGVAGGAADDEQPPPRRGAAPPPQQQLCGWNGGGLFSSSSSDHRGRSAMMACHDVIEMPFLRGIDVNRAPAAETTTTTARGPSCSEEDEEPGASSPNSTLSSLSGKRGAPSAATAAAAAASDDEDSGGGSRKKLRLSKDQAAVLEDTFKEHNTLNPKQKAALARQLNLKPRQVEVWFQNRRARTKLKQTEVDCELLKRCCETLTDENRRLHRELQELRALKLATAAAAPHHLYGARVPPPTTLTMCPSCERVASAATTTRNNSGAAPARPVPTRPWPPAAAQRSSA

SEQ ID NO: 13895 - protein, 282 aa, Craterostigma plantagineum
LGLSLGSFGPSSSGGSHPPPALPLPSNLFRPSLQEIDRTQRSIGAFLQAPTAAAVCREPASAFRGIDVNRPPTIVDCGEENNNPIASPSPNSTVCSSSGKRTSGEREEKEDGDRAASSSFEVEDDDGGGGDASARKKLRLSKEQAVVLEETFKEHSTLNPKEKIALAKQLNLMPRQVEVWFQNRRARTKLKQTEVDCEYLRRCCENLTEENRRLQKEVNELRALKLSPQFYMSPPTTLTMCPQCERVAAQPSSAAAIRPPSHHQRPAAGMNSWAAMISPRPS

SEQ ID NO: 13896 - protein, 236 aa, Helianthus annuus
MDFHGFAEHALELRLSTTSSVAENTTNPIKKPSPSSDHCLEPSLTLALSGDSCGGSSFSIASAKREREVPSEESERGGENTSGEEDEDGGVNGKKKLRLTKAQSGLLEEAFKLHTTLNPKQKQELARDLKLRPRQVEVWFQNRRARTKLKQTEVDCEYLKRCCNTLTDENQRLRQEVQELKAQKVSPALYMQLPTTTLTVCPSCEQIGDTKSATSKNPCTKKPSFFNPFTSSSAAC

SEQ ID NO: 13897 - protein, 302 aa, Pimpinella brachycarpa
MMIHQREDHLGLSLSLSSPAHRPSSSSSPLQLNLAPSMPTPSTPPFNLFHKKETSDGYILDACRVETRSFLKGIDVNRLPATTVDMEEEAGVSSPNSTISSVSGKRSLERSENGNGDDLLDCSRGLINSDEEDGDNSRKKLRLSKDQSAILEDSFKEHNTLNPKQKLALAKRLGLRPRQVEVWFQNRRARTKLKQTEVDCEFLKRCCENLTDENRRLMKEVQELRALKLSPQFYMQMTPPTTLTMCPSCERVSAPPSSSTGPSSTPVETPRPHHSGSSHHRVAFNPWAIAPAGHRSFDAVPH

SEQ ID NO: 13898 - protein, 319 aa, Pimpinella brachycarpa
MMVQERDELGLSLSLSFPGSSHEQNKSNTTNNKHNQMPHASTPLELNLMPSQPLNLLHNNTTTTWTHPASHDRKMEACRVDRRSLLTGIDVNRIPAMTVDMEEETGVSSPNSTISSLSGNKRSLVNERSELANGDEILECSRSDDEDGDNSRKKLRLTKDQSAILEESFKEHNTLNPKQKIALAKRLGLRPRQVEVWFQNRRARTKLKQTEVDCEFLKRCCQTLTEENRKLQKEVQELRALKSSPQFYMQMTPPTTLTMCPSCERVGGLQSATTTSSAGPSITQAEPLRSHPMNSNHHRLPFNPWASPQRPLDALHPRS

SEQ ID NO: 13899 - protein, 318 aa, Pimpinella brachycarpa
MMVQQRDELGLSLSLSFPGSSHEQNKSNTTNNKHNQMPHASTPLELNLMPSQPLNLLHNNTTTWTHPASHDRKMEACRVDRRSLLTGIDVNRIPAMTVDMEEETGVSSPNSTISSLSGNKRSLVNERSELANGDEILESSRSDDEDGDNSRKKLRLTKDQSAILEESFKEHNTLNPKQKIALAKRLGLRPRQVEVWFQNRRARTKLKQTEVDCEFLKRCCQTLTEENRKLQKEVQELRALKSSPQFYMQMTPPTTLTMCPSCERVGGLQSATTTLSAGPSITQAEPLRSHPMSSNHHRLPFNPWASPQRPLDALHPRS

SEQ ID NO: 13900 - protein, 311 aa, Oryza sativa; identical to SEQ ID NO: 13891

SEQ ID NO: 13901 - protein, 314 aa, Oryza sativa
EESMEMMVHGRRDEQYGGLGLGLGLGLSLGVAGGAADDEQPPPRRGAAPPPQQQLCGWNGGGLFSSSSSDHRGRSAMMACHDVIEMPFLRGIDVNRAPAAETTTTTARGPSCSEEDEEPGASSPNSTLSSLSGKRGAPSAATAAAAAASDDEDSGGGSRKKLRLSKDQAAVLEDTFKEHNTLNPKQKAALARQLNLKPRQVEVWFQNRRARTKLKQTEVDCELLKRCCETLTDENRRLHRELQELRALKLATAAAAPHHLYGARVPPPTTLTMCPSCERVASAATTTRNNSGAAPARPVPTRPWPPAAAQRSSA

SEQ ID NO: 13902 - protein, 203 aa, Oryza sativa
  unsure (1)..(203): unsure at all Xaa locations
MERAEDLRLSLSLSCLRGGGGSDEEDGGCGIDGSRKKLRLSKDQSAVLEDSFREHPTLNPRQKATLAQQLGLRPRQVEVWFQNRRARTKLKQTEVDCEFLKRCCETLTEENRRLQKEVQELRALKLVSPHLYMNMSPPTTLTMCPSCERVSNTNNNSXAPPPPPTAAASGLLLPQAAAASSTPPPTGASSATARSPSGRSSHX

SEQ ID NO: 13903 - protein, 292 aa, Triticum aestivum
  unsure (1)..(292): unsure at all Xaa locations
MELGLSLGEAMADAGRELVLGLGVGVGVGPGAAREGEGRRDHDVAAAARGGLALGCGSSPEPAMRLALLPMVPSLGFPWPSESRHLEASTRGFDVNQAPSSGGSAWGACAAAEEEQEDTAAAARAAVSSSPNDSGGSFPMDFSARGASDAAPGAGGSRGSDEDDGRSARKKLRLSKEQAAFLEESFKEHSTLNPRQKVALAKQLNLRPRQVEVWFQNRRAXTKLKQTEVDCEYLKRCCETLTEENRRLQKXLAELRALKTVHPFYMHLPATTLSMCPSCERVASNSAPASAA

SEQ ID NO: 13904 - protein, 295 aa, Triticum aestivum
  unsure (1)..(295): unsure at all Xaa locations
HHITSPPPSTATVPSSILYTGVLSDRARQRSMMHHAAGLDLDLGPGLGLASQGSLTSSTTTTSSSPASMSRERHQCRDQEGDEDDGGGDGAGGRKNLRMSKDQSAVLEECFKTHSALNPKQNKALANRLGLRPQQVEVWFHNRRARTKLKQTXVDCEYMKRXCEQLTEXNKRLEKEVAELRALKAAPQAHNGASEGPLTTLTMSLSRKRVASTSSPMPAPACQCHPSSNSSVRSETPERCMVVLRGSRRWSSHRRSYVCDTAMISMPSKLTEMTALSQLTNLSKSSRKFKKKKKK

SEQ ID NO: 13905 - protein, 227 aa, Triticum aestivum
  unsure (1)..(227): unsure at all Xaa locations
LVQYNGASEPGSWXXEPWPGXLVSRPSQPSFWYSGGNVAADQEVGPTPTAAAVEERRCSPGSPASSGSGSGLKRGAERSAGSGDEDQDDDGGNARKKLRLSKDQAAVLEECFKTHHTLTPKQKLALANSLGLRPRQVEXVWFQNRSXARTKLKQTXEVDCEYMKRXWCEQLAEQNRRLEKEVAELRALKAAPAGAXXTAPRRGPFTTLTMCLSCKRVASTSGGPVPN

SEQ ID NO: 13906 - protein, 325 aa, Zea mays
  unsure (1)..(325): unsure at all Xaa locations
MDIMAHARDEEQYGNNHLGLGLSLSLGLGVATAAPVEVEPPPPPAAAAAPAPQWWKWNGPGLFFGTTMDHQQQQQPAAARHGHEMPFLRGVDVNRAPAGETRRGSCSEDDEEPGASSPNSTLSSSLSGKRAAPARSGGEVADHTPRAGGGSDDEDSGGGSRKKLRLSKDQAAVLEESFKEHNTLNPKQKAALAKQLNLKPRQVEVWFQNRRARTKLKQTEVDCEFLKRCCETLTEENRRLQREVAELRVLKLVAPHHYARMPPPTTLTMCPSCERLASASASADQAGRAGPCWGPLPVFVDGPARRPXSTTTIWHEMDALANRYR

SEQ ID NO: 13907 - protein, 324 aa, Zea mays
  unsure (1)..(324): unsure at all Xaa locations
MDIMAHARDEEQYGNNHLGLGLSLSLGLGVATAAPVEVEPPPRRAHHLPPRAXQWWKWNGPGLFFGTTMDQQQQPAAARHGHEMPFLRGVDVNRAPAGDTRRGSCSEDDEEPGASSPNSTLSSSLSGKRAAPARSGGEVADHTPRAGGGSDDEDSGGGSRKKLRLSKDQAAVLEESFKEHNTLNPKQKAALAKQLNLKPRQVEVWFQNRRARTKLKQTEVDCEFLKRCCETLTEENRRLQREVAELRVLKLVAPHHYARMPPPTTLTMCPSCERLASASASADQAGRAGPCWGPLPVFVDGPARRPXSTTTIWHEMDALANRYR

SEQ ID NO: 13908 - protein, 310 aa, Brassica rapa subsp. pekinensis
MMKRLSSSDSVGGLISLCPTTSTDQPSPRRYGREFQSMLEGYEEEEEEAVTEERGQTGLAEKKRRLSINQVKALEKNFELENKLEPERKVKLALELGLQPRQVAVWFQNRRARWKTKQLEKDYGVLKTQYDSLRHNFDSLRRDNESLLQEIGKLKAKLNGEEEVEKMMKMENNAVTMECDVSVKEEEVSLPEELTDPPSSPPQALEHSDSFNYRSFTDLRDLLSLKAAASSVAAAGSSDSSDSRAVLNEESSSNVTAGPVTVPQGGFLQFVKMEQTEDHDDFLSGEEACGFFSEEQPPSLHWYSTVDQWN

SEQ ID NO: 13909 - protein, 139 aa, Arabidopsis lyrata subsp. petraea
STGKRSEREEDTDPQGSRGISDDEDGDNSRKKLRLSKDQSVILEETFKDHSTLNPKQKQALAKQLGLRARQVEVWFQNRRARTKLKQTEVDCEFLRRCCENLTEENRRLQKEVTELRALKLSPQFYMHMSPPTTLTMCP

SEQ ID NO: 13910 - protein, 113 aa, Arabidopsis lyrata subsp. petraea
STGKRSEREEDTDPQGSRGISDDEDGDNSRKKLRLSKDQSVILEETFKDHSTLNPKQKQALAKQLGLRARQVEVWFQNRRARTKLKQTEVDCEFLRRCCENLTEENRRLQKEV

SEQ ID NO: 13911 - protein, 289 aa, Capsella rubella
MMLEKDDLGLSLGLNYPKKQMNLNSNPSVSVTPSSSSFGLLRRSSLNESFTSSVPNSDSSQKETRTFIRGIDVNRPPSTAEYGEEDAGVSSPNSTVSSSTGKRSEREEDTDPQGSRGGISDDEDGDNSRKKLRLSKDQSAILEETFKDHSTLNPKQKQALAKQLGLRARQVEVWFQNRRARTKLKQTEVDCEFLRRCCENLTEENRRLQKEVTELRALKLSPQFYMHMSPPTTLTMCPSCEHVSAPPPQQPPQAATSAQHHRGSLPVNAWAQGTRISHGLTFDALRPRS

SEQ ID NO: 13912 - protein, 561 aa, Arabidopsis thaliana
MSGRSAFSRTGGFRPENLGQNAVSLIGSIGFSVLVIGVVVFTIIAATYEPEDPLFHPSDKITTFLTSNSNATLKSDDSIVKTGEDFMAANQTAFGGFINIADVETSENDSDGNQLDCDTNIPIDCKDPEVFHLMMKATMEKFKDSHFYKFGKPVIVEGSSSSCDMAWRYRPKDGKAAAFYKDYRRFVIEKSGNCSVSVMGIGEYHSGVNARKRKRPGFRNSSGGKVDDFALPVVGEAVNDSLPVVESENVFKEGHYLVYSGGGDRCKSMNHFLWSFLCALGEAQYLNRTLVMDLTLCLSSVYTLSGQNEEGKDFRFYFDFEHLKEAASMLDQVQFWADWGKWYKKNGLKLHLVEDFRVTPMKLVDVKDTLIMRKFGTVEPDNYWYRVCEGETESVVQRPWNLLWKSKRLMEIVSAIASRLNWDYDAIHIERGDKARNKEVWPNLEKDTSPSSILSTLQDKIEQGRNLYIATNEPELSFFNPLKDKYKPHFLDEFKDLWDESSEWYSETTKLNGGNPVEFDGYMRASVDTEVFLRGKKQIETFNDLTNDCRDGIGTCNVAAS

SEQ ID NO: 13913 - protein, 568 aa, Arabidopsis thaliana
MFGRSAIRGGGFRAENLGQNALTLIGNIGFSLFVFGVLIFTIIAATYEPEDPLFHPSDKITTFLTSTSNATLRSDDSVVKTGEDFMLANQTAFAEFININDVEASTNETTTEEEGNKLECDVNTPIDCKDQQVFHLMMRATIDKFKDIHFYKFGKPVTGEEGVNSCDMAWRYRPRDGKSAAFYKDYRRFVVAKSENCSVSVVGIGEYHSGLNARKRKKNQKAGFEKTGGKKDDFSLPVVGELVNDSLPMVESDSVFKTGKYLVYVGGGDRCKSMNHFLWSFLCALGEAQYLNRTLVMDLTLCLSSIYTSSGQNEEGKDFRFYFDFEHLKEAASVLDEAQFWAQWGKLRKKRRNRLNLHLVEDFRVTPMKLAAVKDTLIMRKFGSVEPDNYWYRVCEGDAESVVKRPWHLLWKSRRLMEIVSAIASRLNWDYDAVHIERGEKARNKEVWPNLEADTSPSALLSTLQDKVEEGRHLYIATNEGELSFFNPLKDKYATHFLYDYKDLWDESSEWYSETTKLNGGNPVEFDGYMRASVDTEVFLRGKKQIETFNDLTNDCKDGVGTCNAATS

SEQ ID NO: 13914 - protein, 560 aa, Glycine max
MLGRAAFSRTGSFRPENLGQNAMAMIGNVCFSFFVIGVLVFTIMAATYEPEDPLFHPSTKITTFLTSKSNATFKSDNSVVRTGEDFMAANETAFGSIINSTDVDTSAEIIDAGDAECDVSGPIDCKDPEVFHLMMRATIDKFQDIHFYRFGKPAPGSNDSTCDMAWRFRPKEGKAAAFYKDYRRFVIDRSANCSLSVVSIGEYHTGVNARKRKKPGLEKTPLDMYQANTLPVVGEIVNDSLPVVESESSFSHGKYLLYEGGGDRCKSMNHYLWSFLCALGEAQYLNRTLIMDLSICLSSIYTSSKQDEEGKDFRFYFDFEHLKEAASVLDKEQFWADWNQWQQKDGMSLHLVEDFRVTPMKLMDVKDALIMRKFGSVEPDNYWYRVCEGETESVVQRPWHLLWKSRRLMDIVSAISSKLNWDYDSVHVVRGEKARNKELWPNLDAHTSPDALLSTLRDKIDEGRNLYIATNEPDTSFFDPLKDKYTTHFLDEYTELWDENSEWYSETTKLNNGIPVEFDGYMRVSIDTEVFFRGKKQLETFNDLTSDCKDGINTCNVAAN

SEQ ID NO: 13915 - protein, 561 aa, Glycine max
MLGRAAFSRTGSFRPENLGQNAMAMIGNVCFSFFVIGVLVFTIMAATYEPEDPLFHPSTKITTFLTSKSNATFKSDNSVVRTGEDFMAANETAFGSIINSTDVDTSAEIIDAGDAECDVSGPIDCKDPEVFHLMMRATIDKFQDIHFYRFGKPAPGSNDSTSCDMAWRFRPKEGKAAAFYKDNRRFVIDRSANCSLSVVSIGEYHTGVNARKRKKPGLEKTPLDMYQANTLPVVGEIVNDSLPVVESESSFSHGKYLLYEGGGDRCKSMNHYLWSFLCALGEAQYLNRTLIMDLSICLSSIYTSSKQDEEGKDFRFYFDFEHLKEAASVLDKEQFWADWNQWQQKDGMSLHLVEDFRVTPMKLMDVKDALIMRKFGSVEPDNYWYRVCEGETESVVQRPWHLLWKSRRLMDIVSAISSKLNWDYDSVHVVRGEKARNKELWPNLDAHTSPDALLSTLRDKIDEGRNLYIATNEPDTSFFDPLKDKYTTHFLDEYTELWDENSEWYSETTKLNNGIPVEFDGYMRVSIDTEVFFRGKKQLETFNDLTSDCKDGINTCNVAAN

SEQ ID NO: 13916 - protein, 161 aa, Glycine max
  unsure (1)..(161): unsure at all Xaa locations
SSXLRRPPPRKFGNFEPDNYWSRVCEGETEGIIKRPWHFLWKSRRLMEIVSAIASRMNWDFDSVHVVRGEKAQNTQLWPNLDRDTSPDSLLMALNDKVGAGRYLYIATNEPEKSFFNPLKEKYKTHFLDDFKYLWDENSEWFTETKELSNGQPVEFDGYMX

SEQ ID NO: 13917 - protein, 571 aa, Oryza sativa
  unsure (1)..(571): unsure at all Xaa locations
AGPGGGAVRGAVARRRRDRDRDRDRPARRAALRGXNLLFALFVAAVLAFTLLAAVHSPDDPLLHPSSHQLTAFLTSATSNSTFLADDSVLRTGEDFAAAIGANSSDAAAAAEATVAEENPIVEAVSCDTEAPVDCRDKDLFNLLMRTAIEKFSDLHFYRFGRPVAVPGSPMECDLAWRFRPADNGRTTYYKDYRRFTLTRDVNTCNLVVGNVGEYHSGTGAKRSGRRKGKKGKKGKREAPPELVVGEAVNDNLPVVESESEFSRGKYLIYMGGGERCKSMNHYVWGFLCALGEAQYLNRTLVMDLNVCLNSRYTSSGKDEERDFRLYFDFEHLKQSASVIDQSQFWTDWGKWHKKDRLKNHYTEDIKVTPMQLRDVKDTLIMRKFGNVEPDNFWSRVCEGETEAVIKRPWYLLWKSRRLMEIVSAISSRMDWDFDSVHVVRGEKAQNKQLWPNLDRDTSPDSLLTTLNDKVGAGRHLYIATNEPDKSFFDPMKGKYRTHFLDDFKDLWDENSEWYTETKELSNGNAVEFDGYMRVAVDTEVFLRGKRKLETFSDLTRDCKNGVNTCPASSX

SEQ ID NO: 13918 - protein, 534 aa, Oryza sativa
  unsure (1)..(534): unsure at all Xaa locations
AGPGGGAVRGAVARRRRDRDRDRDRPARRAALRGXNLLFALFVAAVLAFTLLAAVHSPDDPLLHPSSHQLTAFLTSATSNSTFLADDSVLRTGEDFAAAIGANSSDAAAAAEATVAEENPIVEAVSCDTEAPVDCRDKDLFNLLMRTAIEKFSDLHFYRFGRPVAVPGSPMECDLAWRFRPADNGRTTYYKDYRRFTLTRDVNTCNLVVGNVGEYHSGTGAKRSGRRKGKKGKKGKREAPPELVVGEAVNDNLPVVESESEFSRGKYLIYMGGGERCKSMNHYVWGFLCALGEAQYLNRTLVMDLNVCLNSRYTSSGKDEERDFRLYFDFEHLKQSASVIDQSQFWTDWGKWHKKDRLKNHYTEDIKVTPMQLRDVKDTLIMRKFGNVEPDNFWSRVCEVHVVRGEKAQNKQLWPNLDRDTSPDSLLTTLNDKVGAGRHLYIATNEPDKSFFDPMKGKYRTHFLDDFKDLWDENSEWYTETKELSNGNAVEFDGYMRVAVDTEVFLRGKRKLETFSDLTRDCKNGVNTCPASSX

SEQ ID NO: 13919 - protein, 391 aa, Oryza sativa
  unsure (1)..(391): unsure at all Xaa locations
NCGSPGCRVGEYHSRSGAXPCGRRKGKKGKKGKREAPVTDFPELVVGEAVNDNLPVVESESEFSRGKYLIYMGGGERCKSMNHYVWGFLCALGEAQYLNRTLVMDLNVCLNSRYTSSGKDEERDFRLYFDFEHLKQSASVIDQSQFWTDWGKWHKKDRLKNHYTEDIKVTPMQLRDVKDTLIMXRKFGNVEPDNFWSRVCEGETEAVIKRPWYLLWXKSRRLMXRLASAIXSSRMERDFGSVHVGXRGEKAQNKQLWPNLDRDTSPDSLLTTLNDKVGAGPPSGPSHHEPDKSFFDPMKGKYRTHFLDDFKDLWDENSEWYTETKELSNGNAVEFDGYMRVAVDTEVFLRGKRKLETFSDLTRDCKNGVNTCPASSXTSRELCALSLKCCA

SEQ ID NO: 13920 - protein, 311 aa, Triticum aestivum
  unsure (1)..(311): unsure at all Xaa locations
XXIYMGGGERCKRMNHYIWGFLCALGEAQFLNRTLVMDFNVCLNSRYTASGKDGEXXDYRLYFDFEHLKESASVIDQSQFWTDWGKWHKKDRLKNHYTEDXYKVTPMKLRDVKDTLIMRKFGHVEPDNYWSRVCEGETEAMIKRPWHFLWKSGRLMEIVSAIASRMSWDFDSMHVVRGEKAQNTQLWPNLDADTSPENLLTTLNDKVGAGRYLYIATDESDKSFFDPLKNKYKTRFXLDDFKDLWDENSEWYVETKELNNGNPVEFDGYMRVAVDTEVFLRGKRKLETFNDLTRDCKDGVNTCAAASXIPD

SEQ ID NO: 13921 - protein, 532 aa, Mus musculus
MLLLWLLLLLLLLVPLLAILWQQRSRGARPCWLISLQHRVAWGMLGWAAAWQQWRLDRSTLNVGQSQQQALMWCLKKAQGSCCLPREDTDMRTFRNHLPLTQTSHTQEQESEETLPSPASPQYHGDASLQATLLGLITLNKAYPEALAPGSTACVTPTSPWPCSVPWLGHALGRVSPDGAKDPRTLLLEALISPGLRVLEARTAVELLDVFVGLEADGEELAEAIAAGILGTLLPKRAAELKEALEQGPRGLARRLWPKLQVVVTLDSGGQAEAVAALRVLWCQGLAFFSPAYAASGGVVALNLWPERPQGSYLLPPGVPFIELLPIKEGTQEEAASTLLLTDAQREKEYELVLTNHTSLTRCRLGDVVQVVGTYNQCPVVRFTCRLGQTLNVRGEVTDETVFSVALAQAVGQWPGAKLLDHVCVESRVLDSCEGSAPHYEVFVELRGLRNLSEENRDKLDNCLQEASAQYKSLRFRGSVGPAKVHLVRPGSFRVLREALAAFSSSSCRPPEMPRVIRLRHLAQLLQKRVIS

SEQ ID NO: 13922 - protein, 532 aa, Mus musculus
MLLLWLLLLLLLLVPLLAILWQQRARGARPCWLISLQHRVAWGMLGWAAAWQQWRLDRSTLNVGQSQQQALMWCLKKAQGSCCLPREDTDMRTFRNHLPLTQTSHTQEQESEETLPSPASPQYHGDASLQATLLGLITLNKAYPEALAPGSTACVTPTSPWPCSVPWLGHALGRVSPDGAKDPRTLLLEALISPGLRVLEARTAVELLDVFVGLEADGEELAEAIAAGILGTLLPKRAAELKEALEQGPRGLARRLWPKLQVVVTLDSGGQAEAVAALRVLWCQGLAFFSPAYAASGGVVALNLWPERPQGSYLLPPGVPFIELLPIKEGTQEEAASTLLLTDAQREKEYELVLTNHTSLTRCRLGDVVQVVGTYNQCPVVRFTCRLGQTLNVRGEVTDETVFSVALAQAVGQWPGAKLLDHVCVESRVLDSCEGSAPHYEVFVELRGLRNLSEENRDKLDNCLQEASAQYKSLRFRGSVGPAKVHLVRPGSFRVLREALAAFSSSSCRPPEMPRVIRLRHLAQLLQKRVIS

SEQ ID NO: 13923 - protein, 510 aa, Rattus norvegicus
MLCQQRSPGARPCWLISLQHRVACVVLSWAAAWQRRKLEQSTLNVSQSQQQALMGCLKEAQGSCCLPRENTDMTTFRNLPLTKTSHTQQKESEEKLLPPTLPQYHGDASLQATLLGLMTLNKAYPEVLAPGSTACVTPTSPWPYSVPWLGHALGRVSPIGAKDARTLLLEALISPGLRVLEARTAVELLDVFVGLEADGEELAEVIASGSLGKLPRRAAELQEALEQGPRGLALRLWPKLQVVVTLDAGGQAEAVAALRVLWCQGLAFFSPAYAASGGVMALNLWPEQPQGSYLLSPGVPFIELLPIKEGTQEEAASTLLLTDVRREEKYELVLTDSTSLTRCRLGDVVQVIGTYNQCPVVRFTCRLGQTLSVRGEVTDENVFSVALAQAVGQWPGAKLLDHVCVESHILDSYEGSAPHYEVFVELRGLRNLSEENRDKLDHCLQEASPRYKSLRFWGSVGPAKVHLVRPGSFRVLREALAACPSSSCPEMPRVLRLRHLAQLLQKRVIP

SEQ ID NO: 13924 - protein, 563 aa, Clostridium acetobutylicum
MSKVIYKISIDLGGIVKRNFEKETKNCGKVNEEVLFKILKSNDKSEIGIKFKFKDIKSIRQFKDSVPITEYKDYEKYINRMADGEGNVLMSEKVEYFGHTSGTTGKQKLVPCTKNSRRRASKYMALLVNRFCYDNFKENWNYARGMMIADIVMTTYTKGKIPICSATSGGMKGIKHLLPYLYTSPIEVMEIKDKETALYLHLLFGLEEEELLYISGVFISNILDLFRTLEKNNKALVRDIQKGSISEELNIDEGLRKVLNKKLKPNNKRAMELEKEFKKGFKGIAKRIWPNLLYIASVTGANFSIYNDKVYYYIDSIPIYSAAYGSTEAMIGINPYASKVLYVITPSAVFYEFIPIGEKGEESFDTLLLSELKLGGRYEVVITNYAGLYRYKIGDVVKVVGFYNKCPEIEFLYRKNQVLNMAAEKTNEEHLTYAIKNTIKKLNLDLVDYTTEPDNSITPGRYIFYFEFRNNMYGFSTEKLQNILDDELRVSNLAYNRARNNKKLGMLKVEVLAPNTFDLIKEALFNKGISKNQIKIPRVIINNKIVMDIINRNKIKFVKKSVI

SEQ ID NO: 13925 - protein, 503 aa, Bacteroides thetaiotaomicron VPI-5482
MNITKIISKTFDSRLKQIDLYASQASEIQHRVLSRLVNQAAQTEWGKKYDYASIRSYEDFRNRLPIQTYEEIKPYVERLRAGEQNLLWPSEIRWFAKSSGTTNDKSKFLPVSKEALEDIHYRGGKDAAALYFRINPDSHFFSGKGLILGGSHSPNLNSNHSLVGDLSAILIQNVNPLINFIRVPSKKIALMSEWETKIEAIANSTIPVNVTSLSGVPSWMLVLIKRILEKTGKQTLEEVWPNLEVFFHGGVAFTPYREQYKQVIHSKMMHYVETYNASEGYFGTQNDLSDPAMLLMIDYGIFYEFVPLEEVDKENPRAYCLEEVELNKNYAMVISTSCGLWRYMIGDTVKFTNKNPYKFVITGRTKHFINAFGEELIVDNAEKGLAKACAETGAQVCEYSAAPVFMDEHAKCRHQWLIEFAKMPDSVEKFAAILDATLKEVNSDYEAKRWKDIALQPLEVIVARPGLFHDWLARKGKLGGQHKVPRLSNTREYIESMLVLNNE

SEQ ID NO: 13926 - protein, 599 aa, Physcomitrella patens
MALRIENPYYKLLDTDEEIVEDFELMSRNARETQLELLRKILERNANVEYLQRQGLNGRTDEASFKACVPVSTYANIEADVDRIADGDTSPICCVDPPTSFALSSGTTGGKCKLIPRTDALLAQAMKAGQIGSVYRRRAFPRKHEGPPVVMSFQYAGRQFDTKSGLKAGTGTTNFYRSAAFKNAKSAPFSATSPVDIVLGYDVPQQMYCHLLCGLYRCQEVEQMSAIFAYMIVEPFRLLERVWRDICKDIREGTVNERVSDPELRSSVLKVLSPNPELADLIERECAKGWSGIIERLFPNINYIMSIFSGSMLPYVAPMRQYAGSVPLMNADYGASEAWIGINLDPRCPAEDASFTIIPNFAYFEFIPVNRDSAGYDSVEGDEIVGLTDVKVGQEYEIVLTTVGGLYRYRLGDIVKVTGFFNSTPKVAFVCRKGVVLSVNTDKTDEEELRLVVGKASLLLKESNMELADYSSYTDQDSQPGHYVIFWELRSHEHLDMDLLSECCKVLDQSFNNPYMRGRAARTIGPLELAIVKEGAFARLMEQFVRKNGVGASQYKVSRCFKNPATLKHFRDETIATLRSPDFPPELLAAWRPSTKIVG

SEQ ID NO: 13927 - protein, 590 aa, Arabidopsis thaliana
MAVDSNLSSPLGPPACEKDAKALRFIEEMTRNADTVQENLLAEILARNADTEYLRRFNLCGATDRDTFKTKIPVITYEDLQPEIQRIADGDRSPILSAHPISEFLTSSGTSAGERKLMPTIKEELDRRQLLYSLLMPVMNLYVPGLDKGKGMYFLFVKSETKTPGGLPARPVLTSYYKSEHFRSRPYDPYNVYTSPNEAILCPDSFQSMYTQMLCGLLDRLSVLRVGAVFASGLLRAIRFLQLHWSRFAHDIELGCLDSEITDPSIRQCMSGILKPDPVLAEFIRRECKSDNWEKIITRIWPNTKYLDVIVTGAMAQYIPTLEYYSGGLPMACTMYASSECYFGLNLNPMSKPSEVSYTIMPNMAYFEFIPLGGTKAVELVDVNIGKEYELVVTTYAGLCRYRVGDILRVTGFHNSAPQFHFVRRKNVLLSIDSDKTDESELQKAVENASSILHEECGSRVAEYTSYADTSTIPGHYVLYWELLVRDGARQPSHETLTRCCLGMEESLNSVYRQSRVADNSVGPLEIRVVRNGTFEELMDYAISRGASINQYKVPRCVNFTPIVELLDSRVVSAHFSPSLPHWTPERRRR

SEQ ID NO: 13928 - protein, 595 aa, Arabidopsis thaliana
MTVDSALRSPMMHSPSTKDVKALRFIEEMTRNVDFVQKKVIREILSRNSDTEYLKRFGLKGFTDRKTFKTKVPVVIYDDLKPEIQRIANGDRSMILSSYPITEFLTSSGTSAGERKLMPTIDEDMDRRQLLYSLLMPVMNLYVPGLDKGKALYFLFVKTESKTPGGLPARPVLTSYYKSEQFKRRPNDPYNVYTSPNEAILCPDSSQSMYTQMLCGLLMRHEVLRLGAVFASGLLRAIGFLQTNWKELADDISTGTLSSRISDPAIKESMSKILTKPDQELADFITSVCGQDNSWEGIITKIWPNTKYLDVIVTGAMAQYIPMLEYYSGGLPMACTMYASSESYFGINLKPMCKPSEVSYTIMPNMAYFEFLPHHEVPTEKSELVELADVEVGKEYELVITTYAGLNRYRVGDILQVTGFYNSAPQFKFVRRKNVLLSIESDKTDEAELQSAVENASLLLGEQGTRVIEYTSYAETKTIPGHYVIYWELLVKDQTNPPNDEVMARCCLEMEESLNSVYRQSRVADKSIGPLEIRVVKNGTFEELMDYAISRGASINQYKVPRCVSFTPIMELLDSRVVSTHFSPALPHWSPERRR

SEQ ID NO: 13929 - protein, 603 aa, Arabidopsis thaliana
MAVDSPLQSRMVSATTSEKDVKALKFIEEMTRNPDSVQEKVLGEILTRNSNTEYLKRFDLDGVVDRKTFKSKVPVVTYEDLKPEIQRISNGDCSPILSSHPITEFLTSSGTSAGERKLMPTIEEDLDRRQLLYSLLMPVMNLYVPGLDKGKGLYFLFVKSESKTSGGLPARPVLTSYYKSDHFKRRPYDPYNVYTSPNEAILCSDSSQSMYAQMLCGLLMRHEVLRLGAVFASGLLRAISFLQNNWKELARDISTGTLSSRIFDPAIKNRMSKILTKPDQELAEFLVGVCSQENWEGIITKIWPNTKYLDVIVTGAMAQYIPTLEYYSGGLPMACTMYASSESYFGINLKPMCKPSEVSYTIMPNMAYFEFLPHNHDGDGAAEASLDETSLVELANVEVGKEYELVITTYAGLYRYRVGDILRVTGFHNSAPQFKFIRRKNVLLSVESDKTDEAELQKAVENASRLFAEQGTRVIEYTSYAETKTIPGHYVIYWELLGRDQSNALMSEEVMAKCCLEMEESLNSVYRQSRVADKSIGPLEIRVVRNGTFEELMDYAISRGASINQYKVPRCVSFTPIMELLDSRVVSAHFSPSLPHWSPERRR

SEQ ID NO: 13930 - protein, 597 aa, Arabidopsis thaliana
MAVDSLLQSGMASPTTSETEVKALKFIEEITRNPDSVQEKVLGEILSRNSNTEYLKRFDLNGAVDRKSFKSKVPVVIYEDLKTDIQRISNGDRSPILSSHPITEFLTSSGTSAGERKLMPTIEEDINRRQLLGNLLMPVMNLYVPGLDKGKGLYFLFVKSESTTSGGLPARPALTSYYKSDYFRTSDSDSVYTSPKEAILCCDSSQSMYTQMLCGLLMRHEVNRLGAVFPSGLLRAISFLQNNWKELSQDISTGTLSSKIFDHAIKTRMSNILNKPDQELAEFLIGVCSQENWEGIITKIWPNTKYLDVIVTGAMAEYIPMLEYYSGGLPMASMIYASSESYFGINLNPMCKPSEVSYTIFPNMAYFEFLPHNHDGDGGVEATSLVELADVEVGKEYELVITTYAGLYRYRVGDILRVTGFHNSAPQFKFIRRENVLLSIESDKTDEADLQKAVENASRLLAEQGTRVIEYTSYADTKTIPGHYVIYWELLSRDQSNALPSDEVMAKCCLEMEESLNAVYRQSRVSDKSIGPLEIRVVQNGTFEELMDFSISRGSSINQYKVPRCVSLTPIMKLLDSRVVSAHFSPSLPHWSPERRH

SEQ ID NO: 13931 - protein, 612 aa, Arabidopsis thaliana
MPEAPKIAALEVSDESLAEKNKNKLQFIEDVTTNADDVQRRVLEEILSRNADVEYLKRHGLEGRTDRETFKHIMPVVTYEDIQPEINRIANGDKSQVLCSNPISEFLTSSGTSGGERKLMPTIEEELDRRSLLYSLLMPVMDQFVPGLDKGKGMYFLFIKSESKTPGGLPARPVLTSYYKSSHFKNRPYDPYTNYTSPNQTILCSDSYQSMYSQMLCGLCQHKEVLRVGAVFASGFIRAIKFLEKHWPELARDIRTGTLSSEITDSSVREAVGEILKPDPKLADFVESECRKTSWQGIITRLWPNTKYVDVIVTGTMSQYIPTLDYYSNGLPLVCTMYASSECYFGVNLRPLCKPSEVSYTLIPNMAYFEFLPVHRNSGVTSSISLPKALTEKEQQELVDLVDVKLGQEYELVVTTYAGLYRYRVGDVLSVAGFKNNAPQFSFICRKNVVLSIDSDKTDEVELQNAVKNAVTHLVPFDASLSEYTSYADTSSIPGHYVLFWELCLNGNTPIPPSVFEDCCLTIEESLNSVYRQGRVSDKSIGPLEIKMVESGTFDKLMDYAISLGASINQYKTPRCVKFAPIIELLNSRVVDSYFSPKCPKWSPGHKQWGSN

SEQ ID NO: 13932 - protein, 612 aa, Arabidopsis thaliana
MPEAPKIAALEVSDESLAEKNKNKLQFIEDVTTNADDVQRRVLEEILSRNADVEYLKRHGLEGRTDRETFKHIMPVVTYEDIQPEINRIANGDKSQVLCSNPISEFLTSSGTSGGERKLMPTIEEELDRRSLLYSLLMPVMDQFVPGLDKGKGMYFLFIKSESKTPGGLPARPVLTSYYKSSHFKNRPYDPYTNYTSPNQTILCSDSYQSMYSQMLCGLCQHKEVLRVGAVFASGFIRAIKFLEKHWPELARDIRTGTLSSEITDSSVREAVGEILKPDPKLADFVESECRKTSWQGIITRLWPNTKYVDVIVTGTMSQYIPTLDYYSNGLPLVCTMYASSECYFGVNLRPLCKPSEVSYTLIPNMAYFEFLPVHRNSGVTSSISLPKALTEKEQQELVDLVDVKLGQEYELVVTTYAGLYRYRVGDVLSVAGFKNNAPQFSFICRKNVVLSIDSDKTDEVELQNAVKNAVTHLVPFDASLSEYTSYADTSSIPGHYVLFWELCLNGNTPIPPSVFEDCCLTIEESLNSVYRQGRVSDKSIGPLEIKMVESGTFDKLMDYAISLGASINQYKTPRCVKFAPIIELLNSRVVDSYFSPKCPKWSHGHKQWGSN

SEQ ID NO: 13933 - protein, 612 aa, Arabidopsis thaliana
MPEAPKKESLEVFDLTLDQKNKQKLQLIEELTSNADQVQRQVLEEILTRNADVEYLRRHDLNGRTDRETFKNIMPVITYEDIEPEINRIANGDKSPILSSKPISEFLTSSGTSGGERKLMPTIEEELDRRSLLYSLLMPVMSQFVPGLENGKGMYFLFIKSESKTPGGLPARPVLTSYYKSSHFKERPYDPYTNYTSPNETILCSDSYQSMYSQMLCGLCQHQEVLRVGAVFASGFIRAIKFLEKHWIELVRDIRTGTLSSLITDPSVREAVAKILKPSPKLADFVEFECKKSSWQGIITRLWPNTKYVDVIVTGTMSQYIPTLDYYSNGLPLVCTMYASSECYFGVNLRPLCKPSEVSYTLIPSMAYFEFLPVHRNNGVTNSINLPKALTEKEQQELVDLVDVKLGQEYELVVTTYAGLCRYRVGDLLRVTGFKNKAPQFSFICRKNVVLSIDSDKTDEVELQNAVKNAVTHLVPFDASLSEYTSYADTSSIPGHYVLFWELCLDGNTPIPPSVFEDCCLAVEESFNTVYRQGRVSDKSIGPLEIKIVEPGTFDKLMDYAISLGASINQYKTPRCVKFAPIIELLNSRVVDSYFSPKCPKWVPGHKQWGSN

SEQ ID NO: 13934 - protein, 549 aa, Arabidopsis thaliana
MAVDSPLQSRMVSATTSEKDVKALKFIEEMTRNPDSVQEKVLGEILTRNSNTEYLKRFDLDGVVDRKTFKSKVPVVTYEDLKPEIQRISNGDCSPILSSHPITEFLTSSGTSAGERKLMPTIEEDLDRRQLLYSLLMPVMNLYVPGLDKGKGLYFLFVKSESKTSGGLPARPVLTSYYKSDHFKRRPYDPYNVYTSPNEAILCSDSSQSMYAQMLCGLLMRHEVLRLGAVFASGLLRAISFLQNNWKELARDISTGTLSSRIFDPAIKNRMSKILTKPDQELAEFLVGVCSQENWEGIITKIWPNTKYLDVIVTGAMAQYIPTLEYYSGGLPMACTMYASSESYFGINLKPMCKPSEVSYTIMPNMAYFEFLPHNHDGDGAAEASLDETSLVELANVEVGKEYELVITTYAGLYRYRVGDILRVTGFHNSAPQFKFIRRKNVLLSVESDKTDEAELQKAVENASRLFAEQGTRGIEYTSYAETKTIPGHYVIYWELLGRDQSNALMSEEVMAKCCLEMEESLNSVYRQSRVADKSIGPLGDTCGTERYV

SEQ ID NO: 13935 - protein, 614 aa, Oryza sativa (japonica cultivar-group)
MAPAAVAAAEAGSKAAAVAGKAVAACERDAEKLEFIEEMTRGFDAVQERVLAAILARNNGAEYLRRHGMEGRTDREAFKARVPVVTYEDLRPEIERIANGDRSNIISSHPITEFLTSSGTSAGERKLMPTIEDELDRRQMLYSLLMPVMNLYVPGLDKGKGLYFLFIKSETKTPGGLPARPVLTSYYKSDHFKHRPFDPYNVYTSPTAAILCTDAFQSMYAQMLCGLVARAEVLRVGAVFASGLLRAIRFLQLHWRELAHDIRTGTLSAKVTEPSIRDAVAEVLAAPDAELAAFVEAECGKDKWEGIITRMWPNTKYLDVIVTGAMAQYIPTLKFYSGGLPMACTMYASSECYFGLNLRPMCDPSEVSYTIMPNMGYFELMPHDPDAPPLPRDAPPPRLVDLADAEVGREYELVITTYAGLCRYRVGDILQVTGFHNAAPQFRFVRRKNVLLSIDSDKTDEAELQAAVERASALLSPYGASIVEYTSQADATTIPGHYVVYWELMVREGGAWPPPAEEEGRGVFERCCLEMEEALNAVYRQGRNGEAIGPLEIRVVRAGTFEEVMDYAISRGASINQYKAPRCVSFGPIIELLNSRVISKHFSPACPKYSPHKK

SEQ ID NO: 13936 - protein, 623 aa, Oryza sativa (japonica cultivar-group)
MAVMTDVSTTGTALRTPAAGAVKEGDVEKLRFIDEMTTNVDAVQERVLGEILGRNAGTEYLTKCGLDGATDRAAFRAKVPVVSYDDLQPYIQRIANGDRSPILSTHPVSEFLTSSGTSAGERKLMPTIMDELDRRQLLYSLLMPVMNFTHTYKKQMMINGHESLHRYVPGLDKGKGLYFLFVKSETKTPGGLTARPVLTSYYKSDHFKNRPYDPYHNYTSPTAAILCADAFQSMYAQMVCGLCQRNDVLRLGAVFASGLLRAIRFLQLNWEQLADDIESGELTPRVTDPSVREAVAAILLPDPELAKLIRAECSKGDWAGIITRVWPNTKYLDVIVTGAMAQYIPTLEFYSGGLPMACTMYASSECYFGLNLRPMCDPSEVSYTIMPNMGYFEFLPVDETGAASGDATQLVDLARVEVGREYELVITTYAGLNRYRVGDVLRVTGFHNAAPQFRFVRRKNVLLSIESDKTDEAELQRAVERASALLRPHGASVVEYTSQACTKRIPGHYVIYWELLTKGAGATVVDADTLGRCCLEMEEALNTVYRQSRVADGSIGPLEIRVVRPGTFEELMDYAISRGASINQYKVPRCVTFPPIVELLDSRVVSSHFSPALPHWTPARRSE

SEQ ID NO: 13937 - protein, 610 aa, Oryza sativa (japonica cultivar-group)
MPEAPTAKTAPAYGYAPGAHAEALEFIEHVTANAGQVQRRVLGEILAQNAPAEYLRRYGIPGSPDVVDAFRRLVPLVTYEGLQPDILRIANGDTSPIFSGKPISEFLTSSGTSGGERKLMPTIADEMNRRSLLYSLLMPVMSQSVSGLDKGKAMYLLFVKAESRTPGGLAARPVLTSYYRSRQFLDRPRDPYTSYTSPDEAILCVDSYQSMYAQLLCGLVHRADVLRVGAVFASGFLRAIHFLEKHWARLCHDIRTGELDPEITDRVVRDAVGRVLRADPALADAIEDECARASWEGIIRRLWPRTKYIDVIVTGTMSQYIPTLEFYGGGLPLTCTMYASSECYFGLNLNPMCKPSDVAYTLIPTMCYYEFLPVNCNNATAEASHRDLVDLVDVKLGHEYELVVTTYSGLYRYRVGDVLRVAGFKNKAPMFSFVRRQNVALSVDSDKTDETELHAAVSGAVQHLAPFGASLVEYTSYADAATIPGHYVLFWELRAGSTAVPASVFEECCLSVEEALNSVYRQGRACDRSIGPLEIRVVAEGTFDKLMDYAISRGASINQYKAPRCVRPGPVVELLDARVQGKYFSPKCPKWSPGNKQWNKSKDLVGKGDA

SEQ ID NO: 13938 - protein, 614 aa, Oryza sativa; identical to SEQ ID NO: 13935

SEQ ID NO: 13939 - protein, 604 aa, Oryza sativa
MAVMTDVSTTGTALRTPAAGAVKEGDVEKLRFIDEMTTNVDAVQERVLGEILGRNASTEYLTKCGLDGATDRAAFRAKVPVVSYDDLQPYIQRIANGDRSPILSTHPVSEFLTSSGTSAGERKLMPTIMDELDRRQLLYSLLMPVMNLYVPGLDKGKGLYFLFVKSETKTPGGLTARPVLTSYYKSDHFKNRPYDPYHNYTSPTAAILCADAFQSMYAQMVCGLCQRNDVLRLGAVFASGLLRAIRFLQLNWEQLAEDIESGELTPRVTDPSVREAVAAILLPDPELAKLIRAECSKGDWAGIITRVWPNTKYLDVIVTGAMAQYIPTLEFYSGGLPMACTMYASSECYFGLNLRPMCDPSEVSYTIMPNMGYFEFLPVDESAASGDATQLVDLARVEVGREYELVITTYAGLNRYRVGDVLRVTGFHNAAPQFRFVRRKNVLLSIESDKTDEAELQRAVERASALLRPHGASVVEYTSQACTKRIPGHYVIYWELLTKGAGATVVDADTLGRCCLEMEEALNTVYRQSRVADGSIGPLEIRVVRPGTFEELMDYAISRGASINQYKVPRCVTFPPIVELLDSRVVSSHFSPALPHWTPARRSE

SEQ ID NO: 13940 - protein, 593 aa, Oryza sativa
  unsure (1)..(593): unsure at all Xaa locations
GARASDVADQAAPACERDAEKLEFIEEMTRGFDAVQERVLAAILARNNGAEYLRRHGMEGRTDREAFKARVPVVTYEDLRPEIERIANGDRSNIISSHPITEFLTSSGTSAGERKLMPTIEDELDRRQMLYSLLMPVMNLYVPGLDKGKGLYFLFIKSETKTPGGLPARPVLTSYYKSDHFKHRPFDPYNVYTSPTAAILCTDAFQSMYAQMLCGLVARAEVLRVGAVFASGLLRAIRFLQLHWRELAHDIRTGTLSAKVTEPSIRDAVAEVLAAPDAELAAFVEAECGKDKWEGIITRMWPNTKYLDVIVTGAMAQYIPTLKFYSGGLPMACTMYASSECYFGLNLRPMCDPSEVSYTIMPNMGYFELMPHDPXXRLVDLADAEVGREYELVITTYAGLCRYRVGDILQVTGFHNAAPQFRFVRRKNVLLSIDSDKTDEAELQAAVERASALLSPYGASIVEYTSQADATTIPGHYVVYWELMVREGGAWPPPAEEEGRGVFERCCLEMEEALNAVYRQGRNGEAIGPLEIRVVRAGTFEEVMDYAISRGASINQYKAPRCVSFGPIIELLNSRVISKHFSPACPKYSPHKK

SEQ ID NO: 13941 - protein, 598 aa, Oryza sativa
  unsure (1)..(598): unsure at all Xaa locations
MAVMTDVSTTGTALRTPAAGAVKEGDVEKLRFIDEMTTNVDAVQERVLGEILGRNAGTEYLTKCGLDGATDRAAFRAKVPVVSYDDLQPYIQRIANGDRSPILSTHPVSEFLTSSGTSAGERKLMPTIMDELGRRQLLYSLLMPVMNLYVPGLDKGKGLYFLFVKSETKTPGGLTARPVLTSYYKSDHFKNRPYDPYHNYTSPTAAILCADAFQSMYAQMVCGLCQRNDVLRLGAVFASGLLRAIRFLQLNWEQLADDIESGELTPRVTDPSVREAVAAILLPDPELAKLIRAECSKGDWAGIITRVWPNTKYLDVIVTGAMAQYIPTLEFYSGGLPMACTMYASSECYFGLNLRPMCDPSEVSYTIMPNMGYFEFLPVDESAASGDATQLVDLARVEVGREYELVITTYAGLNRYRVGDVXLRVTXFRFVRRKNVLLSIESDKTDEAELQRAVERASALLRPHGASVVEYTSQACTKRIPGHYVIYWELLTKGAGATVVDADTLGRCCLEMEEALNTVYRQSRVADGSIGPLEIRVVRPGTFEELMDYAISRGASINQYKVPRCVTFPPIVELLDSRVVSSHFSPALPHWTPARRSE

SEQ ID NO: 13942 - protein, 802 aa, Oryza sativa
MAVMTDVSTTGTALRTPAAGAVKEGDVEKLRFIDEMTTNVDAVQERVLGEILGRNAGTEYLTKCGLDGATDRAAFRAKVPVVSYDDLQPYIQRIANGDRSPILSTHPVSEFLTSSGTSAGERKLMPTIMDELGRRQLLYSLLMPVMNLYVPGLDKGKGLYFLFVKSETKTPGGLTARPVLTSYYKSDHFKNRPYDPYHNYTSPTAAILCADAFQSMYAQMVCGLCQRNDVLRLGAVFASGLLRAIRFLQLNWEQLADDIESGELTPRVTDPSVREAVAAILLPDPELAKLIRAECSKGDWAGIITRVWPNTKYLDVIVTGAMAQYIPTLEFYSGGLPMACTMYASSECYFGLNLRPMCDPSEVSYTIMPNMGYFEFLPVDESAASGDATQLVDLARVEVGREYELVITTYAGLNRFVRRKNVLLSIESDKTDEAELQRAVERASALLRPHGASVVEYTSQACTKRIPGHYVIYWELLTKGAGATVVDADTLGRCCLEMEEALNTVYRQSRVADGSIGPLEIRVVRPGTFEELMDYAISRGASINQYKVPRCVTFPPIVELLDSRVVSSHFSPALPHWTPARRTTSPAHPSRTVPSRPRVNHLPRAHHDVGPCVLVLAVVVDWAGWLPRWRHAVQVKEAGVRGFNGCSPVSRLTRTRARALRRKRGRVAETQPHRGREGGRGRGATCRGTAVPVRAGGRCAFDHKNRRFAWEIRPQGFMDTSKMVLDRNACKEVPLFPRSKRKAHIAAGARLASKVESEAHTHARRRETVRKRCGGAWFMWARPVKGEPRQSSSSRCLPDSSS

SEQ ID NO: 13943 - protein, 593 aa, Oryza sativa
  unsure (1)..(593): unsure at all Xaa locations
SAIGAALRSXXAATVSEADVEKLRLIEELTSDVDAVQERVLSEILGRNAGAEYLTRCGHDAGDTGRATFRAKVPVVSYDDLKPYIQRVADGDCSPVLSTHPITEFLTSSGTSAGECKLILVAMDDSGRRQALHGLIGPVLKLYVPGLEKGKGLYFMFVKSETKTRGGLTAWFALTSVYKSEQFKSMAIAYTSPTAAILCEDAFQSMYAQMVCGLCQRHDVVRFGAVFAAALVRAIRFLQLNWGQLAADIEAGELGPHVADPSVREAVSGILRSDAELAEFVRIECSKGDWAGIITRIWPNTKYVDAIVTGAMAQYIRTLQYYSGGLPIVSTSYASSECFFGINLRPVCDPSEVSYTIMPNTAYFEFLPVGEXXVDATNLVDLARVEVGREYEVVITTYAGLSRYRVGDVLRVTGFHNAAPQFRFVRRQSVLLSVELDKTDEAELHRAVERASSALLRPRGVSVAEYTSRACTERIPGHYVVYWELLTESPVGAGDGEETLGRCCLEMEEALSAVYRQGRVADGSIGPLEIRIVRPGTFEEVMDLAVSRGTSIGQYKVPQCVTVPSVVELLDSRVVSSQFSPALPHWIPTPRSD

SEQ ID NO: 13944 - protein, 436 aa, Triticum aestivum
  unsure (1)..(436): unsure at all Xaa locations
XGLTARPVLTSYYKSEQFKNRPYDPYHNYTSPTAAILCADAFQSMYAQMVCGLCQRHEVLRVGAVFASGLLRAIRFLQLNWKELAADIEAGALSPRVTDASVREAVAGILRPDPELAQFVRDECCNDDWAGIVRRIWPNTKYLDVIVTGAMAQYIGTLKYYSGDLPMACTMYASSECYFGLNLRPLCDPSEVSYTIMPNMGYFEFLPVDSATGAASCVDAGNLVDLARVEAGREYELVITTYAGLNRYRVGDVLRVTGFHNAAPQFQFVRRKNVLLSIESHKTDEAELQRAVERASALLRPHGASVAEYTSQACTKSIPGHYVIYWELLTTGAGAATAVDKGTLDACCLEMEEALNTVYRQSRVADAIGPLEIRVVRAGTFEELMDYAISRGASINQYKAPRCVTFPPIIELLDSRVVSSHFSPALPHWTPARRSD

SEQ ID NO: 13945 - protein, 468 aa, Triticum aestivum
  unsure (1)..(468): unsure at all Xaa locations
FRTSLSVFSLPLDPNRGLYFLFVKSETKTPSGLTARPVLTSYYKSEQFKNRPYDPYHNYTSPTAAILCADAFQSMYAQMVCGLCERPGLPRAGAVPAPGLLRAVRLLPRAGAAPAADAAPGARCPRVADAPVPVAXGRAASRPAPSAPSSSGSAGRARSWSPRIRRLPPRPQHLDVIVTGAMAQYIGTLKYYSGDLPMACTMYASSECYFGLNLRPLCDPSEVSYTIMPNMGYFEFLPVDSATGAASCVDAGNLVDLARVEAGREYELVITTYAGLNRYRVGDVLRVTGFHNAAPQFQFVRRKNVLLSIESHKTDEAELQRAVERASALLRPHGASVAEYTSQACTKSIPGHYVIYWELLTTGAGAATAVDKGTLDACCLEMEEALNTVYRQSRVADGSIGPLEIRVVRGGTFEELMDYAISRGASINQYKAPRCVTFPPIIELLDSRVVSSHFSPALPHWTPARRSD

SEQ ID NO: 13946 - protein, 435 aa, Triticum aestivum
  unsure (1)..(435): unsure at all Xaa locations
MPEAPSAQPAPASGYAPGAHREALDFIEHVTANAGKVQQRVLAEILAQNETAEYLRRYGVSSSSSPLDPVDAFRRCVPLVTYEDLQPDILRIANGDSSPILSGKPISEFLTSSGTSGGERKLMPTIADELDRRSLLYSLLMPVMSQSLPGLDKGKAMYLLFVKAESRTPGGLAARPVLTSYYRSRQFLDRPHDPSSAYTSPNKAILCVDSYQSMYAQLLCGLVHRTDVLRVGAVFASGLLRAIRFLEKHWPLLCHDIRTGELDPEITDHAVRDAVGRLLHANPALASEIEAECSKPSWEGIIRRLWPRTKYIDVIVTGAMSQYIQTLEFYGGGLPLICTMYASSECYFGLNLNPMCKPGDVAYTLIPTMCHFEFLPVHCSNANAEPSHRDLVDLVDVKLGHDYELVVTTFSGLCRYRVGDVLRVAGFKNEAPMFX

SEQ ID NO: 13947 - protein, 226 aa, Triticum aestivum
  unsure (1)..(226): unsure at all Xaa locations
XHERRCXMDDPPPRLVDLADAEVGKEYELVITTYAGLCRYRVGDILQAAGPGNAAPQFRFVRRKNVLLSIDSDKTDEAELQAAVERAARLLAPYGASIVEYTSEADATTIPGHYVVYWELMLKDCREGLWPEAAVFERCCLEMEEALNSVYRQGRNGDAIGPLEIRVVRGGTFEEVMDYAISRGASINQYKAPRCVSFGPIIELLNSRVLSKHFSPACPKYGPPKK

SEQ ID NO: 13948 - protein, 221 aa, Triticum aestivum
MAPATADAAGAAVGGRVKTALGVAACERDAEKLELIEQLTKGFDDEQQRVLAAILARNNGAEYLRRHGMEGCTDRDAFKARVPVVTYEDLRPEIERIANGDRSNIISSHPISEFLTSSGTSAGERKLMPTIEDELDRRQMLYSLLMPVMNLFVPGLDKGKGLYFLFIKSETKTPGGLPARPVLTSYYKSDHFKYRPFDAYQVYTSPTPAILCTDSFQSMYS

SEQ ID NO: 13949 - protein, 616 aa, Zea mays
  unsure (1)..(616): unsure at all Xaa locations
MAVMAEVVSTTGAALRSPATQQPAAAGAAKGTDAEKLQFIEDMTSNVDAVQERVLGEILARNADTEYLSSRCGLAGATDRATFRAKVPMATYEDLQPYIRRIADGDRSPILSGHPVSEFLTSSGTSGGERKLMPTIEDELNRRQLLYSLQMPVMNLYVPGMDKGKALHFLFVKSETKTPGGLAARPVLTSYYKSNHFRNRPFDAYNNYTSPTAAILCADAFQSMYAQMLCGLCQRQDVLRVGAVFASGLLRAIRFLQLNWEQLAEDIEAGSLTPRVTDPSVREAVAGILRADPELAALVRSECSKGDWAGIITRIWPSTKYLDVIVTGAMAQYIPTLKYYSGGLPMACTMYASSECYFGLNLRPMCDPSEVSYTLMPNMCYFEFLPMDSAAXXSGGDASQLVDLARVEVGREYELVITTYAGLNRYRVGDVLQVTGFHNSAPQFRFVRRKNVLLSIESDKTDEAELQRAVERASALLRPHGAAVVEYTSQAYTKSIPGHYVIYWELLAKGPAAGGAVGEGTLERCCLEMEEALNTVYRQSRVADAIGPLEIRVVRPGTFEELMDYAISRGASINQYKVPRCVTFPPIIELLDSRVVSSHFSPALPHWTPGQRSDSD

SEQ ID NO: 13950 - protein, 614 aa, Zea mays
  unsure (1)..(614): unsure at all Xaa locations
MAVMAEVVSTTGAALRSPASQPLPAAVKNADAEKLQFIEEMTSNVDAVQERVLGEILARNAGTEYLAKYGLAAATTDRATFRAKVPMATYEDLQPYIRRIADGDRSPILSGHPVSEFLTSSGTSAGERKLMPTIEDELNRRQLLYSLQMPVMNLYVPGMDKGKALHFLFVKSETKTPGGLAARPVLTSYYKSNHFKNRPFDAYNNYTSPTAAILCADAFQSMYAQMLCGLCQRQDVLRVGAVFASGLLRAIRFLQLNWEQLAEDIEAGSLTPRVTDPSVREAVAGILRADPELAALVRSECSKGDWAGIITRIWPSTKYLDVIVTGAMAQYIPTLKYYSGGLPMACTMYASSECYFGLNLRPMCDPSEVSYTLMPNMCYFEFLPMDSAAXXSGGDASQLVDLARVEVGREYELVITTYAGLNRYRVGDVLQVTGFHNSAPQFRFVRRKNVLLSIESDKTDEAELQRAVERASALLRPHGAAVVEYTSQAYTKSIPGHYVIYWELLAKGPAGGAAVGEGTLERCCLEMEEALNTVYRQSRVADAIGPLEIRVVRPGTFEELMDYAISRGASINQYKVPRCVTFPPIIELLDSRVVSSHFSPALPHWTPGQRSDSD

SEQ ID NO: 13951 - protein, 614 aa, Zea mays
  unsure (1)..(614): unsure at all Xaa locations
MAVMAEVVSTTGAALRSPASQPLPAAVKNADAEKLQFIEEMTSNVDAVQERVLGEILARNAGTEYLAKYGLAAATTDRATFRAKVPMATYEDLQPYIRRIADGDRSPILSGHPVSEFLTSSGTSAGERKLMPTIEDELNRRQLLYSLQMPVMNLYVPGMDKGKALHFLFVKSETKTPGGLAARPVLTSYYKSNHFKNRPFDAYNNYTSPTAAILCADAFQSMYAQMLCGLCQRQDVLRVGAVFASGLLRAIRFLQLNWEQLAEDIEAGSLTPRVTDPSVREAVAGILRADPELAALVRSECSKGDWAGIITRIWPSTKYLDVIVTGAMAQYIPTLKYYSGGLPMACTMYASSECYFGLNLRPMCDPSEVSYTLMPNMCYFEFLPMDSAAXXSGGDASQLVDLARVEVGREYELVITTYAGLNRYRVGDVLQVTGFHNSAPQFRFVRRKNVLLSIESDKTDEAELQRAVERASALLRPHGAAVVEYTSQAYTKSIPGHYVIYWELLAKGPAAGAAVGEGTLERCCLEMEEALNTVYRQSRVADAIGPLEIRVVRPGTFEELMDYAISRGASINQYKVPRCVTFPPIIELLDSRVVSSHFSPALPHWTPGQRSDSD

SEQ ID NO: 13952 - protein, 614 aa, Zea mays
MAVMAEVVSTTGAALRSPATQQPAAAGAAKGTDAEKLQFIEDMTSNVDAVQERVLGEILARNADTEYLSSRCGLAGATDRATFRAKVPMATYEDLQPYIRRIADGDRSPILSGHPVSEFLTSSGTSGGERKLMPTIEDELNRRQLLYSLQMPVMNLYVPGMDKGKALHFLFVKSETKTPGGLAARPVLTSYYKSNHFRNRPFDAYNNYTSPTAAILCADAFQSMYAQMVCGLCQRQDVLRVGAVFASGLLRAIRFLQLNWEQLAEDIEAGSLTPRVTDPSVREAVAGILRPDPAVAELVRSECSGGDWAGIVTRIWPNTKYLDVIVTGAMAQYIPTLKHYSGGLPMACTMYASSECYFGLNLRPMCDPSEVSYTLMPNMCYFEFLPMGGAVDASQLVDLGRVERGREYELVITTYAGLNRYRVGDVLQVTGFHNSAPQFRFVRRKNVLLSIESDKTDEAELQRAVERASALLRPHGAAVVEYTSQAYTKSIPGHYVVYWELLQAKGGAAVDGETLEGCCLEMEEALNAVYRQSRVADGSIGPLEIRVVRPGTFEELMDYAISRGASINQYKVPRCVTFPPIIELLDSRVVSSHLSPALPHWTAGQRSGSGSGSD

SEQ ID NO: 13953 - protein, 418 aa, Zea mays
  unsure (1)..(418): unsure at all Xaa locations
XTRPLPRTSXIEKSPTAAILCAXAFQSMYAQMVCGLCQRQDVLRVGAVFASGLLRAIRFLQLNWEQLAEDIEAGSLTPRVTDPSVREAVAGILRPDPAVAELVRSECSGGDWAGIVTRIWPNTKYLDVIVTGAMAQYIPTLKHYSGGLPMACTMYASSECYFGLNLRPMCDPSEVSYTLMPNMCYFEFLPMGGAVDASQLVDLGRVERGREYELVITTYAGLNRYRVGDVLQVTGFHNSAPQFRFVRRKNVLLSIESDKTDEAELQRAVERASALLRPHGAAVVEYTSQAYTKSIPGHYVVYWELLQAKGGAAVDGETLEGCCLEMEEALNAVYRQSRVADGSIGPLEIRVVRPGTFEELMDYAISRGASINQYKVPRCVTFPPIIELLDSRVVSSHLSPALPHWTAGQRSGSGSGSD

SEQ ID NO: 13954 - protein, 530 aa, Homo sapiens
MLLWPLLLLLLLLPTLALLRQQRSQDARLSWLAGLQHRVAWGALVWAATWQRRRLEQSTLHVHQSQQQALRWCLQGAQRPHCSLRRSTDISTFRNHLPLTKASQTQQEDSGEQPLPPTSNQDLGEASLQATLLGLAALNKAYPEVLAQGRTARVTLTSPWPRPLPWPGNTLGQVGTPGTKDPRALLLDALRSPGLRALEAGTAVELLDVFLGLETDGEELAGAIAAGNPGAPLRERAAELREALEQGPRGLALRLWPKLQVVVTLDAGGQAEAVAALGALWCQGLAFFSPAYAASGGVLGLNLQPEQPHGLYLLPPGAPFIELLPVKEGTQEEAASTLLLAEAQQGKEYELVLTDRASLTRCRLGDVVRVVGAYNQCPVVRFICRLDQTLSVRGEDIGEDLFSEALGRAVGQWAGAKLLDHGCVESSILDSSAGSAPHYEVFVALRGLRNLSEENRDKLDHCLQEASPRYKSLRFWGSVGPARVHLVGQGAFRALRAALAACPSSPFPPAMPRVLRHRHLAQCLQERVVS

SEQ ID NO: 13955 - protein, 474 aa, Homo sapiens [sequence omitted]

SEQ ID NO: 13956 - protein, 2549 aa, Mus musculus
MLGTGPAVATASAATSSNVSVLQQFASGLKSRNEETRAKAAKELQHYVTMELREMSQEESTRFYDQLNHHIFELVSSSDANERKGGILAIASLIGVEGGNSTRIGRFANYLRNLLPSSDPVVMEMASKAIGRLAMAGDTFTAEYVEFEVKRALEWLGADRNEGRRHAAVLVLRELAISVPTFFFQQVQPFFDNIFVAVWDPKQAIREGAVAALRACLILTTQREPKEMQKPQWYRHTFEEAEKGFDETLAKEKGMNRDDRIHGALLILNELVRISSMEGERLREEMEEITQQQLVHDKYCKDLMGFGTKPRHITPFTSFQAVQPQQPNALVGLLGYSSPQGLMGFGTSPSPAKSTLVESRCCRDLMEEKFDQVCQWVLKCRSSKNSLIQMTILNLLPRLAAFRPSAFTDTQYLQDTMNHVLSCVKKEKERTAAFQALGLLSVAVRSEFKVYLPRVLDIIRAALPPKDFAHKRQKTVQVDATVFTCISMLARAMGPGIQQDIKELLEPMLAVGLSPALTAVLYDLSRQIPQLKKDIQDGLLKMLSLVLMHKPLRHPGMPKGLAHQLASPGLTTLPEASDVASITLALRTLGSFEFEGHSLTQFVRHCADHFLNSEHKEIRMEAARTCSCLLTPSIHLISGHAHVVSQTAVQVVADVLSKLLVVGITDPDPDIRYCVLASLDERFDAHLAQAENLQALFVALNDQVFEIRELAICTVGRLSSMNPAFVMPFLRKMLIQILTELEHSGIGRIKEQSARMLGHLVSNAPRLIRPYMEPILKALILKLKDPDPDPNPGVINNVLATIGELAQVSGLEMRKWVDELFIIIMDMLQDSSLLAKRQVALWTLGQLVASTGYVVEPYRKYPTLLEVLLNFLKTEQNQGTRREAIRVLGLLGALDPYKHKVNIGMIDQSRDASAVSLSESKSSQDSSDYSTSEMLVNMGNLPLDEFYPAVSMVALMRIFRDQSLSHHHTMVVQAITFIFKSLGLKCVQFLPQVMPTFLNVIRVCDGAIREFLFQQLGMLVSFVKSHIRPYMDEIVTLMREFWVMNTSIQSTIILLIEQIVVALGGEFKLYLPQLIPHMLRVFMHDNSQGRIVSIKLLAAIQLFGANLDDYLHLLLPPIVKLFDAPEVPLPSRKAALETVDRLTESLDFTDYASRIIHPIVRTLDQSPELRSTAMDTLSSLVFQLGKKYQIFIPMVNKVLVRHRINHQRYDVLICRIVKGYTLADEEEDPLIYQHRMLRSSQGDALASGPVETGPMKKLHVSTINLQKAWGAARRVSKDDWLEWLRRLSLELLKDSSSPSLRSCWALAQAYNPMARDLFNAAFVSCWSELNEDQQDELIRSIELALTSQDIAEVTQTLLNLAEFMEHSDKGPLPLRDDNGIVLLGERAAKCRAYAKALHYKELEFQKGPTPAILESLISINNKLQQPEAASGVLEYAMKHFGELEIQATWYEKLHEWEDALVAYDKKMDTNKEDPELMLGRMRCLEALGEWGQLHQQCCEKWTLVNDETQAKMARMAAAAAWGLGQWDSMEEYTCMIPRDTHDGAFYRAVLALHQDLFSLAQQCIDKARDLLDAELTAMAGESYSRAYGAMVSCHMLSELEEVIQYKLVPERREIIRQIWWERLQGCQRIVEDWQKILMVRSLVVSPHEDMRTWLKYASLCGKSGRLALAHKTLVLLLGVDPSRQLDHPLPTAHPQVTYAYMKNMWKSARKIDAFQHMQHFVQTMQQQAQHAIATEDQQHKQELHKLMARCFLKLGEWQLNLQGINESTIPKVLQYYSAATEHDRSWYKAWHAWAVMNFEAVLHYKHQNQARDEKKKLRHASGANITNATTAATTAASAAAATSTEGSNSESEAESNENSPTPSPLQKKVTEDLSKTLLLYTVPAVQGFFRSISLSRGNNLQDTLRVLTLWFDYGHWPDVNEALVEGVKAIQIDTWLQVIPQLIARIDTPRPLVGRLIHQLLTDIGRYHPQALIYPLTVASKSTTTARHNAANKILKNMCEHSNTLVQQAMMVSEELIRVAILWHEMWHEGLEEASRLYFGERNVKGMFEVLEPLHAMMERGPQTLKETSFNQAYGRDLMEAQEWCRKYMKSGNVKDLTQAWDLYYHVFRRISKQLPQLTSLELQYVSPKLLMCRDLELAVPGTYDPNQPIIRIQSIAPSLQVITSKQRPRKLTLMGSNGHEFVFLLKGHEDLRQDERVMQLFGLVNTLLANDPTSLRKNLSIQRYAVIPLSTNSGLIGWVPHCDTLHALIRDYREKKKILLNIEHRIMLRMAPDYDHLTLMQKVEVFEHAVNNTAGDDLAKLLWLKSPSSEVWFDRRTNYTRSLAVMSMVGYILGLGDRHPSNLMLDRLSGKILHIDFGDCFEVAMTREKFPEKIPFRLTRMLTNAMEVTGLDGNYRTTCHTVMEVLREHKDSVMAVLEAFVYDPLLNWRLMDTNTKGNKRSRTRTDSYSAGQSVEILDGVELGEPAHKKAGTTVPESIHSFIGDGLVKPEALNKKAIQIINRVRDKLTGRDFSHDDTLDVPTQVELLIKQATSHENLCQCYIGWCPFW

SEQ ID NO: 13957 - protein, 2549 aa, Mus musculus
MLGTGPAVATASAATSSNVSVLQQFASGLKSRNEETRAKAAKELQHYVTMELREMSQEESTRFYDQLNHHIFELVSSSDANERKGGILAIASLIGVEGGNSTRIGRFANYLRNLLPSSDPVVMEMASKAIGRLAMAGDTFTAEYVEFEVKRALEWLGADRNEGRRHAAVLVLRELAISVPTFFFQQVQPFFDNIFVAVWDPKQAIREGAVAALRACLILTTQREPKEMQKPQWYRHTFEEAEKGFDETLAKEKGMNRDDRIHGALLILNELVRISSMEGERLREEMEEITQQQLVHDKYCKDLMGFGTKPRHITPFTSFQAVQPQQPNALVGLLGYSSPQGLMGFGTSPSPAKSTLVESRCCRDLMEEKFDQVCQWVLKCRSSKNSLIQMTILNLLPRLAAFRPSAFTDTQYLQDTMNHVLSCVKKEKERTAAFQALGLLSVAVRSEFKVYLPRVLDIIRAALPPKDFAHKRQKTVQVDATVFTCISMLARAMGPGIQQDIKELLEPMLAVGLSPALTAVLYDLSRQIPQLKKDIQDGLLKMLSLVLMHKPLRHPGMPKGLAHQLASPGLTTLPEASDVASITLALRTLGSFEFEGHSLTQFVRHCADHFLNSEHKEIRMEAARTCSRLLTPSIHLISGHAHVVSQTAVQVVADVLSKLLVVGITDPDPDIRYCVLASLDERFDAHLAQAENLQALFVALNDQVFEIRELAICTVGRLSSMNPAFVMPFLRKMLIQILTELEHSGIGRIKEQSARMLGHLVSNAPRLIRPYMEPILKALILKLKDPDPDPNPGVINNVLATIGELAQVSGLEMRKWVDELFIIIMDMLQDSSLLAKRQVALWTLGQLVASTGYVVEPYRKYPTLLEVLLNFLKTEQNQGTRREAIRVLGLLGALDPYKHKVNIGMIDQSRDASAVSLSESKSSQDSSDYSTSEMLVNMGNLPLDEFYPAVSMVALMRIFRDQSLSHHHTMVVQAITFIFKSLGLKCVQFLPQVMPTFLNVIRVCDGAIREFLFQQLGMLVSFVKSHIRPYMDEIVTLMREFWVMNTSIQSTIILLIEQIVVALGGEFKLYLPQLIPHMLRVFMHDNSQGRIVSIKLLAAIQLFGANLDDYLHLLLPPIVKLFDAPEVPLPSRKAALETVDRLTESLDFTDYASRIIHPIVRTLDQSPELRSTAMDTLSSLVFQLGKKYQIFIPMVNKVLVRHRINHQRYDVLICRIVKGYTLADEEEDPLIYQHRMLRSSQGDALASGPVETGPMKKLHVSTINLQKAWGAARRVSKDDWLEWLRRLSLELLKDSSSPSLRSCWALAQAYNPMARDLFNAAFVSCWSELNEDQQDELIRSIELALTSQDIAEVTQTLLNLAEFMEHSDKGPLPLRDDNGIVLLGERAAKCRAYAKALHYKELEFQKGPTPAILESLISINNKLQQPEAASGVLEYAMKHFGELEIQATWYEKLHEWEDALVAYDKKMDTNKEDPELMLGRMRCLEALGEWGQLHQQCCEKWTLVNDETQAKMARMAAAAAWGLGQWDSMEEYTCMIPRDTHDGAFYRAVLALHQDLFSLAQQCIDKARDLLDAELTAMAGESYSRAYGAMVSCHMLSELEEVIQYKLVPERREIIRQIWWERLQGCQRIVEDWQKILMVRSLVVSPHEDMRTWLKYASLCGKSGRLALAHKTLVLLLGVDPSRQLDHPLPTAHPQVTYAYMKNMWKSARKIDAFQHMQHFVQTMQQQAQHAIATEDQQHKQELHKLMARCFLKLGEWQLNLQGINESTIPKVLQYYSAATEHDRSWYKAWHAWAVMNFEAVLHYKHQNQARDEKKKLRHASGANITNATTAATTAASAAAATSTEGSNSESEAESNENSPTPSPLQKKVTEDLSKTLLLYTVPAVQGFFRSISLSRGNNLQDTLRVLTLWFDYGHWPDVNEALVEGVKAIQIDTWLQVIPQLIARIDTPRPLVGRLIHQLLTDIGRYHPQALIYPLTVASKSTTTARHNAANKILKNMCEHSNTLVQQAMMVSEELIRVAILWHEMWHEGLEEASRLYFGERNVKGMFEVLEPLHAMMERGPQTLKETSFNQAYGRDLMEAQEWCRKYMKSGNVKDLTQAWDLYYHVFRRISKQLPQLTSLELQYVSPKLLMCRDLELAVPGTYDPNQPIIRIQSIAPSLQVITSKQRPRKLTLMGSNGHEFVFLLKGHEDLRQDERVMQLFGLVNTLLANDPTSLRKNLSIQRYAVIPLSTNSGLIGWVPHCDTLHALIRDYREKKKILLNIEHRIMLRMAPDYDHLTLMQKVEVFEHAVNNTAGDDLAKLLWLKSPSSEVWFDRRTNYTRSLAVMSMVGYILGLGDRHPSNLMLDRLSGKILHIDFGDCFEVAMTREKFPEKIPFRLTRMLTNAMEVTGLDGNYRTTCHTVMEVLREHKDSVMAVLEAFVYDPLLNWRLMDTNTKGNKRSRTRTDSYSAGQSVEILDGVELGEPAHKKAGTTVPESIHSFIGDGLVKPEALNKKAIQIINRVRDKLTGRDFSHDDTLDVPTQVELLIKQATSHENLCQCYIGWCPFW

SEQ ID NO: 13958 - protein, 1083 aa, Mus musculus
MDTNKEDPELMLGRMRCLEALGEWGQLHQQCCEKWTLVNDETQAKMARMAAAAAWGLGQWDSMEEYTCMIPRDTHDGAFYRAVLALHQDLFSLAQQCIDKARDLLDAELTAMAGESYSRAYGAMVSCHMLSELEEVIQYKLVPERREIIRQIWWERLQGCQRIVEDWQKILMVRSLVVSPHEDMRTWLKYASLCGKSGRLALAHKTLVLLLGVDPSRQLDHPLPTAHPQVTYAYMKNMWKSARKIDAFQHMQHFVQTMQQQAQHAIATEDQQHKQELHKLMARCFLKLGEWQLNLQGINESTIPKVLQYYSAATEHDRSWYKAWHAWAVMNFEAVLHYKHQNQARDEKKKLRHASGANITNATTAATTAASAAAATSTEGSNSESEAESNENSPTPSPLQKKVTEDLSKTLLLYTVPAVQGFFRSISLSRGNNLQDTLRVLTLWFDYGHWPDVNEALVEGVKAIQIDTWLQVIPQLIARIDTPRPLVGRLIHQLLTDIGRYHPQALIYPLTVASKSTTTARHNAANKILKNMCEHSNTLVQQAMMVSEELIRVAILWHEMWHEGLEEASRLYFGERNVKGMFEVLEPLHAMMERGPQTLKETSFNQAYGRDLMEAQEWCRKYMKSGNVKDLTQAWDLYYHVFRRISKQLPQLTSLELQYVSPKLLMCRDLELAVPGTYDPNQPIIRIQSIAPSLQVITSKQRPRKLTLMGSNGHEFVFLLKGHEDLRQDERVMQLFGLVNTLLANDPTSLRKNLSIQRYAVIPLSTNSGLIGWVPHCDTLHALIRDYREKKKILLNIEHRIMLRMAPDYDHLTLMQKVEVFEHAVNNTAGDDLAKLLWLKSPSSEVWFDRRTNYTRSLAVMSMVGYILGLGDRHPSNLMLDRLSGKILHIDFGDCFEVAMTREKFPEKIPFRLTRMLTNAMEVTGLDGNYRTTCHTVMEVLREHKDSVMAVLEAFVYDPLLNWRLMDTNTKGNKRSRTRTDSYSAGQSVEILDGVELGEPAHKKAGTTVPESIHSFIGDGLVKPEALNKKAIQIINRVRDKLTGRDFSHDDTLDVPTQVELLIKQATSHENLCQCYIGWCPFW

SEQ ID NO: 13959 - protein, 2549 aa, Rattus norvegicus
MLGTGPATATAGAATSSNVSVLQQFASGLKSRNEETRAKAAKELQHYVTMELREMSQEESTRFYDQLNHHIFELVSSSDANERKGGILAIASLIGVEGGNSTRIGRFANYLRNLLPSSDPVVMEMASKAIGRLAMAGDTFTAEYVEFEVKRALEWLGADRNEGRRHAAVLVLRELAISVPTFFFQQVQPFFDNIFVAVWDPKQAIREGAVAALRACLILTTQREPKEMQKPQWYRHTFEEAEKGFDETLAKEKGMNRDDRIHGALLILNELVRISSMEGERLREEMEEITQQQLVHDKYCKDLMGFGTKPRHITPFTSFQAVQPQQSNALVGLLGYSSHQGLMGFGASPSPTKSTLVESRCCRDLMEEKFDQVCQWVLKCRSSKNSLIQMTILNLLPRLAAFRPSAFTDTQYLQDTMNHVLSCVKKEKERTAAFQALGLLSVAVRSEFKVYLPRVLDIIRAALPPKDFAHKRQKTVQVDATVFTCISMLARAMGPGIQQDIKELLEPMLAVGLSPALTAVLYDLSRQIPQLKKDIQDGLLKMLSLVLMHKPLRHPGMPKGLAHQLASPGLTTLPEASDVASITLALRTLGSFEFEGHSLTQFVRHCADHFLNSEHKEIRMEAARTCSRLLTPSIHLISGHAHVVSQTAVQVVADVLSKLLVVGITDPDPDIRYCVLASLDERFDAHLAQAENLQALFVALNDQVFEIRELAICTVGRLSSMNPAFVMPFLRKMLIQILTELEHSGIGRIKEQSARMLGHLVSNAPRLIRPYMEPILKALILKLKDPDPDPNPGVINNVLATIGELAQVSGLEMRKWVDELFVIIMDMLQDSSLLAKRQVALWTLGQLVASTGYVVEPYRKYPTLLEVLLNFLKTEQNQGTRREAIRVLGLLGALDPYKHKVNIGMIDQSRDASAVSLSESKSSQDSSDYSTSEMLVNMGNLPLDEFYPAVSMVALMRIFRDQSLSHHHTMVVQAITFIFKSLGLKCVQFLPQVMPTFLNVIRVCDGAIREFLFQQLGMLVSFVKSHIRPYMDEIVTLMREFWVMNTSIQSTIILLIEQIVVALGGEFKLYLPQLIPHMLRVFMHDNSQGRIVSIKLLAAIQLFGANLDDYLHLLLPPIVKLFDAPEVPLPSRKAALETVDRLTESLDFTDYASRIIHPIVRTLDQSPELRSTAMDTLSSLVFQLGKKYQIFIPMVNKVLVRHRINHQRYDVLICRIVKGYTLADEEEDPLIYQHRMLRSSQGDALASGPVETGPMKKLHVSTINLQKAWGAARRVSKDDWLEWLRRLSLELLKDSSSPSLRSCWALAQAYNPMARDLFNAAFVSCWSELNEDQQDELIRSIELALTSQDIAEVTQTLLNLAEFMEHSDKGPLPLRDDNGIVLLGERAAKCRAYAKALHYKELEFQKGPTPAILESLISINNKLQQPEAASGVLEYAMKHFGELEIQATWYEKLHEWEDALVAYDKKMDTNKDDPELMLGRMRCLEALGEWGQLHQQCCEKWTLVNDETQAKMARMAAAAAWGLGQWDSMEEYTCMIPRDTHDGAFYRAVLALHQDLFSLAQQCIDKARDLLDAELTAMAGESYSRAYGAMVSCHMLSELEEVIQYKLVPERREIIRQIWWERLQGCQRIVEDWQKILMVRSLVVSPHEDMRTWLKYASLCGKSGRLALAHKTLVLLLGVDPSRQLDHPLPTVHPQVTYAYMKNMWKSARKIDAFQHMQHFVQTMQQQAQHAIATEDQQHKQELHKLMARCFLKLGEWQLNLQGINESTIPKVLQYYSAATEHDRSWYKAWHAWAVMNFEAVLHYKHQNQARDEKKKLRHASGANITNATTTATTAASAAAATSTEGSNSESEAESNESSPTPSPLQKKVTEDLSKTLLLYTVPAVQGFFRSISLSRGNNLQDTLRVLTLWFDYGHWPDVNEALVEGVKAIQIDTWLQVIPQLIARIDTPRPLVGRLIHQLLTDIGRYHPQALIYPLTVASKSTTTARHNAANKILKNMCEHSNTLVQQAMMVSEELIRVAILWHEMWHEGLEEASRLYFGERNVKGMFEVLEPLHAMMERGPQTLKETSFNQAYGRDLMEAQEWCRKYMKSGNVKDLTQAWDLYYHVFRRISKQLPQLTSLELQYVSPKLLMCRDLELAVPGTYDPNQPIIRIQSIAPSLQVITSKQRPRKLTLMGSNGHEFVFLLKGHEDLRQDERVMQLFGLVNTLLANDPTSLRKNLSIQRYAVIPLSTNSGLIGWVPHCDTLHALIRDYREKKKILLNIEHRIMLRMAPDYDHLTLMQKVEVFEHAVNNTAGDDLAKLLWLKSPSSEVWFDRRTNYTRSLAVMSMVGYILGLGDRHPSNLMLDRLSGKILHIDFGDCFEVAMTREKFPEKIPFRLTRMLTNAMEVTGLDGNYRTTCHTVMEVLREHKDSVMAVLEAFVYDPLLNWRLMDTNAKGNKRSRTRTDSYSAGQSVEILDGVELGEPAHKKTGTTVPESIHSFIGDGLVKPEALNKKAIQIINRVRDKLTGRDFSHDDTLDVPTQVELLIKQATSHENLCQCYIGWCPFW

SEQ ID NO: 13960 - protein, 2360 aa, Cryptococcus neoformans var. grubii
MSSQSDVLDNIFQRLSARSEDVRAQAGQDLAEHVVAYTQEYPGHDASKGVWAQVFHKTFEFTRSNNQLERLGAIIAISQLLQLTKDDTPDRAQQKVLRLYEYLRPLTTCGDSTVMLPASLVVEDMVRNSPTLHTDTFLGKEVGQALVMIDDSRQEVGRFSGALLLYAFARAAPGVFHQYISKVLEKIWIPLRDSRSVVRERASMLLSTCLDTLKTRGDRPSTDTYRKIFEEARLGLLKASSTESILGSLLAFNSMLQNQQLSMAEYYRSICELTFKYRDSKEVSIRKAVIALIPSMATYDSDDFEAHYLHRGMAYLLQALNRPADRDISYVALGHMAVHLGSKMKPFIDDIMRIIRDHLRMRGKKNAPYEAPIFQCLAMLATSVGPMLTRQMHEILDLMFPWGLSEPLCTALQATASHIPPLLRTIQDRLLEMLSQTLTGQSYRPLGAPAPRGGAQMDLNLLQSTTNAQSTDTLKLALRLLARFDFVGHTLSEFVRDAALPYLEHDSVEVRREAVLATTTLFMTDPICQQTSSNSVEIVNDVLSKLLTVAITDPNAGIRRTVLDHLEDKFDRHLAQAADIRCLFIALNDEVFGNRERTISIIGRLAHHNPAYVMPHLRKSLINIVTELEYSTNARQKEESAKLLCLMIGAAAGLVKSYAPTILSVLLRTASSPESSIGVQAECLKCIGELARVAGEELVPSVRAILDLVIEMLNDQSSPAKRDTALKTLGQIASNTGEVIKPYTDYPQLMGVLFKFLRMEANSSVRQETIKTIGMLGALDPFKHKTLLGDVDDPIDEGTTSRVNDIVLLNQHNSSVNDEFFQTVVIHSLVNVLHDSTYKDHYQAVEAIMMIFRTQRLRCVNFLPQIVPAFLNVIRIAHSSRTELYLKQLAQFITIVKLHIRNYLNDVFDLIHEFWNPNSTLQITIISLVEAIAKAVEGEFKAYLPKLLQQILRSFDGDLSAKHLPELKLNTLLQILKAFYVFGESIEDYLHLVLPVIVRSFENPAAPDSLRIAALRTTGQLCRKVNFSDHASQIIHPLVRTLGNSSEELRQTAMETLCVLVLQFGPDYAIFIPMVNKALVENKISHPGYEALITKLLNRERLPPDLGPVERYASDSAAEASAPEPVALKVNQQALKLAWDCSHLLNTSSRTEWISWIIGLGHEMMRESPSQAIRAARSLALSSVAFTKELFNVAFYSCWQELFESYQEDLWHNLDRAIKKDDVPGDVVNMILGATQFLEHDEKEVAIESRVLGSVAANYQALAVALHYKEQEFFLDPSKEVIEDLIDVNQKLQQSDAAWGTLEWAQTEMGMTTEVEWYEKLGRWEEALQVWNERDADASTTFSEWEITEGKVTCLHAMGEWEQLSDFVQARWANRTAEEKKLLSPLAAAASWSLKQWDLMDDYISAMKGDGADRAFFKAILAVHRNQIPAALKQISKARERLDPELTTLTGDSYGRAYDTVVRIQMLAELEEIIAYKDHADEPARQEMQRQTWKKRLAGCQRDVEVWQRILQVRSLVLKPNEDMDTWIEFADLCRTSDRLNLAEKTLTSLVGFQYPSMEDTRGRAPPPIIFAYLRMAWAKNLQIDSREERYETLQHLRDFTDQLTDDVGIGARGPNGRLMLPDQKLYGSYTKLLAQCHVELGQWQATLRESQGSADPSGILHDYCLATELDPEWYQAWHTWALANFEVITQLEVSQQGLSPVHFTTYIIPAVEGFLKSISLSPGNSLQDTLRLLTLWFTYGYSSGVTAAVSQGLPTVNIDVWLEVIPQIIARIQTPRQSIQQLIVQLLHDIGKAHPQALIYPLTVASKSTVAARRTVAQNITHKMREHSPKIVDQAELVSTELIRAAILWHEMWYDGLEEASKHYFGDHDIPGMLGVLEPLHEIVENGPQTLRETSFIQSFGHDLRIAREHLKRYRITQDGTEIQQAWDVYYSVFQRLGKQLKLLNVIELQYVSPKLMAVRDLDIAVPGTYQSGKPIIGIKNVIPTFKVIASKQKPRQCSMRGMDGKEYAYCLKGHEDLRQDERVMQLFGLVNTLLNNDHESAKRHLSIQRFSVTPLSPSAGLLGWVTHSDTIHVLIKQYRDQRKILVDIEHKLMQQMSDESYDSLPLLHKVEIFQYALDNTTGQDLYRILWLKSRNSDIWLERRTTYTRSLGLNSMVGYILGLGDRHPSNLLLDQITGKMVHIDFGDCFEVAQQRDKYPEKVPFRLTRMLIHAMEVCGITGNFSRSCEVSMEVLRDNRESLMAVLEAFVYDPLIAWRLTATDKRPGGVGEVKDLDDPAVYGKQRKNKANETEILNDVENTEVKNDKGLQVIERVRRKLTGRDFKPDVVLDVKSQVEKLVVEATKTENLCVAFLGWCSFW

SEQ ID NO: 13961 - protein, 2383 aa, Anopheles gambiae str. PEST
LKSRNKDVQNKAIKDLSLYVKTELRETPDDMFFEDFNHHIFEMLTSTDNNEKKGGILAIDCLINGDVVNTTNKISRYSNNLRNLLPMSDVCVMQLAANVLVKLALLPGSNGASSFEFDIKRAFEWLSEDRVENKRHAAVLVLRELAVAMPTFFYQQVGSFFDHIFVAIKDPKAAIREGAGQALRAVLIVTSQREGTKQNNNTQWHMNCYDQAFDSRYYDVVTDMKFFRQNSSVQESALYRALVKEKYDTICQAVLDQRSSKSPYVIQTLLAIFPRLAAFNREEFVRLHLRTVANYLLTLLRSKEKERNAAFVSLGYIAVAVEKEIEPYTKRIMELIGSALPLKDTPSKRKAPVDPSVFMCVMLLGHALKGGITHEIKEIIAPMLSTGLSPALIVCLRELCETVPQAQQEITAGLLKILSYVLMNRPLPQFIVPKSHSVVSPAFLSSLEQQPQSQPPQQQVHDTATIVLALQTLGKFSFEGCSLLQFVQRCADHFLNSEQQEIRIEAVHTCTFLLKLALQAAESNGNDVSETLTQTLSSVLEKILVVGITDVDPAVRLRVLKSLDESFDTQLAQPWFLSSLLVTIHDEVFEIRELAIIIIGRLSTINPAYVMPSLRKTMVQLLTELEHSGVSRNKEQSARMLDHLIVSTPRLVASYMRPILTILVPKLKEPDQNPSVVLNVLRAIGDLAEVIGGHHVLQKWSDELLQLLLDMLSDAGSTEKRAVALWTFGQLVSATGQVVVPYNKYPNLIDILINFLKTEQQLYVRRETIRVLGLLGALDPYKHKMNRGLIDSQTSANILISVDTKTDEHTDLSTSEMLINMSTQLDEYYPAVVISTLMKILRDPTLSNHHLSVVQAITFTFTSLGIKGVPYLSQVLPCLLRNIVTAEMSLKEYLFQQLSTLISIVKQHIIGFMDDIFELIKTFWTTGGAGVPGGGGSSSSTASAASLQPTIINLVEKIAIALGCEFKVYLPQLMPQILRVLLHDTSKDRAVTVKLLGAMRNFGNNLDDYLHLIIPAIVKLFEPLDIPLNVSITALQTINYLAEVLDFTDFSSRIVHPLVRVLDFYPELRPVALTTLCSIMIQLGRKYLVFVPLVNRVMIKHKIPSVEYTKLLTKLQNNSTLAMDDEFRIRQARNRNREISLPSDSTIKKFPVSMSDLEAMFKANRRVSKDDWLEWLRRLSIILLKESKNPALRSCATLAQNYPQLLKDLFNAAFVSCWSDLSEKLKQDLAHSLTQALTVQDLPEITQTVLNLAEFMEHCESYPLKIDSKILGERAMECRAYAKALHYKEDEFHRTDDPPQSLFESLILINNKLQQKEAAEGLLEYAGRHRSSAEEMKVQVRWYEKLHSWEQARSLYSEKLKSNPNDLESRLGEMRCLEALGEWSALNAVTTQNWDALGSEGQSKAGRLAAAAAWGLQDWDGMHRFVRCIPEDTQDGAFYRAVLAVHNEQYALAQSLIDSTRDLLDTELTAMAGESYERAYGAMVCVQMLAELEEVIQYKLIPERRETIKSMWWDRLLGGQRLVEDWQRVIQVHSLVLSPKEDIRTWLKFASLCRKNGSLKLSEKTLTMLLEYDPMENLSEPLPIDKPHVTFAYTKHLHMAGYTKEAYDHLNRFVASFSPQAFTASSGAGGQDDLKDENRRLLARCFLKLGMWQSSSTGGNLVKDHLINGILVCYSRATKHDPNWYKAWHNWAYMNFEVVQAKKQQEEYTKNPGSAAERNLIKHYAVPAVRGFFQSINLSQGNSLQDTLRLLTLWFDHAQYEEVYEALVEGMRVIDKNTWLQVIPQLIARIDTPRNLVGQLINYLLTEIGKTHPQALVYPLTVASKSAPGTRKQAAHKILNNMCEHSNTLVNQVLLISEELIRVAILWHEQWHEGLEEASRLYFGEQNVEGMFATLEPLHAMLQRGPQTLKESSFNQAYGRDLTEAQEWCKHYKNSKNTRDLNQAWDLYYHVFRRISRQLVQLTSLELQYVSPKLLACRNLELAVPGSYTPGQQLICIASIETNLTIISSKQRPRKLCIRGSNGKNYMFLLKGHEDLRQDERVMQLFGLVNTLLLNDRDTFRRNLTIQRYAVIPLSTNSGLIGWVPHCDTLHKLIRDYRDSKKTMLNIEHRIMLRMAPDYDHLTVMQKVEVFEHALDQTKGDDLAKLLWLKSPSSEQWFDRRTNYIRSLAVMSMVGYILGLGDRHPSNLMLDRLSGKILHIDFGDCFEVAMTREKFPEKIPFRLTRMLINAMEVTGIEGTYRRTCESVMNVLRRNKDSLMAVLEAFVYDPLLNWRLLDSDRLRRSKNAGDMDSVSGSMHEDSLLSYNARRDARLNELNATTGPAAGGQPSATVNVPSGVKDKLTGKDFGKAEPVAVNRQIDLLIQQATSNENLCQCYIGWCPFW

SEQ ID NO: 13962 - protein, 2593 aa, Anopheles gambiae str. PEST
RKAPYPTRAPDVAAGIRDEPPCPLTKEHVPLSAPGRHDAGQTMGGKGDTKPSQQQCAAKRRTKKKPATDQQRQPKTIPSGGGGSGLVRASSGDRQEQEMSAGGGKRYQTARTQAASQRRVRRLASDGPAGPGGGGAVPHELAANVPADMRISKLLRRLVGETSGGPLFVELCDRLELVILDPSNASYVRKSFDLLAHTVAQILEGGLRECQDRVAQLFGMLLHVLVGGAGPDCGAVLRGWTDRYLNQSKRIRRPALVALRQLVVLDRTERGLEPVADWLVGYLQQILEQTDVLDVFLLVTDVMVRLADGYGHAFAPHFSDIVDIVVGWQLESTQPTAVKLHCARVLLAFRPFWCEQRDVTFNLLEQFSEDIDGHCGDVEYADRAQADDANRLFGALLTAFNSVFKCLQDAAGDGTFLLQPDELARFDCCCCTIVAIVVRLLEAPPTGLAVAAICEFIMLKLMLPATTLTPLGEDELLEIVGRLVQHGSGYSDEQIGAVLHLLLQYADAGGNTERQHARALALRPLIFAESGPFYAFRYRQSAAVKRALLLLYHRMLTLKHAEVLQGAYRSILADIDDALGRLRAVGNRTPSPGTLVRLQYRIQFNLLLLSPLAMARSSIFITWTLREDPVLHVLLERLAPADGRLWDRRTHAPLHYAVLLTAFHHCSANNHFISSSGLLRPAGRTVVERFRRDTSDTDAPPESPTADHFGLVLRFLGTILRQWGTRQQSGGRLYGAVRGTELLPLLLDWCVAIVTQTTRYHDVLHECDDFNQLLVHVGTVAVERGSESETIGLRCADCLDAACRFASLHPSAYQAIAEACCVHLCSVYGSLRTRYTVIFSKLPLRHSLRQVNEFTGVNRRRWEQIGELKNGLYHQGGYALQHSATLRMADLRTLFNRIAFSRDGSEYAGGYLHELLTRSFNQPSRYGEMALRDLRCLIPWAQWEAAQLCVNQKLRTPFGKPQSTFLRIESIVKQCARILALTDRFPVRDIRTSIANQRHARILLGFLEALEKSIYNAAEGTAYALPAPEKPARTFFRVNQSTCAEWFTRIRTAVDLVALHCMEPEMVIRYSEAVLRELVAAGKTGDPIFEHMLMSLVWALVRNWESDALYGVYVWSKRLTGRKYSWIRMAAEEASGHRETAASGFRSILADPGSAGMDRHIRDFIVDQTILSLLFTGDYRQLYEFLLAEESSGTPRATIPLITVTAAQIRSIIRYEETHDVSVIDISQWELVDVGTNIPNDFSCHKAICAVENSLSGIILQEQIEQRQRMIDASTELIQCYLQECLLTRCREYLFQLTITNHILYKIAQRIRAPDATAAAGEAAGATASATADGSGGLGSLNVEKFYGTLTLMRLLAWSEFLLADAGAGEQQQNIDLRLDLVSIGRKEKNYALCRRELEKYYHKSNLIGRLGAAGDEPPKQQRLTLEQVAAALTARSAGAAVWDENLSRAVYEHCKWLHCQPGKRLEAINFAACATAAIDGVLRERRGSEPRLAERVGRFLLTISDWMAGEAGEPTANELASVRRLGQLLPAVGAKPLAADHAHMFRASDRLIGTLLQGAVDRCPSLAKAWFALGSWLYRWGKRLVEHSAADGSPSSSPVRISVDQVAGIVAGPAVSLADCERIVEILNEHEPARMMAGPDGGEGDEPDELELDSSATIGSIGLLDALHRAMPRLERNVPPDRLHAIIDIWRSNHRAVYGHYEAAAEAYFRFLQLSSGRNEAVEEEGVDSERARSVTVTLRLLRLIVKHALGLKEVLEEGLATTPSEPWRVITPQLFSRLAHHEPYVRRRVSELLCRVAKDAPHLIIFPAVVGSVQEEPGQLAVVDVLRDGVEEVSNRLEGEGESAQSAQDGGAGLSFCFNALLDILSREIPDTVKQVQTLVHELRRISLLWEELWVVSLQQIYADYTKRIPTFEAEYRRLYASGQLTDQRRALLAEKHRLLLRPLLFVLEQLYGITSRPAETNHERHFQERYHRYIRNMLAKLREPADFSRPIEGWNRFRTLYAQLQQRSQKRFSFFLRLADVSPNLLRLSNTAIAMPGIDTTLAGSRQPILIRTVDNNIQILPTKTRPKKLTFCGNDGRRFGYLSKGLEDLHLDERIMQFLSIANLMMTKSIDCNGNVTHYRAEHYSVIPLGPRSGLITWVDHTVPIFSLYKKWQQREALQKKEGKGAGSSATLRPSELFYNKLTPLLQSHGLKANASRREWPLPVLKQVLAELQQETPRDLLAKELWCHSATASSWRQVIRSYSLSLAVMSVIGYIIGLGDRHLDNVLVKLATGEIVHIDYNVCFEKGKTLRVPEKVPFRMTPNLEEALGMTGIEGTFRLACEHVLKSLKKGRETLLTLLEAFVYDPLVDWAVGEEIGSGLPMTATDITVSTAAAASHAPGSVATTRSISQAKKQLDREVTRDTLAVRFAECRTDWYQNRDELLQHLLCLQKLVRELGEVRRETAESERLRSLYSQMLQLIGEVGYLDTAFGSHPLASLAQRLEMRAQLQEVYGVQRTQMAQQADRLAQQLAQYERVRRAVEEQKQKEQKEQKRNAYAVSVWRRIRMKLEGRDPDPGRRCGVSDQVGWMIDEAMDPNNLAVLYEGWTPWV

SEQ ID NO: 13963 - protein, 2604 aa, Giardia lamblia ATCC 50803
MSEDHFEKIRRGKHSQYKSMTIKAEDCHSWAGSTLGEAPTPSGGATIIPPAVVSNQSFATTISPKTRHIRTHSSSHLDDMSSTSFCINQDCILSQDILKSSDLGTDGFFNSGPYRHMLISDTLRQIIIIGTTDIDPEVRMSIIQALTTTNRYDIYLVHESSLRTLFIALYDDNIEIRILAVKLIGRLCSLNPALVTPEIRHLILVLLTELRLTTENNKRATSNELIVKIFKFCGSIVLPYVPMVYSAVMGLISKDCDDEYLLITSLTTLAELFTIGSTSMVHCLAEVIPLLITCIKEETSKTLRLTTTRCFVRIVEATSFVVFPWFIYHDLFTIVFGILKNDTSQEIRLEAAKLITTIGAIDPIFYQNGKPDLSALVPPTNLTCKCQSTDVFSLDYIMDESNIWVCHKGEGGAAQEASIKSHGKAVVSPITGHVVENVYIMKLDSGSEVSANVSDFELTLNVIMSTLYSILSESTLDMYHYDAVVVFRTIIQTECTAISLPMVPKIISLILENIQNCKVFMQETMLRELILIISSIGHHAHSYVSDIFDIIEVLWANQQLIELILALLEEVSIVLDLSLGNYGSQFFLKFVGLFTVLKSSQEISDSAKKLLIRACRSVVALSSLFSNHIHLIVDLLCSGIRKQKLGKELRFALLDTLSRLTICTNLSRFGASIIHPILEVIMEADPCTSVEHNKNANPEKGLNPMNIVSYKAFEVLHFICAQFGVSVTLYIPVITECLLKVGFTSGLLDSIFSLLLRREEVDPVTFYRLICEWKKKQAKKFSEYTSLASLLAMYETPVTQDTLLYMESISNKVPGDDKDAMILVVKDINFDDIGSVINYLHTSSTWFGDDMRPLPAGAIGVHSLSIQENDMLNKHVTIPQQIWRADTCKKNEEWRHWLSNLSLTLLQCSPLKCLRACHKLATSYPRVARDLFNYSFLACLSETYPSNNEHRNYIVESIRSVFLSQNCPLDVLQILLDLAEFWENRSREFSTTFSHNFLGEVAERCHAYTRSLRYKETEYAQHPIEAVGRLIAINYSLGYEETAIGTLRVECKRLNFISTNLIYDILLRCLYTGLDDVFTMMQREGGLEPGAAVNCSAESTLERIINKVVSKIVTKALTEAKKISNLNQSIPQQLVSYGSIGGIFVEGRPVMSGPEGSVLQVDYNEIGIYLSALARRMLKSKLTYQYPTFLMYEENLFQSVLKTLRYKAQGHMQDLYGPSPKWFENVCLWDKALSGYNRQIDQLKLSLKSNTSEARTLLPMLVNLTKDKIRCLFALADYSAVQEEADQLLNYLSSESKEEAGLTTVKHTLIKGFQADIATYAAWSLLEQDQEDVEIWLRVLPEDNIDGTIIRATSYIKANKMLEAHKLLCKLRLRIDPDLIGLSAESYTRAYNLCILLQTITELQNIISYKLALNGLKLDAPSTLIKEGGNPYENIFETTLISFNPPPGFADTEKERLRLMWSRKISMIRWDCESWEALLRVRRLIIFPIEDQEVWIRFSVLCLQSGRVQLARKTLETFINSSSVHHIKVSKSRGLYTLLGLTSFGTPRRYLKHGSGDVSTGGSVTPIGSALGAEMGVVQDLSAVGSSLAKYLLKDGVVKDAFTAQQHVALPTSDVLSIASHSVAKPTLQMIANASTHQGQSIEKETPLSIVGQQCDDAKRNAQRDLFNALIPPLNHVYPHVLYAYCKHLWVSSNENVLEKLVAFTHLIRLCNDVSIQKTEPKLVCRMLIRLGAWYSDLLTPLDHKSCSMIGTISPSEGYVNIPVQDTVTSCSAIWNSIVNNCDADASVCSTTYEATEHSAERLELSSASTLDKAVAKLVDNILLAYDELSNVSLEECNQYNTVGMSRIGLIALEWFQVAADRDETSNHIWKCISHTTYAIVNSFAAYIDKLNDRPGVDGGLQIVTRRSSVDATSDAVGSTSEALSQSVQDSDRPLVCPEHLGFVQNRQVLLEKAKLEYLVESIIAHFKCIETGRSIEALPTTLRLMTLWFRYGSYDEVETEIINGLAAVPINIWLDVIPQLIARLHSPQHKIRLLVHQLLVLIGTEHPQALIYPLVVASKSTILNRRVESLSIVDQIRRTNEAMILESLNINKELQRVAILWPEIAYDLITQASTAFCEEPRDLVKFFNYACQLQLLASRTPETQSESVFIQMFSSQLQAAWDSCRQFPVTNDLVCLNIVMKHYKEIYDRIHSELPFLNTIDLLQTSPLLYNISNTNLCVPGSYHPARAITTIVKFYQKVFVIRSKQRPRKVGLVASDGEYYAFLLKGHEDLRQDERVMQLFTLINNLLMNDSYCSRRGLMVMKYPITPLSQNSGLLYWVPGCDTIISLIKEFRQLKRIHLETEMQQIKYRAPAFMNMALHYKVDAFKYMLTTSDAIDLCRSLWNKASSAEDWLLKRMNYTRSIAVSSIVGYILGLGDRHPANLMIERTTGMVLHIDYGDCFEVAMHREQLPEKVPFRLTSIMMKAFESCGTEGSFRMTGEATMSILRSNKDSLVSVLETFIYDPLMSMKVLSGENTMGGKENIDGNTEFYGTRRPVQESYLEGNERNPKAVKIVQRIYDKLTGYDIKYIDRSLSVSEQIQSLIHSATNAENLCQLYIGWCPYW

SEQ ID NO: 13964 - protein, 1525 aa, Giardia lamblia ATCC 50803
MMQREGGLEPGAAVNCSAESTLERIINKVVSKIVTKALTEAKKISNLNQSIPQQLVSYGSIGGIFVEGRPVMSGPEGSVLQVDYNEIGIYLSALARRMLKSKLTYQYPTFLMYEENLFQSVLKTLRYKAQGHMQDLYGPSPKWFENVCLWDKALSGYNRQIDQLKLSLKSNTSEARTLLPMLVNLTKDKIRCLFALADYSAVQEEADQLLNYLSSESKEEAGLTTVKHTLIKGFQADIATYAAWSLLEQDQEDVEIWLRVLPEDNIDGTIIRATSYIKANKMLEAHKLLCKLRLRIDPDLIGLSAESYTRAYNLCILLQTITELQNIISYKLALNGLKLDAPSTLIKEGGNPYENIFETTLISFNPPPGFADTEKERLRLMWSRKISMIRWDCESWEALLRVRRLIIFPIEDQEVWIRFSVLCLQSGRVQLARKTLETFINSSSVHHIKVSKSRGLYTLLGLTSFGTPRRYLKHGSGDVSTGGSVTPIGSALGAEMGVVQDLSAVGSSLAKYLLKDGVVKDAFTAQQHVALPTSDVLSIASHSVAKPTLQMIANASTHQGQSIEKETPLSIVGQQCDDAKRNAQRDLFNALIPPLNHVYPHVLYAYCKHLWVSSNENVLEKLVAFTHLIRLCNDVSIQKTEPKLVCRMLIRLGAWYSDLLTPLDHKSCSMIGTISPSEGYVNIPVQDTVTSCSAIWNSIVNNCDADASVCSTTYEATEHSAERLELSSASTLDKAVAKLVDNILLAYDELSNVSLEECNQYNTVGMSRIGLIALEWFQVAADRDETSNHIWKCISHTTYAIVNSFAAYIDKLNDRPGVDGGLQIVTRRSSVDATSDAVGSTSEALSQSVQDSDRPLVCPEHLGFVQNRQVLLEKAKLEYLVESIIAHFKCIETGRSIEALPTTLRLMTLWFRYGSYDEVETEIINGLAAVPINIWLDVIPQLIARLHSPQHKIRLLVHQLLVLIGTEHPQALIYPLVVASKSTILNRRVESLSIVDQIRRTNEAMILESLNINKELQRVAILWPEIAYDLITQASTAFCEEPRDLVKFFNYACQLQLLASRTPETQSESVFIQMFSSQLQAAWDSCRQFPVTNDLVCLNIVMKHYKEIYDRIHSELPFLNTIDLLQTSPLLYNISNTNLCVPGSYHPARAITTIVKFYQKVFVIRSKQRPRKVGLVASDGEYYAFLLKGHEDLRQDERVMQLFTLINNLLMNDSYCSRRGLMVMKYPITPLSQNSGLLYWVPGCDTIISLIKEFRQLKRIHLETEMQQIKYRAPAFMNMALHYKVDAFKYMLTTSDAIDLCRSLWNKASSAEDWLLKRMNYTRSIAVSSIVGYILGLGDRHPANLMIERTTGMVLHIDYGDCFEVAMHREQLPEKVPFRLTSIMMKAFESCGTEGSFRMTGEATMSILRSNKDSLVSVLETFIYDPLMSMKVLSGENTMGGKENIDGNTEFYGTRRPVQESYLEGNERNPKAVKIVQRIYDKLTGYDIKYIDRSLSVSEQIQSLIHSATNAENLCQLYIGWCPYW

SEQ ID NO: 13965 - protein, 1104 aa, Giardia lamblia ATCC 50803
MSTDAITSSRFYPYLADLKSIDPNIYTRAAMAIRMQVEKDSRQMLADPRTLFISDLMSFIRNLATSSSYEDRLASLWVMRELIQSRPTISMIPLTYFEEIALELVNDPSEVIILTNCVFIGRLINAEGHGIDFVPKLFVISIDKIKSGDSTKVYTGMLLFNDLTEVETSFAIDISSEEFLEPIWHVITETRNSNIKEVGFKAINKFISYQKKATKHDVLVRLITMIRAALDGKNISEQLIALHLLLNMLNLSVKDKSIADYFQENYSSFFSLVANIFRSKTSEGRMLVASIISLFAKLDPERFCTTERLQMILTFYKKMIPTQQELFIPLGEFVIVIGEKHVKPIFNDLINLITSSFKSQNFTKAGSILPPEPLKCIQYITKGAPNLVQKHVTSILECIFSVGLCESLTSALQDLSANLHNRLLDIQGLLLYLVANELGGINLFLSNAYGVIDGSEDYYLVLTENQSQAVADGHDSGVLDSQTSIIPGTRPSTTQATTHVEDTRTNEDAIELAHDLSITGLKEESEQCDFKNSLSVYQTVTTSAGITALYKLSDRIATALGTSKLRPRRHSTSEAILLAFQALYDFDFSLFDLTIFAADYLTRYLRNDSSTLRIKAAQTILKLMSEDHFEKIRRGKHSQYKSMTIKAEDCHSWAGSTLGEAPTPSGGATIIPPAVVSNQSFATTISPKTRHIRTHSSSHLDDMSSTSFCINQDCILSQDILKSSDLGTDGFFNSGPYRHMLISDTLRQIIIIGTTDIDPEVRMSIIQALTTTNRYDIYLVHESSLRTLFIALYDDNIEIRILAVKLIGRLCSLNPALVTPEIRHLILVLLTELRLTTENNKRATSNELIVKIFKFCGSIVLPYVPMVYSAVMGLISKDCDDEYLLITSLTTLAELFTIGSTSMVHCLAEVIPLLITCIKEETSKTLRLTTTRCFVRIVEATSFVVFPWFIYHDLFTIVFGILKNDTSQEIRLEAAKLITTIGAIDPIFYQNGKPDLSALVPPTNLTCKCQSTDVFSLDYIMDESNIWVCHKGEGGAAQEASIKSHGKAVVSPITGHVVENVYIMKLDSGSEVSANVSDFELTLNVIMSTLYSILSESTLEHVPL

SEQ ID NO: 13966 - protein, 651 aa, Glomus mosseae
  unsure (1)..(651): unsure at all Xaa locations
GILTHAQQNPNLQDLQLKENWYEKLNRWEDALTAYEKRRTDDPNDNEATLGVMRCLHSLGDMDGLSELVQEKWPEAETEMRKSIATYAAAGAWSLGQWGLMEDYIKNIKSDNYYRPFYQAIIALHKNQYSEAVRYIDKTRDLLDTELTALVGESYNRAYNVVVRVQMLAELEEIITYKQYAQGVPRNVDVWQQILKVRALVISPKENMEMWIKFANLCRKSDRLEFAEKTLKLLLVGDQKLELIHPSILARXSPQVVYAHLKWMWASXVREEALEFLRDFTTRMSNNDRVGNNGLLARCYLKKGEWQKVLQDDWDRETVPDILQSYLLATQYDKDWYKAWHAWALANLEVISFYEKLKSAENNTPADQTITSVTEEISGDIQQEVLRYVYRPFKGFFRSIALSRGNCLQDTLRLLTLWFKYGYQEEVCSAIKEGYGSVNIDTWLEVIPQLIARIHAPDQKVRRLIHDLLAEVGKEHPQALIYPLTVASKSQSFNRQTAASSVMDKLRAHSAVLVEQALLVSQELIRVAILWHEIWMENLEEASRLFFIERNFEAMFNILDELQERLDRGPETLREVAFVQAYGRELQEAGGWCKKYKQTGDMTFLSQAWQIYHEMFKKITAQVGTITTLELQYVSPKLLAARDLELAVPGP

SEQ ID NO: 13967 - protein, 2481 aa, Arabidopsis thaliana
MSTSSQSFVAGRPASMASPSQSHRFCGPSATASGGGSFDTLNRVIADLCSRGNPKEGAPLAFRKHVEEAVRDLSGEASSRFMEQLYDRIANLIESTDVAENMGALRAIDELTEIGFGENATKVSRFAGYMRTVFELKRDPEILVLASRVLGHLARAGGAMTSDEVEFQMKTAFDWLRVDRVEYRRFAAVLILKEMAENASTVFNVHVPEFVDAIWVALRDPQLQVRERAVEALRACLRVIEKRETRWRVQWYYRMFEATQDGLGRNAPVHSIHGSLLAVGELLRNTGEFMMSRYREVAEIVLRYLEHRDRLVRLSITSLLPRIAHFLRDRFVTNYLTICMNHILTVLRIPAERASGFIALGEMAGALDGELIHYLPTIMSHLRDAIAPRKGRPLLEAVACVGNIAKAMGSTVETHVRDLLDVMFSSSLSSTLVDALDQITISIPSLLPTVQDRLLDCISLVLSKSHYSQAKPPVTIVRGSTVGMAPQSSDPSCSAQVQLALQTLARFNFKGHDLLEFARESVVVYLDDEDAATRKDAALCCCRLIANSLSGITQFGSSRSTRAGGRRRRLVEEIVEKLLRTAVADADVTVRKSIFVALFGNQCFDDYLAQADSLTAIFASLNDEDLDVREYAISVAGRLSEKNPAYVLPALRRHLIQLLTYLELSADNKCREESAKLLGCLVRNCERLILPYVAPVQKALVARLSEGTGVNANNNIVTGVLVTVGDLARVGGLAMRQYIPELMPLIVEALMDGAAVAKREVAVSTLGQVVQSTGYVVTPYKEYPLLLGLLLKLLKGDLVWSTRREVLKVLGIMGALDPHVHKRNQQSLSGSHGEVPRGTGDSGQPIPSIDELPVELRPSFATSEDYYSTVAINSLMRILRDASLLSYHKRVVRSLMIIFKSMGLGCVPYLPKVLPELFHTVRTSDENLKDFITWGLGTLVSIVRQHIRKYLPELLSLVSELWSSFTLPGPIRPSRGLPVLHLLEHLCLALNDEFRTYLPVILPCFIQVLGDAERFNDYTYVPDILHTLEVFGGTLDEHMHLLLPALIRLFKVDAPVAIRRDAIKTLTRVIPCVQVTGHISALVHHLKLVLDGKNDELRKDAVDALCCLAHALGEDFTIFIESIHKLLLKHRLRHKEFEEIHARWRRREPLIVATTATQQLSRRLPVEVIRDPVIENEIDPFEEGTDRNHQVNDGRLRTAGEASQRSTKEDWEEWMRHFSIELLKESPSPALRTCAKLAQLQPFVGRELFAAGFVSCWAQLNESSQKQLVRSLEMAFSSPNIPPEILATLLNLAEFMEHDEKPLPIDIRLLGALAEKCRVFAKALHYKEMEFEGPRSKRMDANPVAVVEALIHINNQLHQHEAAVGILTYAQQHLDVQLKESWYEKLQRWDDALKAYTLKASQTTNPHLVLEATLGQMRCLAALARWEELNNLCKEYWSPAEPSARLEMAPMAAQAAWNMGEWDQMAEYVSRLDDGDETKLRGLASPVSSGDGSSNGTFFRAVLLVRRAKYDEAREYVERARKCLATELAALVLESYERAYSNMVRVQQLSELEEVIEYYTLPVGNTIAEERRALIRNMWTQRIQGSKRNVEVWQALLAVRALVLPPTEDVETWLKFASLCRKSGRISQAKSTLLKLLPFDPEVSPENMQYHGPPQVMLGYLKYQWSLGEERKRKEAFTKLQILTRELSSVPHSQSDILASMVSSKGANVPLLARVNLKLGTWQWALSSGLNDGSIQEIRDAFDKSTCYAPKWAKAWHTWALFNTAVMSHYISRGQIASQYVVSAVTGYFYSIACAANAKGVDDSLQDILRLLTLWFNHGATADVQTALKTGFSHVNINTWLVVLPQIIARIHSNNRAVRELIQSLLIRIGENHPQALMYPLLVACKSISNLRRAAAQEVVDKVRQHSGALVDQAQLVSHELIRVAILWHEMWHEALEEASRLYFGEHNIEGMLKVLEPLHDMLDEGVKKDSTTIQERAFIEAYRHELKEAHECCCNYKITGKDAELTQAWDLYYHVFKRIDKQLASLTTLDLESVSPELLLCRDLELAVPGTYRADAPVVTISSFSRQLVVITSKQRPRKLTIHGNDGEDYAFLLKGHEDLRQDERVMQLFGLVNTLLENSRKTAEKDLSIQRYSVIPLSPNSGLIGWVPNCDTLHHLIREHRDARKIILNQENKHMLSFAPDYDNLPLIAKVEVFEYALENTEGNDLSRVLWLKSRSSEVWLERRTNYTRSLAVMSMVGYILGLGDRHPSNLMLHRYSGKILHIDFGDCFEASMNREKFPEKVPFRLTRMLVKAMEVSGIEGNFRSTCENVMQVLRTNKDSVMAMMEAFVHDPLINWRLFNFNEVPQLALLGNNNPNAPADVEPDEEDEDPADIDLPQPQRSTREKEILQAVNMLGDANEVLNERAVVVMARMSHKLTGRDFSSSAIPSNPIADHNNLLGGDSHEVEHGLSVKVQVQKLINQATSHENLCQNYVGWCPFW

SEQ ID NO: 13968 - protein, 2513 aa, Arabidopsis thaliana
MSTSSQSFVAGRPASMASPSQSHRFCGPSATASGGGSFDTLNRVIADLCSRGNPKEGAPLAFRKHVEEAVRDLSGEASSRFMEQLYDRIANLIESTDVAENMGALRAIDELTEIGFGENATKVSRFAGYMRTVFELKRDPEILVLASRVLGHLARAGGAMTSDEVEFQMKTAFDWLRVDRVEYRRFAAVLILKEMAENASTVFNVHVPEFVDAIWVALRDPQLQVRERAVEALRACLRVIEKRETRWRVQWYYRMFEATQDGLGRNAPVHSIHGSLLAVGELLRVYSLMLEFVCRNTGEFMMSRYREVAEIVLRYLEHRDRLVRLSITSLLPRIAHFLRDRFVTNYLTICMNHILTVLRIPAERASGFIALGEMAGALDGELIHYLPTIMSHLRDAIAPRKGRPLLEAVACVGNIAKAMGSTVETHVRDLLDVMFSSSLSSTLVDALDQITISIPSLLPTVQDRLLDCISLVLSKSHYSQAKPPVTIVRGSTVGMAPQSSDPSCSAQVQLALQTLARFNFKGHDLLEFARESVVVYLDDEDAATRKDAALCCCRLIANSLSGITQFGSSRSTRAGGRRRRLVEEIVEKLLRTAVADADVTVRKSIFVALFGNQCFDDYLAQADSLTAIFASLNDEDLDVREYAISVAGRLSEKNPAYVLPALRRHLIQLLTYLELSSADNKCREESAKLLGCLVRNCERLILPYVAPVQKALVARLSEGTGVNANNNIVTGVLVTVGDLARVGGLAMRQYIPELMPLIVEALMDGAAVAKREVAVSTLGQVVQSTGYVVTPYKEYPLLLGLLLKLLKGDLVWSTRREVLKVLGIMGALDPHVHKRNQQSLSGSHGEVPRGTGDSGQPIPSIDELPVELRPSFATSEDYYSTVAINSLMRILRDASLLSYHKRVVRSLMIIFKVLPELFHTVRTSDENLKDFITWGLGTLVSIVRQHIRKYLPELLSLVSELWSSFTLPGPIRPSRGLPISYGEYFASLTDNQVLHLLEHLCLALNDEFRTYLPVILPCFIQVLGDAERFNDYTYVPDILHTLEVFGGTLDEHMHLLLPALIRLFKVDAPVAIRRDAIKTLTRVIPCVQVTGHISALVHHLKLVLDGKNDELRKDAVDALCCLAHALGEDFTIFIESIHKLLLKHRLRHKEFEEIHARWRRREPLIVATTATQQLSRRLPVEVIRDPVIENEIDPFEEGTDRNHQVNDGRLRTAGEASQRSTKEDWEEWMRHFSIELLKESPSPALRTCAKLAQLQPFVGRELFAAGFVSCWAQLNESSQKQLVRSLEMAFSSPNIPPEILATLLNLAEFMEHDEKPLPIDIRLLGALAEKCRVFAKALHYKEMEFEGPRSKRMDANPVAVVEALIHINNQLHQHEAAVGILTYAQQHLDVQLKESWYEKLQRWDDALKAYTLKASQTTNPHLVLEATLGQMRCLAALARWEELNNLCKEYWSPAEPSARLEMAPMAAQAAWNMGEWDQMAEYVSRLDDGDETKLRGLASPVSSGDGSSNGTFFRAVLLVRRAKYDEAREYVERARKCLATELAALVLESYERAYSNMVRVQQLSELEEVIEYYTLPVGNTIAEERRALIRNMWTQRIQGSKRNVEVWQALLAVRALVLPPTEDVETWLKFASLCRKSGRISQAKSTLLKLLPFDPEVSPENMQYHGPPQVMLGYLKYQWSLGEERKRKEAFTKLQILTRELSSVPHSQSDILASMVSSKGANVPLLARVNLKLGTWQWALSSGLNDGSIQEIRDAFDKSTCYAPKWAKAWHTWALFNTAVMSHYISRGQIASQYVVSAVTGYFYSIACAANAKGVDDSLQDILRLLTLWFNHGATADVQTALKTGFSHVNINTWLVVLPQIIARIHSNNRAVRELIQSLLIRIGENHPQALMYPLLVACKSISNLRRAAAQEVVDKVRQHSGALVDQAQLVSHELIRVAILWHEMWHEALEEASRLYFGEHNIEGMLKVLEPLHDMLDEGVKKDSTTIQERAFIEVGNFNPGFLAYRHELKEAHECCCNYKITGKDAELTQAWDLYYHVFKRIDKQLASLTTLDLESVSPELLLCRDLELAVPGTYRADAPVVTISSFSRQLVVITSKQRPRKLTIHGNDGEDYAFLLKGHEDLRQDERVMQLFGLVNTLLENSRKTAEKDLSIQRYSVIPLSPNSGLIGWVPNCDTLHHLIREHRDARKIILNQENKHMLSFAPDYDNLPLIAKVEVFEYALENTEGNDLSRVLWLKSRSSEVWLERRTNYTRSLAVMSMVGYILGLGDRHPSNLMLHRYSGKILHIDFGDCFEASMNREKFPEKVPFRLTRMLVKAMEVSGIEGNFRSTCENVMQVLRTNKDSVMAMMEAFVHDPLINWRLFNFNEVPQLALLGNNNPNAPADVEPDEEDEDPADIDLPQPQRSTREKEILQAVNMLGDANEVLNERAVVVMARMSHKLTGRDFSSSAIPSNPIADHNNLLGGDSHEVEHGLSVKVQVQKLINQATSHENLCQNYVGYVPLHFYTPKPRLL

SEQ ID NO: 13969 - protein, 374 aa, Arabidopsis thaliana
MQLFGLVNTLLENSRKTAEKDLSIQRYSVIPLSPNSGLIGWVPNCDTLHHLIREHRDARKIILNQENKHMLSFAPDYDNLPLIAKVEVFEYALENTEGNDLSRVLWLKSRSSEVWLERRTNYTRSLAVMSMVGYILGLGDRHPSNLMLHRYSGKILHIDFGDCFEASMNREKFPEKVPFRLTRMLVKAMEVSGIEGNFRSTCENVMQVLRTNKDSVMAMMEAFVHDPLINWRLFNFNEVPQLALLGNNNPNAPADVEPDEEDEDPADIDLPQPQRSTREKEILQAVNMLGDANEVLNERAVVVMARMSHKLTGRDFSSSAIPSNPIADHNNLLGGDSHEVEHGLSVKVQVQKLINQATSHENLCQNYVGWCPFW

SEQ ID NO: 13970 - protein, 494 aa, Glycine max
  unsure (1)..(494): unsure at all Xaa locations
XARARLYYGDGNVEAMFATLDPLHDMLERGPETLREIAFQQSFGRDLQDARESCRRFQQYGELNDLNQAWDLYYQIFKRIARILPSFSILELQQVSPKLLAARDLELAVPGTYHSGKPIIRISKFAESLDVLTSKQRPRKLKVAGSDGKDHAFLLKGHEDLRQDERVMQLFGLVNTLLSKDPETFKRHLMTIPYPIIPLAPNSGLLGWVDNTDTLHVLVKNYRDSRKILLNIEHRIMLQMAPDYDHMMLIQKMEVFEYALDNTTGQDLYRVLWLKSRNSEAWLDRRTQYTRTLAVMSMVGHILGLGDRHPSNLLLERISGSVVHVDFGDCFEVAMVRDKYPERVPFRLTRMLIQAMEVSGIEGTFRITCENSMRVLRDHKESIMAVLEAFVHDPLINWRLXSILVEEVERGXXMSVVHXKRVGVDESNPLDDETNEALNQRALQVVDRVQQKLTGRDFKPTQVLDVSEQVQKLILQSTSVENLCQTFIGWCAFW

SEQ ID NO: 13971 - protein, 340 aa, Glycine max
  unsure (1)..(340): unsure at all Xaa locations
XESATXNSPPSNLRKAAAQEVVDKVRQHSGVLVDQAQLVSKELIRVAILWHEMWHEALEEASRLYFGEHNIEGMLNVLEPLHEMLEEGAMKNNVTIKERIFIEAYRQELLEAYECCMNYKRTGKDAELTQAWDIYYHVFRKIDKQLQSLTTLDLESVSPELLECRNLELAVPGSYRADAPVVTIASFARQLVVITSKQRPRKLTIHGSDGDDYAFLLKGHEDLRQDERVMQLFGLVNTLLENSPKTAEKDLSIQRYAVIPLSPNSGLIEWVPNCDTLHHLIREYRDARKITLNQEHKCMXLSFAPDYDHLPLIAKVEVIDXSSAHPQGNXPSTALWFWKX

SEQ ID NO: 13972 - protein, 154 aa, Glycine max
  unsure (1)..(154): unsure at all Xaa locations
XQPFVGRELFAAGFVSCWAQLNETSQKQLVRNLEMAFSSPNIPPEILATLLNLAEFMEHDEKPLPIXLRLLGALAEKCRAFAKALHYKEMEFEGARSKKMDANPVAVVEALIHINNQLHQHEAAVGILTYAQQHLDFQLKESWYEKLQRWDDAL

SEQ ID NO: 13973 - protein, 416 aa, Glycine max
  unsure (1)..(416): unsure at all Xaa locations
PSDMFYGKIIPALKEKGIKRVISRRDWPHEVKCKVLLDLMKEVPRHLLYQELWCASEGYKAFSSKMKRYSGSVAAMSMVGHVLGLGDRHLDNILIDFCNGDIVHIDYNVCFDKGQRLKIPEIVPFRLTQMIEAALGLTGIEGSFKSNCETVIGVLRKNKDILLMLLEVFVWDPLVEWTRGDFHDEAAIGGEERKGMELAVSLSLFASRVQEIRVPLQEHHDQLLTSLPAVESALESFADVMDAFGLISQVRGSIETALEQLVEVEMERASLIELEQNYFVKVGLITEQQLALEEAAVKGRDHLSWEEAEELASQEEACRAQLDQLHQTWNQRDVRTSSLIKREADIKNALMAKLFSFCHPFDFXAFLLAELLFSTLQRACLHLSFHVISQGSPWLPAGLVRDEKASPCLQFCWFKR

SEQ ID NO: 13974 - protein, 220 aa, Glycine max
  unsure (1)..(220): unsure at all Xaa locations
XHASDIFLHNHCIWAKLVLVFCXVGYLLGLGDRHPSNLMLHRFSGKILHIDFGDCFEASMNREKFPEKAFVHDPLINWRLFNFNEVPQMSMLTSNHVPPVVNSEESAPNRELPHPQRGARERELLQAVNQLGDANEVLNERAVVVMARMSNKLTGRDFSTCSSVSNNSLQHAVDHSSLISGDTREVDHALSVKLQVQKLIIQASSHENLCQNYVGWCPFW

SEQ ID NO: 13975 - protein, 2585 aa, Oryza sativa (japonica cultivar-group)
MKRNETILCRICNPSTVQEQEQENGATFHPSPSSARIDIVSLELKQSAWDDDAREGWRPHLWIDLCWPRRRFATLTLTPMATSRDADEIIEKLSSDRARTRDEGVKLLGTWLQGDRAFSFCRLLARNTANLKPAHLPASATWPFLIMALTKCVIADISGKKRSPKSAAARMLRLAVQCAQDFRLSGRSLLLISVAKKLFSHIWEVVKDAPSFLIEYSIILRQLLTVKEYRYQMKPRTYSSFVVLYMKKVATGFDEKISNQASSKEESFRCTLTLHVLLENPPGDYPDIMREESLFITYAKVQLELARAIPEILEKLLDVIIKELDQNFNTGAGLVWCEAPRDEKAGSLRCFQEELMDLSATALYLAYKCTPRTSHNKKKLKTEHVMTAIMDSLLRGSLVWSGSICCLIHKYGYRVDKSLLINWFKATCKGLKRVLKEFSALLMSSARDAPPFWLTNDEMSILEGYWQDTWNSLIHALPLFSTTALVDQVHASFVSEDTWDLQIFKQLPSSYGFSLLNEQSVLMIPETIFSLCAGFSSPVINSADTSQLFGECKNLSKAMSEKCSRAHLPRHIQQPLLLELLEFTKGFMSSNKQFEKVDLPNLVYACSLVCNLIHCSLLSRVFEEKSSFLQVMLDYVTNAIKHIVSVVMKEHAELSHGLTNLGSVFDTTGSALSSFKSFMHSPLFSLWRVNNKTSSVLGVTELLDELLEAISELFAQFSSLMNNFDGDNPSKMLPVPFVSLSEDLHPDNRSSFVDMDLDMTGSGEVDPVTAGGSGSMGISPRPLECKLELVCIISTFFSVVPLHTWEVLYNLADKEVNIKNQDVFLDLLNKATEISFTDWFFRIRLINCISNFIYLFPDVAQDMIGHLLSMLHDTDYRVRLYLARKIVVLFQIWEGHSELFHDVCSSIGVKMVQFSNENPVRAREVLAIGPQPVPIIETALITLAHLSLQSEDIEVERLNYASRSKYLDQLIGPILFRWVACEVKEMFGFKSDEPKNFIEHCCSWLLSFLILRGETADLNWLSKILSQPLSAVIKGYFVPIFGLCIAARYGSGPEKDLAETVLCESLLQLGEISEPERDDLIKKHMVSIVGFLLSVSSSSRQPEIPHFSKEAVAHSVKTVVDGFMDAMDGNLAETVVIDKINIFRSDRVFKFLLAIHQQIADASHPRHIRHRLCAIEVLIDVLGHRVALYSTWFYIICIVGSYIQRQPLQDQCCNILSKLLAAFNSNCSTETDAALGKQLQFVSRAPHLPPELFLLSLRMHHKKLLLGEIIYRGDVSVDNADTISCWHSDPDVVSAVWTLVDLCSSSSVANEASSVLADFISRAGISDVHQVIFHVPNLTEKYPIQPHISKEDKLPSDYGISDDILVGLLKLLKACLSDESAEIIDVTSRTLRGVLSTARGLNALHCLDSLDRSLLMVHSRGINAQVVEQTLLGMEKVSGVSLEDSDLWRTDGRTYKQWLCTLVGSLICHCDDIILRLCRSIAFLKVEVAELLLASALVNIAGNLDSNAGICRLISSMVEEKIFCDSNHLMKSVYLFLDALNVVRSYYVAEKARGCPSNTLKDGRSVRSKSRSPTTTPSSSWKKVYWLSVDYLVAARAANLPPHIDLLVASFTRINELDSIYGITLANEITSQIIRYEHEGDWSSALEYHDLLVRSTRKENHGSLAGTALTGPSDVPSKAEEKMLNWQMHKGLMRSLQKTGCSHVLDVYCQGLSNQKSCLQQDSEFIDMQDLVLALSNASKESTKYIHSTVIKLQMLDHLTMAWDLRWKFCLNQTSKSYVGNKDFSPVPTVPTRMQLELLNKEWTFILCQTERNLDLLEPFLAFRSAVLKILGSEEHLREHLFQSASALRKGARFSLAAAALYELKELRYHMDHQAMPNSYFLFKLEEAKLLRAQGQHDMAINLGKYILKNHPDKKNVSDVYRLVGKWLAETRSSNSRTIIDDYLRHSVDFTELHKCPDKKYKSRQCRTYFHLAHYTDGLFKSYEERLSSNEWQAALRLRKYKSKELDTLMKRLKSSSKSEKTDYSVKIQELQKQLALDEEEAGKIQCTHAKFSAKIQKSSKDDRDKFLNLALQGYQRSLVVGGKYDLQVVQSYKFIPLVYQIASRLGSSKDAQGSTNFQNALASLLKKMAIDHPYHTIFQLLALANGDRVKDKQRSRSSFIVDMDKKLAAENLLKDLSSSHGALIRQMKQMVEIYIKLAELETKKEDTNKRIPLPREIRSICQLELVPVVTASIPVDPNCQYEEGSFPHFNGLADSIMVMNGINAPKVIECIGSDGNKYRQLAKSGNDDLRQDAVVPFTPSAGVVEWVNGTVPLAEYLVGSTRSGGAHGRYGTGDWTYHQCRETMTNVGYIVGLGDRHSQNILIDQETAEVVHIDLGVAFEQGLMLKTPERVPFRLTRDMIDGMGVTGVEGVFRRCCEKTLSVMRANKEALVTIIEVFVHDPLYKWALSPLKALQRQKESEDIDSCLDDSQEACEGNKDAARAILRVKQKLDGYEDGEMRSVQGQVQQLIQDAVDADRLCQMFPGWGAWLVLSHTYIHTVWDGMGSLIDALTQTAVELMTRQWHLVVERFKGHVYIHQTADAFRS

SEQ ID NO: 13976 - protein, 1083 aa, Cryptococcus neoformans var. neoformans
EFGTSEDLIDVNQKLQQSDAAWGTLEWAQTEMGMTTEVEWYEKLGRWEEALQVWNERDADASTTFSEWEITEGKVTCLHAMGEWEQLSDFVQARWANRTAEEKKLLSPLAAAASWSLKQWDLMDDYISAMKGDGADRAFFKAILAVHRNQIPAALKQISKARERLDPELTTLTGDSYGRAYDTVVRIQMLAELEEIIAYKDHADEPARQEMQRQTWKKRLAGCQRDVEVWQRILQVRSLVLKPNEDMDTWIEFADLCRTSDRLNLAEKTLTSLVGFQYPSMEDTRGRAPPPIIFAYLRMAWAKNLQIDSREERYETLQHLRDFTDQLTDDVGIGARGPNGRLMLPDQKLYGSYTKLLAQCHVELGQWQATLRESQGSADPSGILHDYSLATELDPEWYQAWHTWALANFEVITQLEVSQQGLSPIHFTTYIIPAVEGFLKSISLSPGNSLQDTLRLLTLWFTYGYSSGVTAAVSQGLPTVNIDVWLEVIPQIIARIQTPRQSIQQLIVQILHDIVKAHPQALIYPLTVASKSTVAARSTVAQNITHKMREHSPKIVDQAELVSTELIRAAILWHEMWYDGLEEASKHYFGDHDIPGMLGVLEPLHEIVENGPQTLRETSFIQSFGHDLRIAREHLKRYRITQDGTEIQQAWDVYYSVFQRLGKQLKLLNVIELQYVSPKLMAVRDLDIAVPGTYQSGKPIIGIKNVIPTFKVIASKQKPRQCSMRGMDGKEYAYCLKGHEDLRQDERVMQLFGLVNTLLNNDHESAKRHLSIQRFSVTPLSPIAGLLGWVTHSDTIHVLIKQYRDQRKILVDIEHKLMQQMSDESYDSLPLLQKVEIFQYALDNTTGQDLYRILWLKSRNSDIWLERRTTYTRSLGLNSMVGYILGLGDRHPSNLLLDQITGKMVHIDFGDCFEVAQQRDKYPEKVPFRLTRMLIHAMEVCGITGNFSRQCEVSMEVLRDNRESLMAVLEAFVYDPLIAWRLTATDKRPGGVGEVKDLDDPAVYGKQRKNKANETEILNDVENTEVKNDKGLQVIERVRRKLTGRDFKPDVVLDVKSQVEKLVVEATKTENLCVAFLGWCSFW

SEQ ID NO: 13977 - protein, 2380 aa, Dictyostelium discoideum
MSQHEQPSIWADALTKLLNDLKSKKEEDRVKASKNLKSYVISQSREMTNENFTKFMNELNNNLIFELVNSSVIPEKIGGIMAIDELIDVDYDENATKITRLANYLRIGLGFNDFTVMLMASKALGRLARSSGTLTAEFVEFEVTRALEWLSGDRIEARRHAAVLVLKELAQNAPTLFYVHASSFVDLIWVALKDPKVAIREGAVEALRACLELISERESRLRLQWYQKIYDEAQKSFKQNGSPESIHGSLITVSELLRNTGDFMLSKFKDICETVLKYKDHRDKLVKKTVLALFPRLAVFCSRDFVLNYFNACMNHLLAALRNQNERPTAFIALGEIAMAVGGSIKPYLDSIVVMIKQGLMTKGKQFCPEVLTCISMLASAVGQSMYPHMQVILPQMIVSSGLTVVLTDALRDLTINLPTLIPNIQYKLLNLISQVLANKPFSEPGAPSPYRKSATPFQGGSIPQLGQNSDVDPQMIALALKTLGSFDFSKHNLLEFVRECVVNYLDDDNIEIRREAAITCAQLMVGTEEPTPTRGHSAVIVGEVLEKLLVVGIADPDPSIRKTVLSSLEARFDHYLAQAENLRSLFIALNDELFEIRELAITVIGRLTIRNPAYVMPSLRKTLIQLLTELEFSGDGRNKEESARLLGHLISASEKLIKPYVEPILKALLPKLRDSNPRVASCVLAALGELSVVGGEEMVQHIDSLLPLIIDTLQDQSSTSKREVALKTLAQLASSTGYVIKPFSKYPMLLDTLLNAIKTERIGSIRREVIKVLGILGSLDPYKHKMNELGKRREDPKANDDKNNNMTNEVITISPSNEDYYPTVALTALMKILRDPSLSSHHTSVIQAVMYIFKSLSLKSIPFLPQIMPPFLHAMNTGEPLFREFLFQQLGSLVSIVKQHIRDYLVNVFALIEKYWNSNLLIPIIKLVEEISSALNDEFKVYLPNLIPQMLNVLHTDRSPKRSPTTKVLRALEVFGTNLDDYLHLVIPAIVKLFEQVDVTTQVRTLAIQTIGRLCKKLNFSDYASRIIHPLARVLDSTESELREETLNTLCALVYQLGSDYAIFIPMVGKVLARREIQSTNYELLISKLLKNQQLMLTPGSGDDGGMGANRFGGDHNGHHLGEDHNNTSTPLDIGVKKLKANEQHLKNAWETSQRSTKEDWGEWIRRFSVELLRESPSPALRSCLSLAQDYHPLVKELFNAGFVSCWTELHEQFQEELVRSLETALLSPNIPPEILQTLLNLAEFMELHEKPLPIDIRTLGALAEKCHAYAKALHYKESEFSQSPSSTIEALISINNQLQQPEAAIGILIYAQKNHSVELKEGWYEKLRRWEDALAAYEKKQKDDPNGGTIENTMGILRCLHALGEWERLSALSSETWKSDINDHTRATIAPLAAAAAWNLVNWDKMDEYVCAMNKDTVEGSFYRAILEVHHDNFTLAHGFIDHARTLVDTELTALLGESYNRAYKVVVRLQQLSELEEIIEYKKCVDSPERRNMIKNTWKTRLRGCQHNVDIWQSILAVHSLVISPHEELDMWLKFVGLCRKGSRLGLAQKTLTMLMGKDPSTTSQFGSVLPNTHPRITFAYIKQLWSAGAKQPAFEKLRTFVQALRDTDDLPLQGRAYLKLGEWQLALGDTLSEASIPHIISSFKAATECDPNWYKAWHSWALINFEVVSHYEQNGGTPEQIGAHLLPAVHSFFKSISLGPDRSLQDTLRLLTLWFKHGAQKEVEAALMQGFNTISIDTWLHVIPQIIARIHAPVLPVRRLLHELIDTIGKEHPQALVYPLTVATKSHSPARLAAAKSLMDKMRKHSATLVDQALPVSQELVRTAILWLEMWYEGLEEASRQYFGDHNPEAMLATLAPLHQILEKGPETTSETSFLQAFGRDLQEALEWSKKYEKTRKEGDLNQAWDLYYQVFRRIYKQLPQMSSLELQYVSPKLLNSNNMELAVPGTYKASENVIRIQSFSQALSVIPSKQRPRKLTIIGSDGLEYTFLLKGHEDLRQDERVMQLFSLVNNLLSANHETAKSHLSIRRFSVIPLSPNSGLIGWVPHSDTLHTLIKDFRDSNKILLSIEHRLMLQMCSDYDNLTLLQKVEVFQYALENSNGLDLHKVLWLKSRNSEVWLDRRTNYTRSLAVMSMVGYILGLGDRHPSNLMLDRHTGHILHIDFGDCFEVAMHRDKYPEKIPFRLTRMLINAMEVSGIEGNFRLTCEAVMNVLRNNKESLMAVLEAFVHDPLINWRLLTPNENNTKHKATNIASNNSTSNSTTKIEGDLNTIDNPINKESPDHEAVAGSLKSSPVHGRQIARNQRVGVDAEQVEAEIVPEALNERALSVINRVNKKLTGRDFSSNETLDVPEQVQKLIDQATSHENLCLSYVGWCPFW

SEQ ID NO: 13978 - protein, 2344 aa, Dictyostelium discoideum
MNDSNSSNDSCNTENNTLTATKNSINNTTTTTTTPNNNVNCLKTSGSIKLSASSVPFIPGSSASLPSILSNQYKLAASNNVSNNIMMISTPIISSAQQQQQQVPPPQQTTTTTTATATAITPTPITTSQSTSSSMLNLPLKVGKESIETLFRNRFHPKNNIRETVLSSLQSILIPDLSDTINNTKENIEYFYNMIIDENNYILKLLLLNIINDTKRNLVVYNYNQQHQLPIQNTSSPNTPSSTTTTTTTSTKPSKRGDKERERGRRNKDKINEKQLQQQQLQQLQLQQQLDHEGSSLYLPFSSLLSFIKPDKQQQPQQSQQSQLNEIDQMVRPKSLPKDDNDSDNFNIRVLEYNLKLLIKIYFKVSMYQDSIKTHIFDLYIQINQAISEQQRQLQEKEKESKTSKPIPQPIISLVIPTVLVSIGDIIKYKYATPSPPNLTPTTTTKMEEEERIINTILINEFKKTDVSIIESNLYLFECILSISVSNEPTIVVPNTTTATTATTATTSNTSTAAAATTTTPTLSTSSSSLSPPASTQSSLSLSSSSSAVIAPTTVGYIFKFNKELFRKLIALVYSTVVQHQITLSTVFTTLVLKGYLNEDQIQKLLNITLFKLSDPSEQVKLSYLTLLSKMVSYFDLNHQKNLNHKVNDISLPYKLLIMGSTSQPFFNGQIFKKIFDWIMGIGKDQPSFDSLTKYLIDLFDSFNVISILFNEQNKILSQQYLAAQSTMITPPLSLHQIDDRRKFETLISKSDELIWFWTVWECSKFCIANRLKSPYGSAFQTFEIFEKLLLQLNKDRRDFKKIKILLHFMESMEKLIFSTVNGSVLVQSLNNKETQFFRHNVRVCEDWFSRIRVNLLKASILSSSTPDIIRHASLRVQDIQANRFVLDSNTAHFELEFCILHLANALQQLNETESLQGLSNWSDINLNNSDNNNNNNNKNNNNNNNSTFFNNGNINKYTLKLPWMKGVILRSKQKFEESISSLLSVPPMLESNSISFPFVLEQIIKSYLDISNFTEVEQFLQNYQNQIQQQSNSLIIYKDTFIKTLGSFYRGEMEEAHAFAKRTESQNHILQREQLGLGLLGNQIMTDELLLSIMVNQKDLFNNTNIINNNNSGGSSSGTATATAVTTTTTTTTTTTTTTTTTTNTNNDIIGFSNNINSMLKLTKNNILKALNYLGLESNVQTFQYLTQLKIMDEIENGVYNSRVVPINNQIGFLERLRRVRGHISNTKQRSDILLSNIPLTEKMIKLSRKFENYKFSSKLLDTILESHSSSYYLERCKLKYLNGKQTEATLDLIKYAHRDITIPSSSTTTTTTTTTTTPPSTSSNTATTTNNINIDELSTQKFKVYTEIIKYLNSNPSIITELSSSNYSIPQEQLNPEYYFKKATLTKPENSKLWITYADWILNEKSNISEQNDEESLNGGGSGGNENSSNEMLRLKNTNTNELKTAVEAYFQFLKYSMLDGNSNGGLNIRATLKILNILVCSGNKLVETFERCLNELTSTRPFTIIIPQLFARLSHPDTFVQKYVVEILNRIGRDNPNKIVYQTIVGSLNFTNTNNNNNSSCAAATTDDGLDIELLQKQYPNYLQILNIKENLLKHSELLVKETETLIYQLGKLTTLWDDNWQYFIEQIQGWVYINTKQWNDDYQQLKATIKNPTILKHTLKKKNQELLQPIYEKLKRLTAATVLSVCKTPHEKWFTKCHFETINKTIRAFEKQNKPTSPFDVLHDLIAEFQQYRLISLSLSSVNPSLALFRPTITQMPGTDLNYFNINHIHHHHHHHNHHGNNNNQHSTSSGNLPIQNQVTIQLIKPTIYLLPTKTKPKKMAMLGSDGNLYYYLLKGREDLHLDERIMQLLNVVDQLLMNDKKPTLKLLRTRNYSVIPLSQSSGLIQWVEGAVPLFSIYKNWYKNDQVYKQQQQQQQQLQHQQQQQRQQQQQQPPPQQQPQQQPQQQPQQQPQPQQNSTTTSNIVNKPIIARPVDIFYAKITPLLEKAGLNFMTPRSEWPKEILIQVLNELMQETPKWILQRELWFSSSSSSELFLKTQSYSRSLALMSVIGYMIGLGDRHLDNILLDLKTGEIVHIDYNICFEKGAELKIPERVPFRMTQIFEYALGLTGVQGTFRETSIQIMHLLRKNKDILLNLLETFIYDPLFDWKHSNKQTNNNNNNNNNNNMNQAAGEQESIEKKQSSNNSSNPIISTPTKLQQQQKLPNSPLSISSNNTNSTNNNNNNNNNNNNNNNNNNNNNNKDQDSDSSQSQEDEDNNVVEGEGGEGGEGDIDELNLVQDSSNGKDAFKSIQGLTVVNQVRLKLEGTEKKLSIPDQIDLIIRESMNVENLSSTYEGWSPWV

SEQ ID NO: 13979 - protein, 872 aa, Oryza sativa
  unsure (1)..(872): unsure at all Xaa locations
XTRRDTWIKFANXCWKSGRISQAKSTLVKLLQLDPESSPELTLYHGHPQVVLAYLKYQYAVGDELKRRDAFCRLQDLSVQLATTTNSYSGTLASQVATSNAGVPLIARVYLTLASWKRALSPGLDDDSIQEILVSYKNATLNAKDWGKAWHLWALFNTEVMSRYTLRGRPDIAGKYVVAAVTGYFYSIACASTTKGVDDSLQDILRLLTLWFNHGATSEVQMALQKGFSLVNIEMWLVVLPQIIARIHSNNKIVRELIQSLLVRIGKDHPQALMYPLLVACKSISILRQRAAQEVVDKIRQHSGGLVDQAQLVSKELIRVAILWHEMWHEALEEASRMYFGEHNIEGMLAVLEPLHAMLERGXXETIKENTFIQAYGHELLEAHECCLKYRATGEDAELTKAWDLYYHVFRRIDKQLPSLTTLDLHSVSPELLXCRKLELAVPGTYSADAPLVTIEYFVPQLIXITSKQRPTDAWVHGSDGNDYAFLLKGHEDLRQDERVMQLFGLVNTLLENSRKTSEKDLSIQRYAVIPLSPNSGLIGWVPNCDTLHALIREYRDARKIFLNQEHRCMLSFAPDYDHLPLIAKVEVFQHALENSEGNDLAKVLWLKSRTSEVWLERRTNYTRSLAVMSMVGYLLGLGDRHPGNLMLDRYSGKILHIDFGDCFEASMNREKFPEKVPFRLTRMLVKAMEVSGIEGTFRTTCENVMQVLRTNKDSVMAMMEAFVHDPLINWRLFNFNEVPQVTNYGNAHSHTVVNSEEAANRELMQPPRGARERELLQAVNQLGDANEVLNERAVAVMARMSHKLTGRDFSSGSSLSGAGSSTQHGNEHLASGDTREVEPGLSVKVQVQRLILQATSHENLCQNYVGWCPFW

SEQ ID NO: 13980 - protein, 217 aa, Oryza sativa
  unsure (1)..(217): unsure at all Xaa locations
XDAWVHGSDGNDYAFLLKGHEDLRQDERVMQLFGLVNTLLENSRKTSEKDLSIQRYAVIPLSPNSGLIGWVPNCDTLHALIREYRDARKIFLNQEHRCMLSFAPDYDHLPLIAKVEVFQHALENSEGNDLAKVLWLKSRTSEVWLERRTNYTRSLAAMSMVGYLLGLGDRHPSNLMLDRYSGKILHIDFGDCFEASMNREKFPEKVRIRVWHFIIXM

SEQ ID NO: 13981 - protein, 355 aa, Oryza sativa
  unsure (1)..(355): unsure at all Xaa locations
XPGLQEFGTRLVRLFNSGAXVDIRRCAIVTLTKLIPTVQVGTHVSVLVHHLKLVLDGNNDDLRKDAAEALCCLAHALGEDFTIFVSSIHKLLVKHHMRYRKWDEIENRLLRREPLISENLSVQKYTQCPPEVISDPLDDFGGVPSEEGQPRSHQVNDVXRLRSAGEASQRSTREDWAEWMRHFSIALLKESPSPALRTCARLAQLQPSVGRELFAAGFASCWAQMNETSQEQLVRSLKTAFSSQNIPPEILATLLNLAEFMEHDEKPLPIDTRLLGALAEKCRAFAKALHYKEMEFEAVCSKKMGANPVTVVESLIHINNQLHQHEAAIGILTYSQQHLEVQLKESWYEKLHRWX

SEQ ID NO: 13982 - protein, 534 aa, Triticum aestivum
  unsure (1)..(534): unsure at all Xaa locations
YFGEHNIDGMLAVLEPLHAMLERGAETIKENTFIQAYGHELLEAHECCLKYRATGEDAELTKAWDLYYHVFRRIDKQLPSLTTLDLHSVSPELLKCRKLELAVPGTYSADSPLVTIEYFVPQLIVITSKQRPRKLTIHGSDGEDYAFLLKGHEDLRQDERVMQLFGLVNTLLENSRKTSEKDLSIQRYAVIPLSPNSGLIGWVPNCDTLHALIREYRDARKIFLNQEHRLMLAFAPDYDHLPLIAKVEVFQHALQNTEGNDLAKVLWLKSRTSEVWLERRTNYTRSLAVMSMAGYLLGLGDRHPSNLMLDRFSGKILHIDFGDCFEASMNREKFPEKVPFRLTRMLVKAXEVSGIEGTFRTTCENVXMQVLRTNKDSVMAMMXEAFVHDPLINWRLFNFNEVPQVSNYGNAHTHTVVSSEEAAPSEXXLMQPPRGAREKELLQAVNQLGDANEVLNERAVAVMARMSHKLTGRDFSSGSALSGXPAAQVNNLASVDAREVEPGLSVKVQVQKLILQATSHENLCQNYVGWCPFW

SEQ ID NO: 13983 - protein, 303 aa, Triticum aestivum
AGIAGDQHRDATAVHIFILTPPARRGLLGERPESPPARLEMAPMAANAAWHMGEWDQMSEYVSRLDDGDENKLRSLGNTTASGDGSSNGAFFRAVLSVRCKKYEEARVYVERARRCLATELAPLVLESYERAYNNMVRVQQLSELEEVIDYCTLLMESPIADGRRAHAPADAWERIKGTKRNVEVWQALLAVRELVLPPNEDRDTWIKFAKLCWKSGRISQAKSTLVKLLQFDPESSPELTLYHGHPQVVLAYLKYQYAVGDELKRKDAFSRLQDLAVQIATATNSYSGMLASHGAITSAGVP

SEQ ID NO: 13984 - protein, 753 aa, Zea mays
  unsure (1)..(753): unsure at all Xaa locations
XRPIPALDDDSIQEILISYHNATLSAKDWGKAWHIWALFNTEVMSRYTFRGRPDIAGKYVVAAVTGYFYSIAWASTTKGVDDSLQDILRLLTLWFNHGDTSEVQTALQKGFSLVKIEMWLVVLPQIIARIHSNNRVVRELIQSLLVRIGKGHPQALMYPLLVACKSISILRQRAAQEVVDKIRQHSGGLVDQAQLVSKELIRVAILWHEMWHEALEEASRMYFGEHNIEGMLAVLEPLHAMLERGXXETIKENAFIQAYGHELLEAHECCLKYRATGEDAELTKAWDLYYHVFRRIDKQLPSLTTLDLHSVSPELLKCRKLELAVPGTYAADSPLVTIEYFVPQLIVITSKQRPRKLTIHGSDGNDYAFLLKGHEDLRQDERVMQLFGLVNTLLENSRKTSEKDLSIQRYAVIPLSPNSGLIGWVPNCDTLHALIREYRDARKIFLNQEHRLMLAFAPDYDHLPLIAKVEVFQHALQNTEGNDLAKVLWLKSRTSEVWLERRTNYARSLAVMSMVGYLLGLGDRHPSNLMLDRYSGKILHIDFGDCFEASMNREKFPEKVPFRLTRMLVKAMEVSGIEGTFRTTCENVMQVLRTNRDSVMAMMEAFVHDPLINWRLFNFNEVPQVSNYGNVHAHTVVSSEEAVANRELMQPQRGARERELLQAVNQLGDANEVLNERAVAVMARMSDKLTGRDFSSGSALAGAXVALSNNLASGDARDAQPGLSVKVQVQKLILQATSHENLCQNYVGWCPFW

SEQ ID NO: 13985 - protein, 2337 aa, Schizosaccharomyces pombe
MKEFPGLKSRNEEIRNKAANDLYEYVIAYSRELSGEALVQFNNDVNKYVYTLIHSTDPLDRLAGVTAINRLIDYEGEDTTRITRFANYLRIILPGTDQKATVLAAKALGRLAVPGGALTSEFVNFEVKRALEWLQGERNENRRYAAVLILKELAKNTSTLIYAHIDSIFELLWHGLRDPKVTIRIASADALSEFLKIVRQRDSSIRLQWYTSILNEAQRGVAQGSSDYIHGSLLVYRQLFLKAGMFMHERYREVSDIILQFRDHKDLLIRKTVTELIATLAAYNPDEFVSNYLHVCMLHLLNLLKKENVKMLAFATIGKVAVAITNSIIPYLDPICDSIKESLKIHIRNKSASDAAIFQCISLLSIALGQAFSNYAYDLFDLIFASGLSEASYRALSDLAHNIPPLLPVIQERLLDMLSKILSGRPFIPPGCPPQYVARSLKSSKSASLKTGFFPNDVYILALKVLGNFDFSGYILNEFVKDCVVVYLENNDPEVRKTASITCSQLFARDPILSQTSDHAIQVVAEVLEKLLTVGICDTVPDIRLTVLNSLDSRFNKHLAQADKIRLLFIAINDENFAVRESALRIIGRLNVYNPAYVMPYLRKIMLKTLTILDYSTIIRTKEENAKLLCLLIAAAPRLIESHVEPILQILLPKAKDSSSIVAASIVNSLGEICQISGEVIVPFIKDLMPLIIEALQDQSSPIRRAAALKALGNLSSSTGYVIDPYIEFPSLLDILIGITKTEQDITIRRETIKLIGTLGALDPNRHRVLEKGTEKVVPEQKNIPPDISLLMSGIGPSSDEYYPTVVITALMSILKDPSLTIHHTAVIQAVMYIFKTMGLRCAPFLSQIIPEFIAVMRTCPTNILEFYFQQLSILVLIVRQHIRSFLPDLFKLIKDFWNPHSNLQFTILSLIESLARAMQGEFKPYLPSLLVMMLQIFDSDVSVDSVSTKKVLHAFIVFGDTLADYFHMLLDPILRLYERNDVSIGIKESIMITIGRLSMVINLSEYASRIIHPVMRMLSCNNASLIRVSMDTVCALIYQLNVDFAIFIPMIDKCLKMNGVTHETYSILVEQFLQEQPLPIKLNPYEKYDKPKLDVVASAADITSKKLPVNQEILRNAWEASQRSTKDDWQEWIRRLGVALLRESPSHALRACAALAAAYQPLARDLFNASFVSCWSELYDHFQEELVKSIEIALTSPHISPEIIQILLNLAEFMEHDDKPLPIDIRTLGAYAAKCHAFAKALHYKELEFIEEELVTKPSVDTIEALISINNQLQQPDAAIGILKHAQQHDKMNLKETWYEKLQRWEDALSAYEKREAAGAGNFEITMGKLRCLHALGEWDRLSQLAQENWIHAGHDARRYIAPLSVAAAWGLGQWEQMDEYISVMKSESPDKAFFNAIVALHRSQFEEAASYITRARDLLDTELTALVGESYNRAYSVAVRVQMLSELEEIITYKKAEDKPEVREMIKKTWVRRLKGCQRNVDVWQRMLRIRSLVISPRDNMEMWIKFANLCRKSGRISLAKKSLNLLLEDDENLDNSLVLKKTHPSIVYANLKFLWAVDDKRKALNSMQEFTSQLISDINVDPALFVQSTSVNTQKSQEEIQYYFHLLARCYHKQGQWQQEIENNWSEGSFDGVLQSYMYATQFDSKWYKAWHSWALANFEAVKFLEQSEEQIPSAAYEQYIIPAVKGFFKSIALSKGNLQDTLRLLNLWFKFGNNSNVINTLNVGISTVNIDIWLDVIPQLIARIHASSLSVRKSVHQLLSDVGRAHPQALVYPLTVAAKSQSSARQNAALAIMDSLKTHSPRLVEQARLVSHELIRAAILWHEQWHEGLEEASRLYFGDHNIEGMFAVLRPLHEMLERGPETLREISFQQAFGRDLVEARDCCIRFEQTGDISDLNQAWDLYYQVFKKIRKQLPQLTTLDLQYVSPKLLHVHDLELAVPGTYVSGKPVIRIVKFYPTFNVITSKQRPRRLSIKGSDGKDYQYVLKGHEDIRQDERVMQLFGLCNNLLLADPETFKRLLSIQRYPVIPLSPDSGLLGWVLDSDTLHVLIRDYRESRKILLNIEHRLIIQMAPDYDRLTLLQKVEVFEYALLSTTGQDLYRVLWLKSRSSEAWLNRRTNYSRTLAVMSMVGYILGLGDRHPSNLMLDRYTGNIIHIDFGDCFEVAMHREKFPEKIPFRLTRMLVNAMEVSGIEGTFRITCEHVMRVLRTNKESVMAVLEAFVYDPLINWRLAPAYSPSIDEKQSNEPNTLLGETIDGLHRKRLNEEGITLEERQKPEILNQRAITVLNRVSNKLTGRDFKPQQQLDVPSQVEKLILQATSIENLCLCYIGWCSFW

SEQ ID NO: 13986 - protein, 1973 aa, Schizosaccharomyces pombe
SIALGQAFSNYAYDLFDLIFASGLSEASYRALSDLAHNIPPLLPVIQERLLDMLSKILSGRPFIPPGCPPQYVARSLKSSKSASLKTGFFPNDVYILALKVLGNFDFSGYILNEFVKDCVVVYLENNDPEVRKTASITCSQLFARDPILSQTSDHAIQVVAEVLEKLLTVGICDTVPDIRLTVLNSLDSRFNKHLAQADKIRLLFIAINDENFAVRESALRIIGRLNVYNPAYVMPYLRKIMLKTLTILDYSTIIRTKEENAKLLCLLIAAAPRLIESHVEPILQILLPKAKDSSSIVAASIVNSLGEICQISGEVIVPFIKDLMPLIIEALQDQSSPIRRAAALKALGNLSSSTGYVIDPYIEFPSLLDILIGITKTEQDITIRRETIKLIGTLGALDPNRHRVLEKGTEKVVPEQKNIPPDISLLMSGIGPSSDEYYPTVVITALMSILKDPSLTIHHTAVIQAVMYIFKTMGLRCAPFLSQIIPEFIAVMRTCPTNILEFYFQQLSILVLIVRQHIRSFLPDLFKLIKDFWNPHSNLQFTILSLIESLARAMQGEFKPYLPSLLVMMLQIFDSDVSVDSVSTKKVLHAFIVFGDTLADYFHMLLDPILRLYERNDVSIGIKESIMITIGRLSMVINLSEYASRIIHPVMRMLSCNNASLIRVSMDTVCALIYQLNVDFAIFIPMIDKCLKMNGVTHETYSILVEQFLQEQPLPIKLNPYEKYDKPKLDVVASAADITSKKLPVNQEILRNAWEASQRSTKDDWQEWIRRLGVALLRESPSHALRACAALAAAYQPLARDLFNASFVSCWSELYDHFQEELVKSIEIALTSPHISPEIIQILLNLAEFMEHDDKPLPIDIRTLGAYAAKCHAFAKALHYKELEFIEEELVTKPSVDTIEALISINNQLQQPDAAIGILKHAQQHDKMNLKETWYEKLQRWEDALSAYEKREAAGAGNFEITMGKLRCLHALGEWDRLSQLAQENWIHAGHDARRYIAPLSVAAAWGLGQWEQMDEYISVMKSESPDKAFFNAIVALHRSQFEEAASYITRARDLLDTELTALVGESYNRAYSVAVRVQMLSELEEIITYKKAEDKPEVREMIKKTWVRRLKGCQRNVDVWQRMLRIRSLVISPRDNMEMWIKFANLCRKSGRISLAKKSLNLLLEDDENLDNSLVLKKTHPSIVYANLKFLWAVDDKRKALNSMQEFTSQLISDINVDPALFVQSTSVNTQKSQEEIQYYFHLLARCYHKQGQWQQEIENNWSEGSFDGVLQSYMYATQFDSKWYKAWHSWALANFEAVKFLEQSEEQIPSAAYEQYIIPAVKGFFKSIALSKGNLQDTLRLLNLWFKFGNNSNVINTLNVGISTVNIDIWLDVIPQLIARIHASSLSVRKSVHQLLSDVGRAHPQALVYPLTVAAKSQSSARQNAALAIMDSLKTHSPRLVEQARLVSHELIRAAILWHEQWHEGLEEASRLYFGDHNIEGMFAVLRPLHEMLERGPETLREISFQQAFGRDLVEARDCCIRFEQTGDISDLNQAWDLYYQVFKKIRKQLPQLTTLDLQYVSPKLLHVHDLELAVPGTYVSGKPVIRIVKFYPTFNVITSKQRPRRLSIKGSDGKDYQYVLKGHEDIRQDERVMQLFGLCNNLLLADPETFKRLLSIQRYPVIPLSPDSGLLGWVLDSDTLHVLIRDYRESRKILLNIEHRLIIQMAPDYDRLTLLQKVEVFEYALLSTTGQDLYRVLWLKSRSSEAWLNRRTNYSRTLAVMSMVGYILGLGDRHPSNLMLDRYTGNIIHIDFGDCFEVAMHREKFPEKIPFRLTRMLVNAMEVSGIEGTFRITCEHVMRVLRTNKESVMAVLEAFVYDPLINWRLAPAYSPSIDEKQSNEPNTLLGETIDGLHRKRLNEEGITLEERQKPEILNQRAITVLNRVSNKLTGRDFKPQQQLDVPSQVEKLILQATSIENLCLCYIGWCSFW

SEQ ID NO: 13987 - protein, 2335 aa, Schizosaccharomyces pombe
MEYFSDLKNKNESIQLAAADQLKEFVHSSTKELSGESLARFNNDINRRIFELIHSHDSHERFGGILAIGKLIEFESEGDVTNLSRYANYLRMTLPSTDWHSMELSAKVLGHLAASGGTLAAEFVEFEVQRAFEWLQGDRQEQKRMAAILIIKALAQNSPTLVYLYISEIFQNLWTGLRDPKPLIRETAADALGASLDVVCQREAKVQLQCFNEVLLQAEHGLRQSSVEYLHGSLLAYKELFEKSGSFIREHYTEFCDLALRLREHRDNSIRRCIVFLLPTLSEYNPKKFQQRYLDSFMVYLLSHIRKDKEKSLAFEAIGRIAMAVNEAMIPYLQNILKVIRDTLTAKVREKTQYEKPVFECIGMLAAAVKLELLEDSRSLLGLIFSCELSVHLRQALVKMAENIPPLLAPIQERLLNMVSQILTGKNFEIRTNDTYTPSFTNIYSAREPDQRSKSTESIILALETLGTFNFTGYSLISFIQESVLSYLENDNSEIRIAAARTCCQVFARDPICRKTNPLAVESVAEVLEKLLTLGIADSDPKIRETVLSLLDERFDRHLAHPDNIRCLFIALNDEVFSIREIAIIIIGRLALYNPAHVMPSLRKTIIQLLSDMEYSGNSRQKEESAQLLKLLVSKARTLIKPYIQSIIHVILPKAADTSPGVSSAIISALGELASVEGEDMPVDVRGSFMKLILVNLQDQSSTLKRLASLKCLRKLCGRSGYVIQPYLDYPPLLGALIGILQSEQPTPIRREVLRTLGVLGALDPYTYLTTEEVSDDLQSSHNNAHGVPQISAAQYPSLENYAMVAVVTLIGILKDSSLSMHHSSVVQAVMHICSQMGSKSTVFLPQVVPTFLQVMQSLSASSAEFYFQQLTTLTSIIGPNIRDYVSDIFNLSKVFWESTTSLLLVILELIDAIAIALQDEFKFYLPQILSCMLKAFSLDNTSSRSVSYKVLQSFVIFGSNIEEYMHLVLPVIIRSFERDTIPLGFRKSALKCIAQLFQSVNFSDHASRIIHPLVRMLGKSNGDLRAVIMDTLCAIVSQLGYDYSIFIPMVNKVLVSHKISHPAYELLVSRLLKGEPLPKDVVVKEFKPRPSTKPFSTQDEVLTKLPVDQASLKAAWESSQKLTRDDWQDWIRRISIELLKESPSSALRSCSTLAGIYHPLARDLFNVSFLSCWDELTESNKKNLVKSIELAMNAPNISVEILQTLLNLAEYMEREDHTLPIPIKVISAHASKCNVYAKALHYTELQFVQETKEEVSISTIESLITINNHLQQSDAAVGMLQYTKEHKQFSLKETWYEKLHRWDDALAAYEHREREGDSSFEINIGKLRCYYALGDWDHLSELAQKAWVTSEQEHREAIAPLAAAAAWGLGQWNLISEYVSAMDRDPQDKEFFSAISAVHLGQYNKAYGHIERHRDILVNDLSSIIGESYNRAYGIMVKSQMLSELEEIIDYKKNMQYENNLDSLKKTWRKRLEGCQKNVDVWHNTLRFRALVLSPQDSPEMWIKLADLCRRSDRLKLSNQCLTYLMGRDPSNAYPLDSLKLLNPHVVYTYLKYLWATDQKNIAVSELEEFTSYLSSKHGYKMGDSSKLVDILASSSVSSEERSFLARCFHKLGKWKKSLQDSVNQESVRDILNCYFYATLFDKSWYKAWHSWALANFEVVGYYEQTEHGVTQDMYEQYIVPAIKGFFHSSVLNQKNSLQDILRLLNLWFKFGEHSDVAAAIVEGFSNVPMDTWLEVIPQLIARIHTSSSSVRASVHQLLSDIGRVHPQALVYSLTVSSKSTNPQQKHSAKSIMDSMLSHSDTLVRQALLVSQELIRVAILWHELWYEGLEEASQAYFSDHDISLMIDIVKPLHETLEKGPSTLSEISFAQTFGYDLRKARSYWQKFLQDGDPTELNQSWDLYYQVFRRIQKQLPRIKHLELQYVSPKLLDACDLELAVPGTYGHNKPVIRISHFHHTFEVISSKQRPRRLTIHGSDGKDYQYVLKGHEDLRQDERVMQLFGLCNTLLTTDSETFKRRLNIERYTVIPLSPNSGLLGWVPHSDTLHFLIKEFRSKRNILLNLEHRMMLQMAPDCDSLTLLQKLEVFEYVMANTDGYDLYHVLWLKSRSSEAWLDRRTSYTQSLAVMSMVGYILGLGDRHPSNLMMDRYSGKIIHIDFGDCFEVAMHREKFPEKIPFRLTRMLINAMEVSGIQGTYKITCELVMRVLRSNTESLMAVLEAFVYDPLINWRLMTKSSFGASTTLRPTSSSVEEKGRSYTHRARHADYAALSETNGVNAEGLNERSIQVLKRVSNKLTGKDFDLKEQLPVKAQVEKLIQQATAPENLCRCYVGWCSFW

SEQ ID NO: 13988 - protein, 398 aa, Schizosaccharomyces pombe
MKEFPGLKSRNEEIRNKAANDLYEYVIAYSRELSGEALVQFNNDVNKYVYTLIHSTDPLDRLAGVTAINRLIDYEGEDTTRITRFANYLRIILPGTDQKATVLAAKALGRLAVPGGALTSEFVNFEVKRALEWLQGERNENRRYAAVLILKELAKNTSTLIYAHIDSIFELLWHGLRDPKVTIRIASADALSEFLKIVRQRDSSIRLQWYTSILNEAQRGVAQGSSDYIHGSLLVYRQLFLKAGMFMHERYREVSDIILQFRDHKDLLIRKTVTELIATLAAYNPDEFVSNYLHVCMLHLLNLLKKENVKMLAFATIGKVAVAITNSIIPYLDPICDSIKESLKIHIRNKSASDAAIFQCISLLSIALGQAFSNYAYDLFDLIFASGLSEASYRALSD

SEQ ID NO: 13989 - protein, 2509 aa, Neurospora crassa
MSLTKEQAAATLETYIRDVRNRTSSDDARKRAARQIRDLVNVAKQGKSTNSEFLLRFLSDIGTHANIQGCIEMGAEQFTAFFNTVNQRTMALIQGTDTCDRMGGVYILDALVDFDGIDLALKYSRFEQHIGYILRSKDVTPMQPAAVVLGKLCKPGGSLISELVDAEVKLALEWLQSERVEERRYAAVLILRELARNAPTLMYPYVNFVFEQSWIGLRDQRLLIRATSAETVSACFKIIRERDQAMKQEWMDKMFHEAVRGLKTNTVESVHASLLVLKELLEQGGMYMQTHYGEACDIVFRHKDAKDPAIRKTVVLLIPDLANYAPNDFASTYLHKFMIHLSHMLKKEKERNDAFLAIGNVANSVKSAIAPYLDDVLIYVRDGLSIQSRKRGSVDPVFDCISRLAVAVGQTLSKYMEALLDPIFACELTPKLTQALVDMAFYIPPVKATIQERLLDMLSKVLCGEPFRPLGAPHPNTLTSIPAIPKDPKDPSVQERGKAEVKLALNTLGSFDFSGHVLNEFVRDVAIKYVEDDDPEIREAAALTCCQLYVRDPIVNQTSYHALQVVADVIEKLLTVGVSDPDPGIRRTVLAALDERFDQHLAKAENIRTLFFALHDEQFAIREVAVSIIGRLARYNPAYVIPQLRKTIIQMLTELEYTDVARSKEESSKLLSLLTQHAQDLVKPYVNSITEVLLPKARDPTPSVAATVLQAIGELCTVGGESMLAYKDTLMPIIIDALQDQSAPIKREAALHTLGQLASNAGYVIKPYLEYPQLLEILQSIIRGEPQHGTLRQETIKLMGILGALDPYKHQASPAKDSMASQVANVASARSGNPSNKTPDSLKTALTNLMQVEERTDDNKRNNEAAQLTDVSLMMGGLTPSNEDYYPTVVINALLQILKDQSLVQWHGNVVDAIMSIFITLGLKCVQFLDRVVPAFISVIRASSNARLEFYFNHLSRLVSIVRQHIRVYLKDIIDVLQEYWHTTLALQSTILGLIESISRSLEGEFKIYLAKLLPLMLGVLEKDVSTKRQPSEKVFHAFLVFGSSAEEYMHLIIPVIVRLFDSHSQPLFLRKSAIETIGKLSSMVNLNDYASKIIHPLTRVLASGEPSLRVAALDTLCALMLQLGRDYLHFEHTVDKAISMYAIQHSNYEKAIEKLKKGEALPQNLAPRFEDISMEGFAAENNPPKKLTLNPVHLKQVWETKGKSTKDDWHEWFRKFSTTLLTESPNHSLRACASLASNYQPLARELFNSAFVSCWSELYEQFQEDLITNIENTIKSENVPPDLLGQLLNLAEFMEHDDKALPIDIRVLGREAARCHAYAKALHYKELEFLQDHNSGAVEALIVINNQLQQSDAAIGILRKVKTYREGIQLRESWFEKLERWDEALNFYCQREREIPEDQPVPVDIVMGKMRCYHALGEWDSLATLAGKTWANSAPEIQRRIAPLATTAAWGLGKWDSMDSYLQSMKRFSPDRAFFGAILALHRNQFREAMACIEQAREGLDTELSALVSESYNRAYQVVVRVQMLAELEELIVYKQCDGEKQATMRRTWETRLKGCQRNVEVWQRMLRLRSLVMTPQENMHMWTKFANLCRKSGRMGLAEKSLKQLIGTDSPLDSVIPYWHDRHPGSVGNRIASPILYAVLKFQWEIGQSPGFRNSEHRVAEKTLYCLQRFTQETAHRVETSRMHMAAHAQNGMEVQNQPGFAEFNEEMMHPQAQKHWLEQTVLLAKCYLRQGEWMVSLNKDDWQQRYRAEVLDCYYKATHYNNKWYKAWHAWALANFEVVQYLTGNREVDVRNNGEQNYIIQYVVPAVRGFFESIALSSGSSLQDTLRLLALWLTHGGHIDVHNAVTEGFTRVSVDTWLEVIPQLIARINQPHKRVQQSVHGLLADVGRAHPQALVYPLTVARKSWHNTRRVRSANQILESMRQHSLRLVEQAEIVSGELIRVAVLWHELWHEALEEASRLYFGDHNIEGMFATLEPLHELLEAGPQTLREISFAQTFGRDLSEARDWCRQYQETQDSNDLNQAWDLYYTVFRRITRQLPQMTSLELAYCSPNLLNAKDLELAVPGTYRSGQEVVRIMSFDATFSVISSKQRPRKLDIVGSDGKTYTFLLKGHEDIRQDERVMQLFGLCNTLLANDSECFKRHLNIQRYPAIPLSQNSGLLGWVPNSDTVHQLIREYRDSRKILLNIEHRIMLQMAPDYDNLTLMQKVEVFGYALDNTTGQDLYRVLWLKSKSSEAWLDRRTNYTRSLGVMSMVGYILGLGDRHPSNLMLDRITGKIIHIDFGDCFEVAMKREKYPERVPFRLTRMLTYAMEVSNIEGSFRTTCEHVMRVLRENKESVMAVLEAFIHDPLLNWRLTNPTSPPGPNFNAEREVAMPGGPGPRARRPSILDAPVAPTEFLAAQAAPGADGHGMGMSANPGRSRARTNSSAIYPTGSSMVNGHGNNQQEQQEVQNARALEVLDRVQQKLTGRDFKPHEELNVTDQVNKLIIEATKLENLCQHYIGWCSFW

SEQ ID NO: 13990 - protein, 1583 aa, Trypanosoma brucei
SVAAVQVIVGIFSLEVLSPGCLVSFYGEVISSIQKQARVQVRKREEILVHLISLVRILKGHLRPHLKEITSTVDSFISVTDLSVLRQVLALLKELCCSLRRRFRPYMSSLLGPIIVLVEENVEETSEIVLDFFSAMGSLLEDHLHTVLPVVCNIIVDTSVPSRCRIVAVKTLICFTKRLPDLCFHASRCVHCLCRVLRESDGGDGVGDEGRLGCSAMEALCTLAGSLGKNFENFVLVVLPAVADRYGETSGEYCRFCHDIYEAIDGKRAPEVSSNGVGKAGGGGAPSLPFTAGTSASPLKDRADAYASLRFHLRKRDQASDEDWNHWLPQLAVNLLRSSSSPSHGRALTLAELHEPFARQMLHSAFAACYADMDEHTQREVIGLLTEVLRGLRVPSEVMQELLNLSEHMERQGIRLSAGGKASIKHSSNFCPFDRQVLMESSANCNLYSKALHYAEIEFLETVREYERSILRGCPKPLPVEDWQNLIKLCEKSIYFCNLLGQRESANGILKFIRQNLPLLTGKKVTELSQMMDAHLFDKLRWWSQSLQAYERRLQQEPNKVSNMVGLLRALDALGEYPRVLEMWRQFSKRVSKREVSKLASMGAHAAWLLRRWDDMEHITSFMSDEDYTGTTALFYKATLAARKKRFREAEKLIDMCRKRVDSKLSALVAESYDRAYDLFVGIQQLSELEELAMATSDPQSAMHWRQLWERRLSVMAYEGWPGTLANHTLLVPPSSEIDMWLRFVSLSRAHGQGSVSTEVLRELLGNQSIESAIENGIPTPAVAMGSFQHLYETNQRDSAIARLQLYVSKVEGSGAQHVSREREDMAVCHAKLAEWLVHQKKAHRTEDELQKIFHHLRRATELDKSNGSIWRTLARVHREAATKPADGSDSSGASGHIMEALSAYLRSVSLSEELEDALGFLSLWFMYGPLLAVQVGSTLKEEIEEVNPTVWLKVIPQIIARISSSNGTVADSVYNLLVLVARRHPQAILYSLNVAHSSYQGKGTADGVEPLKGSHRVLARIAEIHQNGKAMVEDSALVCRELVRCAVLWPELWFNELGRALYQWERQRSAENLLLAMGPLLEQLKRPETMAEAQFAAELRQPLENACCHVERAVSSRHEQFMEEARRIFVSIERRIREQISGMSSLALQLVSPKLHQNGRNLSLVVPGQYREDGNYPLIASFQNVLKVLNSKQRPRRIYINGSNGEIYKFLLKGHEDLRLDERVMQLLGFVNTILEKHSVPKRHDCLIQTYSVTPLSDNAGLVGWVDHCDTLNKIIEDYRVNPRCIRMELDLMRSMCDNLYYLTAIQRVEPFEFPLERTEGVDLVRSFWVKAPSAETWLERRTTYVCSLATMSMVGHILGLGDRHPSNLMIHAFSGRVVHIDFGDCFEVAQQRSIHPEKVPFRLTRMLVKAMEMGGIEGLFRHGCHTVMNVLREEGGSLLALLEAFVHDPLVSWWRDEAEGFSGNGQAASSVQTISVIGSMTNVAEEGSVGSLQLSQLSVQRRATTQQRVNANIEKDTSQTRKPKSVVKRIKRKLRGLEFPQSQEGKSSDGFTVEEQVSRLIEEATSNENLCVHFLGWCPFW

SEQ ID NO: 13991 - protein, 2903 aa, Trypanosoma brucei
MPRYTAMRRLGPVGHSGGISSNGVTTVGAVTASNVGNGVVNIGGDGSQGVAMGPGATDVASARPLLIVPNTTSAAGGSADVSDEEVDQLLRELERSVDSPQAAAVMRDAVWAIERRAFSSCDPHSRDYFLESRVRIILMSLSTTSDVKQLLLAVDFIEALLAVPYTNLQHRFTRLCRSLMNILRCGIEEPAREAQRVLKRMLVTDSQFGAYHTPLRSFITKELRDNCKVALMRLYGRAQQANVSFTPDFLSTMLAAEATAEISPRFITGTLRQQVLELASMLAGFSDLLLRRAAYRCMVVLFKNTSAMRRKEVVLENRRIINEAIRSLNLSHNSESSIISTLETLRALLSSRGVHCMDKQVNTLPQLCVLVTEQHRISKTTAVRNAVCDLVPVIAETDISSAARRTTYCAIIMEPVKNVRDDSNKDLELRNLAIFIQNVGYEVLDSTNRVNLDSIIQRYITRRGTEEECWHILAAICSSRARPETQRTHMCSKTSYIAMSSSSAMQKGCETIQGHQSGGEISLSAQELRSASAEAHSVCQLVAGESQNSCNSHELMQPVEALVRRCLPHMVHAVLSDEFVRYITIIQDHLPSLSSDLQTYLDQLVNRTLRNDKRKYCGGEVEDGALVAQVFAGDRLSTELGNSQPQEDIIQSSTLAYVTAMGRLAQYLLPTTLPEGGAINWQQSQGATSTTATDGNGQGYSLGSVETFCKSVVAGQPQLVSPESTLSSAAGATTAEVCSGAAPDSVGASELKIALEVFSKRQITSSDQLREVSDIIIQYQRHPDKRVRQQCCTTVIEALKCWARYSQSDRTSAYSSLVPDLLEVYLKNVAMELDPKVRLVEVTLLADAVELRMFLREKRIIDTLISFLHDISHVREKTMELLVTLAQDNHTGPSVETVQYSLLIVVESSVAALEYSSDPRILIRHMSDLQTVAKFSLRPLMGHLDRTFVACRRRLVEEVVPDTIALSTLKTLRTILEAIKREEAVLLKYKDVALELYAPVAVALRASTASPLSHAAIGVLVCMHEIGASPLNWDARQLHELLQSVTAVYIEAANSTEEELGRALTLFGQIGAVDPATKPDTAAMKKKDDEAAIQDEADLELTYDYTKIVYRNLSRMLDLSLSESVCVQSMCTLLHLVRLTTDRKELIGGMHAIKAILQIARRANDAPLLRIEALHILAAITSLRHEKVCKTLLPELVTLFEQLWYPQDHALFRAVLNLVSALKPGNLTGKEQSEVWPWLYPRLVDVALQDHTETREFCLRVVGIIQHAKYIPPHCIPIVFPMLTQFVQQMDQLAELRSLSLCAAIRIVCNLQAVQHLPSLMHTICTLTRHCDLTENLGPRLSTPTLHRSLRLLSNTHPNGEADVNALCERLCATGSEGSADAGGCFTNEGGETLPTSTQPNSSFHCGNGDYASAPYLGQYTQKCQQQQQGGTYLDPNDDEAYDTLPQGQQDITAFMKHVEFGLRAKDNKWREWFAEFQKNMIVASPHPVFRIMVDLFDKHEPLRRKLFHPSFKCFYESLNAEHMKKVKDVLNLALRSSDTEVVSKCIGLADYLDHNPPNISESVLQQLRHLEGNEPMDVGKFTKHSNLHVGNVIAGSRSPTPACRHEPGGYYASHHGQLYRNISDNYNFESVLHSLNSPKTEGPVFNEGVRPPSHKVQDVGNGEHEVTDNGGTDSGCGVERNGKEGRSESESGDVNGSARRQTMLPVAKSIEGDTNEGLSFLAGPVARRITVSAHHTTNVNASDGTCPNTGDAEVHIRATAIPSTVNPLFTNDSLVEAALRTRMPDKAMSYLENKLLPVMQKYRYAHSVPKEAVQAVVLPLASLYSRLEMQDSVVGLFHAMRYKSDNEDGFAYELLQWWDVAQGVYATKVHDCCGSSARDIDGYVRMLCLCGEWERALQVVKDTYKSLDQPSSTIAQSGAMAAWILGKWDDVKMLIERLPNKEKGNITLRHFFQNATLFHQEFGCRAQWDCGVQDGQRRLETSPQVEALRASIMRAKMEVDESLKTLLPLSYAHAYENLTMLQHFTEMEEHIAYMESRTEEFRGQLRERWNRRFAALKPDSLMPNLRSLMLHSLVLNASEMSVMVVNFCERTGTNYPQLSKWAMEWLKQGKFPRANHLSQSCHVLPATPVSLEPCVAITYIGQVWSGGQRQKAVQLMENFLEETHSTLEEQQPAAYGVAQLRLGMWKQEMFADSFWKVEHRQEVLRHFHEAVRAVPGSCEAWHSWGLMNYRVQQRDCSLSRYEQRLFVEAAHQGFVAAICRSASPSTALPGVMRLLQLWVFHNGMSLLKESVADSVARIPTDYWVQAIPQLIGHLRSASHDVRDVVSMILQRLCVAHSQAVVFPLLVVLMSADGGGGETHSRRKELARSIINNLPKRIRAEAELVATLLINASATPIERIGESLSAVATAWNPNAEYEEDKEEVRRKLRYVLDVFNTNRRQLLYNVGDIGQYVRIVMEEDACGRREKASGILTQLVEEITKHISEKLGKEPQKAMEPLLNLRNLSIAVFGEYDIQYTNFPTIASFSSKLDVIPSKKRPRRIRLSGSNGCMYTYCLKGNEDIRMDERVMQLFGMVNVLLSDAKTAKSAFIHRFPVIPISDNVGLLGWVEHANTINNTICTHRNTISKVRTHHESNTLRAYVETIGSWEKLSMIRRTEILDYVMSQKDCEAVDVARAMWHRSNTAEQWLERRTAFTQSLATMSMVGYVLGLGDRHLGNILLSMSTGKIVHIDFGDSFDVGRLRHVLPETVPFRLTRMLTNAMEVFGVDGVFRASCNRTQSTLHKNADSIMALLTAFVHDPIVQHKGKMRNMMEKSRTPQNIVERIRNKLRGTEMAVRNADTVIFNTVLESSRRPDLLYMSHAFNDVAKRTVVNGRTTEEQVSMLIDEATRLENYAALYFGWGPLW

SEQ ID NO: 13992 - protein, 1935 aa, Encephalitozoon cuniculi
MSCIPRRMAFPSSDISCFTKSLHTTSADVTRTTFLISSPDCTRPKSKDETISEVNLLMSSEARSLLIDSTSSGPIFFNLFIIESFFLSGEFLFFATRKMPKVLSSSSQFMQGNVSSKGFYCGQEGPKPLDMNRDYLKNLYLQRLESERYSDVFRESMSSLVSTEIINAVISLAVQDDDETMLVDLLELFLQNLESNVVFHEKLTKSSFHLLLFKRPLGIQSYTKLKSIYDRVGSRRVVPGFEHTEFLSKNFYNYCLYKHAYKDYQFDLELDAGSLGPVETNLFKDLLKAVCIENRENEHLANYIKTLPMDVSVFLAIVMPDFRIDASRLGPEDVFLVCPSQVRGYDPKQFTKAFLCSLNSEGGLCRVCGRRVLGCGFEEIDREEYLDSVSGNIEEMCFGVSHWEKIRTPRMLTTILRSLFKRPGCLECYKCLRYFPIEEQGEMEDIVLRFLRYAASILSIGNIQVSLRMFPFIRHTPRVVFSYFVILFEGFLKYSGNLFLKNVIRNVSTRNKAKFMGVRAMIFEYYLKGSIESASSTEENTKNEGGSGAVENPGRKRADDLGDLFAPLSEFFDEERKAFVRNNMFYIYPIMYSLSFPYYTPDLAFTQANNHFLIISLFLRGEESRIDEIGYGKDELYRMGVDVMIPLLCNGYFKYDVLSRFFGNVQEYIRAHLPKFLFALKKVYVERPFEFRVCVFKILKCIIEAISGNVRMLFNYLFPFVEFFMRSHEESCGTDCKMIFIEYYSSFFKNDCLVRNMSRIFPYLDAEKIARWSNVKSEDDYLDIVIGLLDTRGHFSQEMAAKKAVELLARVFGDPGKGKGFDEESFVENVLRRFFKSREFRMKIGNVYGKLKELGNDAAFLIGCISQEFLDANPLPSVCSVLIEECTPEAIARVMVEKYLFEMDPGKQDLHFFIIQETLRFIKGPLSDRMEEVVEQFRSTQYFYEYVPVHPVEGVYEKTYTFKRFLGRLYRYSLNEIAKSEMQEYFSLLKYGNLLDTLFLEFHCLCLCRLLLEAGDHKVLGMVREIANNLQEGVDKRIARFVLKLHGFTSGKHIEDQQILRISFFLKDHHNAIQTLEKMIRKERKSELFDLLQYCYYSIKDYDKVLGINSVFARPSLINLFFRFCVDKNFAAARRCLEPKPGHDGVKEESGEDHKGQAPRELDVKILMEEIIDECQDDEVTKFMNDCKKIEGDFSEWKRLESRNEVFKHFIKDCELVSKSKNLLKTLDLIAGRRELAGDNRMLLECHESLVASIRSMMDARDDMSCDEMFESLLTAEKQDTIGNSSQGLHSREYFDDFASVDMVRAERRSERIGYMDRSKSGSTSGYSSLEEFERDLKLAIIRNYRGDDDVGRCIQEIGGMLLKREWCVLYELAELNVLQGKIGDAKTSLKKVLEIFPKTSMLYKKALIRYSELLDTKTAYTSALSILKDSGKLFLLGAKKFESTEPVKAMEMYINSVIHDNQCSDEAVPRIFHLFSEMMPPGDINAGAVLLKKFLESSISLLPPYYNQILSRLSHPNQDVANVVSRIVFELMENYPSKTFWRSLIMMNSQVPSTRKRMEGIVSGLTLDNKVALSNVKRISEELTCISRSKKNELTMEEDFPAFAKMFPAGVTVPNTKVLISGVRNEVKVFNSLQRPKRICFVGSDGKNYYWLCKNQDDLRKDSRFMDLNLIINSILKKQSSRKYIRTYAVIPFSHESGIIEWIGGLSSLKAICDTYYARDGISISETACRFVHNKKIGMREWHRVASKFHPKFHLWFHDSFPHPFSWLVARNNYTQTYAIMNIVGWFMGLGDRHAENILFDSNTGDTVHVDLNCIFGKGKELQVPERVPYRLTQNIVDAFGVLGLEGSYNTSLCTTLDLFLKNKNILVSNLLSFVYDPLFEWRRKSATTPKKIIEDLWHKMDDLDACSKCDVLNEEATNDENLCMMYIGWLPFI

SEQ ID NO: 13993 - protein, 2692 aa, Caenorhabditis elegans
MLQQHGISFQMNADRQNKAATTSNRIVSAPATNEFDERHRKQGIDAARALASQYRSRITENRDANQRQAARELSRYVRSELKDEPNTFSDAFLNAIDGRTDIASQSAIYNCMKSNSNIDQKRAGIYLIVCLAETHSGNVIRYANYLLKMLNNGNGLDEDTVKMASKALAFLIATCKSYAAELVDRCLDHCHEWLGQNVPHSQQPKNQQEIDQIRRLAASHLSRELALATPTAFFLRVNLFFKYIFNAVRDKNPAVRIAGIDALHVVLTIVSQREAKNKTEWFKKCFDEALEGQPNPSQKDDLDRWHAVALILNELLRISDQRFELIRCESSQFIKQKFLKEDEEEGVEWLVLTKQQTIVESVTARKLVLERFPKILDCVRQIIPLANKTSSTKQQSSIYLNTVLMQLLPRICAFPQCDRTFQTISFDTSFTILQRNAVAAPAIGMMMLSNPDVHATHIEKTISFISAAIKKTTNSDVLDNYFTFLFLFVDAYHEQVTTQIKAIIPQLMDITLSRSLANVLKMIMMRIPKLRLNVQDGVMASVYQTLTGSLIPPKSEPIGRPASPKAILQKAETDPKELQRIVLAVDVLGEFYFSRGALQRIMQYVADYYLTADNVEIRLAAVSSCCEMVVPFVGVYKKVTSDKRNSLLQTIYGVLRAVCSVIVNDQDVRVRMQVISCFGQMPRPFLAHLAQPEMLEVQFMALHDEKLEMQQACVTLLGRLAELNPALVLPRLRLMLLETLSQMQQSGQARLEQHSAKMIAQLAKQSPKFMRPYVGSLMIAMIPKLRNDQKYAEVTAQVLNAVSEIAVIGGAEIVKNLKPLFEKLTHMINDSSSLHKREAALRAIGGICRSTAYVVDPYRDYPSLLDDLLRILKTVMSNTMRREAIKTLGILGAIDPYTHKVFTGSVQSSTAISTALSLPISETDSKDPRQDIIHWFNYEKCTLEEFYPAITIANLMLMMQDEDSQSYAEIAQAIVTIFRSLGDMAPLYTEQVIPRLIEVCRRATESSNRANLREFFLQQLANFVAIIRKHAAPYMPAIFTIIADAWKEDISVKMVVIEVLTDMGTAIGNDFSKYTGELIPYLLTVLQTDKTKERVLTVKVMESIQKLTHCIVQHLHLVLPPLLIILDDFSLKLSIRNTALSTVLHMTQQVDVSAYAPRMMQSWHHNISTAEMRDKLLLLLIEIIKQLGKFFDIFKRGVDQKLRDYNLDKSVHYEQYRKLAQRAQMSRDVLTSSVFAGSNGNIQYSSTQAGMRGQANNVYANNDLHERLMNGSIDSGASRQDNRDDYYRYGVEEKISEEVPKVAPTTARPTSELVTVQITKQRLNKDALMPQWKNENLTSKDEWLQWLMKIRIGFLTYGSSPSLRAASSLGDQHPHLARDLFPAAFMSVWTELDSDVQNDLTSCLLRAISTGIPELIQTILNLAEFMDHSEKGPLPISHDVLGRWAEQTKAFAKACRYKEMSVLKKSGSMQTTFTRKVKLEPNDCQSLITYANKLNVQEEAAGVVRYAERNEMNFQMRGRWYEKLNEWEKALGAYELEEKKKSSCPNLQVYDEKDHLMTPEEAATAEEARMHEMRCLEALGRWDELNSKSVVWADQRGNRNDSVRDEINKKQLDHKMAVIAARGAWAVDNWERMADYVSVISENTQDGAMLRAVVAVHNDENTKAMGLIEKVREMIDSELTAMANESYERAYIPMVSVQQMAELEEAIEYKTRPERRPRIALLWSRRLQGCRRNVEQWQRLIMLRGLVLSPQEMHPLRVKFSSMCRKQGKNSMSRAVLRELLSLPANSDLVRAKAPFDKPLLVLALAKQLYQDDHKDEAIRALEDLANHWNKRINPIPKATGRELIPPSTKEPARICAKVLLKLGEWTELKSKTSNNMQVGELSFVRQQVSPQYRTKESRTPETIAFENTINYYQQATQYDPGWHKVWHKLASTHFYAVCRERPHPTTVISPPQQPQQPKKMHIPPVTRATSPPPPAQKSPQPAPFHSITEPLSDYPVPPPLGSLVGLPPMPAYLSSNSSLPPQHHHVSPLSNDSPSNSAENKLYLKHAAHAVRCFAKALMCSPGSRLEDTLRLMQLWFDHGDDKDQDVYFALTETIFDLPVTTWLEAIPQLMARLDCPDDQKSVQLVLRVLCEIARHRPQAVIYALTVASRSKDVHRSKNAGTVLEKMMEYHSKLVREASLVTEELVRCAILWHEQWHDALDDASRVYFHDNNVQAMFDALRNMNDLMQKGAPTTMKEHSFQQTYSSDLKEAGRYVQAFESSGNVKDLNQAWEIYCSVFKKLRDQLATLNSLDLVYVSPNLVSAKDLELVVPGTYDPSAPIVSIQSFSSKMNVITSKQRPRKMVIRGSNGLDYQFLLKGHEDPRQDERVMQLFGLVNTLLANNSETCRRNLTIQRYSIVALSKDSGLIGWVPNCDTLHTLVKEYREKKAKIPLSIEHKTLQKLSLETEHLTLMQKLQLFESALSVTQGEDLRHVLWLKSPSSEVWFDRRTNYTRSVACMSMVGYILGLGDRHPSNLMLDRLTGKVVHIDFGDCFEVAMLREKFPERVPFRLTRMLINAMEVTGLDGVYNYTAERVLKMLRTNQESLLAVLEAFVYDPVINWRLVEGMKKDPKTRKDTGGRQNMAGAVLPSSSTTDSIMETIKRKLDGTEFVHTDGSTPPEPLQVTEQLAMLTEQATSPLNLCQSYIGWCPFW

SEQ ID NO: 13994 - protein, 2695 aa, Caenorhabditis elegans
MLQQHGISFQMNADRQNKAATTSNRIVSAPATNEFDERHRKQGIDAARALASQYRSRITENRDANQRQAARELSRYVRSELKDEPNTFSDAFLNAIDGRTDIASQSAIYNCMKSNSNIDQKRAGIYLIVCLAETHSGNVIRYANYLLKMLNNGNGLDEDTVKMASKALAFLIATCKSYAAELVDRCLDHCHEWLGQNVPHSQQPKNQQEIDQIRRLAASHLSRELALATPTAFFLRVNLFFKYIFNAVRDKNPAVRIAGIDALHVVLTIVSQREAKNKTEWFKKCFDEALEGQPNPSQKDDLDRWHAVALILNELLRISDQRFELIRCESSQFIKQKFLKEDEEEGVEWLVLTKQQTIVESVTARKLVLERFPKILDCVRQIIPLANKTSSTKQQSSIYLNTVLMQLLPRICAFPQCDRTFQTISFDTSFTILQRNAVAAPAIGMMMLSNPDVHATHIEKTISFISAAIKKTTNSDVLDNYFTFLFLFVDAYHEQVTTQIKAIIPQLMDITLSRSLANVLKMIMMRIPKLRLNVQDGVMASVYQTLTGSLIPPKSEPIGRPASPKAILQKAETDPKELQRIVLAVDVLGEFYFSRGALQRIMQYVADYYLTADNVEIRLAAVSSCCEMVVPFVGVYKKVTSDKRNSLLQTIYGVLRAVCSVIVNDQDVRVRMQVISCFGQMPRPFLAHLAQPEMLEVQFMALHDEKLEMQQACVTLLGRLAELNPALVLPRLRLMLLETLSQMQQSGQARLEQHSAKMIAQLAKQSPKFMRPYVGSLMIAMIPKLRNDQKYAEVTAQVLNAVSEIAVIGGAEIVKNLKPLFEKLTHMINDSSSLHKREAALRAIGGICRSTAYVVDPYRDYPSLLDDLLRILKTVMSNTMRREAIKTLGILGAIDPYTHKVFTGSVQSSTAISTALSLPISETDSKDPRQDIIHWFNYEKCTLEEFYPAITIANLMLMMQDEDSQSYAEIAQAIVTIFRSLGDMAPLYTEQVIPRLIEVCRRATESSNRANLREFFLQQLANFVAIIRKHAAPYMPAIFTIIADAWKEDISVKMVVIEVLTDMGTAIGNDFSKYTGELIPYLLTVLQTDKTKERVLTVKVMESIQKLTHCIVQHLHLVLPPLLIILDDFSLKLSIRNTALSTVLHMTQQVDVSAYAPRMMQSWHHNISTAEMRDKLLLLLIEIIKQLGKFFDIFKRGVDQKLRDYNLDKSVHYEQYRKLAQRAQMSRDVLTSSVFAGSNGNIQYSSTQAGMRGQANNVYANNDLHERLMNGSIDSGASRQDNRDDYYRYGVEEKISEEVPKVAPTTARPTSELVTVQITKQRLNKDALMPQWKNENLTSKDEWLQWLMKIRIGFLTYGSSPSLRAASSLGDQHPHLARDLFPAAFMSVWTELDSDVQNDLTSCLLRAISTGIPELIQTILNLAEFMDHSEKGPLPISHDVLGRWAEQTKAFAKACRYKEMSVLKKSGSMQTTFTRKVKLEPNDCQSLITYANKLNVQEEAAGVVRYAERNEMNFQMRGRWYEKLNEWEKALGAYELEEKKKSSCPNLQVYDEKDHLMTPEEAATAEEARMHEMRCLEALGRWDELNSKSVVWADQRGNRNDSVRDEINKKQLDHKMAVIAARGAWAVDNWERMADYVSVISENTQDGAMLRAVVAVHNDENTKAMGLIEKVREMIDSELTAMANESYERAYIPMVSVQQMAELEEAIEYKTRPERRPRIALLWSRRLQGCRRNVEQWQRLIMLRGLVLSPQEMHPLRVKFSSMCRKQGKNSMSRAVLRELLSLPANSDLVRAKAPFDKPLLVLALAKQLYQDDHKDEAIRALEDLANHWNKRINPIPKATGRELIPPSTKEPARICAKVLLKLGEWTELKSKTSNNMQVGELSFVRQQVSPQYRTKESRTPETIAFENTINYYQQATQYDPGWHKVWHKLASTHFYAVCRERPHPTTVISPPQQPQQPKKMHIPPVTRATSPPPPAQKSPQPAPFHSITEPLSVIIDYPVPPPLGSLVGLPPMPAYLSSNSSLPPQHHHVSPLSNDSPSNSAENKLYLKHAAHAVRCFAKALMCSPGSRLEDTLRLMQLWFDHGDDKDQDVYFALTETIFDLPVTTWLEAIPQLMARLDCPDDQKSVQLVLRVLCEIARHRPQAVIYALTVASRSKDVHRSKNAGTVLEKMMEYHSKLVREASLVTEELVRCAILWHEQWHDALDDASRVYFHDNNVQAMFDALRNMNDLMQKGAPTTMKEHSFQQTYSSDLKEAGRYVQAFESSGNVKDLNQAWEIYCSVFKKLRDQLATLNSLDLVYVSPNLVSAKDLELVVPGTYDPSAPIVSIQSFSSKMNVITSKQRPRKMVIRGSNGLDYQFLLKGHEDPRQDERVMQLFGLVNTLLANNSETCRRNLTIQRYSIVALSKDSGLIGWVPNCDTLHTLVKEYREKKAKIPLSIEHKTLQKLSLETEHLTLMQKLQLFESALSVTQGEDLRHVLWLKSPSSEVWFDRRTNYTRSVACMSMVGYILGLGDRHPSNLMLDRLTGKVVHIDFGDCFEVAMLREKFPERVPFRLTRMLINAMEVTGLDGVYNYTAERVLKMLRTNQESLLAVLEAFVYDPVINWRLVEGMKKDPKTRKDTGGRQNMAGAVLPSSSTTDSIMETIKRKLDGTEFVHTDGSTPPEPLQVTEQLAMLTEQATSPLNLCQSYIGWCPFW

SEQ ID NO: 13995 - protein, 2697 aa, Caenorhabditis elegans
MLQQHGISFQMNADRQNKAATTSNRIVSAPATNEFDERHRKQGIDAARALASQYRSRITENRDANQRQAARELSRYVRSELKDEPNTFSDAFLNAIDGRTDIASQSAIYNCMKSNSNIDQKRAGIYLIVCLAETHSGNVIRYANYLLKMLNNGNGLDEDTVKMASKALAFLIATCKSYAAELVDRCLDHCHEWLGQNVPHSQQPKNQQEIDQIRRLAASHLSRELALATPTAFFLRVNLFFKYIFNAVRDKNPAVRIAGIDALHVVLTIVSQREAKNKTEWFKKCFDEALEGQPNPSQKDDLDRWHAVALILNELLRISDQRFELIRCESSQFIKQKFLKEDEEEGVEWLVLTKQQTIVESVTARKLVLERFPKILDCVRQIIPLANKTSSTKQQSSIYLNTVLMQLLPRICAFPQCDRTFQTISFDTSFTILQRNAVAAPAIGMMMLSNPDVHATHIEKTISFISAAIKKTTNSDVLDNYFTFLFLFVDAYHEQVTTQIKAIIPQLMDITLSRSLANVLKMIMMRIPKLRLNVQDGVMASVYQTLTGSLIPPKSEPIGRPASPKAILQKAETDPKELQRIVLAVDVLGEFYFSRGALQRIMQYVADYYLTADNVEIRLAAVSSCCEMVVPFVGVYKKVTSDKRNSLLQTIYGVLRAVCSVIVNDQDVRVRMQVISCFGQMPRPFLAHLAQPEMLEVQFMALHDEKLEMQQACVTLLGRLAELNPALVLPRLRLMLLETLSQMQQSGQARLEQHSAKMIAQLAKQSPKFMRPYVGSLMIAMIPKLRNDQKYAEVTAQVLNAVSEIAVIGGAEIVKNLKPLFEKLTHMINDSSSLHKREAALRAIGGICRSTAYVVDPYRDYPSLLDDLLRILKTVMSNTMRREAIKTLGILGAIDPYTHKVFTGSVQSSTAISTALSLPISETDSKDPRQDIIHWFNYEKCTLEEFYPAITIANLMLMMQDEDSQSYAEIAQAIVTIFRSLGDMAPLYTEQVIPRLIEVCRRATESSNRANLREFFLQQLANFVAIIRKHAAPYMPAIFTIIADAWKEDISVKMVVIEVLTDMGTAIGNDFSKYTGELIPYLLTVLQTDKTKERVLTVKVMESIQKLTHCIVQHLHLVLPPLLIILDDFSLKLSIRNTALSTVLHMTQQVDVSAYAPRMMQSWHHNISTAEMRDKLLLLLIEIIKQLGKFFDIFKRGVDQKLRDYNLDKSVHYEQYRKLAQRAQMSRDVLTSSVFAGSNGNIQYSSTQAGMRGQANNVYANNDLHERLMNGSIDSGASRQDNRDDYYRYGVEEKKEVPKVAPTTARPTSELVTVQITKQRLNKDALMPQWKNENLTSKDEWLQWLMKIRIGFLTYGSSPSLRAASSLGDQHPHLARDLFPAAFMSVWTELDSDVQNDLTSCLLRAISTGIPELIQTILNLAEFMDHSEKGPLPISHDVLGRWAEQTKAFAKACRYKEMSVLKKSGSMQTTFTRKVKLEPNDCQSLITYANKLNVQEEAAGVVRYAERNEMNFQMRGRWYEKLNEWEKALGAYELEEKKKSSCPNLQVYDEKDHLMTPEEAATAEEARMHEMRCLEALGRWDELNSKSVVWADQRGNRNDSVRDEINKKQLDHKMAVIAARGAWAVDNWERMADYVSVISENTQDGAMLRAVVAVHNDENTKAMGLIEKVREMIDSELTAMANESYERAYIPMVSVQQMAELEEAIEYKTRPERRPRIALLWSRRLQGCRRNVEQWQRLIMLRGLVLSPQEMHPLRVKFSSMCRKQGKNSMSRAVLRELLSLPANSDLVRAKAPFDKPLLVLALAKQLYQDDHKDEAIRALEDLANHWNKRINPIPKATGRELIPPSTKEPARICAKVLLKLGEWTELKSKTSNNMQVGELSFVRQQVSPQYRTKESRTPETIAFENTINYYQQATQYDPGWHKVWHKLASTHFYAVCRERPHPTTVISPPQQPQQPKKMHIPPVTRATSPPPPAQKSPQPAPFHSITEPLSVIIDYPVPPPLGSLVGLPPMPAYLSSNSSLPPQHHHVSPLSNDSPSNSAENKLYLKHAAHAVRCFAKALMCSPGSRLEDTLRLMQLWFDHGDDKDQDVYFALTETIFDLPVTTWLEAIPQLMARLDCPDDQKSVQLVLRVLCEIARHRPQAVIYALTVASRSKDVHRSKNAGTVLEKMMEYHSKLVREASLVTEELVRCAILWHEQWHDALDDASRVYFHRRLQDNNVQAMFDALRNMNDLMQKGAPTTMKEHSFQQTYSSDLKEAGRYVQAFESSGNVKDLNQAWEIYCSVFKKLRDQLATLNSLDLVYVSPNLVSAKDLELVVPGTYDPSAPIVSIQSFSSKMNVITSKQRPRKMVIRGSNGLDYQFLLKGHEDPRQDERVMQLFGLVNTLLANNSETCRRNLTIQRYSIVALSKDSGLIGWVPNCDTLHTLVKEYREKKAKIPLSIEHKTLQKLSLETEHLTLMQKLQLFESALSVTQGEDLRHVLWLKSPSSEVWFDRRTNYTRSVACMSMVGYILGLGDRHPSNLMLDRLTGKVVHIDFGDCFEVAMLREKFPERVPFRLTRMLINAMEVTGLDGVYNYTAERVLKMLRTNQESLLAVLEAFVYDPVINWRLVEGMKKDPKTRKDTGGRQNMAGAVLPSSSTTDSIMETIKRKLDGTEFVHTDGSTPPEPLQVTEQLAMLTEQATSPLNLCQSYIGWCPFW

SEQ ID NO: 13996 - protein, 687 aa, Caenorhabditis elegans
MPAYLSSNSSLPPQHHHVSPLSNDSPSNSAENKLYLKHAAHAVRCFAKALMCSPGSRLEDTLRLMQLWFDHGDDKDQDVYFALTETIFDLPVTTWLEAIPQLMARLDCPDDQKSVQLVLRVLCEIARHRPQAVIYALTVASRSKDVHRSKNAGTVLEKMMEYHSKLVREASLVTEELVRCAILWHEQWHDALDDASRVYFHRRLQDNNVQAMFDALRNMNDLMQKGAPTTMKEHSFQQTYSSDLKEAGRYVQAFESSGNVKDLNQAWEIYCSVFKKLRDQLATLNSLDLVYVSPNLVSAKDLELVVPGTYDPSAPIVSIQSFSSKMNVITSKQRPRKMVIRGSNGLDYQFLLKGHEDPRQDERVMQLFGLVNTLLANNSETCRRNLTIQRYSIVALSKDSGLIGWVPNCDTLHTLVKEYREKKAKIPLSIEHKTLQKLSLETEHLTLMQKLQLFESALSVTQGEDLRHVLWLKSPSSEVWFDRRTNYTRSVACMSMVGYILGLGDRHPSNLMLDRLTGKVVHIDFGDCFEVAMLREKFPERVPFRLTRMLINAMEVTGLDGVYNYTAERVLKMLRTNQESLLAVLEAFVYDPVINWRLVEGMKKDPKTRKDTGGRQNMAGAVLPSSSTTDSIMETIKRKLDGTEFVHTDGSTPPEPLQVTEQLAMLTEQATSPLNLCQSYIGWCPFW

SEQ ID NO: 13997 - protein, 2322 aa, Caenorhabditis elegans
MITSRNNDIGNLIEQFRQRDTPQKERKAILARIEEILQTTKNVESLCVKWTYLLDNLCWPSLTKHDRNDMKTLAGKVIRLVGVLLFDTESYPEFLIYLGTLYQSVTKKSEETRADIVFSVYFIVGVISQKTENRLIATDTENVEKSLDWIIKVLPNSSISVYNHCLKGFVLVANTFPNVYAAMFESTLRAILTNLPDFNSHEKNFELLIDTVMRFSDQLNEKPHLAEEMVRIIRPDIKKNGLGNMRELKKRMKLTMALVKMAKSQKMLEETNQMISEMSIELEENGGKWSSASLITIVCDVFNELLILGKDDVKLQKGVEESLCNVLKDLNLSNQSTMEKQAFFNSLAKIVKQLPAESQVKTRVHQIVFNTETGLFTPKNRDNRMFGHNMIYKDLINLVSVLLTPTSLNHLQATYTDLRKIMIDSMSRLKQSEDTPYSDNIRWNESILLLFFSSLQSISCAKSSLIVMMGIRPSIFEFFSSELPLTEYWLASNHPEVYHLFITIFVGHLKAHDFYIVQSDYIVRGDSIGQSIGQTKRDYARKQVVALQKIINNFGDKLWKKTRLMISSWLHSLIATACEHQIGSDSFSQREWVRLRNTVIHQSVLTWNNECVNQALTILSTATKWSELTSDIHRDIADKTKKAKWKEATTIWESGDCNTYIRQSMSTVYQMSQERQQKTITSTSFGAEEFIIITNFLLKQATPTTFKKGQNSWMDEVLETFTQGCRTLEKPDSYVPETFIEKWDWIINQTANFCIVNKMKTPLGKPMQTFAAFENEIKRLAKEVIVRKNSDKKLNKSSTEDPNQSPPLKYSVQWLRVHLLLKLIVVLEKLMNSAIHGGSSVFNLTEIPVSSRQFFTVNAASCEVWLNRVYYPALLVAYFNGYYGLVIRFGSNALSHFARQKDGDNDKKIVNGVCTASLMSLSMAVLGEPMEIVGLRRKVREEFGTDMGQSLMEALGEMANARYETALVALEAVLVTDAATNETLKMIIQLAMVDILNRIRLPQATDYYKVVLFGEESNDSTITEDFRSVELLTKFEKLNNTVNEKRQVVDWSARERFQFVESAFSQTMRRTELLDIQKDFSAMGALALSADSSCKLYSDISSTSLIIANLVNKMTGVSQWKNKLTDTEIFDRNEEGNDGDKLAICRKLMHWGRHTKSNRGQSCAAHSEIIRLSRKTSNCELAFFHINSAIRGEKLAAWQRLEVERQRLKLVKTQNLDVRIREMNEVFGSLAEVFTTSCQLKSDFQMVDGMIKEKMISEGYNEDIAKREEHMSRASIQLADFFQSLPELENVLAPNLFPTIIWSELQRRSDSLSAGYHGIVGSLFHLASEMCPSLAKAHLKMARWAYEIAKIKNFPAENLSFYKFGKDETENEELLKSLEATSLVNLEKLVRAAISDDLRANNILAPNSHFMHIWKMVRDHRTKFLSIAVTSYFQFIQNMSGDCDNLPYSKKEETTLATLRILELLVKHGDVLIDVINDGLNKTNVHIWKEILPQLFARLSHPSEHIRKTLVDLISKICTAAPHAVVFQVVSGAASSSTDGEELEEQQNDDRNRVRACCEKLETNMSQSYPNLVKDVRQFVAELERINLLNEEKWSVVMGTMEHEMEKRLSLIRTENAKTESALHLTASVKNDIIVKRTQLLTRQIFDVLDELYQQTVIEPPKSKNEEEFVTAFAEVLTNAFQESRISRTTSPEKSWIPFKNLIANFVHRNSKKGMQTFETEDISPYLASLSNSCVPMPGQESVEFDRVVSISRVARQVTILPTKTRPKKLGFVGSDGKQVAFLFKGREDLHLDERVMQFLRLCNVMLQPGKGKHRQSVAAYQAHHYAVIPLGPRSGLIKWVEGATPMFHIYRKWQMKEKALKQATKKNGETVPEIERPSNMYHNMIRLAFADHKIDSSITSDRSKWPAEILEEVFESLTAKTPTDLISRELWMRANDATTWWSVTKRYSRSLAVMSMVGSVLGLGDRHLDNLLVDLKWGHVVHIDYNICFDKGKNLRIPETVPFRLTRNMRHALGPSEMYGTFRESCVHVLSTLRSGHQVLTMLLDAFVFDPLVDWTSHEHTATSGVSLALQLAVYGSNWKTKAKERLTDAMELLNLRMSEVQTLWLANRDDLLHWMKQVTECLLIENSMLGANAIYAQQRVKAGTELREAVTRHHALAKELRPLIRVIGKEREEFADYLKFYKQALFDPLLKGHSALRNELDIDTCVYNFNIVMQNIDNVFGALVNLSFTPIETITSRTSQQEFKPPPGLENVWVVKQDQQENSQAREVVRRVERRLNGWLDGSAGPDRKLSPREEADILIAEATSTPNLSQMYEGWTAWV

SEQ ID NO: 13998 - protein, 1663 aa, Caenorhabditis elegans
MSTVYQMSQERQQKTITSTSFGAEEFIIITNFLLKQATPTTFKKGQNSWMDEVLETFTQGCRTLEKPDSYVPETFIEKWDWIINQTANFCIVNKMKTPLGKPMQTFAAFENEIKRLAKEVIVRKNSDKKLNKSSTEDPNQSPPLKYSVQWLRVHLLLKLIVVLEKLMNSAIHGGSSVFNLTEIPVSSRQFFTVNAASCEVWLNRVYYPALLVAYFNGYYGLVIRFGSNALSHFARQKDGDNDKKIVNGVCTASLMSLSMAVLGEPMEIVGLRRKVREEFGTDMGQSLMEALGEMANARYETALVALEAVLVTDAATNETLKMIIQLAMVDILNRIRLPQATDYYKVVLFGEESNDSTITEDFRSVELLTKFEKLNNTVNEKRQVVDWSARERFQFVESAFSQTMRRRVSRVTELLDIQKDFSAMGALALSADSSCKLYSDISSTSLIIANLVNKMTGVSQWKNKLTDTEIFDRNEEGNDGDKLAICRKLMHWGRHTKSNRGQSCAAHSEIIRLSRKTSNCELAFFHINSAIRGEKLAAWQRLEVERQRLKLVKTQNLDVRIREMNEVFGSLAEVFTTSCQLKSDFQMVDGMIKEKMISEGYNEDIAKREEHMSRASIQLADFFQSLPELENVLAPNLFPTIIWSELQRRSDSLSAGYHGIVGSLFHLASEMCPSLAKAHLKMARWAYEIAKIKNFPAENLSFYKFGKDETENEELLKSLEATSLVNLEKLVRAAISDDLRANNILAPNSHFMHIWKMVRDHRTKFLSIAVTSYFQFIQNMSGDCDNLPYSKKEETTLATLRILELLVKHGDVLIDVINDGLNKTNVHIWKEILPQLFARLSHPSEHIRKTLVDLISKICTAAPHAVVFQVVSGAASSSTDGEELEEQQNDDRNRVRACCEKLETNMSQSYPNLVKDVRQFVAELERINLLNEEKWSVVMGTMEHEMEKRLSLIRTENAKTESALHLTASVKNDIIVKRTQLLTRQIFDVLDELYQQTVIEPPKSKNEEEFVTAFAEVLTNAFQESRISRTTSPEKSWIPFKNLIANFVHRNSKKGMQTFETEDISPYLASLSNSCVPMPGQESVEFDRVVSISRVARQVTILPTKTRPKKLGFVGSDGKQVAFLFKGREDLHLDERVMQFLRLCNVMLQPGKGKHRQSVAAYQAHHYAVIPLGPRSGLIKWVEGATPMFHIYRKWQMKEKALKQATKKNGETVPEIERPSNMYHNMIRLAFADHKIDSSITSDRSKWPAEILEEVFESLTAKTPTDLISRELWMRANDATTWWSVTKRYSRSLAVMSMVGSVLGLGDRHLDNLLVDLKWGHVVHIDYNICFDKGKNLRIPETVPFRLTRNMRHALGPSEMYGTFRESCVHVLSTLRSGHQVLTMLLDAFVFDPLVDWTSHEHTATSGVSLALQLAVYGSNWKTKAKERLTDAMELLNLRMSEVQTLWLANRDDLLHWMKQVTECLLIENSMLGANAIYAQQRVKAGTELREAVTRHHALAKELRPLIRVIGKEREEFADYLKFYKQALFDPLLKGHSALRNELDIDTCVYNFNIVMQNIDNVFGALVNLSFTPIETITSRTSQQEFKPPPGLENVWVVKQDQQENSQAREVVRRVERRLNGWLDGSAGPDRKLSPREEADILIAEATSTPNLSQMYEGWTAWV

SEQ ID NO: 13999 - protein, 2470 aa, Drosophila melanogaster
MSTTSVVQQFVNGLKSRNRNVQNKATQDLLFYVKTELREMSQEELAQFFDEFDHHIFTMVNATDINEKKGGALAMKCLINCEGSLTARKGISPYLNRLRDLLLINDVSVMEIAARSLVKLANMPTSKGADSFDFDIKKAFEVLRGERQEYRRHSAVFILRELAIALPTYFYQHILTFFEVIFNAIFDPKPAIRESAGEALRAALIVTAQRESTKQSSEPQWYRICYDEANGSFNADLGSSKDQKGVTRDDRIHGGLVVFNELFRCANATWERRYTSLKTLFPKTQHNKFLEASSSSSMGSQLNTLVPRLKVPFIDKLGSTQTHLGEGEHHKGVAKFASHNVLESAYAQEILQEHYTSICDNVLEQRTSKSPYVQQALLQILPRLAAFNRAVFVEKYLQTCVSHLMQILRGKEKDRTVAYITIGYMAVAVQSAIEVHLSSIMTSVKVALPSKDLTSKRKVPVDPAVFACITLLAHAVKSEIADDVKDILEQMFYTGLSPALTVCLRELSENVPQLKSAITEGLIGILSQVLMNKAAILPYTALPTIAIDGSLMQNGDGATTVLALKTLGTFNFEEQNMLDFVQRCADYFIVHEQQEIRLEAVQTCTRLLKLAVQSSESMENSKTLSDTVSHVIERLLMVAITDMDCNVRIRILRSLDETFDGKLAQPESLNSLFITLHDEIFEIRELAMVTIGRLSSINPAYVMPKLRTTMIELITDLKYSGMSRNKEQSAKMLDHLVISTPRLISSYMNPILKALVPKLHEPESNPGVILNVLRTIGDLAEVNGGSDEMELWADDLLSILLEMLGDAGSPDKRGVALWTLGQLISATGRVVTPYHKYPVLIDILINFLKTEQRRSIRRETIRVLGLLGAMDPYKHKMNKGLIDSQKDNVLIAYSDGKVDESQDISTAELLVNMGNALDEYYPAVAIAALMRILRDPTLSTRHTSVVQAVTFIFQSLGIKCVPYLAQVLPNLLDNVRTADNNLREFLFQQLAILVAFVKLHIISYMGDIFKLIKEFWTINTPLQNTLINLIEQIAVALGCEFRDYLAELIPQILRVLQHDNSKDRMVTRRLLQALQKFGSTLGYYLPLILPPIVKLFDSPYVPQQVSMVALETINNLACQLDFTDFSSRIIHPLVRVLDAEPELRDQAMTTLRSLAKQLGKKYLVFVPMVQRTLNKHRIVDPEYEELLSKIKSCSTLADSYGAGESELRPSRFKNNEPFVTDRNSNNKNLQVTTNELRTAWQVTRRVSKDDWVEWLKRLSIGLLKESPSHALRACRSLAQEYDTLLRDLFNAAFISCWTELSPDLKNELTQSLIQALQVTDMPEITQTILNLAEFMEHCDRDPIPIETKLLGTRAMACRAYAKALRYKEEEFLLREDSQVFESLILINNKLQQREAAEGLLTRYRNAANELNVQGRWYEKLHNWDEALEHYERNLKTDSSDLEARLGHMRCLEALGDWSELSNVTKHEWENFGTEAKSRAGPLAAVAAWGLQDWEAMREYVRCIPEDTQDGSYYRAVLAVHHDDFETAQRLIDETRDLLDTELTSMAGESYERAYGAMVCVQMLAELEEVIQYKLIPERREPLKTMWWKRLQGGQRLVEDWRRIIQVHSLVVKPHEDIHTWLKYASLCRKSGSLHLSHKTLVMLLGTDPKLNPNQPLPCNQPQVTYAYTKYMAANNQLQEAYEQLTHFVSTYSQELSCLPPEALKQQDQRLMARCYLRMATWQNKLQDSIRPDAIQGALECFEKATSYDPNWYKAWHLWAYMNFKVVQAQKSALDKQQPPGASMGMTMGSGLDSDLMIIQRYAVPAVQGFFRSISLIKGNSLQDTLRLLTLWFDYGNHAEVYEALLSGMKLIEINTWLQVIPQLIARIDTHRQLVGQLIHQLLMDIGKNHPQALVYPLTVASKSASLARRNAAFKILDSMRKHSPTLVEQAVMCSEELIRVAILWHEQWHEGLEEASRLYFGDRNVKGMFEILEPLHAMLERGPQTLKETSFSQAYGRELTEAYEWSQRYKTSAVVMDLDRAWDIYYHVFQKISRQLPQLTSLELPYVSPKLMTCKDLELAVPGSYNPGQELIRISIIKTNLQVITSKQRPRKLCIRGSNGKDYMYLLKGHEDLRQDERVMQLFSLVNTLLLDDPDTFRRNLAIQRYAVIPLSTNSGLIGWVPHCDTLHTLIRDYRDKKKVPLNQEHRTMLNFAPDYDHLTLMQKVEVFEHALGQTQGDDLAKLLWLKSPSSELWFERRNNYTRSLAVMSMVGYILGLGDRHPSNLMLDRMSGKILHIDFGDCFEVAMTREKFPEKIPFRLTRMLIKAMEVTGIEGTYRRTCESVMLVLRRNKDSLMAVLEAFVYDPLLNWRLLDVDKKGNDAVAGAGAPGGRGGSGMQDSLSNSVEDSLPMAKSKPYDPTLQQGGLHNNVADETNSKASQVIKRVKCKLTGTDFQTEKSVNEQSQVELLIQQATNNENLCQCYIGWCPFW

SEQ ID NO: 14000 - protein, 760 aa, Drosophila melanogaster
MARCYLRMATWQNKLQDSIRPDAIQGALECFEKATSYDPNWYKAWHLWAYMNFKVVQAQKSALDKQQPPGASMGMTMGSGLDSDLMIIQRYAVPAVQGFFRSISLIKGNSLQDTLRLLTLWFDYGNHAEVYEALLSGMKLIEINTWLQVIPQLIARIDTHRQLVGQLIHQLLMDIGKNHPQALVYPLTVASKSASLARRNAAFKILDSMRKHSPTLVEQAVMCSEELIRVAILWHEQWHEGLEEASRLYFGDRNVKGMFEILEPLHAMLERGPQTLKETSFSQAYGRELTEAYEWSQRYKTSAVVMDLDRAWDIYYHVFQKISRQLPQLTSLELPYVSPKLMTCKDLELAVPGSYNPGQELIRISIIKTNLQVITSKQRPRKLCIRGSNGKDYMYLLKGHEDLRQDERVMQLFSLVNTLLLDDPDTFRRNLAIQRYAVIPLSTNSGLIGWVPHCDTLHTLIRDYRDKKKVPLNQEHRTMLNFAPDYDHLTLMQKVEVFEHALGQTQGDDLAKLLWLKSPSSELWFERRNNYTRSLAVMSMVGYILGLGDRHPSNLMLDRMSGKILHIDFGDCFEVAMTREKFPEKIPFRLTRMLIKAMEVTGIEGTYRRTCESVMLVLRRNKDSLMAVLEAFVYDPLLNWRLLDVDKKGNDAVAGAGAPGGRGGSGMQDSLSNSVEDSLPMAKSKPYDPTLQQGGLHNNVADETNSKASQVIKRVKCKLTGTDFQTEKSVNEQSQVELLIQQATNNENLCQCYIGWCPFW

SEQ ID NO: 14001 - protein, 455 aa, Drosophila melanogaster
MDLDRAWDIYYHVFQKISRQLPQLTSLELPYVSPKLMTCKDLELAVPGSYNPGQELIRISIIKTNLQVITSKQRPRKLCIRGSNGKDYMYLLKGHEDLRQDERVMQLFSLVNTLLLDDPDTFRRNLAIQRYAVIPLSTNSGLIGWVPHCDTLHTLIRDYRDKKKVPLNQEHRTMLNFAPDYDHLTLMQKVEVFEHALGQTQGDDLAKLLWLKSPSSELWFERRNNYTRSLAVMSMVGYILGLGDRHPSNLMLDRMSGKILHIDFGDCFEVAMTREKFPEKIPFRLTRMLIKAMEVTGIEGTYRRTCESVMLVLRRNKDSLMAVLEAFVYDPLLNWRLLDVDKKGNDAVAGAGAPGGRGGSGMQDSLSNSVEDSLPMAKSKPYDPTLQQGGLHNNVADETNSKASQVIKRVKCKLTGTDFQTEKSVNEQSQVELLIQQATNNENLCQCYIGWCPFW

SEQ ID NO: 14002 - protein, 3218 aa, Drosophila melanogaster
MKNAIHPENCNGAGTEEEASSAFHAEIDRVLLNNNGNHGDSSNEGGGGNGSGRGGATGSGNIAGLGGSESMWSPGGGKSHDVAQAFANALLLRNMNHVVGKGQPVVQNHRKAYQCKGDTINPMANGEDLRLSKIIRRLINENNPTVSLELCSKLDQAVRTPINMGYMTCSFVWILDNMLTLYKQCPPPVLEECSKTLGLIGFINRKSYPIYEEFIVKNYKSSKRMQKYMIMALRATLSCDTKCELHMYADKIMLLLKDFLENAESADIFIVVSNTLVQFAASYAETFECHFTDVVDIVIGWQLEAGQPTDLKTHCAQVLEQLTPFFSKQIDFSYGLLDQFVEDITTLEEGEPANTAERVGAFVGAFNTLLKCLARMQIFVGMPTCECIVKMAVDHLIKIMPTLHLNTEALVNINELICICLLNNFTGLDPILLEQVLLDQVKRMISLTELQRQSVLYLLLCTVRRLRARLTPSLVHFIFQSNPYMTKVRLRSPGETSYKLLLRTCQETLLIRNVPLLQQAYKYLVDDIDACLEKLLITAPRSKARKASVLLVFHLSALAALAKQTSSIIGMYACKPSILELLLTNCRAHELKFWSKYPAAQQAIFGLLVVHCQANHNFRTNSSLLRDQELSAENTSPTANSFASILRFLDSVLGQAHQLAPQNLRVLLQWIQMLLRECREKIDLLMEQENFRGICRNIAATASKLVPLESAACIQTVLDYGLERLEKYPKLLILYRDTALQQLQMLSTNYHAPYFQIYAQLPLHLTLTGGESSMPGMASRRVSVWQQRISQYSAVRDNVFRDFFDRVQKPEQDSLIHCLRELFVRSCQVAPQDERQMNLSQCTKRCQRLAIAWLQFEAARYCVDQRLRTTVGKPQETFLGFEAIIMRHARLLSGCAKEIERSALDDLSLEELLSMQSNLSLLLGFLDALEKLIYNAAEGSAFALRPPEKQVAAFFRLNNPTCQSWFNRIRIGVVIIAMHVQQPELVIRYAQQILVNSKTQDPTYSQAIVYMAWSLVSCQEADSLRGLRLWARGKSCKSYKWLKYAADQAAGKRESALAGYRTILAEKELQSELEPHTRQFVVSQMMQCLQDLGQWSQLVELKQQQMTRPEDRELNPFLQRSNVEVNALERLLAKSEESCSSMDALGGVFQQLSLWPSNWDESVSSSGLSERASFSSIHMRQRTEDIVLHKLLEDRCVPDQAKNLLDTQWRDSLLNPSFDQRSCKELTLLRHIVQGVSGGQELSLLPVSSGRCQNRSKFISSAILMRCLAWTQLLRQHCAPGSWETLCLDAAAAAREEGNLQLAETLLTQFFGQPIGEIAALFSLEQGVQTDNPEMLRGYSELVKCLHLQQQQSQTHSGDLSSSIDVCAALCLNIQKSNNQPAAGADLLLNLADWIAVRTCNGLTTNQSPVLIQLLDQLPECPLTCDSSQPLAIPQAERMVARLVHSCLQQRPNYAEALIAYGNWCYRWGKKVADSCCVLTQADATAISQALDIPQPLESEKLDELLQALSTEQPPANCVEVCPDAARARDDEAAKNRLRRLTFLADKTPEALDAILQIWRRAIANTYDYYKDAARSYFQYLSFKSGSGPEKPEGEGVVSQRERLHVDDSNLVTTTLRLLRLIVKHASGLQEVLEQGLHTTPIAPWKVIIPQLFSRLNHHEPYVRKSVCDLLCRLAKSRPQLVIFPAVVGANREQQDATAPPATARPTTEDACCYGYLLGELSKQAPEAVQHVKLMVKELRRVCLLWDEYWIHSLAHIYNTYVSRVSALATDFRPDDHEGKNNRFNVWRPQLLADLEALVAVTSRPPETTYERSFRKRFDAPIRLTVDALRHRRYPEAWDKLKQLYHILQSNMIRGSGSTLKMQSISPVLCGIGRMRISMPGLDAHGPDGDQVYIESVESSVCVLPTKTKPKKVAFYGSNGQRYTFLFKGMEDLHLDERIMQFLSISNAIMACRSDAPGNGCYRAHHYSVIPLGPQSGLISWVDGVTPVFALYKKWQQRRSQVAGNAGAGAVANVPRRFTDLFYNKLSPLLAKHNMQVSDPRRQWPISVLLQVLDELSQETPNDLLARELWCQAGNAAEWRQSVRRFVRCMSVMSMIGYVIGLGDRHLDNVLINLGSGDIVHIDYNVCFEKGRTLRIPEKVPFRLTQNLVQAMGITGIEGPFRLGCEYVLKVMRKERETLLTLLEAFVYDPLVDWTTNDDAQALRRSLNAKLQESADGGGAGGLGVGDLKYHKKDKNKGKPLDSDVKRQPFLSKLGMLQKYWSTNKTELMPQLEEMEQEVGNLQAAQAKQVVAEEELVKLNQRSALIAEIKSLGTAIESHSFNTASLRNAVRRGHSEALALLSTERLPDFGRVQCILRSYGQCLQLYHLLDLQGQLVKLQMESNSENAREFSALTEALQLSGLDSMRSQLNELLGRMDMVAQKSSKHLQEYAGVMNFYPEQSHRQNLFVRFHDSFATYIQNGYTADSTTNTNSPSSSIICKADVVGVAEAMEYSWERLGCQLHEASKLYAANQAQALTLGAPTTALLSMIVQSGCSQLLLKASLVRTLDRAGGAFAAYEQVALASHDDGLLHHQLLFIHLVRTMLQGVLVMTKEEDQHLAQLESLLSALSHLKKMFEYDLPANLYRLLLLQPNLGKLSALCHLSASSLAQLFLEATMENGHKPPDQFPVERRFLLTLQPVYDQFLLASTSLDSLVSSMQSMLEDVHDVQTQQIMELGLMRSCHTELNDECFFGLVSEALESSRTCDVREMARPMLGFIHRLQVEKLAGLLPILTRNFYTAVGPQCLPTASCGDPAQADHLCESLFISLQSDGALLQQQAEIALLSQQVDLHTLAASAQYWAYSEALGSQLRCGPHIVSRPKLTAAIGECWLELDQKLTALQQLQAGLESQLSQLQTQRSNWNRNHIDNLLRMEQCNKQRTMSHVALLQKMTDGAGAVARLEQNAIVVGEEGQALVDHLEQWLAAHGQWQASSSRISAVEQSMVELLDPEGAIDHYWLENVQGLLEEQTCKVHREIAAIEGEQQSKHRFICTLLKETLRLLENMPRFHVQSLCSEAQAQGQGKMEYANVQLLSDHLREGQGLMQSLYMRLQELRKDICSDRRVLQPSMLQNWRHQLEMILTLAKQEVNEFFKGLEDFMQHAGETDSYEIFTHAKGSGNVHEQKRNAYGVSVWKKIRMKLEGRDPDSNQRSTVAEQVDYVIREACNPENLAVLYEGWTPWV

SEQ ID NO: 14003 - protein, 249 aa, Carassius auratus
PEAASGVLEYAMKHFGELEIHATWYEKLHEWEDALVAYDKKIDMNKDDPELILGCMICLEALGEWGQLHQQCCEEWTLVSEETQAKMARMAAAAAWGLATGTVWKSILAWSQETPMMEPFTGQCLLYIRISSHWLNSALTKPETYWMLSSTAMAGESYSRAYGAMVSCQMLSELEEVIQYKLVPGRRDIIRETWWERLQGCQRIVEDWQRILMVRSLVISPHEDMRTWLKYASLCGKSGRIALAHKTLV

SEQ ID NO: 14004 - protein, 2549 aa, Homo sapiens
MLGTGPAAATTAATTSSNVSVLQQFASGLKSRNEETRAKAAKELQHYVTMELREMSQEESTRFYDQLNHHIFELVSSSDANERKGGILAIASLIGVEGGNATRIGRFANYLRNLLPSNDPVVMEMASKAIGRLAMAGDTFTAEYVEFEVKRALEWLGADRNEGRRHAAVLVLRELAISVPTFFFQQVQPFFDNIFVAVWDPKQAIREGAVAALRACLILTTQREPKEMQKPQWYRHTFEEAEKGFDETLAKEKGMNRDDRIHGALLILNELVRISSMEGERLREEMEEITQQQLVHDKYCKDLMGFGTKPRHITPFTSFQAVQPQQSNALVGLLGYSSHQGLMGFGTSPSPAKSTLVESRCCRDLMEEKFDQVCQWVLKCRNSKNSLIQMTILNLLPRLAAFRPSAFTDTQYLQDTMNHVLSCVKKEKERTAAFQALGLLSVAVRSEFKVYLPRVLDIIRAALPPKDFAHKRQKAMQVDATVFTCISMLARAMGPGIQQDIKELLEPMLAVGLSPALTAVLYDLSRQIPQLKKDIQDGLLKMLSLVLMHKPLRHPGMPKGLAHQLASPGLTTLPEASDVGSITLALRTLGSFEFEGHSLTQFVRHCADHFLNSEHKEIRMEAARTCSRLLTPSIHLISGHAHVVSQTAVQVVADVLSKLLVVGITDPDPDIRYCVLASLDERFDAHLAQAENLQALFVALNDQVFEIRELAICTVGRLSSMNPAFVMPFLRKMLIQILTELEHSGIGRIKEQSARMLGHLVSNAPRLIRPYMEPILKALILKLKDPDPDPNPGVINNVLATIGELAQVSGLEMRKWVDELFIIIMDMLQDSSLLAKRQVALWTLGQLVASTGYVVEPYRKYPTLLEVLLNFLKTEQNQGTRREAIRVLGLLGALDPYKHKVNIGMIDQSRDASAVSLSESKSSQDSSDYSTSEMLVNMGNLPLDEFYPAVSMVALMRIFRDQSLSHHHTMVVQAITFIFKSLGLKCVQFLPQVMPTFLNVIRVCDGAIREFLFQQLGMLVSFVKSHIRPYMDEIVTLMREFWVMNTSIQSTIILLIEQIVVALGGEFKLYLPQLIPHMLRVFMHDNSPGRIVSIKLLAAIQLFGANLDDYLHLLLPPIVKLFDAPEAPLPSRKAALETVDRLTESLDFTDYASRIIHPIVRTLDQSPELRSTAMDTLSSLVFQLGKKYQIFIPMVNKVLVRHRINHQRYDVLICRIVKGYTLADEEEDPLIYQHRMLRSGQGDALASGPVETGPMKKLHVSTINLQKAWGAARRVSKDDWLEWLRRLSLELLKDSSSPSLRSCWALAQAYNPMARDLFNAAFVSCWSELNEDQQDELIRSIELALTSQDIAEVTQTLLNLAEFMEHSDKGPLPLRDDNGIVLLGERAAKCRAYAKALHYKELEFQKGPTPAILESLISINNKLQQPEAAAGVLEYAMKHFGELEIQATWYEKLHEWEDALVAYDKKMDTNKDDPELMLGRMRCLEALGEWGQLHQQCCEKWTLVNDETQAKMARMAAAAAWGLGQWDSMEEYTCMIPRDTHDGAFYRAVLALHQDLFSLAQQCIDKARDLLDAELTAMAGESYSRAYGAMVSCHMLSELEEVIQYKLVPERREIIRQIWWERLQGCQRIVEDWQKILMVRSLVVSPHEDMRTWLKYASLCGKSGRLALAHKTLVLLLGVDPSRQLDHPLPTVHPQVTYAYMKNMWKSARKIDAFQHMQHFVQTMQQQAQHAIATEDQQHKQELHKLMARCFLKLGEWQLNLQGINESTIPKVLQYYSAATEHDRSWYKAWHAWAVMNFEAVLHYKHQNQARDEKKKLRHASGANITNATTAATTAATATTTASTEGSNSESEAESTENSPTPSPLQKKVTEDLSKTLLMYTVPAVQGFFRSISLSRGNNLQDTLRVLTLWFDYGHWPDVNEALVEGVKAIQIDTWLQVIPQLIARIDTPRPLVGRLIHQLLTDIGRYHPQALIYPLTVASKSTTTARHNAANKILKNMCEHSNTLVQQAMMVSEELIRVAILWHEMWHEGLEEASRLYFGERNVKGMFEVLEPLHAMMERGPQTLKETSFNQAYGRDLMEAQEWCRKYMKSGNVKDLTQAWDLYYHVFRRISKQLPQLTSLELQYVSPKLLMCRDLELAVPGTYDPNQPIIRIQSIAPSLQVITSKQRPRKLTLMGSNGHEFVFLLKGHEDLRQDERVMQLFGLVNTLLANDPTSLRKNLSIQRYAVIPLSTNSGLIGWVPHCDTLHALIRDYREKKKILLNIEHRIMLRMAPDYDHLTLMQKVEVFEHAVNNTAGDDLAKLLWLKSPSSEVWFDRRTNYTRSLAVMSMVGYILGLGDRHPSNLMLDRLSGKILHIDFGDCFEVAMTREKFPEKIPFRLTRMLTNAMEVTGLDGNYRITCHTVMEVLREHKDSVMAVLEAFVYDPLLNWRLMDTNTKGNKRSRTRTDSYSAGQSVEILDGVELGEPAHKKTGTTVPESIHSFIGDGLVKPEALNKKAIQIINRVRDKLTGRDFSHDDTLDVPTQVELLIKQATSHENLCQCYIGWCPFW

SEQ ID NO: 14005 - protein, 2549 aa, Homo sapiens [sequence omitted]

SEQ ID NO: 14006 - protein, 2548 aa, Homo sapiens [sequence omitted]

SEQ ID NO: 14007 - protein, 1188 aa, Homo sapiens
EFMEHSDKGPLPLRDDNGIVLLGERAAKCRAYAKALHYKELEFQKGPTPAILESLISINNKLQQPEAAAGVLEYAMKHFGELEIQATWYEKLHEWEDALVAYDKKMDTNKDDPELMLGRMRCLEALGEWGQLHQQCCEKWTLVNDETQAKMARMAAAAAWGLGQWDSMEEYTCMIPRDTHDGAFYRAVLALHQDLFSLAQQCIDKARDLLDAELTAMAGESYSRAYGAMVSCHMLSELEEVIQYKLVPERREIIRQIWWERLQGCQRIVEDWQKILMVRSLVVSPHEDMRTWLKYASLCGKSGRLALAHKTLVLLLGVDPSRQLDHPLPTVHPQVTYAYMKNMWKSARKIDAFQHMQHFVQTMQQQAQHAIATEDQQHKQELHKLMARCFLKLGEWQLNLQGINESTIPKVLQYYSAATEHDRSWYKAWHAWAVMNFEAVLHYKHQNQARDEKKKLRHASGANITNATTAATTAATATTTASTEGSNSESEAESTENSPTPSPLQKKVTEDLSKTLLMYTVPAVQGFFRSISLSRGNNLQDTLRVLTLWFDYGHWPDVNEALVEGVKAIQIDTWLQVIPQLIARIDTPRPLVGRLIHQLLTDIGRYHPQALIYPLTVASKSTTTARHNAANKILKNMCEHSNTLVQQAMMVSEELIRVAILWHEMWHEGLEEASRLYFGERNVKGMFEVLEPLHAMMERGPQTLKETSFNQAYGRDLMEAQEWCRKYMKSGNVKDLTQAWDLYYHVFRRISKQLPQLTSLELQYVSPKLLMCRDLELAVPGTYDPNQPIIRIQSIAPSLQVITSKQRPRKLTLMGSNGHEFVFLLKGHEDLRQDERVMQLFGLVNTLLANDPTSLRKNLSIQRYAVIPLSTNSGLIGWVPHCDTLHALIRDYREKKKILLNIEHRIMLRMAPDYDHLTLMQKVEVFEHAVNNTAGDDLAKLLWLKSPSSEVWFDRRTNYTRSLAVMSMVGYILGLGDRHPSNLMLDRLSGKILHIDFGDCFEVAMTREKFPEKIPFRLTRMLTNAMEVTGLDGNYRITCHTVMEVLREHKDSVMAVLEAFVYDPLLNWRLMDTNTKGNKRSRTRTDSYSAGQSVEILDGVELGEPAHKKTGTTVPESIHSFIGDGLVKPEALNKKAIQIINRVRDKLTGRDFSHDDTLDVPTQVELLIKQATSHENLCQCYIGWCPFW

SEQ ID NO: 14008 - protein, 895 aa, Homo sapiens
EIQATWYEKLHEWEDALVAYDKKMDTNKDDPELMLGRMRCLEALGEWGQLHQQCCEKWTLVNDETQAKMARMAAAAAWGLGQWDSMEEYTCMIPRDTHDGAFYRAVLALHQDLFSLAQQCIDKARDLLDAELTAMAGESYSRAYGAMVSCHMLSELEEVIQYKLVPERREIIRQIWWERLQGCQRIVEDWQKILMVRSLVVSPHEDMRTWLKYASLCGKSGRLALAHKTLVLLLGVDPSRQLDHPLPTVHPQVTYAYMKNMWKSARKIDAFQHMQHFVQTMQQQAQHAIATEDQQHKQELHKLMARCFLKLGEWQLNLQGINESTIPKVLQYYSAATEHDRSWYKAWHAWAVMNFEAVLHYKHQNQARDEKKKLRHASGANITNATTAATTAATATTTASTEGSNSESEAESTENSPTPSPLQKKVTEDLSKTLLMYTVPAVQGFFRSISLSRGNNLQDTLRVLTLWFDYGHWPDVNEALVEGVKAIQIDTWLQVIPQLIARIDTPRPLVGRLIHQLLTDIGRYHPQALIYPLTVASKSTTTARHNAANKILKNMCEHSNTLVQQAMMVSEELIRVAILWHEMWHEGLEEASRLYFGERNVKGMFEVLEPLHAMMERGPQTLKETSFNQAYGRDLMEAQEWCRKYMKSGNVKDLTQAWDLYYHVFRRISKQLPQLTSLELQYVSPKLLMCRDLELAVPGTYDPNQPIIRIQSIAPSLQVITSKQRPRKLTLMGSNGHEFVFLLKGHEDLRQDERVMQLFGLVNTLLANDPTSLRKNLSIQRYAVIPLSTNSGLIGWVPHCDTLHALIRDYREKKKILLNIEHRIMLRMAPDYDHLTLMQKVEVFEHAVNNTAGDDLAKLLWLKSPSSEVWFDRRTNYTRSLAVMSMVGYILGLGD

SEQ ID NO: 14009 - protein, 367 aa, Homo sapiens
FRRISKQLPQLTSLELQYVSPKLLMCRDLELAVPGTYDPNQPIIRIQSIAPSLQVITSKQRPRKLTLMGSNGHEFVFLLKGHEDLRQDERVMQLFGLVNTLLANDPTSLRKNLSIQRYAVIPLSTNSGLIGWVPHCDTLHALIRDYREKKKILLNIEHRIMLRMAPDYDHLTLMQKVEVFEHAVNNTAGDDLAKLLWLKSPSSEVWFDRRTNYTRSLAVMSMVGYILGLGDRHPSNLMLDRLSGKILHIDFGDCFEVAMTREKFPEKIPFRLTRMLTNAMEVTGLDGNYRITCHTVMEVLREHKDSVMAVLEAFVYDPLLNWRLMDTNTKGNKRSRTRTDSYSAGQSVEILDGVELGEPAHKKTGTT

SEQ ID NO: 14010 - protein, 4144 aa, Canis familiaris
MFSSSQIPRVFLIPSRRELRLVLQLQESLSAGDRCSAAMASYQLTRGLGQECVLSSDPAVLALQTSLVFSKDFGLLVFVRKSLSIDEFRDCREEVLKFLYIFLEKIGQKITPYSLDIKTTCTSVYTKDKAAKCKIPALDLLIKLLQTLRSSRLMDEFSIGELFNKFYGELALKTKIQDTVLEKIYELLGVLAEVHPSEMINNSEKLFRAFLGELKIQMTSAIREPKLPVLAGCLKGLSSLMCNFTKSMEEDPQTSREIFDFALKAIRPQIDLKRYAVPLAGLCLFTLHASQFSTCLLDNYVSLFEVLSKWCSHTNVEMKKAAHSALESFLKQVSFMVAKDAEMHKSKLQYFMEQFYGIIRNMDSNSKDLSIAIRGYGLFAGPCKVINAKDVDFMYIELIQRCKQLFLTQIDTVDDHVYHMPSFLQSIASVLLYLDRVPEVYTPVLEHLMVAQIDSFPQYSPKMQSVCCKALVKVFLALGGKGPVLWNCISTVVHQGLIRICSKPVILQKGVESEPEEYRASGEVRTGKWKVPTYKDYLDLFRSLLSCDQMMDSLLADEAFLFVNSSLQNLNRLLYDEFVKSVLKIIEKLDLTLEKRNVGEHEDENEATGVWVIPTSDPAANLHPAKPKDFSAFINLVEFCRDILPEKHIEFFEPWVYSFAYELILQSTRLPLISGFYKLLSVAVRNAKKIKYFEGVGMKSQTQAPKDPEKYSCFALFAKFGKEVTVKMKQYKDELLASCLTFILSLPHDIIELDIRAYIPALQMAFKLGLSYTPLAEVGLNALEEWSVCICKHIIQPHYKDILPSLDGYLKTSALSDETKNSWEVSAPSQAAQKGFNQVVLKHLKKTKNISSNEALSLEEIRIRVVQMLGFLGGQINKNLLTATSSDEMMKKCVAWDREKRLSFAVPFIEMKPVIYLDVFLPRVTELALSASDRQTKVAACELLHSMVMFTLGKATQMPECGQGFPPMYQLYKRTFPALLRLACDVDQVTRQLYEPLVMQLIHWFTNNKKFESQDTVALLETILDGIVDPVDSTLRDFCGRCIREFLKWSIKQTTPQQQEKSPVNTKSLFKRLYSFALHPNAFKRLGASLAFNNIYREFREEESLVEQFVFEALVTYLESLALAHTDEKPLGTIRQCCDAIDHLRHIIEKKHVSLNKVKKRRRPRGFPPSASLCLLDMVQWLLAHCGRPQTECRHKSIELFYKFVPLLPGNKSPSLWLKDILKNKDTSFLINTFEGGGGSCDRPSGILVQPTLFHLQGPFSLRAALQWMDMLLAALECYNTFIEEKTLKAPDVLGTETQSSLWKAVAFFLDNIAMHDITAAEKCFGTGAAGHRPSPQEGERYNYSKCTIVVRIMEFTTTLLNTSPDGWKLLEEDLCNNKNFMTLLVKILCQPSSIGFNIGDVLVMNHLPDVCVNLMKALKKSPYKDTLEMCLKEKITVQSIEELCAVDLYGPDAYVDRATLASVVSACKQLHRAGVLHVVLPSQSADQRHSVGIKLLFLVYKSIAPGDEREYFPSLDPSCKRLASGLLELAFAFGGLCEHLVDLLLDTAVLSMPASGESQRNMVSFSHGEYFYSLFSEIINTELLRNLDMTVLKLMKSSVDNPKMVSAILNGMLDQSFRDRASRKQQGLKLASTILHNWKKWDSWWAKDSAPESKTAVLTLLAKILQIDSSVSFNTNHSAFPEVFTTYTSLLADSNLGLHLMGQAVILLPFFTNLTGGNLEDLEHVLEKLIVSNFPMKSEEFPVGTLRYSNYVDCMKKFLDALELSQSPVLLQLMAEILCREQQHVMEELFQSTFKKIARKSSCVTQLALLESVYRMFKRDDLLSNVTRQAFVDRSLLTLLWHCGLNALREFFGKIVVETIDVLKSRFTKLNESTFDTQITKKMGFYKMLDVMYSRLSKDDVHSKESKINQVFHGSCITEGNELTKTLIKLCYDAFTENMAGENQLLERRRLYHCAAYNCAISVICCVFTELKFYQGFLFSEKPEKNLLILENLIDLKRCYTFPIEVEVPMERRKKYIEIRKEAREAVNGDSDGPHYLSSLSYLADSSLSEEMSQFDFSTGVQSYSYGSQDPKSTHGHFRRREHKDPMVQDAVLELEMDELNQHECMATMTALIKHMQRNQILSKDEGSVPRNLPPWMKFLHDKLGNPSVSLNIRLFLAKLVINTEEVFRPYAKYWLSPLLQLVVSENNGGEGIHYMVVEIVVTVLSWTGLATPVGVPKDEVLANRLLHFLMEHVFHQKRAVFRHNLEIIKTLVECWKDCLSVPYRLIFEKFSSKDPNSKDNSVGIQLLGIVMANNLPPYDPKCGIERIKYFEALVSNMSFVKYKEVYAAAAEVLGLTLRYITERENILENVVYELVIKQLKQHQNTMEDKFIVCLNKVVKNFPPLADRFMNAVFFLLPKFHGVMKTLCLEVVLCRAEEITNIYLELKSKDFIQVMRHRDDERQKVCLDIIYKMMAKLKPVELRDLLNSVVEFISHPSPVCREQMYNILMWIHDNYRDPESQADDDSREVFKLAKDVLIQGLIDENAGLQLIIRNFWSHETRLPSNTLDRLLALNSLYSPKIEVHFLSLATDFLLEMTSLSPDYANPVFEHPLSECEFQEYTIDSDWRFRSTVLTPMFIETQASQSTLQTRTQERSLPAQGVMARQIRATQQQYDFTPTQTADGRSSFNWLTGSSIDPLVDYTVSSSDSSSSSLLFAQKRNEKSQRAPLKSVGPDFGEKKLGLPGDKVDNKAKGIDNRTEILRLRRRFIKDQEKLSLIYARKGIAEQKREKEIKSELKMKHDAQVILYRSYRQGDLPDIQIKYSSLVTPLQAVAQRDPVVAKQLFGSLFSGIIKEMDKYKTMSEKNNITQKLLQDFSHFLNSTFSFFPPFVSCIQEISCQHTDLLSLDPGSIRASCLASLQQPVGVRLLEEALLHLGPQEPPAKQFKGRMRVSPDVVRWMELAKLYRSIGEYDILRGIFSSEIGTKQITQSAIFAEARSDYSEAAKQYNEALNKEEWVDGEPTEAEKDFWELASLDCYNQLAEWKSLAYCSIVSVDNENPPDLNKMWSEPFYRETYLPYMIRSKLKLLLQGEADQSLLTFIDEAVNKDLQKALIELHYSQELSLLYILQDDIDRAKYYIENCIQIFMQNYSSIDVLLHRSRLTKLQSVQTMIEIQEFISFISRQGNLSSQAPLKRLLKSWTNRYPDARMDPVHIWDDIITNRCFFLSKIEEKLTLPLGDHSLSMDEERDSSDKMEVQEQGEEVCSLIKNCMFSMKMKMVESARKQHNFSLAMKLLKELRRESKTRDDWQVKWVHTYCRLSHSRIQGQSCLQQILSALKTVSLLAGESTSSYFSKNVLAFHDQNILLGTTYSIIANALRREPACLAEIEESRARRILDLSGSSLENAEKVIAVLYQRAFHHLSEAVRTAEEEAQPSLRGQGPVASLTDAYMTLADFCDQQLRKEEESASVTESVELQTYPGLVVDNMLKALKLHSSEARLKFPRLLQIIELYPEETLSLMTKEISSTPCWQFIGWISHMVALLDQEEAVAVQCTVEEIADNYPQAIVYPFIISSESYSFKDTSTGHKNKEFVARIKTKLDLGGVIQDFISALEQLSNPEMLFKDWTDDMKAELAKNPVSKKNIEKMYERMYAALGDLRAPGLGAFRRRFIQVFGKEFDKHFGKGGSKLPGMKLRDFGSITDSLFYKMCTDSKPPGNLKECSPWMSDFKVEFLRNELEIPGQYDGKGKPLPEYHARIAGFDERIKVMASIRKPKRIIIRGRDEKEYPLLVKGGEDLRQDQRIEQLFEVMNVLLSQDTACSQRNMQLKTYHVIPMTSRLGLIEWIENTLTLKDFLLSNMSREEKAAYTSDPKAPPCEYRDWLAKMSGKYDVGAYMSMFKAASRTETVTSFRRRESRVPADLLKRAFLKMSTGPAAFLALRSHFASSHALMCISHWILGIGDRHLNNFMVSMETGGLIGIDFGHAFGSATQFLPVPELMPFRLTRQFINLMLPMKEAGVVYSIMVHALRAFRSHSDLLTNTMDVFVKEPSFDWKNFEQKMLKKGGSWIQEINVTEKNWYPRQKIHYAKRKLAGANPAVITCDELFLGHEKALAFGDYVAVARGSKDHNIRAQQPENGLSEEAQVKCLIDQATDPNILGRTWIGWEPWM

SEQ ID NO: 14011 - protein, 4106 aa, Equus caballus
AVAGYQLIRGLGQECMLSTGPAVLALQTSLVFSKDFGLLVFVRKSLSIDEFRDCREEILKFLYIFLEKIGQKITPYSLDIKNTCTSVYTKDKAAKCKIPALDLLIKLLQTLRSSRLMDEFRVGELFTKFYGELALKTKIPDTVLEKIYELLGVLGEVHPSEMISNSEQLFRAFLGELKSQMTSTVREPKLPVLAGCLKGLSSLMCNFTKSMEEDPQTSREIFDFALKAIRPQIDLKRYAVPLAGLCLFTLHASQFSTCLLENYVSLFEVLSKWCGHTNIELKKAAHSALESFLKQVSFMVAKDAERHKNKLQYFMEQFYGIIRNMDSNSKDLSIAIRGYGLFAGPCKVINAKDVDFMYVELIQRCKQLFLTQTDTVDDHIYQMPSFLQSIVSVLLYLDTIPEVYTPVLEHLMVVQIDSFPQYSPKMQPVCCRAIVKLFLALAEKGPVLWNCISTVVHQGLIRICSKPVVFQKGAGSESEDYHTSEEARTGKWKMPTYKDYLDLFRYLLSCDQMMDSLLADEAFLFVNSSLHSLNRLLYDEFVKSVLKIVEKLDLTLEKQNVGEQEDETEATGVWVIPTSDPAANLHPAKPKDFSAFINLVEFCREILPEKHVEFFEPWVYSFAYELILQSTRLPLISVFYKLLSVAVRNAKKMKYFEGVGPKSQKQSPEDLEKYSCFALFAKFSKEVSIKMKQYKDELLASCLTFILSLPHDIIELDVRAYVPALQMAFKLGLSYTPLAEVGLNALEEWSGYICKHVIQPYYKDILPSLDGYLKTSVLSDETKNSWQVSALSRAAQKGFNKVVLKHLTKTKSISSNEALSLEEVRIRVVRILGSLGGQINKNLVTAASSDEMMKKCVAWDREKRLRFAVPFMEMKPVIYLDLFLPRVTELALSASDRQTTVAACELLHSMVMFMLGKATQMPEDGQGSPPMYQLYKRTFPVLLRLACDVDQVTRQLYEPLVMQLIHWFTNNKKFESQDTVALLETILDGIVDPVDSTLRDFCGQCIQEFLKWSIKQTTPQQQEKSPVNTKSLFKRLYSFALHPNAFKRLGASLAFNNIYREFREEESLVEQFVFEALVTYMESLALAHTDEKSLGTIQQCCDAIDHLSLIIEKKHVSLNKAKKRRLPRGFPPATSLCLLDVVQWLLANCGRPQTECRHKSIELFYKFVTLLPGNKSPFLWLKDIIKKEDISFLINTFEGGGSGRPSGILAQPTLFHLQGPFSLRAALQWMDMLLAALECYNTFIEEKTLEAPKVLGTETQSSLWKAVAFFLESIAMHDIMAAEKYFGTGATGNRPSPQEGERYNYSKCTIVVRIMEFTTTLLSTSPEGWKLLEKDVCNTNLMKLLVKTLCEPSSIGFNIGDVAVMNYLPSVCTNLMKALKKSPYKDILEMHLKEKITAQSIEELCAVDLYCPDACVDRARLASVVSACKQLHRAGVLCVIIPSQSADQHHSIGTKLLSLVYKSIAPGDEQQCLPSLDPNCKRLASGLLELAFAFGGLCEHLVSLLLDTTVLSMPSRGGSQKNIVSFSHGEYFYSLFSETINTELLKNLDLAVLELMKSSVDNPKMVSNVLNGMLDQSFRDRTSEKHQGLKLATIILQNWKKCDSWWAKDSAPESKMAVLTLLAKIFQIDSSVCFNTNHCMFPEVFTTYVSLLADSKLDLHLKGQAIILLPFFTSLTGGSLEDLKVVLENLIVSNFPMKSEEFPPGTLQYNNYVDCMKKFLDALELSKSPMLLQLMTEILCREQQHVMEELFQSTFKKIARKSSCITQLGLLESVYRMFRRDDLLSNITRQAFVDRSLLTLLWHCSLNALREFFSKIVVEAINVLKSRFIKLNESAFDTQITKKMGYYKMLDVMYSRLPKDDVHSKESKINQVFHGSCITEGSELTKTLIKLCYDAFTENMAGENQLLERRRLYHCAAYNCAISVVCCVFNELKFYQGFLFTEKPEKNLLIFENLIDLKRCYTFPIEVEVPMERKKKYLEIRKEAREAAASGDSDGPRYISSLSYLADSSLSEEMSQFDFSTGVQSYSYSSQDPKSTTAHFRRQKHKESMIQDDILELEMDELNQHECMATMTALIKHMQRNQILPKEEEGSVPRNLPPWMKFLHDKLGNPSISLNIRLFLAKLVINTEEVFRPYARYWLSPLLQLVVSGNNGGEGIHYMVVEIVVIILSWTGLATPIGVPKDEVLANRLLHFLMKHVFHQKRAVFRHNLEIIKTLVECWKDCLSIPYRLIFEKFSSTDPNSKDNSVGIQLLGIVMANNLPPYDPKCGIESIKYFQALVNNMSFVRYREVYAAAAEVLGLVLRYITERENILEESVCELVIKQLKQHQNTMEDKFIVCLNKAVKNFPPLADRFMNTVFFLLPKFHGVMKTLCLEVVLCRAEEITDLYLQLKSKDFIQVMRHRDDERQKVCLDIIYKMMARLKPVELRELLNPVVEFISHPSPVCREQMYNILMWIHDNYRDPEGQTDDDSQEIFKLAKDVLIQGLIDENPGLQLIIRNFWSHETRLPSNTLDRLLALNSLYSPKIEAHFLSLATDFLLEMTSVSPDYSNPMFDHPLSECKFQEYTIDSDWRFRSTVLTPMFIETQASQSALQTRTQEGSLSARGVMTGQIRATQQQYDFTPTQNTDGRSSFNWLTGNSIDPLVDFTVSSSSDSLSSSLLFAHKRSEKSQRGPLKSVGPDFGKKRLGLPGDEVDNKAKGTDNRAEILRLRRRFLKDREKLSLIYARKGVAEQKREKEIKSELKMKHDAQVILYRSYRQGDLPDIQIKYSSLITPLQAVAQRDPIIAKQLFGSLFSGIIKEMDKYKTMSEKNNITQKLLQDFNNFLNTTVSFFPPFISCIQEISCQHADLLSLDPASVSASCLASLQQPVGVRLLEEALLHLLPEEPPAKRVRGRPCLYPDFVRWMELAKLYRSIGEYDILRGIFNSEIGTKQVTQNALLAEARNDYSEAVKQYNEALNKQDWVDGEPMEAEKDFWELASLDCYNQLAEWKSLAYCSTVSVDSANPPDLNKMWNEPFYQETYLPYMIRSKLKLLLQGEGDQSLLTFIDEAVSKELQKVLVELHYSQELSLLYILQDDVDRAKYYIENCIRIFMQSYSSIDVLLERSRLTKLQSLQALIEIQEFISFIRKQGNLSSQIPLKRLLKTWTNRYPDAKMDPMNIWDDIITNRCFFLSKIEEKLTIPPDDHSMNTDGDEDSSDRMKVQEQEEDIYSLIKSGKFSMKMKMIESARKQKNFSLAMKLLKELHKESKTRDDWLVKWVQSYCRLSHSRSQTQNRPEQILTVLKTVSLLDENTSSYLSKNIPVSRDHNILLGTTYRIIANALSSDPTCLAEIGESKARRILELSGSSLENAEEVIAGLYQRVLHHLSEAVRIAEEEAQPFTRGQEPAVGVIDAYMTLVDFCDQQLRKEEESSSVTESVQLQMYPALVVDKMLKALRLDSNEARLKFPRLLQIIERYPEETLSLMTKEISSIPCWQFIGWISHMVALLDKEEAVAVHRTVEEIADNYPQAMVYPFIISSESYSFKDTSTGYKNKEFVERIKIKLDQGGVIQDFINALEQLSHPEMLFKDWTDDIKVELEKNPVNRKNIEKMYEKMYATLGDPQAPGLGAFRRRCIQGFGKEFDKHFGRGGSKLPGMKSREFSDITNSLFSKMCEVSKPPGNLKECSPWMSDFKVEFLRSELEIPGQYDGKGKPVPEYHARIAGFDERIKVMASMRKPKRIIIRGHDEREYPFLVKGGEDLRQDQRIEQLFEVMNVILSQDATCSQRSMQLKTYQVIPMTSRLGLIEWIENTFTLKELLLSNMSQEEKAACTRDPKAPPFEYRDWLTKMSGKCDVGAYMLMYKGASRTETVTSFRKRESKVPADLLKRAFVKMSTSPEAFLTLRSHFAGSHALICISHWIPGIGDRHLNNFLVSMETGGVIGIDFGHAFGSATQFLPVPELMPFRLTRQFINLMLPMKETGVMYSIMVHALRAFRSQSNLLANTMDVFVKEPSFDWKNFEQKMRKKGGSWIQEINVTEKNWYPRQKIHYAKRKLAGANPAVITCDELLLGHEKAAAFGDYVAVARGSEDHNIRAQELESDLSEEAQVKCLIDQATDPNILGRTLVGWEPWM

SEQ ID NO: 14012 - protein, 255 aa, Rattus norvegicus
MDDREDLVYQAKLAEQAERYDEMVESMKKVAGMDVELTVEERNLLSVAYKNVIGARRASWRIISSIEQKEENTGGEDKLKMIREYRQMVETELKLICCDILDVLDKHLIPAANTGESKVSYYYMKGDYHRYLAEFATGNDRKEAAENSLVAYKAASDIAMTELPPTHPIRLGLALNFSVFYYEILNSPDRACRLAKAAFDDAIAELDTLSEESYKDSTLIMQLLRDNLTLWTSDMQGDGEEQNKEALQDVEDENQ

SEQ ID NO: 14013 - protein, 262 aa, Fritillaria cirrhosa
MSSAESREENVYLAKLAEQAERYEEMVEFMEKVAKTVETEELTVEERNLLSVAYKNVIGARRASWRIMSSIEQKEESKGNDQNVKLIKGYRHKVEEELAKICNDILTVIDKHLIPSSGSGEATVFYYKMKGDYYRYLAEFKNEHERKEAADQSMKAYQAASNTANTDLPSTHPIRLGLALNFSVFYYEIMNSPERACHLAKQAFDEAIAELDTLSEESYKDSTLIMQLLRDNLTLWTSDLPEDGGDEGFKGEEAKAAGDDEH

SEQ ID NO: 14014 - protein, 261 aa, Aspergillus nidulans
MGHEDAVYLAKLAEQAERYEEMVENMKVVAASDVELTVEERNLLSVAYKNVIGARRASWRIVTSIEQKEESKGNKSQVALIKEYRQKIEGELAKICQDILDVLDQHLIKSAQSGESKVFYHKMKGDYHRYLAEFAVGDNRKAAADASLEAYKSATEVAQTDLAPTHPIRLGLALNFSVFYYEILNSPDQACHLAKLAFDDAIAELDTLSEESYKDSTLIMQLLRDNLTLWTSSEAEPAAENAPAEKKEEAPAAEGEEKPAE

SEQ ID NO: 14015 - protein, 248 aa, Giardia lamblia ATCC 50803
MAEAFTREDYVFMAQLNENAERYDEMVETMRKISGMEGELSDKERNLLSVAYKNVIGPRRAAWRIVSSIEAKEKGRQKPNAKRIEQIRVYRQKIEKELSDICNDILKLLQEQFVPRSTNADAKVFYYKMQGDYYRYLAEYSSGEDKEKIAGSALNAYNSAFEISQQLPPTHPIRLGLALNFSVFYYEILASPDRACELARKAFDAAITDLDKLTEESYKDSTLIMQLLRDNLNLWVTDSAGDDNAEEK

SEQ ID NO: 14016 - protein, 266 aa, Neospora caninum
MAEEIKNLRDEYVYKAKLAEQAERYDEMAEAMKNLVENCLDEQQPKDELSVEERNLLSVAYKNAVGARRASWRIISSVEQKELSKQHMQNKALAAEYRQKVEEELNKICHDILQLLTDKLIPKTSDSESKVFYYKMKGDYYRYISEFSGEEGKKQAADQAQESYQKATETAEGHSPATHPIRLGLALNYSVFFYEILNLPQQACEMAKRAFDDAITEFDNVSEDSYKDSTLIMQLLRDNLTLWTSDLQADQQQQEGGEKPAEQADQ

SEQ ID NO: 14017 - protein, 259 aa, Picea glauca
MVESSREENVYMAKLAEQAERYEEMVEFMEKVTKGVEVEELTVEERNLLSVAYKNVIGARRASWRIISSIEQKEESRGNDEHVVTIREYRSKVESELSKICEGILRLLDSHLIPSSTAAESKVFYLKMKGDYHRYLAEFKTGAERKEAAENTLLAYKSAQDIAAAELAPTHPIRLGLALNFSVFYYEILNSPDRACNLAKQAFGEAIAELDTLGEDSYKDSTLIMQLLRDNLTLWTSDMQEDAGDEIKETSKRDEGEEQ

SEQ ID NO: 14018 - protein, 94 aa, Picea glauca
  unsure (1)..(94): unsure at all Xaa locations
DICRIXLAEQAERYEEMVEFMEKVTKGVEVEELTVEERNLLSVAYKNVIGARRASWRIIWSIEQKEESRGNDEHVVTIREYRSKVESYLSACSA

SEQ ID NO: 14019 - protein, 220 aa, Spinacia oleracea
RNLLSVAYKNVVGARRASWRIISSIEQKEESRGNEDHVSVIRDYRSRIEKELSDNCDGILKLLDTKLVPAASSGDSKVFYLKMKGDYHRYLAEFKTGAQRKEAAESTLTAYKAAQDIANAELAPTHPIRLGLALNFSVFYYEILNSPDRACNLAKQAFVEAIAELDTLGEDSYKDSTLIMQLLRDNLTLWTSDMQDEAADEITEEAAKQQKAVNNNKIAY

SEQ ID NO: 14020 - protein, 300 aa, Plasmodium falciparum 3D7
MNQYIDNDISVSNKEELIYYIKILNHLGSYDGKNIYEYYLFLIKYDILFIVSYILLTIETVTLIKSVNVENYNFNYTESLSVGFAFKNALNVKRKEKTILENIITNEKSSEREKICAELLKSKLNTDIRSIEKNTYAVLKNKCISRTTDDKILMLYWHILGDMSRYCADTFHGTDKEKMHEKSMKSYSYALHYANKMKIPPSSPKMLELLVSWTVLHKDMNKDINYSIELAAEAFRNAIQNMHLLENDDECSKTIRILGILRDNINKWCEISGRKNVNALFEINGENLDKYKDIMNSTHT

SEQ ID NO: 14021 - protein, 275 aa, Cucurbita pepo
MAGRSSPREEFVYLAKLAEQAERYEEMVEFMEKVSAAVDNEELTVEERNLLSVAYKNVIGARRASWRIISSIEQKEESRGNDDHVSIIRDYRSKIETELSNICGFRILNLLDSRLIPSAASGDSKVFYLKMKGDYHRYLAEFKTGAERKEAAESTLTAYKSAQDIANAELPPTHPIRLGLALNFSVFYYEILNSPDRACSLAKQAFDEAIAELDTLGEESYKDSTLIMQLLRDNLTLWTSDIRGSRDDIKEAAPKRDCTNSSEQIDLHVQDSTSP

SEQ ID NO: 14022 - protein, 286 aa, Arabidopsis thaliana
MSSSGSDKERETFVYMAKLSEQAERYDEMVETMKKVARVNSELTVEERNLLSVGYKNVIGARRASWRIMSSIEQKEESKGNESNVKQIKGYRQKVEDELANICQDILTIIDQHLIPHATSGEATVFYYKMKGDYYRYLAEFKTEQERKEAAEQSLKGYEAATQAASTELPSTHPIRLGLALNFSVFYYEIMNSPERACHLAKQAFDEAIAELDTLSEESYKDSTLIMQLLRDNLTLWTSDLPEDGGEDNIKTEESKQEQAKPADATEVVIHFKMRTDQRAWKLNEI

SEQ ID NO: 14023 - protein, 268 aa, Arabidopsis thaliana
MSSSGSDKERETFVYMAKLSEQAERYDEMVETMKKVARVNSELTVEERNLLSVGYKNVIGARRASWRIMSSIEQKEESKGNESNVKQIKGYRQKVEDELANICQDILTIIDQHLIPHATSGEATVFYYKMKGDYYRYLAEFKTEQERKEAAEQSLKGYEAATQAASTELPSTHPIRLGLALNFSVFYYEIMNSPERACHLAKQAFDEAIAELDTLSEESYKDSTLIMQLLRDNLTLWTSDLPEDGGEDNIKTEESKQEQAKPADATEN

SEQ ID NO: 14024 - protein, 253 aa, Arabidopsis thaliana
MAKLSEQAERYDEMVETMKKVARVNSELTVEERNLLSVGYKNVIGARRASWRIMSSIEQKEESKGNESNVKQIKGYRQKVEDELANICQDILTIIDQHLIPHATSGEATVFYYKMKGDYYRYLAEFKTEQERKEAAEQSLKGYEAATQAASTELPSTHPIRLGLALNFSVFYYEIMNSPERACHLAKQAFDEAIAELDTLSEESYKDSTLIMQLLRDNLTLWTSDLPEDGGEDNIKTEESKQEQAKPADATEN

SEQ ID NO: 14025 - protein, 260 aa, Brassica napus
MAVSAREEFVYMAKLAEQAERYEEMVEFMEKVSAAVDGDELTVEERNLLSVAYKNVIGARRASWRIISSIEQKEESRGNDDHVTAIRDYRSKIETELSGICDGILKLLDSRLVPAAASGDSKVFYLKMKGDYHRYLAEFKTGQERKDAAENTLSAYKAAQDIANAELAPTHPIRLGLALNFSVFYYEILNSPDRACSLAKQAFDDAIAELDTLGEGSYKDSTLIMQLLRDNLTLWTSDMQDDAADEIKEASAPKPTEEQQ

SEQ ID NO: 14026 - protein, 261 aa, Maackia amurensis
MASSKERETFVYVAKLAEQAERYEEMVDSMKNVATLDVELTVEERNLLSVGYKNVIGARRASWRILSSIEQKEEAKGNEVNAKRIKEYRQKVESELTNICNDVMRVIDEHLIPSASAGESTVFYYKMKGDYYRYLAEFKTGNEKKEAGDQSMKAYESATAAAEAELPPTHPIRLGLALNFSVFYYEILNSPERACHLAKQAFDEAISELDTLNEESYKDSTLIMQLLRDNLTLWTSDIPEDGEDAQKANGTAKLGGGEDAE

SEQ ID NO: 14027 - protein, 260 aa, Pisum sativum
MAAAHTPREENVYMAKLAEQAERYEEMVEFMEKVSANADSEELTVEERNLLSVAYKNVIGARRASWRIISSIEQKEESRGNEDHVAVIRDYRSKIESELSNICDGILKLLDTRLIPSASSGDSKVFYLKMKGDYHRYLAEFKTGAERKEAAESTLTGYKSAQDIANAELPPTHPIRLGLALNFSVFYYEILNSPDRACNLAKQAFDEAIAELDTLGEESYKDSTLIMQLLRDNLTLWTSDMQDDGADEIKEAAPKADEQQ

SEQ ID NO: 14028 - protein, 260 aa, Pisum sativum
MAAAHTPREENVYMAKLAEQAERYEEMVEFMEKVSANADSEELTVEERNLLSVAYKNVIGARRASWRIISSIEQKEESRGNEDHVDVIRDYRSKIESELSNICDGILKLLDTRLIPSASSGDSKVFYLKMKGDYHRYLAEFKTGAERKEAAESTLAAYKSAQDIANAELPPTHPIRLGLALNFSVFYYEILNSPDRACNLAKQAFDEAIAELDTLGEESYKDSTLIMQLLRDNLTLWTSDMQDDGADEIKEAAPKADEQQ

SEQ ID NO: 14029 - protein, 261 aa, Vicia faba
MASTKDRENFVYIAKLAEQAERYEEMVDSMKNVANLDVELTIEERNLLSVGYKNVIGARRASWRILSSIEQKEESKGNDVNAKRIKEYRHKVETELSNICIDVMRVIDEHLIPSAAAGESTVFYYKMKGDYYRYLAEFKTGNEKKEAGDQSMKAYESATTAAEAELPPTHPIRLGLALNFSVFYYEILNSPERACHLAKQAFDEAISELDTLNEESYKDSTLIMQLLRDNLTLWTSDIPEDGEDSQKANGTAKFGGGDDAE

SEQ ID NO: 14030 - protein, 257 aa, Vicia faba
MASSKETFVYTAKLAEQAERYEEMVEAMKNVAKLDVELTVEERNLLSVAYKNVVGGRRASWRILSSIEQREETKGNEVNVNRIKEYRKKVESELSDICTDIMAVIDEHLIPNSSGESNVFYYKMKGDYYRYLAEFKSGDDRKEAADQSLKAYQEASTAAETELPPTHPVRLGLALNFSVFYYEILNSPERACHLAKQAFDVAIAELDSLNEESYKDSTLIMQLLRDNLTLWTSDIPEEGVEEQKAESARAPVGDNAE

SEQ ID NO: 14031 - protein, 259 aa, Vigna angularis
MAAAPTPREENVYMAKLAEQAERYEEMVEFMEKVSAAADNEELNVEERNLLSVAYKNVIGARRASWRIISSIEQKEESRGNEDHVTVIRDYRSKIESELSNICDGILKLLDSRLIPSASSGDSKVFYLKMKGDYHRYLAEFKTGAERKEAAESTLAAYKSAQDIANAELPPTHPIRLGLALNFSVFYYEILNSPDRACNLAKQAFDEAIAELDTLGEESYKDSTLIMQLLRDNLTLWTSDMQDDGADEIKEAAPKQDDQ

SEQ ID NO: 14032 - protein, 165 aa, Capsicum annuum
MASQREENVYMAKLAEQAERYEEMVEFMEKVVAALDGGDELTVEERNLLSVAYKNVIGARRASWRIISSIEQKEESRGNEDHVTSIKNYRSKIEIELTSICNGILKLLDSKLIGSAATGDSKVFYLKMKGDYYRYLAEFKTGAERKEAAENTLSLISLLRILLMP

SEQ ID NO: 14033 - protein, 252 aa, Lycopersicon esculentum
MEKEREKQVYLARLAEQAERYDEMVEAMKAIAKMDVELTVEERNLVSVGYKNVIGARRASWRILSSIEQKEESKGHEQNVKRIKTYRQRVEDELTKICSDILSVIDEHLVPSSTTGESTVFYYKMKGDYYRYLAEFKAGDDRKEASEQSLKAYEAATATASSDLAPTHPIRLGLALNFSVFYYEILNSPERACHLAKQAFDEAIAELDSLSEESYKDSTLIMQLLRDNLTLWTSDLEEGGEHSKGDERQGEN

SEQ ID NO: 14034 - protein, 252 aa, Lycopersicon esculentum
  unsure (1)..(252): unsure at all Xaa locations
MEKEREKQVYLARLAEQAERYDEMVEAMKAIAKMDVELTVEERNLVSVGYKXVIGARRASWRILSSIEQKEESKGHEQNVKRIKTYRQRVEDELTKICSDILSVIDEHLVPSSTTGESTVFYYKMKGDYYRYLAEFKAGDDRKEASEQSLKLYEAATATASSDLAPTHPIRLGLALNFSVFYYEILNSPERACHLAKQAFDEAIAELDSLSEESYKDSTLIMQLLRDNLTLWTSDLEEGGEHSKGDERQGEN

SEQ ID NO: 14035 - protein, 251 aa, Nicotiana tabacum
MDKEREKQVYLARLAEQAERYDEMVEAMKTVAKMDVELTVEERNLVSVGYKNVIGARRASWRILSSIEQKEESKGHDQNVKRIKTYQQRVEDELTKYALTLSVIDEHVVPSSTSGESTVFYYKMKGDYYRYLAEFKSGDDRKEAADQSLKAYEAATATASADLAPTHPIRLGLALNFSVFYYEILNSPERACHLAKQAFDEAIAELDSLSEESYKDSTLIMQLLRDNFTLWTSDLEEGGEHSKGDERQGEN

SEQ ID NO: 14036 - protein, 261 aa, Nicotiana tabacum
MASSKERENFVYVAKLAEQAERYDEMVDAMKSVANMDVELSVEERNLLSVGYKNVVGSRRASWRILSSIEQKEESRGNEQNVKRIKEYRQKVETELTSICNDIMVVIDQHLIPSCTAGESTVFYHKMKGDYYRYLAEFKSGNDKKEVAELSLKAYQSATTAAEAELPPTHPIRLGLALNFSVFYYEIMNSPERACHLAKQAFDEAISELDSLNEDSYKDSTLIMQLLRDNLTLWTSDLPEDAEDAQKGDATNKAGGGEDAE

SEQ ID NO: 14037 - protein, 254 aa, Solanum tuberosum
MAREENVYMAKLAEQAERYEEMVQFMEKVSTSLGSEELTVEERNLLSVAYKNVIGARRASWRIISSIEQKEESRGNEEHVKCIKEYRSKIESELSNICDGILKLLDSNLIPSASNGDSKVFYLKMKGDYHRYLAEFKTGAERKEAAESTLSAYKAAQDIANTELAPTHPIRLGLALNFSVFYYEILNSPDRACNLAKQAFDEAIAELDTLGEESYKDSTLIMQLLRDNLTLWTSDMQDDGADEIKETKPDNEQQ

SEQ ID NO: 14038 - protein, 259 aa, Solanum tuberosum
MAVAPTAREENVYMAKLAEQAERYEEMVEFMEKVSNSLGSEELTVEERNLLSVAYKNVIGARRASWRIISSIEQKEESRGNEEHVNSIREYRSKIENELSKICDGILKLLDSKLIPSATSGDSKVFYLKMKGDYHRYLAEFKTGAERKEAAESTLTAYKAAQDIASAELAPTHPIRLGLALNFSVFYYEILNSPDRACNLAKQAFDEAIAELDTLGEESYKDSTLIMQLLRDNLTLWTSDMQDDGADEIKEDPKPEEKN

SEQ ID NO: 14039 - protein, 259 aa, Helianthus annuus
MAAASSPREENVYLAKLAEQAERYEEMVEFMEKVVAAADGGEELTIEERNLLSVAYKNVIGARRASWRIISSIEQKEESRGNEGHVSTIRDYRSKIESELSSICDGILKVLDSKLIGSASGGDSKVFYLKMKGDYYRYLAEFKTGDERKLAAENTLSAYKAAQDIANAELAPTHPIRLGLALNFSVFYYEILNSPDRACNLAKQAFDEAIAELDTLGEDSYKDSTLIMQLLRDNLTLWTSDMQDDTAEEVKEAPKPDDQ

SEQ ID NO: 14040 - protein, 130 aa, Pimpinella brachycarpa
GTRESKVFYLKMKGDYHRYMAEFKVGDERKNAAEDTMNSYKAAQDIALADLAPTHPIRLGLALNFSVFYYEILNSSDKACSMAKQAFEEAIAELDTLGEESYKDSTLIMQLLRDNLTLWTSDSQDQLDEP

SEQ ID NO: 14041 - protein, 259 aa, Lilium longiflorum
MSPAEPSREENVYMAKLAEQAERYEEMVEFMEKVARTVDTEELTVEERNLLSVAYKNVIGARRASWRIISSIEQKEESRGNEDHVALIKDYRGKIEAELSKICDGILKLLDSHLVPSSTAPESKVFYLKMKGDYHRYLAEFKSGAERKEAAESTLLAYKSAQDIALAELAPTHPIRLGLALNFSVFYYEILNSPDRACNLAKQAFDEAISELDTLGEESYKDSTLIMQLLRDNLTLWTSDINEEAGDEIKEASKAVEGQ

SEQ ID NO: 14042 - protein, 268 aa, Pneumocystis carinii
MTSRENLVYLAKLAEQAERYEEMVESMKKVASSDQELTVEERNLLSVAYKNVIGARRASWRIVSSIEQKEENKGNLSQAGLIKEYRSKIESELTSICNDILAVLDAHLIASASTGESKVFYYKMKGDYYRYLAEFAVGDKRKAPSDASLAAYKEASDIAGTDLPPTHPIRLGLALNFSVFYYEILNSPDCACHLAKQAFDDAIAELDTLSEESYKDSTLIMQLLRDNLTLWTSDMQDSNEKNDSKEAVSEVPDPGKPSETEASKTDDI

SEQ ID NO: 14043 - protein, 249 aa, Phytophthora infestans
MDRDSLVFLAKLAEQAERYDEMVDHMKAVANNHNVELTVEERNLLSVAYKNVIGSRRASWRVISSIENKGDSERSEHIKAYRQKIEGELVDICNDILTIIENNLIPNSSSEEGKVFYYKMKGDYHRYLAEFQVDDERKESSDKALESYKQASTIAMAELPPTHPIRLGLALNFSVFYYEILNSPDRACNLAKQAFDDAIAELDTLSEESYKDSTLIMQLLRDNLTLWTSDQEPDNADANQGDMNVQDVE

SEQ ID NO: 14044 - protein, 233 aa, Entodinium caudatum
YLAMLAEQCSRYKEMVQFLEDMVKQRDKDLNSDERNLLSIAYKNSISGGRSAVRTIMAYEAKEKKKENSTFLPYITEYKKQVEDELTKLCQGVLKTTDEQLLKKAEDDEAKVFYIKMKGDYNRYIAEYAEGDLKKQVSDDALKAYDEATEIAKTLPVLNPIALGLALNFSVFYYEVINDHKKAIEIAKAAVEKADKELPNIDEDADENRDTVSIYNLLKENLDMWVSEEEGDQ

SEQ ID NO: 14045 - protein, 234 aa, Entodinium caudatum
DKYEKQVYLAMLAEQCSRYEDMMTFLEDMVKAKAEDLSSDERNLLSIAYKNTISLDRQAIRTLLAYESKEAKKAESPYLDYIKEYKAKVQKELEDLCNKINRTIDDNLLPKATTDEAKVFYHKMKGDYCRYIAENVDGDTKKKYSDEGLAAYNAALEAAKNIDYKNPVKLGLALNLSVFYYEVVGNKDEACKLAEDTLSKSKEALNGADEEEDEVKDAMSIVNLLEENLGMGER

SEQ ID NO: 14046 - protein, 199 aa, Entodinium caudatum
YEKNVYLAMLAEQCSRYKEMVQFLEDMVKQRDKDLNSDERNLLSIAYKNSISGGRSAVRTIMAYEAKEKKKENSTFLPYITEYKKQVEDELTKLCQGVLKTTDEQLLKKAEDDEAKVFYIKMKGDYNRYIAEYAEGDLKKQVSDDALKAYDEATEIAKTLPVLNPIALGLALNFSVFYYEVINDHKKAIEIAKARCRKS

SEQ ID NO: 14047 - protein, 277 aa, Entodinium caudatum
DKEELLNRCKLNDLIENYGEMFEYLKELSHIKIDLQPDELDLITRCTKCYIGHKRGQYRKILTLIDKDKIVDNQKNSALLEILRKKLSEEILLLCNSTIELSQNFLNNNVFPKKTQLFFTKIIADHYRYIYEINGKEDIKLKAKEYYEKGLQTIKTCKYNSTETAYLTFYLNYSVFLHDTMRNTEESIKVSKACLYEALKDTEDIVDNSQKDIVLLCQMLKDNISLWKTETNEDNDNDNNNSTNNGKNNIENNSLNNINIKESTENNINEIKTNSDK

SEQ ID NO: 14048 - protein, 270 aa, Schizosaccharomyces pombe
MSTTSREDAVYLAKLAEQAERYEGMVENMKSVASTDQELTVEERNLLSVAYKNVIGARRASWRIVSSIEQKEESKGNTAQVELIKEYRQKIEQELDTICQDILTVLEKHLIPNAASAESKVFYYKMKGDYYRYLAEFAVGEKRQHSADQSLEGYKAASEIATAELAPTHPIRLGLALNFSVFYYEILNSPDRACYLAKQAFDEAISELDSLSEESYKDSTLIMQLLRDNLTLWTSDAEYSAAAAGGNTEGAQENAPSNAPEGEAEPKADA

SEQ ID NO: 14049 - protein, 271 aa, Schizosaccharomyces pombe
MSTTSREDAVYLAKLAEQAERYEGMVENMKSVASTDQELTVEERNLLSVAYKNVIGARRASWRIVSSIEQKEESKGNTAQVELIKEYRQKIEQELDTICQDILTVLEKHLIPNAASAESKVFYYKMKGDYYRYLAEFAVGEKRQHSADQSLEGYKAASEIATAELAPTHPIRLGLALNFSVFYYEILNSPDRACYLAKQAFDEAISELDSLSEESYKDSTLIMQLLRDNLTLWTSDAEYSAAAAGGNTEGAQENAPSNAPEGEREPKATHR

SEQ ID NO: 14050 - protein, 270 aa, Schizosaccharomyces pombe
MSTTSREDAVYLAKLAEQAERYEGMVENMKSVASTDQELTVEERNLLSVAYKNVIGARRASWRIVSSIEQKEESKGNTAQVELIKEYRQKIEQELDTICQDILTVLEKHLIPNAASAESKVFYYKMKGDYYRYLAEFAVGEKRQHSADQSLEGYKAASEIATAELAPTHPIRLGLALNFSVFYYEILNSPDRACYLAKQAFDEAISELDSLSEESYKDFTLIMQLLRDNLTLWTSDAEYSAAAAGGNTEGAQENAPSNAPEGEAEPKADA

SEQ ID NO: 14051 - protein, 270 aa, Schizosaccharomyces pombe
MSNSRENSVYLAKLAEQAERYEEMVENMKKVACSNDKLSVEERNLLSVAYKNIIGARRASWRIISSIEQKEESRGNTRQAALIKEYRKKIEDELSDICHDVLSVLEKHLIPAATTGESKVFYYKMKGDYYRYLAEFTVGEVCKEAADSSLEAYKAASDIAVAELPPTDPMRLGLALNFSVFYYEILDSPESACHLAKQVFDEAISELDSLSEESYKDSTLIMQLLRDNLTLWTSDAEYNQSAKEEAPAAAAASENEHPEPKESTTDTVKA

SEQ ID NO: 14052 - protein, 251 aa, Fucus vesiculosus
MASRDDLVYMAKLAEQAERFDEMVDHMKAVAQQPKELSVEERNLLSVAYKNVIGSRRASWRVISSIEGKDTVSDQLPLIRDYKSKIETELTDICADILKIIEAELIPNSTSEEGKVFYYKMKGDYHRYLAEFQSADERKTSASDALDAYQLASDHANQDLPPTHPIRLGLALNFSVFYYEILNSPDRACGLAKAAFDDAIAELDTLSEESYKDSTLIIMQLLRDNLTLWTSDQGEAEEAPGNADGTVVEDL

SEQ ID NO: 14053 - protein, 273 aa, Saccharomyces cerevisiae
MSQTREDSVYLAKLAEQAERYEEMVENMKAVASSGQELSVEERNLLSVAYKNVIGARRASWRIVSSIEQKEESKEKSEHQVELIRSYRSKIETELTKISDDILSVLDSHLIPSATTGESKVFYYKMKGDYHRYLAEFSSGDAREKATNSSLEAYKTASEIATTELPPTHPIRLGLALNFSVFYYEIQNSPDKACHLAKQAFDDAIAELDTLSEESYKDSTLIMQLLRDNLTLWTSDISESGQEDQQQQQQQQQQQQQQQQQAPAEQTQGEPTK

SEQ ID NO: 14054 - protein, 273 aa, Saccharomyces cerevisiae
MSQTREDSVYLAKLAEQAERYEEMVENMKAVASSGQELSVEERNLLSVAYKNVIGARRASWRIVSSIEQKEESKEKSEHQVELIRSYRSKIETELTKISDDILSVLDSHLIPSATTGECKVFYYKMKGDYHRYLAEFSSGDAREKATNSSLEAYKTASEIATTELPPTHPIRLFLALNFSVFYYEIQNSPDKACHLAKQAFDDAIAELDTLSEESYKDSTLIMQLLRDNLTLWTSDISESGQEDQQQQQQQQQQQQQQQQQAPAEQTQGEPTK

SEQ ID NO: 14055 - protein, 267 aa, Saccharomyces cerevisiae
MSTSREDSVYLAKLAEQAERYEEMVENMKTVASSGQELSVEERNLLSVAYKNVIGARRASWRIVSSIEQKEESKEKSEHQVELICSYRSKIETELTKISDDILSVLDSHLIPSATTGESKVFYYKMKGDYHRYLAEFSSGDAREKATNASLEAYKTASEIATTELPPTHPIRLGLALNFSVFYYEIQNSPDKACHLAKQAFDDAIAELDTLSEESYKDSTLIMQLLRDNLTLWTSDMSESGQAEDQQQQQQHQQQQPPAAAEGEAPK

SEQ ID NO: 14056 - protein, 267 aa, Saccharomyces cerevisiae; identical to SEQ ID NO: 459

SEQ ID NO: 14057 - protein, 194 aa, Saccharomyces cerevisiae
ISDDILSVLDSHLIPSATTGESKVFYYKMKGDYHRYLAEFSSGDAREKATNASLEAYKTASEIATTELPPTHPIRLGLALNFSVFYYEIQNSPDKACHLRKQAFDDAIAELDTLSEESYKDSTLIMQLLRDNLTLWTSDMSESGQAEDQQQQQQHQQQQPPAAAEVKHQSKYSDKSKEKLLKKRKKKERGCNNL

SEQ ID NO: 14058 - protein, 276 aa, Yarrowia lipolytica
MSSERETKTFLARLCEQADRYDEMVNYMKDVAKSGEELTVDERNLLSVAYKNVIGARRASWRVIFPIEQKEEAKGATHHLELLKTYRAKIEAELEDICSDVLDILTNHLLPKAENAESKVFYYKMKGDYHRYLAEFTSGEKRKEAATAAHESYKSATDVAQTELSSTHPIRLGLALNFSVFYYEILNSPDRACHLAKQAFDDAIAELDTLSEESFRDSTVIMQLLRDNLTLWKNDLEESLQAQQSEETPATDAAAASTEAAAPKEEAKPAAEEPKE

SEQ ID NO: 14059 - protein, 256 aa, Yarrowia lipolytica
MTREDNIYLARLSEQAGRYEDMVEYMKEIATGDQELSVEERNLLSVAYKNVIGAHRAWWRVVSSCEQKEEQKGKETKIIDDFRQKIEAGLQDICHDILNVLEKHLIPKLEKPSAEATEAAAKDGADPSELSESIVFYYKMKGDYYRYLAEFTTDDKRKEAAEKSLQAYQFASDEATSKLPPTHHIRLGLALNFSVFYYEILNSPERACQLAKQAFDDAIADIDSITEERSKDYALIMQLLRDNLTLWTNNDEPEQA

SEQ ID NO: 14060 - protein, 67 aa, Heterodera glycines
NSPDKACQLAKQAFDDAIAELDTLNEDSYKDSTLIMQLLRDNLTLWTSDTAGDEQEAGGEAGEAGGN

SEQ ID NO: 14061 - protein, 90 aa, Brassica rapa subsp. pekinensis
  unsure (1)..(90): unsure at all Xaa locations
MKGDYHRYLAEFKAGDERKETAESTLVAYKSAQDIATAELAPTHPIRLGLALNFSVFYYXILNSPDRACTLAXQAFDEAIAELDTLGEES

SEQ ID NO: 14062 - protein, 262 aa, Neurospora crassa
MGHEDAVYLAKLAEQAERYEEMVENMKIVASEDRDLTVEERNLLSVAYKNVIGARRASWRIVTSIEQKEESKGNSTQVSLIKEYRQKIESELAKICEDILSVLDQHLIPSATTGESKVFYHKMKGDYHRYLAEFAVGDKRKDSADKSLDAYKNATDVAQTELPPTHPIRLGLALNFSVFYYEILNAPDQACHLAKQAFDDAIAELDTLSEESYKDSTLIMQLLRDNLTLWTSSEAEAPAAQGEAAPEEPKADAPAAEEPKAE

SEQ ID NO: 14063 - protein, 270 aa, Neurospora crassa
MANERERCVKTFLARLCEQAERYDEMVTFMKEVAKLGGELTVDERNLLSVAYKNVVGTRRASWRIISSIEQKEESKGSDKHVAIIKEYRQKIETELETVCKDVLEVLDEALIPHAATGESKVFYHKMKGDYHRYLAEFASGEKRKNAATAAHEAYKNATDVAQTELTPTHPIRLGLALNFSVFYYEILNSPDRACHLAKQAFDDAIAELDSLSEESYRDSTLIMQLLRDNLTLWTSSDNGEPEAAAEAPKAEEKAEEKAEAAEEKAPEEQ

SEQ ID NO: 14064 - protein, 264 aa, Candida albicans
MPASREDSVYLAKLAEQAERYEEMVENMKAVASSGQELSVEERNLLSVAYKNVIGARRASWRIVSSIEQKEEAKGNESQVALIRDYRAKIEAELSKICEDILSVLSDHLITSAQTGESKVFYYKMKGDYHRYLAEFAIAEKRKEAADLSLEAYKAASDVAVTELPPTHPIRLGLALNFSVFYYEILNSPDRACHLAKQAFDDAVADLETLSEDSYKDSTLIMQLLRDNLTLWTDLSEAPAATEEQQQSSQAPAAQPTEGKADQE

SEQ ID NO: 14065 - protein, 262 aa, Trichoderma harzianum
MGHEDAVYLAKLAEQAERYEEMVENMKIVASEDRDLTVEERNLLSVAYKNVIGARRASWRIVTSIEQKEESKGNSSQVTLIKEYRQKIENELAKICDDILEVLDQHLIPSAKSGESKVFYHKIKGDYHRYLAEFAIGDRRKDSADKSLEAYKAATEVAQTELPPTHPIRLGLALNFSVFYYEILNAPDQACHLAKQAFDDAIAELDTLSEESYKDSTLIMQLLRDNLTLWTSSEAETPARLMPLLRRRPLLRLPSRRRRAQG

SEQ ID NO: 14066 - protein, 184 aa, Trypanosoma brucei brucei
EERNLLSVAYKNVIGARRACWRSISALEQKEDLKKEKNVTLIKAFKRQIEKELSDICIDILELIEKHLLPNAETDETKVYYLKMKGDYHRYYAEIETNTEEQKDKALEAYTQAMQYNASLKPTSPIRLGLALNFSVFYYEILKSPDRGCQLAREAFEEALSDPDVLDEEQHKEAALIMQLLRDN

SEQ ID NO: 14067 - protein, 239 aa, Entamoeba histolytica
MASREDCVYTAKLAEQSERYDEMVQCMKQVAEMEAELSIEERNLLSVAYKNVIGAKRASWRIISSLEQKEQAKGNDKHVEIIKGYRAKIEKELSTCCDDVLKVIQENLLPKASTSESKVFFKKMEGDYYRYFAEFTVDEKRKEVADKSLAAYTEATEISNAELAPTHPIRLGLALNFSVFYFEIMNDADKACQLAKQAFDDAIAKLDEVPENMYKDSTLIMQLLRDNLTLWTSDACDEE

SEQ ID NO: 14068 - protein, 236 aa, Entamoeba histolytica
SEDCVFLSKLAEQSERYDEMVQYMKQVAALNTELSVEERNLLSVAYKNVIGSRRASWRIITSLEQKEQAKGNDKHVEIIKGYRAKIEDELAKYCDDVLKVIKENLLPNASTSESKVFYKKMEGDYYRYYAEFTVDEKRQEVADKSLAAYTEATEISNADLAPTHPIRLGLALNFSVFYYEIMNDADKACQLAKQAFDDSIAKLDEVPESSYKDSTLIMQLLRDNLTLWTSDTADEE

SEQ ID NO: 14069 - protein, 238 aa, Entamoeba histolytica
MTSREDLVYLSKLAEQSERYEEMVQYMKQVAEMGTELSVEERNLISVAYKNVVGSRRASWRIISSLEQKEQAKGNTQRVELIKTYRAKIEQELSQKCDDVLKIITEFLLKNSTSIESKVFFKKMEGDYYRYYAEFTVDEKRKEVADKSLAAYQEATDTAASLVPTHPIRLGLALNFSVFYYQIMNDADKACQLAKEAFDEAIQKLDEVPEESYKESTLIMQLLRDNLTLWTSDMGDDE

SEQ ID NO: 14070 - protein, 277 aa, Eimeria tenella
MIEDIKTLREEHVYRAKLAEQAERYDEMAEAMKNLVENCLDQNNSPPGAKGDELTVEERNLLSVAYKNAVGARRASWRIISSVEQKEANRNHMANKALAASYRQKVENELNKICQEILTLLTDKLLPRTTDSESRVFYFKMKGDYYRYISEFSNEEGKKASAEQAEESYKRATDTAEAELPSTHPIRLGLALNYSVFYYEILNQPQKACEMAKLAFDDAITEFDSVSEDSYKDSTLIMQLLRDNLTLWTSDLQTQEQQQQPVGEGAEAPKVEATEQQ

SEQ ID NO: 14071 - protein, 266 aa, Toxoplasma gondii
MAEEIKNLRDEYVYKAKLAEQAERYDEMAEAMKNLVENCLDEQQPKDELSVEERNLLSVAYKNAVGARRASWRIISSVEQKELSKQHMQNKALAAEYRQKVEEELNKICHDILQLLTDKLIPKTSDSESKVFYYKMKGDYYRYISEFSGEEGKKQAADQAQESYQKATETAEAELPSTHPIRLGLALNYSVFFYEILNLPQQACEMAKRAFDDAITEFDNVSEDSYKDSTLIMQLLRDNLTLWTSDLQADQQQQEGGEKPAEQADQ

SEQ ID NO: 14072 - protein, 256 aa, Plasmodium falciparum
MATSEELKQLRCDCTYRSKLAEQAERYDEMADAMRTLVEQCVNNDKDELTVEERNLLSVAYKNAVGARRASWRIISSVEQKEMSKANVHNKNVAATYRKKVEEELNNICQDILNLLTKKLIPNTSESESKVFYYKMKGDYYRYISEFSCDEGKKEASNCAQEAYQKATDIAENELPSTHPIRLGLALNYSVFFYEILNQPHQACEMAKRAFDDAITEFDNVSEDSYKDSTLIMQLLRDNLTLWTSDLQGDQTEGNK

SEQ ID NO: 14073 - protein, 234 aa, Plasmodium falciparum
LAEQAERYDEMADAMRTLVEQCVNNDKDELTVEERNLLSVAYKNAVGARRASWRIISSVEQKEMSKANVHNKNVAATYRKKVEEELNNICQDILNLLTKKLIPNTSESESKVFYYKMKGDYYRYISEFSCDEGKKEASNFAQEAYQKDTDIAENELPSTHPIRLGLALNYSVFFYEILNQLHQACEMAKRAFDDAITEFDNVSEDSYKDSTLIMQLLRDNLTLWTSDLQGDQTE

SEQ ID NO: 14074 - protein, 262 aa, Plasmodium knowlesi
MATSEDLKQLRSDCTYRSKLAEQAERYDEMADAMRTLVEQCVNNDKDELTVEERNLLSVAYKNAVGARRASWRIISSVEQKEMSKANVHNKNIAATYRKKVEEELNNICQDILNLLTKKLIPNTSESESKVFYYKMKGDYYRYISEFSCDEGKKEASNFAQEAYQKATDIAENELPSTHPIRLGLALNYSVFFYEILNQPHQACEMAKRAFDDAITEFDNVSEDSYKDSTLIMQLLRDNLTLWTSDLQGDQTEEKSKDEGLE

SEQ ID NO: 14075 - protein, 244 aa, Tetrahymena pyriformis
MSLSREELIYMAKIAEQTERFEDMLEYMKKVVQTGQELSVEERNLLSVAYKNTVGSRRSAWRSISAIQQKEESKGSKHLDLLTNQKKKIETELNLYCDDILKLLNDFLIKNATNAEAQVFFLKMKGDYYRYIAEYAQGDEHKKAADGALDSYNKACEIANSELRPTHPIRLGLALNFSVFHYEVLNDPSKACTLAKTAFDEAIGDIERIQEDQYKDATTIMQLIRDNLTLWTSEFQDDAEEQQE

SEQ ID NO: 14076 - protein, 258 aa, Encephalitozoon cuniculi
MASKQYEEALQKANLSDMAERYDDMAKEMRLAVTLAHEDKHILNVMARNLFSVAYKNLVSSRRSSWRMLCSERQKLEGKDPSVVHVINEKIKVVEEELLRFCDEVLDIITTYILSLEEAQKNIEYNIFFLKMKGDYYRYKAEVVTGPEHSEVSKHAAESYKEATEKAKTLPPTNPIKLGLALNYSVFHYEILNDSEKACSIAKGAFDEAIKELDTLSEEHYRDSTLIMQLLRDNLTLWTSREEGNVMGDEGKGDPDEN

SEQ ID NO: 14077 - protein, 249 aa, Hydra vulgaris
MSHLSEQELVDMAKLAEQAERYDDMVKFMKELTVKSKKLSDEHRNLLSVAFKNVVGARRSAWRIISSIESKQEEKGDSTELTTKYKKEIEHELQERCREVLDLLDNHLLVEVDSGCNGENGNYEGKVFYQKMKGDYYRYLVEVSSSEKRNELAAKSQQAYDEATKTAEKLPNTHPISLGLALNFSVFHYEIMNDSPKACALAKKAFDGAIAELDSLKEESYKDSTLIMQLLRDNLTLWTSETEQDEQNE

SEQ ID NO: 14078 - protein, 254 aa, Schistosoma japonicum
MRDSFVLQQKDLSPSDLVQIAKLAEQAERYDDMAAAMKAYAELPAELGSEERNLFSVAYKNVVGARRSAWRVISAVEHKHDENSKKRQLTKEYRVKMEEELNEICREVLTLLSKYLTPKSNGFESQVFYRKMEGDYYRFLAEVATGDARKEVVEKSQAAYEKATEIAEEMLPSTHPIRLGLALNFSMFYYEIKCDPTQACNLAKRAFDTSIGELDSLQDDSYKDSTLIMQLLRDNLTLWASDQPEAEDVDGNDG

SEQ ID NO: 14079 - protein, 246 aa, Schistosoma japonicum
MCDESWINKSKIQDRESLVALAKISDQSERYNDMACAMKKVVEMPSKLNNEERNLFSAAYKNVVGCRRSAWRIVSSIEQKLEEEKKKRATEYRTFIENELQSVCQEVLDILDKFLIKSDDAPEDIVFYRKMKGDYYRYLAEFQTGDKRAEAIKHSKEAYEAATAKATSDLPPTHPIRLGLALNFSVFYYEIENNPEKACTIAQNAFNESIELLDQPDSGSLKDSTLVMQLLRDNLTLWTSEREAAQ

SEQ ID NO: 14080 - protein, 250 aa, Schistosoma japonicum
MVSDRECSVECAKLCEQAERYDDMVKAVIEIVKISEGELTIEERNLLSVAYKNAVGARRSSWRILNSLETKRDRYRTLQCTNIHAVSKQCEKKLDEICTNILDLLHDYLVPKAASDESKVFLHKMRGDYHRYRAEFAVHDKRKEAAESSLLAYKEAMKYAENLTVTHPIRLGLGLNFSVLYYEILNNPAKACDVAKTAFDLAIAELDTLSEESYKDSTLIMQLLRDNLNLWNPFNDGEKDTAASPKGEEK

SEQ ID NO: 14081 - protein, 249 aa, Schistosoma mansoni
MTEREALVYRAKLAEQLERYDEMVDAMKEVVEMAEELTVEERNLLSVAYKNVIGSRRSSWRVFSAVEQTEGNRGNAEKQACAKKFREVLESELDRVSKDILELIDKYLIKSATKSDSKVFYLKMKGDYFRYMAEFSVDPQRKKAAEESNKAYQEASEIAATQLFPTHPIRLGLALNYSVYFYEIMNDPDEACRLAQAAFDDAIAKLDQLSEESYKDSTLIMQLLRDNLTLWTSDPERDDNVKKDTDEKA

SEQ ID NO: 14082 - protein, 248 aa, Echinococcus granulosus
MAAITSWITDSGCKDHASLVSIAKLAEQAERYEDMAVAMKTIAEMGNELNNEERNLLSVAYKNVVGARRSSWRIMSSIAKKQAGTPLADQTDIYLKKVEEELTKICNDVLALLSKNLITEKIGAEAKIFYYKMMGDYYRYLAEVQEGEQNDKSTEAAEEAYQKATSLAEAELSVTHPIRLGLALNFSVFYYEIKNMPEKACSLAKAAFDAAITEVDSIKDETYKDSTLIMQLLRDNLTLWSSECETDS

SEQ ID NO: 14083 - protein, 244 aa, Echinococcus granulosus
MSRLAECTISDTVDELVQRAKLAEQAERYDDMAGACKTMAKMRNELNNEEANLLSVAYKNVVGARRSSWRIMSSIAKKQAGTPLAHQHDIYLKKVEEELIQICNDVLALPVLPITEKIGAEAKIFYYKMMGDYYRYSAEVQEGEQNDKSTEAAEEANQKATSLAEAELSVTHPIRLGLALNFSVFYYEIKNMPEKACSLAKAAFDAAITEVDSIKDETYKDSTLIMQLLRDNLTLWNSECETDS

SEQ ID NO: 14084 - protein, 248 aa, Echinococcus multilocularis
MAAITSWITDSGCKDHASLVSIAKLAEQAERYEDMAVAMKTIAEMGNELNNEERNLLSVAYKNVVGARRSSWRIMSSIAKKQAGTPLADQTDIYLKKVEEELTKICNDVLALLSKNLITEKIGAEAKIFYYKMMGDYYRYLAEVQEGEQNDKSTEAAEEAYQKATSLAEAELSVTHPIRLGLALNFSVFYYEIKNMPEKACSLAKAAFDAAITEVDSIKDETYKDSTLIMQLLRDNLTLWNSECETDS

SEQ ID NO: 14085 - protein, 244 aa, Echinococcus multilocularis
MSRLAECTISDTVDELVQRAKLAEQAERYDDMAGACKTMAEMGNELNNEERNLLSVAYKNVLGARRSSWRIMSSIAKKQAGTPLADQTDIYLKKVEEELIPICNDVLALPVLPITEKIGAEAKIFYYKMMGDYYRYLAEVQEGEQNDKSTEAAEEANQKATSLAEAELSVTHPIRLGLALNFSVFYYEIKNMPEKACSLAKAAFDAAITEVDSIKDETYKDSTLIMQLLRDNLTLWNSECETDS

SEQ ID NO: 14086 - protein, 81 aa, Boltenia villosa
  unsure (1)..(81): unsure at all Xaa locations
YEILNSPDLACRLAKAAFDDAIAELDTLSEDSYKDSTLIMQLLXFNLTLWTSDLNPPEGEGEDVKGEQEILQDVEATDEAS

SEQ ID NO: 14087 - protein, 111 aa, Penaeus monodon
GDARAGLVDDSQKSYQEAFDIAKAEMQPTHPIRLGLALNFSVFFYEILNSPDKACQLAKQAFDDAIAELDTLNEDSYKDSTLIMQLLRDNLTLWTSDTQGEGDEANEGDQN

SEQ ID NO: 14088 - protein, 111 aa, Penaeus monodon
GDARAGVVDDSQKSYQEAFDIAKAEMQPTHPIRLGLALNFSVFFYEILNSPDKACQLAKQAFDDAIAELDMLNEDSYKDSTLIMQLLRDNLTLWTSDTQGEGDEANEGDQN

SEQ ID NO: 14089 - protein, 262 aa, Plasmodium yoelii yoelii
MATPEELKQLRSDCTYRSKLAEQAERYDEMADAMRTLVEQCVNNDKDELTVEERNLLSVAYKNAVGARRASWRIISSVEQKEMSKANVHNKNVAATYRKKVEEELNSICQDILNLLTKKLIPNTSESESKVFYYKMKGDYYRYISEFSCDEGKKEASNFAQEAYQKATDIAENELPSTHPIRLGLALNYSVFFYEILNQPHQACEMAKRAFDDAITEFDNVSEDSYKDSTLIMQLLRDNLTLWTSDLQGDQTEEKSKDEGLE

SEQ ID NO: 14090 - protein, 117 aa, Plasmodium yoelii yoelii
EFSCDEGKKEASNFAQEAYQKATDIAENELPSTHPIRLGLALNYSVFFYEILNQPHQACEMAKRAFDDAITEFDNVSEDSYKDSTLIMQLLRDNLTLWTSDLQGDQTEEKSKDEGLE

SEQ ID NO: 14091 - protein, 183 aa, Paracentrotus lividus
VAYKNVVGSRRAALHTVSIIEQKDETKTKNEENKLQLLKNYRGLIEKELTELCRDGLDILENFVIPSAKDPETKVFYLKMMGDYYRYLAEIFVDSERKTASDNSLDAYKKAAELAEAELNPTDPIRLGLALNFSEFYHEILKMPNDACRLAKAAFDDAIAGLDNINLPEDSYKDSTLIMQLLR

SEQ ID NO: 14092 - protein, 256 aa, Ciona intestinalis
MSTEREDFVYQAKLAEQAERYDEMVEQMKKIAQLGISLTVEERNLLSVAYKNVIGARRASWRIISSIEMKEGSKAQMPSDYRQQVEEELKNICHDILSVIDEHLLPPSQTDQDIESQVFYHKMKGDYHRYLAEFETGDERKSAAEDSLTAYKAASDAAGKLPTTHPIRLGLALNFSVFYYEILNSPDRACRLAKEAFDQAIAELDTLSEESYKDSTLIMQLLRDNLTLWTSDMQGDADGHEGNTDEVQEMHATEAS

SEQ ID NO: 14093 - protein, 260 aa, Oenothera elata subsp. hookeri
MATAPSPREENVYLAKLAEQAERYEEMVEFMEKVCAAADSEELTVEERNLLSVAYKNVIGARRASWRIISSIEQKEESRGNDDHVSTIRDYRSKIETELSNICGGILKLLDSRLIPSAASGDSKVFYLKMKGDYHRYLAEFKTGAERKEAAESTLSAYKAAQDIANAELAPTHPIRLGLALNFSVFYYEILNSPDRACNLANEAFDEAIAELDTLEEESYKDSTLIMQLLRDNLTLWTSDMQDDGGDEIKEAAPKPDEQY

SEQ ID NO: 14094 - protein, 272 aa, Thellungiella halophila
MATQPPSSSSAREEFVYMAKLAEQAERYEEMVEFMEKVAKAVDKEELTVEERNLLSVAYKNVIGARRASWRIISSIEQKEESRGNNDHVSLIRDYRTKIETELSGICDGILKLLDTMLIPAAASGDSKVFYLKMKGDYHRYLAEFKTSQERKDAAEHTLNAYKAAQDIANAELAPTHPIRLGLALNFSVFYYEILNSPDRACNLAKQAFDDAIAELDTLGEESYKDSTLIMQLLRDNLTLWTSDMQDDDDVIKEAAAAAPAAPKPAEEQQQS

SEQ ID NO: 14095 - protein, 231 aa, Ovis aries
YDEMVESMKKVAGMDVELTVEERNLLSVAYKNVIGARRASWRIISSIEQKEENKGGEDKLKMIREYRQMVETELKLICCDILDVLDKHLIPAANTGESKVFYYKMKGDYHRYLAEFATGNDRKEAAENSLVAYKAASDIAMTELPPTHPIRLGLALNFSVFYYEILNSPDRACRLAKAAFDDAIAELDTLSEESYKDSTLIMQLLRDNLTLWTSDMQGDGEEQNKEALQDV

SEQ ID NO: 14096 - protein, 263 aa, Arabidopsis thaliana
MGSGKERDTFVYLAKLSEQAERYEEMVESMKSVAKLNVDLTVEERNLLSVGYKNVIGSRRASWRIFSSIEQKEAVKGNDVNVKRIKEYMEKVELELSNICIDIMSVLDEHLIPSASEGESTVFFNKMKGDYYRYLAEFKSGNERKEAADQSLKAYEIATTAAEAKLPPTHPIRLGLALNFSVFYYEIMNAPERACHLAKQAFDEAISELDTLNEESYKDSTLIMQLLRDNLTLWTSDISEEGGDDAHKTNGSAKPGAGGDDAE

SEQ ID NO: 14097 - protein, 263 aa, Arabidopsis thaliana
MGSGKERDTFVYLAKLSEQAERYEEMVESMKSVAKLNVDLTVEERNLLSVGYKNVIGSRRASWRIFSSIEQKEAVKGNDVNVKRIKEYMEKVELELSNICIDIMSVLDEHLIPSASEGESTVFFNKMKGDYYRYLAEFKSGNERKEAADQSLKAYEIATTAAEAKLPPTHPIRLGLALNFSVFYYEIMNAPERACHLAKQAFDEAISELDTLSEESYKDSTLIMQLLRDNLTLWTSDISEEGGDDAHKTNGSAKPGAGGDDAE

SEQ ID NO: 14098 - protein, 259 aa, Euphorbia esula
MDSSKDRETFVYLAKLAEQAERYDEMVESMKKVANLDVELTVEERNLLSVGYKNVVGSRRASWRILSSIEQKEESKGNEINAKRIKEYRNKVESELSTICSDIMTVIDEHLIPSCNAGESTVFYYKMKGDYYRYLAEFKAGNDKKEAADQSLKAYQTASTTAETDLPPTHPIRLGLALNFSVFYYEIMNSPERACHLAKQAFDEAISELDTLSEESYKDSTLIMQLLRDNLTLWTSDIPEDGDQKMETSGKASGGEDAE

SEQ ID NO: 14099 - protein, 261 aa, Lycopersicon esculentum
MASSKERENFVYVAKLAEQAERYDEMVEAMKNVANMDVELTVEERNLLSVGYKNVVGSRRASWRILSSIEQKEESRGNEQNVKRIKEYLQKVESELTNICNDIMVVIDQHLIPSCSAGESTVFYHKMKGDYYRYLAEFKAGNDKKEVAELSLKAYQAATTAAEAELAPTHPIRLGLALNFSVFYYEIMNSPERACHLAKQAFDEAISELDSLNEDSYKDSTLIMQLLRDNLTLWTSDLPEDAEDAQKGDATNKAGGGEDAE

SEQ ID NO: 14100 - protein, 261 aa, Lycopersicon esculentum
MASSKERESLVYIARLAEQAERYDEMVDAMKNVANLDVELTVEERNLLSVGYKNVVGSRRASWRILSSIEQKEDARGNEQNVKRIQGYRQKVESELTDICNNIMTVIDEHLIPSCTAGESTVFYYKMKGDYYRYLAEFKTGDDKKEVSDLSLKAYQTATTTAEAELPITHPIRLGLALNFSVFYYEIMNSPERACQLAKQVFDEAISELDSLNEDNYKDGTLILQLLRDNLTLWTSDIPEDGEEAPKGDAANKVGAGEDAE

SEQ ID NO: 14101 - protein, 262 aa, Zea mays; identical to SEQ ID NO: 456

SEQ ID NO: 14102 - protein, 248 aa, Hydra vulgaris
MASTDSKEILIQRAKLAEQAERYDDMAAAMKQVTKMTDEPLTGEERNLLSVAYKNIVGAKRSSWRVITSIEQKANDKQALAAQYRSNIEKELKGVCEEVLELLAKYLVNKSIERVDPANKKTLESAVFYLKMKGDYYRYLAEVAVDEERKRVIFEADAAYKQASEISENLISTDPIRLGLALNYSVFHYEIRNKPSEACTLAKKAFDDAIVELDSLAEDSYKDSTLIMQLLRDNLTLWTADADATTEE

SEQ ID NO: 14103 - protein, 36 aa, Spodoptera frugiperda
SKAKMQPTHPIRLGLALNFSVFYYEILNSPDKACQL

SEQ ID NO: 14104 - protein, 260 aa, Populus x canescens
MDSSKDRENFVYVAKLAEQAERYDEMVDAMKKVAKLDVELTVEERNLLSVGYKNVIGARRASWRILSSIEQKEESKGNETNVKRIKEYRQKVEAELTGICHDIMTVIDEHLIPSCTAGESTVFYYKMKGDYYRYLAEFKSGNERKEAADQSLKAYETATTTAASDLSPTHPIRLGLALNFSVFYYEIMNSPERACHLAKQAFDEAISELDTLSEESYKDSTLIMQLLRDNLTLWTSDIPEDGEDQKMETSARTGEGEDAE

SEQ ID NO: 14105 - protein, 260 aa, Populus x canescens
MDSSKDRENFVYVAKLAEQAERYDEMVDAMKKVAKLDVELTVEERNLLSVGYKNVIGARRASWRILSSIEQKEESKGNETNVKRIKEYRKKVEAELTGVCNDIMTVIDEHLIPSSIPGESAVFYYKMKGDYYRYLAEFKSGNERKEAADQSLKAYETATSTAARDLSPTHPIRLGLALNFSVFYYEIMNSPERACHLAKQSFDEAISELDTLSEESYKDSTLIMQLLRDNLTLWTSDIPEDGEDQKMETSAKAGGGEDAE

SEQ ID NO: 14106 - protein, 255 aa, Mus musculus
MDDREDLVYQAKLAEQAERYDEMVESMKKVAGMDVELTVEERNLLSVAYKNVIGARRASWRIISSIEQKEENKGGEDKLKMIREYRQMVETELKLICCDILDVQDKHLIPAANTGESKVFYYKMKGDYHRYLAEFATGNDRKEAAENSLVAYKAASDIAMTELPPTHPIRLGLALNFSVFYYEILNSPDRACRLAKAAFDDAIAELDTLSEESYKDSTLIMQLLRDNLTLWTSDMQGDGEEQNKEALQDVEDENQ

SEQ ID NO: 14107 - protein, 273 aa, Anopheles gambiae str. PEST
GRPTELQHRTSYSRTATMSERENNIYKAKLAEQAERYDEMVEAMKKVASMDVELTVEERNLLSVAYKNVIGARRASWRIISSIEQKEENKGVEEKLEMIKNYRSQVEKELRDICSDILEVLDKHLIPCATTGESKVFYYKMKGDYHRYLAEFATGGDRKDAAENSLVAYKAASDIAMTDLPPTHPIRLGLALNFSVFYYEILNSPDRACRLAKAAFDDAIAELDTLSEESYKDSTLIMQLLRDNLTLWTSDMQADGEGEQKEQIQDVEDQDVS

SEQ ID NO: 14108 - protein, 259 aa, Chlamydomonas reinhardtii
MAVDREECVYMAKLAEQAERYDEMVEEMKKVAKLVHDQELSVEERNLLSVAYKNVIGARRASWRIISSIEQKEEAKGNEEHVQRIRKYRTVVEEELSKICASILQLLDDHLIPTASTGESKVFYLKMKGDYHRYLAEFKTGADRKEAAEHTLLAYKAAQDIALVDLPPTHPIRLGLALNFSVFYYEILNSPERACHLAKQAFDEAIAELDSLGEESYKDSTLIMQLLRDNLTLWTSDMQDPAAGDDREGADMKVEDAEP

SEQ ID NO: 14109 - protein, 264 aa, Mesembryanthemum crystallinum
MSSESSREENVYMAKLAEQAERYEEMVEFMEKVAKMTDTEELSVEERNLLSVAYKNVIGARRASWRIISSIEQKEESRGNEDHVSTIKEYRGKIETELSKICDGILNLLESHLIPSASTAESKVFYLKMKGDYHRYLAEFKTGAERKEAAENTLLAYKSAQDIALAELAPTHPIRLGLALNFSVFYYEILNSPDRACNLAKQAFDEAISELDTLGEESYKDSTLIMQLLRDNLTLWTSDNAEEGGDEIKEAAAKRESGEEKPQQ

SEQ ID NO: 14110 - protein, 40 aa, Mesembryanthemum crystallinum
LIMQLLRDNLTLWTSDMQEDGADEIKEAAAKPDEEAKPMS

SEQ ID NO: 14111 - protein, 259 aa, Arabidopsis thaliana
MASGREEFVYMAKLAEQAERYEEMVEFMEKVSAAVDGDELTVEERNLLSVAYKNVIGARRASWRIISSIEQKEESRGNDDHVTAIREYRSKIETELSGICDGILKLLDSRLIPAAASGDSKVFYLKMKGDYHRYLAEFKTGQERKDAAEHTLAAYKSAQDIANAELAPTHPIRLGLALNFSVFYYEILNSPDRACNLAKQAFDEAIAELDTLGEESYKDSTLIMQLLRDNLTLWTSDMQDDAADEIKEAAAPKPTEEQQ

SEQ ID NO: 14112 - protein, 259 aa, Arabidopsis thaliana
MASGREELVYMAKLAEQAERYEEMVEFMEKVSAAVDGDELTVEERNLLSVAYKNVIGARRASWRIISSIEQKEESRGNDDHVTAIREYRSKIETELSGICDGILKLLDSRLIPAAASGDSKVFYLKMKGDYHRYLAEFKTGQERKDAAEHTLAAYKSAQDIANAELAPTHPIRLGLALNFSVFYYEILNSPDRACNLAKQAFDEAIAELDTLGEESYKDSTLIMQLLRDNLTLWTSDMQDDAADEIKEAAAPKPTEEQQ

SEQ ID NO: 14113 - protein, 267 aa, Arabidopsis thaliana
MATPGASSARDEFVYMAKLAEQAERYEEMVEFMEKVAKAVDKDELTVEERNLLSVAYKNVIGARRASWRIISSIEQKEESRGNDDHVSLIRDYRSKIETELSDICDGILKLLDTILVPAAASGDSKVFYLKMKGDYHRYLAEFKSGQERKDAAEHTLTAYKAAQDIANSELAPTHPIRLGLALNFSVFYYEILNSPDRACNLAKQAFDEAIAELDTLGEESYKDSTLIMQLLRDNLTLWTSDMQDDVADDIKEAAPAAAKPADEQQS

SEQ ID NO: 14114 - protein, 267 aa, Arabidopsis thaliana
MATPGASSARDEFVYMAKLAEQAERYEEMVEFMEKVAKAVDKDELTVEERNLLSVAYKNVIGARRASWRIISSIEQKEESRGNDDHVSLIRDYRSKIETELSDICDGILKLLDTILVPAAASGDSKVFYLKMKGDYHRYLAEFKSGQERKDAAEHTLTAYKAAQDIANSELAPTHPIRLGLALNFSVFYYEILNSPDRACNLAKQAFDEAIAELDTLGEESYKDSTLIMQLLRDNLTLWASDMQDDVADDIKEAAPAAAKPADEQQS

SEQ ID NO: 14115 - protein, 262 aa, Arabidopsis thaliana
MTSARDEFVYMAKLAEQAERYEEMVEFMEKVAKAVDKDELTVEERNLLSVAYKNVIGARRASWRIISSIEQKEESRGNDDHVSLIRDYRSKIETELSDICDGILKLLDTILVPAAASGDSKVFYLKMKGDYHRYLAEFKSGQERKDAAEHTLTAYKAAQDIANSELAPTHPIRLGLALNFSVFYYEILNSPDRACNLAKQAFDEAIAELDTLGEESYKDSTLIMQLLRDNLTLWASDMQDDVADDIKEAAPAAAKPADEQQS

SEQ ID NO: 14116 - protein, 267 aa, Arabidopsis thaliana
MAAPPASSSAREEFVYLAKLAEQAERYEEMVEFMEKVAEAVDKDELTVEERNLLSVAYKNVIGARRASWRIISSIEQKEESRGNDDHVTTIRDYRSKIESELSKICDGILKLLDTRLVPASANGDSKVFYLKMKGDYHRYLAEFKTGQERKDAAEHTLTAYKAAQDIANAELAPTHPIRLGLALNFSVFYYEILNSPDRACNLAKQAFDEAIAELDTLGEESYKDSTLIMQLLRDNLTLWTSDMQDESPEEIKEAAAPKPAEEQKEI

SEQ ID NO: 14117 - protein, 267 aa, Arabidopsis thaliana
MAAPPASSSAREEFVYLAKLAEQAERYEEMVEFMEKVAEAVDKDELTVEERNLLSVAYKNVIGARRASWRIISSIEQKEESRGNDDHVTTIRDYRSKIESELSKICDGILKLLDTRLVPASANGDSKVFYLKMKGDYHRYLAEFKTGQERKDAAEHTLTAYKAAQDIANAELAPTHPIRLGLALNFSVFYYEILNSPDRACNLAKQAFDEAIAELDTLGEESYKDSTLIMQLLRDNLTLWTSDMQDESPEEIKEAAAPKPAEELKEI

SEQ ID NO: 14118 - protein, 261 aa, Vicia faba
MATAPTPREEFVYMAKLAEQAERYEEMVEFMEKVTAAVESEELTVEERNLLSVAYKNVIGARRASWRIISSIEQKEESRGNDEHVSVIRDYRSKIETELSNICNGILKLLDSRLIPSAALGDSKVFYLKMKGDYHRYLAEFKSGAERKDAAESTLTAYKSAQDIANTELPPTHPIRLGLALNFSVFYYEILNSPDRACGLAKQAFDEAIAELDTLGEESYKDSTLIMQLLRDNLTLWTSDMQDDGADEIKEAAPKGNDEPQ

SEQ ID NO: 14119 - protein, 260 aa, Oryza sativa (japonica cultivar-group); identical to SEQ ID NO: 573

SEQ ID NO: 14120 - protein, 264 aa, Oryza sativa (japonica cultivar-group)
MAAAAGGGTREEMVYMAKLAEQAERYEEMVEFMEKVVTAAAAGGGGELTVEERNLLSVAYKNVIGARRASWRIVSSIEQKEEGRGAAGHAAAARSYRARVEAELSNICAGILRLLDERLVPAAAAVDAKVFYLKMKGDYHRYLAEFKTGAERKDAADATLAAYQAAQDIAMKELSPTHPIRLGLALNFSVFYYEILNSPDRACTLAKQAFDEAISELDTLGEESYKDSTLIMQLLRDNLTLWTSDMQDDGGDEMRDATKPEDEH

SEQ ID NO: 14121 - protein, 254 aa, Lycopersicon esculentum
MAREENVYMAKLAEQAERYEEMVQFMEKVSTSLGSEELTVEERNLLSVAYKNVIGARRASWRIISSIEQKEESRGNEEHVKCIKEYRSKIESELSDICDGILKLLDSNLIPSASNGDSKVFYLKMKGDYHRYLAEFKTGAERKEAAESTLSAYKAAQDIANTELAPTHPIRLGLALNFSVFYYEILNSPDRACNLAKQAFDEAIAELDTLGEESYKDSTLIMQLLRDNLTLWTSDMQDDGADEIKETKNDNEQQ

SEQ ID NO: 14122 - protein, 258 aa, Lycopersicon esculentum
MASPREENVYMAKLAEQAERYEEMVEFMEKVVAAADGAEELTVEERNLLSVAYKNVIGARRASWRIISSIEQKEESRGNEDHVASIKEYRSKIESELTSICNGILKLLDSKLIGSAATGDSKVFYLKMKGDYHRYLAEFKTGAERKEAAENTLSAYKAAQDIANAELAPTHPIRLGLALNFSVFYYEILNSPDRACNLAKQAFDEAIAELDTLGEESYKDSTLIMQLLRDNLTLWTSDMQDDGTDEIKEATPKPDDNE

SEQ ID NO: 14123 - protein, 260 aa, Lycopersicon esculentum
MAVVAPTAREENVYMAKLADRAESDEEMVEFMEKVSNSLGSEELTVEERNLLSVAYKNVIGARRASWRIISSIEQKEESRGNEEHVNSIREYRSKIENELSKICDGILKLLDSKLIPSATSGDSKVFYLKMKGDYHRYLAEFKTGAERKEAAESTLTAYKAAQDIASAELAPTHPIRLGLALNFSVFYYEILNSPDRACNLAKQAFDEAIAELDTLGEESYKDSTLIMQLLRDNLTLWTSDMQDDGADEIKEDPKPEEKN

SEQ ID NO: 14124 - protein, 254 aa, Lycopersicon esculentum
MAREENVYMANVAEQAERYEEMVQFMEKVSTSLGSEELTVEERNLLSVAYKNVIGARTLAWRIISSIEQKEESRGNEEHVKCIKEYRSKIESELSDICDGILKLLDSNLIPSASNGDSKVFYLKMKGDYHRYLAEFKTGAERKEAAESTLSAYKAAQDIANTELAPTHPIRLGLALNFSVFYYEILNSPDRACNLAKQAFDEAIAELDTLGEESYKDSTLIMQLLRDNLTLWTSDMQDDGADEIKETKNDNEQQ

SEQ ID NO: 14125 - protein, 258 aa, Lycopersicon esculentum
MAFAREENVYMANVAEQRRSYEEMVEFMEKVVAAADGAEELTVEERILLSVAYKNVMGARRASWRIISSIEQKEESRGNEDHVASIKEYRSKIESELTSICNGILKLLDSKLIGSAATGDSKVFYLKMKGDYHRYLAEFKTGAERKEAAENTLSAYKAAQDIANAELAPTHPIRLGLALNFSVFYYEILNSPDRACNLAKQAFDEAIAELDTLGEESYKDSTLIMQLLRDNLTSWTSDMQDDGTDEIKEATPKPDDNE

SEQ ID NO: 14126 - protein, 255 aa, Lycopersicon esculentum
MASPREENVYMANVADEAERYEEMVEFMEKVVAALNGEELTVEERNLLSVAYKNVIGARRASWRIISSIEQKEESRGNEDHVASIKKYRSQIENELTSICNGILKLLDSKLIGSAATGDSKVFYLKMKGDYYRYLAEFKTGTERKEAAENTLSAYKSAQDIANGELAPTHPIRLGLALNFSVFYYEILNSPDRACNLAKQAFDEAIAELDTLGEESYKDSTLIMQLLRDNLTLWTSDMQDDGTDEIKEPSKADNE

SEQ ID NO: 14127 - protein, 260 aa, Nicotiana tabacum
MAVAPTAREENVYMAKLAEQAERYEEMVEFMEKVSNSLGSEELTVEERNLLSVAYKNVIGARRASWRIISSIEQKEESRGNEEHVNSIREYRSKIENELSKICDGILKLLDAKLIPSAASGDSKVFYLKMKGDYHRYLAEFKTGAERKEAAESTLTAYKAAQDIATTELAPTHPIRLGLALNFSVFYYEILNSPDRACNLAKQAFDEAIAELDTLGEESYKDSTLIMQLLRDNLTLWTSDMQDDGADEIKEDPKPDEAKN

SEQ ID NO: 14128 - protein, 255 aa, Nicotiana tabacum
MAREENVYMAKLAEQAERYEEMVSFMEKVSTSLGTSEELTVEERNLLSVAYKNVIGARRASWRIISSIEQKEESRGNEDHVKCIQEYRSKIESELSNICDGILKLLDSCLIPSASAGDSKVFYLKMKGDYHRYLAEFKTGAERKEAAESTLSAYKAAQDIANAELAPTHPIRLGLALNFSVFYYEILNSPDRACNLAKQAFDEAIAELDTLGEESYKDSTLIMQLLRDNLTLWTSDMQDDGADEIKETKADNEQQ

SEQ ID NO: 14129 - protein, 255 aa, Nicotiana tabacum
MAREENVYMAKLAEQAERYEEMVSFMEKVSTSLGTSEELTVEERNLLSVAYKNVIGARRASWRIISSIEQKEESRGNEDHVKCIQEYRSKIESELSNICDGILKLLDSCLIPSASAGDSKVFYLKMKGDYHRYLAEFKTGAERKEAAESTLSAYKAAQDIANAELAPTHPIRLGLALNFSVFYYEILNSPDRACNLAKQAFDEAIAELDTLGEESYKDSTLIMQLLRDNLTLWTSDMQDDGADEIKETKTDNEQQ

SEQ ID NO: 14130 - protein, 258 aa, Nicotiana tabacum
MASPREENVYMAKLAEQAERYEEMVEFMEKVVAAADGAEELTVEERNLLSVAYKNVIGARRASWRIISSIEQKEESRGNEDHVASIKEYRSKIETELTSICNGILKLLDSKLIGAAATGDSKVFYLKMKGDYHRYLAEFKTGAERKEAAENTLSAYKSAQDIANTELAPTHPIRLGLALNFSVFYYEILNSSDRACNLAKQAFDEAIAELDTLGEESYKDSTLIMQLLRDNLTLWTSDMQDDGTDEIKEAAKPDNEQQ

SEQ ID NO: 14131 - protein, 258 aa, Nicotiana tabacum
MSSSRDEFVYMAKLAEQAERYEEMVDFMEKVVTAADGGEELTIEERNLLSVAYKNVIGARRASWRIISSIEQKEESRGNEDHVTSIKTYRSKIESELTSICNGILKLLDSNLIRAASTGDSKVFYLKMKGDYHRYLAEFKTGAERKEAAENTLSSYKSAQDIANAELAPTHPIRLGLALNFSVFYYEILNSPDRACNLAKQAFDEAIAELDTLGEESYKDSTLIMQLLRDNLTLWTSDMQDEGTEEMKEVAKPDNEEH

SEQ ID NO: 14132 - protein, 255 aa, Nicotiana tabacum
MASPREENVYLAKLAEQAERYEEMVEFMEKVVGAGDDELTIEERNLLSVAYKNVIGARRASWRIISSIEQKEESRGNEDHVASIKTYRSKIESELTSICNGILKLLDSKLIGTAATGDSKVFYLKMKGDYYRYLAEFKTGAERKEAAENTLSAYKSAQDIANGELAPTHPIRLGLALNFSVFYYEILNSPDRACNLAKQAFDEAIAELGTLGEESYKDSTLIMQLFCDNLTLWTSDMQDDGTDEIKEPSKAEEQQ

SEQ ID NO: 14133 - protein, 258 aa, Solanum tuberosum
MASPREENVYMAKLAEQAERYEEMVEFMEKVVAAADGAEELTVEERNLLSVAYKNVIGARRASWRIISSIEQKEESRGNEDHVASIKEYRSKIESELTSICNGILKLLDSKLIGSAATGDSKVFYLKMKGDYHRYLAEFKTGAERKEAAENTLSAYKAAQDIANAELAPTHPIRLGLALNFSVFYYEILNSPDRACNLAKQAFDEAIAELDTLGEESYKDSTLIMQLLRDNLTLWTSDMQDDGTDEIKEAAPKPDNNE

SEQ ID NO: 14134 - protein, 254 aa, Solanum tuberosum
MASPREENVYMANVAARAERYEEMVEFMEKVVAALDTELTVEERNLLSVAYKNVIGARRASWRIISSIEQKEESRGNEDHVASIKKYRSQIENELTSICNGILKLLDSKLIGSAATGDSKVFYLKMKGDYYRYLAEFKTGTERKEAAENTLSAYKSAQDIANGELAPTHPIRLGLALNFSVFYYEILNSPDRACNLAKQAFDEAIADVDTLGEESYKDSTLIMQLLRDNLTLWTSDMQDDGADEIKEPSKADNE

SEQ ID NO: 14135 - protein, 252 aa, Dictyostelium discoideum
MTREENVYMAKLAEQAERYEEMVETMKKVAELDVELTVEERNLLSVAYKNVIGARRASWRIISSIEQKEESKGNENHVKKIKEYKCKVEKELTDICNDILEVLESHLIVSSASGESKVFYYKMKGDYFRYLAEFATGNPRKTSAESSLIAYKAASDIAVTELPPTHPIRLGLALNFSVFYYEILNSPDRACNLAKTAFDDAIAELDTLSEDSYKDSTLIMQLLRDNLTLWTSDVHNMEKNQDGDDDQNEPGM

SEQ ID NO: 14136 - protein, 261 aa, Hordeum vulgare
MSTAEATREENVYMAKLAEQAERYEEMVEFMEKVAKTADVGELTVEERNLLSVAYKNVIGARRASWRIISSIEQKEESRGNEAYVASIKEYRTRIETELSKICDGILKLLDSHLVPSATAAESKVFYLKMKGDYHRYLAEFKAGAERKEAAENTLVAYKSAQDIALADLPTTHPIRLGLALNFSVFYYEILNSPDRACNLAKQAFDEAIAELDSLGEESYKDSTLIMQLLRDNLTLWTSDNAEEGGDEIKEAASKPEGEGH

SEQ ID NO: 14137 - protein, 262 aa, Hordeum vulgare
MSTAEATREENVYMAKLAEQAERYEEMVEFMEKVAKTADVGELTVEERNLLSVAYKNVIGARRASWRIISSIEQKEESRGNEAYVASIKEYRTRIETELSKICDGILKLLDSHLVPSATAAESKVFYLKMKGDYHRYLAEFKAGAERKEAAENTLVAYKSAQDIALADLPTTHPIRLGLALNFSVFYYEILNSPDRACNLAKQAFDEAIAELDSLGEESYKDSTLIMQLLRDNLTLWTSDNAEEGGDEIKEAASKPEGEGHS

SEQ ID NO: 14138 - protein, 262 aa, Hordeum vulgare
MAQPAELSREENVYMAKLAEQAERYEEMVEFMEKVAKTVDSEELTVEERNLLSVAYKNVIGARRASWRIISSIEQKEESRGNEDRVTLIKDYRGKIEVELTKICDGILKLLDSHLVPSSTAPESKVFYLKMKGDYYRYLAEFKSGTERKDAAENTMVAYKAAQEIALAELPPTHPIRLGLALNFSVFYYEILNSPDRACDLAKQAFDEAISELDSLSEESYKDSTLIMQLLRDNLTLWTSDISEDAAEEMKDAPKGESGDGQ

SEQ ID NO: 14139 - protein, 263 aa, Hordeum vulgare
MSAPGELSREENVYMAKLAEQAERYEEMVEFMEKVAKTVDSEELTVEERNLLSVAYKNVIGARRASWRIISSIEQKEESRGNEDRVTLIKEYRGKIETELSKICDGILKLLETHLVPSSTAPESKVFYLKMKGDYYRYLAEFKSGPERKDAAENTMVAYKAAQDIALAELAPTHPIRLGLALNFSVFYYEILNSPDRACNLAKQAFDEAISELDTLSEESYKDSTLIMQLLRDNLTLWTSDITEDTAEEEIREAPKHDSSEGQ

SEQ ID NO: 14140 - protein, 256 aa, Oryza sativa
MSREENVYMAKLAEQAERYEEMVEYMEKVAKTVDVEELTVEERNLLSVAYKNVIGARRASWRIVSSIEQKEEGRGNEEHVTLIKEYRGKIEAELSKICDGILKLLDSHLVPSSTAAESKVFYLKMKGDYHRYLAEFKTGAERKEAAESTMVAYKAAQDIALADLAPTHPIRLGLALNFSVFYYEILNSPDKACNLAKQAFDEAISELDTLGEESYKDSTLIMQLLRDNLTLWTSDLTEDGGDEVKEASKGDACEGQ

SEQ ID NO: 14141 - protein, 256 aa, Oryza sativa; identical to SEQ ID NO: 14140

SEQ ID NO: 14142 - protein, 256 aa, Oryza sativa; identical to SEQ ID NO: 14140

SEQ ID NO: 14143 - protein, 262 aa, Oryza sativa
MSAQAELSREENVYMAKLAEQAERYEEMVEFMEKVAKTVDSEELTVEERNLLSVAYKNVIGARRASWRIISSIEQKEESRGNEDRVTLIKDYRGKIETELTKICDGILKLLESHLVPSSTAPESKVFYLKMKGDYYRYLAEFKTGAERKDAAENTMVAYKAAQDIALAELPPTHPIRLGLALNFSVFYYEILNSPDRACNLAKQAFDEAISELDTLSEESYKDSTLIMQLLRDNLTLWTSDISEDTAEEIREAPKRDSSEGQ

SEQ ID NO: 14144 - protein, 262 aa, Oryza sativa; identical to SEQ ID NO: 14143

SEQ ID NO: 14145 - protein, 262 aa, Oryza sativa; identical to SEQ ID NO: 14143

SEQ ID NO: 14146 - protein, 262 aa, Oryza sativa
MSQPAELSREENVYMAKLAEQAERYEEMVEFMEKVAKTVDSEELTVEERNLLSVAYKNVIGARRASWRIISSIEQKEESRGNEDRCTLIKEYRGKIETELSKICDGILKLLDSHLVPSSTAPESKVFYLKMKGDYYRYLAEFKTGAERKDAAENTMVAYKAAQDIALAELPPTHPIRLGLALNFSVFYYEILNSPDRACNLAKQAFDEAISELDTLSEESYKDSTLIMQLLRDNLTLWTSDISEDAAEEIKEAPKGESGDGQ

SEQ ID NO: 14147 - protein, 262 aa, Oryza sativa; identical to SEQ ID NO: 14146

SEQ ID NO: 14148 - protein, 260 aa, Oryza sativa; identical to SEQ ID NO: 573

SEQ ID NO: 14149 - protein, 263 aa, Oryza sativa
  unsure (1)..(263): unsure at all Xaa locations
MSQPAELSREENVYMAKLAEQAERYEEMVEFMEKVAKTVDSEELTVEERNLLSVAYKNVIGARRASWRIISSIEQKEESRGNEDRXCTLIKEYRGKIETELSKICDGILKLLDSHLVPSSTAPESKVFYLKMKGDYYRYLAEFKTGAERKDAAENTMVAYKAAQDIALAELPPTHPIRLGLALNFSVFYYEILNSPDRACNLAKQAFDEAISELDTLSEESYKDSTLIMQLLRDNLTLWTSDISEDAAEEIKEAPKGESGDGQ

SEQ ID NO: 14150 - protein, 260 aa, Oryza sativa
MSPAEASREENVYMAKLAEQAERYEEMVEFMEKVAKTTDVGELTVEERNLLSVAYKNVIGARRASWRIISSIEQKEESRGNEAYVASIKEYRSRIETELSKICDGILKLLDSHLVPSATAAESNVFYLKMKGDYHRYLAEFKSGAERKEAAENTLVAYKSAQDIALADLPTTHPIRLGLALNLSVFYYEILNSPDRACNLAKQAFDDAIAELDTLGEESYKDSTLIMQLLRDNLTLWTSDNAEDGGDEIKEAAKPEGEGH

SEQ ID NO: 14151 - protein, 265 aa, Oryza sativa
MSPAEPTREESVYKAKLAEQAERYEEMVEYMERVARAAGGASGGEELTVEERNLLSVAYKNVIGARRASWRIISSIEQKEEGRGNDAHAATIRSYRGKIEAELARICDGILALLDSHLVPSAGAAESKVFYLKMKGDYHRYLAEFKSGDERKQAAESTMNAYKAAQDIALADLAPTHPIRLGLALNFSVFYYEILNSPDRACNLAKQAFDEAISELDSLGEESYKDSTLIMQLLRDNLTLWTSDANDDGGDEIKEAAAPKEPGDQ

SEQ ID NO: 14152 - protein, 265 aa, Oryza sativa; identical to SEQ ID NO: 14151

SEQ ID NO: 14153 - protein, 492 aa, Oryza sativa
MKFRSDSSGGDEPRAPAAGDGGGGGDEPAKRQRTDPSSSSSQGEASSSSQPPPQQQQEEQPPEDAGEGEQPRVPDLGEDLVFEVLRRAEARTLAAAACVSRGWRQLAEDERLWEAACVREWANLGFSERQLRAVVLSLGGFRRLHAVYIRPLQWRGAGVPRQQGRRQPPVRLGRDQVQLSLSLFSIGFFQNMPCPKKDKGNDSDKNGGGQCGKTQTVKMSQPAELSREENVYMAKLAEQAERYEEMVEFMEKVAKTVDSEELTVEERNLLSVAYKNVIGARRASWRIISSIEQKEESRGNEDRCTLIKEYRGKIETELSKICDGILKLLDSHLVPSSTAPESKVFYLKMKGDYYRYLAEFKTGAERKDAAENTMVAYKAAQDIALAELPPTHPIRLGLALNFSVFYYEILNSPDRACNLAKQAFDEAISELDTLSEESYKDSTLIMQLLRDNLTLWTSDISEDCQNVCFKCPKGRSGPRNIILSVKVKTAWF

SEQ ID NO: 14154 - protein, 886 aa, Oryza sativa
MSMVNWALEILNQDRNQSVLKDYLTFHCFIHIAHLYICLQVDIAAGGWHSTALTKEGEVYAWGRGEHGRLGFGDDKSSHMVPQKVELLAGEDIIQVSCGGTHSVALTRDGRMFSYGRGDHGRLGYGRKVTTGHPMEVPIDLPPPGTSGGDSGGQWQASPYPTPTTSCPWSIWAAKLRSDGAYRVCFVHTARASESHSRRSDLAGDAVAATPPPCASSSALLNPLAAFARSVTLTPASTEGRVGSGGCRDGRDGRRRGAAGVSLPSDCCPPSSYAPPPAHSPREDDALPSLRSQCICVVYVVDNSKTQATKPRSKSISSAESVQAMRSSEESSSDEDDEILSELKEKWDAIENKSSVLFYGGGAIIAVWLSSIVVKAVDSVPVLPNILELVGLGYSGWFVYRYLLFKLHPKSIPFVFILEKSYTPTTYHLNVKYDLVQLTVARPTCHHTKKRVSHELGGGRVYPPPTARTEANQTRQLYPPLTRGPRRDPSPTCHPLSSLARRTRGATPLAPVPSLPAIKAPVFPTPPLRRTKSIRIHETTRTRPASPPPPPKENVYMAKLAEQAERYEEMVEYMEKVAKTVDVEELTVEERNLLSVAYKNVIGARRASWRIVSSIEQKEEGRGNEEHVTLIKEYRGKIEAELSKICDGILKLLDSHLVPSSTAAESKVFYLKMKGDYHRYLAEFKTGAERKEAAESTMVAYKAAQDIALADLAPTHPIRLGLALNFSVFYYEILNSPDKACNLAKQAFDEAISELDTLGEESYKDSTLIMQLLRDNLTLWTSDLTGGSGRISSSHCFAFGASVVVLRCRSCPRKVDAQVPNSESTHKKKKWAHLVPCDMNNVPYIYNLLSYWKKPDRRFNRKKPEPEIFVVRFKTLNRTGHARDSL

SEQ ID NO: 14155 - protein, 243 aa, Oryza sativa
  unsure (1)..(243): unsure at all Xaa locations
XHASGYEEMVEYMEKVAKTVDVEELTVEERNLLSVAYKNVIGARRASWRIVSSIEQKEEGRGNEEHVTLIKEYRGKIEAELSKICDGILKLLDSHLVPSSTAAESKVFYLKMKGDYHRYLAEFKTGAERKEAAESTMVAYKAAQDIALADLAPTHPIRLGLALNFSVFYYEILNSPDKACNLAKQAFDEAISELDTLGEESYKDSTLIMQLLRDNLTLWTSDLTEDGGDEVKEASKGDACEGQ

SEQ ID NO: 14156 - protein, 266 aa, Oryza sativa
  unsure (1)..(266): unsure at all Xaa locations
MAAAAGGGTREEMVYMAKLAEQAERYEEMVEFMEKVVTAAAAGGGGELTVEERNLLSVAYKNVIGARRASWRIVSSIEQKEEGRGAAGHAAAARSYRARVEAELSNICAGILRLLDERLVPAAAAVDAKVFYLKMKGDYHRYLAEFKTGAERKDAADATLAAYQAAQDIAMKELSPTHPIRLGLALNFSVFYXYEILNSPDGAWTVXAKQAFDEAISELDTLGEESYKDSTLIMQLLRDNLTLWTSDMQDDGGDEMRDATKPEDEH

SEQ ID NO: 14157 - protein, 262 aa, Oryza sativa
  unsure (1)..(262): unsure at all Xaa locations
MLPAEAWREENVYMVKLAEQAERYXVNGRIMEKVAKTTDVAELTVEERNLLCVAYKNVIGARRASXRIISSIEQKEESRVNDAYVASINEHRNKIETDLINICDGILKLLDSHLVPSATAAESKXVFYLTMKGDYHMYLAEFQSXAERNEAADNTLVAYKAAQDIRLGDLSTTHPIRLGLALSFSAFYYEILNXPDRACNLAKQAFDDAIAELDTLGEESYKDSPLXIMQLLRDNLTLWTSDNAEDGGDEIKEAAKPEGEGP

SEQ ID NO: 14158 - protein, 224 aa, Oryza sativa
  unsure (1)..(224): unsure at all Xaa locations
MAAAAGGGTREEMVYMAXXGGQAERYEEMVEFMEKVVTAAAAGGGGELTVEERNLLSVAYKNVIGARRASWRIVSSIEQKEEXRGAAGHVVXLKMKGDYHRYLAEFKTGAERKDAADATLAAYQAAQDIAMKELSPTHPIRLGLALNFSVFYYEILNSPDRACTLAKQAFDEAISELDTLGEESYKDSTLIMQLLRDNLTLWTSDMQDDGGDEMRDATKPEDEH

SEQ ID NO: 14159 - protein, 261 aa, Triticum aestivum; identical to SEQ ID NO: 14136

SEQ ID NO: 14160 - protein, 267 aa, Triticum aestivum
  unsure (1)..(267): unsure at all Xaa locations
MSTAEATREENVYMAKLAEQAERYEEMVEFMEKVAKTADVGELTVEERNLLSVAYKNVIGARRASWRIISSIEQKEESRGNEAYVASIKEYRTRIETELSKICDGILKLLDSHLVPSATAAESKVFYLKMKGDYHRYLAEFKAGAERKEAAENTLVAYKSAQDIALADLPTTHPIRLGLALNFSVFYYEILNSPDRACNLAKQAFDEAIAELDSXLGEESYKDSTLIMQLLRDNLTLWTSDNAEEGGDEIKEAASKPEGEGHXLAGP

SEQ ID NO: 14161 - protein, 262 aa, Triticum aestivum
MAQPAELSREENVYMAKLAEQAERYEEMVEFMEKVAKTVDSEELTVEERNLLSVAYKNVIGARRASWRIISSIEQKEESRGNEDRVTLIKDYRGKIEVELTKICDGILKLLDSHLVPSSTAPESKVFYLKMKGDYYRYLAEFKSGTERKDAAENTMVAYKAAQEIALEELPPTHPIRLGLALNFSVFYYEILNSPDRACDLAKQAFDEAISELDSLSEESYKDSTLIMQLLRDNLTLWTSDISEDAAEEMKDAPKGESGDGQ

SEQ ID NO: 14162 - protein, 263 aa, Triticum aestivum
MTAPAELSREENVYMAKLAEQAERYEEMVEFMEKVAKTVDSEELTVEERNLLSVAYKNVIGARRASWRIISSIEQKEESRGNEDRVTLIKEYRGKIETELSKICDGILKLLETHLVPSSTAPESKVFYLKMKGDYYRYLAEFKSGPERKDAAENTMVAYKAAQDIALAELAPTHPIRLGLALNFSVFYYEILNSPDRACNLAKQAFDEAISELDTLSEESYKDSTLIMQLLRDNLTLWTSDITEDTAEEEIREAPKNDSSEGQ

SEQ ID NO: 14163 - protein, 263 aa, Triticum aestivum; identical to SEQ ID NO: 14162

SEQ ID NO: 14164 - protein, 263 aa, Triticum aestivum
MTAPAELSREENVYMAKLAEQAERYEEMVEFMEKVAKTVDSEELTVEERNLLSVAYKNVIGARRASWRIISSIEQKEESRGNEDRVTLIKEYRGKIETELSKICDGILKLLETHLVPSSTAPESKVFYLKMKGDYYRYLAEFKSGPERKDAAENTMVAYKAAQDIALAELAPTHPIRLGLALNFSVFYYEILNSPDRACNLAKQAFDEAISELDTLSEESYKDSTLIMQLLRDNLTLWTSDITEDTAEEEIREAPKHDSSEGQ

SEQ ID NO: 14165 - protein, 266 aa, Triticum aestivum
MSPAEPTRDESVYMAKLAEQAERYEEMVEFMERVAKATGGAGPGEELSVEERNLLSVAYKNVIGARRASWRIISSIEQKEEGRGNDAHAATIRSYRSKIEAELAKICDGILALLDSHLVPSAGAAESKVFYLKMKGDYHRYLAEFKSGGERKEAAESTMNAYKAAQDIALADLAPTHPIRLGLALNFSVFYYEILNSPDRACNLAKQAFDEAISELDSLGEESYKDSTLIMQLLRDNLTLWTSDTNEDDVDEIKEAPAPKESGDGQ

SEQ ID NO: 14166 - protein, 266 aa, Triticum aestivum; identical to SEQ ID NO: 14165

SEQ ID NO: 14167 - protein, 259 aa, Triticum aestivum
MAKAAATREEMVYLAKLAEQAERYEEMVEFMEKVVAAAGTVELTIEERNLLSVAYKNVIGARRASWRIVSSIEQKEEGRGAAGHAAAARGYRALVEAELSNICAGILRLLDERLVPAAAAVDAKVFYLKMKGDYHRYLAEFKSAAERKDAADSTLGAYQAAQDIAMKELPPTHPIRLGLALNFSVFYYEILNSPDRACSLAKQAFDEAIAELDSLGEDSYKDSTLIMQLLRDNLTLWTSDMQDDAGDEMRDSSKPEDEQ

SEQ ID NO: 14168 - protein, 261 aa, Triticum aestivum
MAKAAAAGTREEMVYLAKLAEQAERYEEMVEFMEKVVAAAGTVELTIEERNLLSVAYKNVIGARRASWRIVSSIEQKEEGRGAAGHAAAARGYRALVEAELSNICAGILRLLDERLVPAAAAVDAKVFYLKMKGDYHRYLAEFKSAAERKDAADSTLGAYQAAQDIAMKELPPTHPIRLGLALNFSVFYYEILNSPDRACSLAKQAFDEAIAELDSLGEDSYKDSTLIMQLLRDNLTLWTSDMQDDAGDEMRDSSKPEDEQ

SEQ ID NO: 14169 - protein, 290 aa, Triticum aestivum
  unsure (1)..(290): unsure at all Xaa locations
MSTAEATREENVYMAKLAEQAERYEEMVEFMEKGGKXTADVGELTVEERNLLSVAYKNVIGARRASWRIISSIEQKEESRGNEAYVASIKEYRTRIETELSKICDGILKLLDSHLVPSATAAESKVFYLKMKGDYHRYXLAEFKAGAERKEAAENTLVAYKSAQDIALADLPTTHPIRXLGLALNFSVFYYEILNSPDRACNLAKQAFDEAIAELDSLGEESYKDSTLIMQLLRDNLTLWTSDNAEEGGXDEIKEAASKPEGEGHXLAGPRACPSLFPSPFTQLPVSFGS

SEQ ID NO: 14170 - protein, 262 aa, Triticum aestivum
  unsure (1)..(262): unsure at all Xaa locations
MAKAAAAGTREEMVYMAKLAEQAERYEEMVEFMEKVVAAAGTGELTVEEXRNLLSVAYKNVIGARRASWRIVSSIEQKEEGRGAAGHAAAARGYRALVEAELSNICAGILRLLDERLVPAPAEGSXLLSSLTLKLDYHRYLAEFKSAAERKDAADSTLGAYQAAQDIAMKELPPTHPIRLGLALNFSVFYYEILNSPDRACSLAKQAFDEAIAELDSLGEDSYKDSTLIMQLLRDNLTLWTSDMQDDAGDEMRDSSKPEDEQ

SEQ ID NO: 14171 - protein, 254 aa, Triticum aestivum
  unsure (1)..(254): unsure at all Xaa locations
MSTAEATREENVYMAKLAEQAERYEEMVEFMEKVAKTADVGELTVEERNLLSVAYKNVIGARRASWRIISSIEQKEESRGNEAYVASIKEYRTRIETELSKICDGILKLLDSHLVPSATAAESKVFYLKMKGDYHRYLAEFKAGADALADLPTTHPIRLGLALNFSVFYYEILNSPDRACNLAKQAFDEAIAELDSLGEESYKDSTLIMQLLRDNLTLWTSDNAEEGGDEIKEAASKPEGEGHXLALERAQVYF

SEQ ID NO: 14172 - protein, 264 aa, Hypocrea jecorina
MGHEDAVYLAKLAEQAERYEEMVENMKIVASEDRDLTVEERNLLSVAYKNVIGARRASWRIVTSIEQKEESKGNSSQVALIKEYRQKIEAELAKICDDILEVLDQHLIPSAKSGESKVFYHKMKGDYHRYLAEFAIGDRRKDSADKSLEAYKAATEVAQTELPPTHPIRLGLALNFSVFYYEILNAPDQACHLAKQAFDDAIAELDTLSEESYKDSTLIMQLLRDNLTLWTSSEAETSAGQVEAPPKEDTPAEAAAPAEEPKAE

SEQ ID NO: 14173 - protein, 272 aa, Hypocrea jecorina
MATERESKTFLARLCEQAERYDEMVTYMKEVAQLGGELSVDERNLLSVAYKNVVGTRRASWRIISSIEQKEESKGSDKHVATIKEYRSKIELELEKVCEDVLNVLDTSLIPNAATGESKVFYHKMKGDYHRYLAEFASGEKRKVAATAAHEAYKNATDVAQTELTPTHPIRLGLALNFSVFYYEILNSPDRACHLAKQAFDDAIAELDSLSEESYRDSTLIMQLLRDNLTLWTSSDSGEAEQAGEAKKDEGEAAKPAEEEPKAEEPAPEATS

SEQ ID NO: 14174 - protein, 257 aa, Schizophyllum commune
MPESREDSVYLAKLAEQAERYEEMVENMKRVASSDQELTVEERNLLSVAYKNVIGARRASWRIVSSIEQKEESKGNEAQVSMIKGYREKIEGELAKICEDILDVLEKHLIPSAASGESKVFYHKMMGDYHRYLAEFATGDKRKDSADKSLEAYKAASDVAVTELPPTHPIRLGLALNFSVFYYEILNSPDRACHLAKQAFDDAIAELDTLSEESYKDSTLIMQLLRDNLTLWTSDMQDSGEKPADSKDEAPEAPGDE

SEQ ID NO: 14175 - protein, 256 aa, Lentinula edodes
MPETREDSVYLAKLAEQAERYEEMVENMKRVASSDQELTVEERNLLSVAYKNVIGARRASWRIVSSIEQKEESKGNEAQVSMIKGYREKIETELAEICEDILDVLDKHLIPSAASGESKVFYHKMMGDYHRYLAEFATGDKRKESADKSLEAYKAASDVAVTELPPTHPIRLGLALNFSVFYYEILNSPDRACHLAKQAFDDAIAELDTLSEESYKDSTLIMQLLRDNLTLWTSDMQDSADKPAEKDEAADAPADE

SEQ ID NO: 14176 - protein, 249 aa, Schistosoma mansoni
MDELRERNIVLAKLCEQAERYDEMVKAMIEIATNTETELTVEERNLLSVAYKNVIGARRSSWRIINSKESQDEAKGSDEIHITKRFRKEVEKELDEICTSILNLLDNCLLPKAVSDESKVFLNKMRGDYHRYRAEYSVGNQRKDAAENSLCAYKKAAEDAEKLPVTHPIRLGLALNFSVFYYEILNNSEQACKCARVAFDSAIAELDTLSEESYKDSTIIMQLLRDNLTLWTSNSEGEKDTASPKGDKK

SEQ ID NO: 14177 - protein, 256 aa, Drosophila melanogaster
MTERENNVYKAKLAEQAERYDEMVEAMKKVASMDVELTVEERNLLSVAYKNVIGARRASWRIITSIEQKEENKGAEEKLEMIKTYRGQVEKELRDICSDILNVLEKHLIPCATSGESKVFYYKMKGDYHRYLAEFATGSDRKDAAENSLIAYKAASDIAMNDLPPTHPIRLGLALNFSVFYYEILNSPDRACRLAKAAFDDAIAELDTLSEESYKDSTLIMQLLRDNLTLWTSDMQAEGDGEPKEQIQDVEDQDVS

SEQ ID NO: 14178 - protein, 262 aa, Drosophila melanogaster
MTERENNVYKAKLAEQAERYDEMVEAMKKVASMDVELTVEERNLLSVAYKNVIGARRASWRIITSIEQKEENKGAEEKLEMIKTYRGQVEKELRDICSDILNVLEKHLIPCATSGESKVFYYKMKGDYHRYLAEFATGSDRKDAAENSLIAYKAASDIAMNDLPPTHPIRLGLALNFSVFYYEILNSPDRACRLAKAAFDDAIAELDTLSEESYKDSTLIMQLLRDNLTLWTSDMQAEEVDPNAGDGEPKEQIQDVEDQDVS

SEQ ID NO: 14179 - protein, 261 aa, Drosophila melanogaster
MTERENNVYKAKLAEQAERYDEMVEAMKKVASMDVELTVEERNLLSVAYKNVIGARRASWRIITSIEQKEENKGAEEKLEMIKTYRGQVEKELRDICSDILNVLEKHLIPCATSGESKVFYYKMKGDYHRYLAEFATGSDRKDAAENSLIAYKAASDIAMNDLPPTHPIRLGLALNFSVFYYEILNSPDRACRLAKAAFDDAIAELDTLSEESYKDSTLIMQLLRDNLTLWTSDMQAEVDPNAGDGEPKEQIQDVEDQDVS

SEQ ID NO: 14180 - protein, 260 aa, Drosophila melanogaster
MTERENNVYKAKLAEQAERYDEMVEAMKKVASMDVELTVEERNLLSVAYKNVIGARRASWRIITSIEQKEENKGAEEKLEMIKTYRGQVEKELRDICSDILNVLEKHLIPCATSGESKVFYYKMKGDYHRYLAEFATGSDRKDAAENSLIAYKAASDIAMNDLPPTHPIRLGLALNFSVFYYEILNSPDRACRLAKAAFDDAIAELDTLSEESYKDSTLIMQLLRDNLTLWTSDMQAEDPNAGDGEPKEQIQDVEDQDVS

SEQ ID NO: 14181 - protein, 255 aa, Danio rerio
MGDREDLVYQAKLAEQAERYDEMVDSMKKVAGMDVELTVEERNLLSVAYKNVIGARRASWRIISSIEQKEENKGGEDKLKMIREYRQTVENELKSICNDILDVLDKHLIPAANSGESKVFYYKMKGDYHRYLAEFATGNDRKEAAENSLVAYKAASDIAMTDLQPTHPIRLGLALNFSVFYYEILNSPDRACRLAKAAFDDAIAELDTLSEESYKDSTLIMQLLRDNLTLWTSDMQGDGEEQNKEALQDVEDENQ

SEQ ID NO: 14182 - protein, 261 aa, Populus x canescens
MAATPSAREESVYMAKLAEQAERYEEMVEYMEKVSASLENEELTVEERNLLSVAYKNVIGARRASWRIISSIEQKEESRGNEDHVSVIRDYRAKIETELSSICDGILKLLDSRLIPTASAGDSKVFYLKMKGDYHRYLAEFKTGAERKEAAESTLTAYKAAQDIANAELAPTHPIRLGLALNFSVFYYEILNSPDRACSLAKQAFDEAIAELDTLGEESYKDSTLIMQLLRDNLTLWTSDMQDDGADEIKEAAPKPGDEQQ

SEQ ID NO: 14183 - protein, 255 aa, Xenopus laevis
MEEREDLVYRAKLAEQAERYDEMVESMKKVAGMDVELTVEERNLLSVAYKNVIGARRASWRIISSIEQKEENKGGEDKLKMIREYRQMVETELKSICNDILDVLDKHLIPAASSGESKVFYYKMKGDYHRYLAEFAQGNDRKEAAENSLVAYKAASDIAMTELPPTHPIRLGLALNFSVFYYEILNSPDRACRLAKAAFDDAIAELDTLSEESYKDSTLIMQLLRDNLTLWTSDMQGDGEDQNKEALQDVEDENQ

SEQ ID NO: 14184 - protein, 255 aa, Homo sapiens
MDDREDLVYQAKLAEQAERYDEMVESMKKVAGMDVELTVEERNLLSVAYKNVIGARRASWRIISSIEQKEENKGGEDKLKMIREYRQMVETELKLICCDILDVLDKHLIPAANTGESKVFYYKMKGDYHRYLAEFATGNDRKEAAENSLVAYKAASDIAMTELPPTHPIRLGLALNFSVFYYEILNSPDRACRLAKAAFDDAIAELDTLSEESYKDSTLIMQLLRDNLTLWTSDMQGDGEEQNKEALQDVEDENQ

SEQ ID NO: 14185 - protein, 1114 aa, Mus musculus
MAEAPPVSGTFKFNTDAAEFIPQERKTSGLNCGTQRRLDSSRIGRRNYSSSPPCHLPRHIPYEDISAVHQHSYASGSKPKSPQGFFQSSNKSLKNHGLQNQPWQKARNEKHQNRNKKAQGLSEQTSDTSSLESVARSESGTNPREHSPSESEKEVVIADPRGAKPKKAAQLTYNYGRGPKAKGRLRSEWGNRMSPKSEDEIPDPWRFPTLTLQIASCRKPVVDPCVCRRNEQRRYPQKRPPLGSGRARPRPGRNPPKQESQRHINAGPKTNMSPIPKDNLRERPTKSACDTGNLAVVSKSSRRVNQEKTAVRRQDPQVLSPFPRGKQNHMLKNVETHTGSLIEQLTTEKYECMVCCELVQVTAPVWSCQSCFHVFHLNCIKKWARSPASHADGQSGWRCPACQNVSAHVPNTYTCFCGKVKNPEWSRNEIPHSCGEVCRKKQPGQDCPHSCNLLCHPGPCPPCPAFTTKTCECGRTRHTVRCGQPVSVHCSNACENILNCGQHHCAELCHGGQCQPCRIILNQVCYCGSTSRDVLCGTDVGKSDGFGDFSCLKICGKDLKCGSHTCSQVCHPQPCQPCPRLPHLVRYCPCGQTPLSQLLEHGSNARKTCMDPVPSCGKVCGKPLACGSSDFIHTCEKLCHEGDCGPCSRTSVISCRCSFRTKELPCTSLKSEDATFMCDKRCNKKRLCGRHKCNEICCVDKEHKCPLICGRKLRCGLHRCEEPCHRGNCQTCWQASFDELTCHCGASVIYPPVPCGTRPPECTQTCARIHECDHPVYHSCHSEEKCPPCTFLTQKWCMGKHELRSNIPCHLVDISCGLPCSAMLPCGMHKCQRLCHKGECLVDEACKQPCTTPRGDCGHPCMAPCHPSLPCPVTACKAKVELQCECGRRKEMVICSEASGTYQRIVAISMASKITDMQLGDSVEISKLITKKEVQQARLQCDEECAALERRKRLAEAFDITDDSDPFNVRSSASKFSDSLKDDARKDLKFVSDVEKEMETLVEAVNKGKNNKKSHCFPPMNRDHRRIIHDLAQVYGLESISYDSEPKRNVVVTAVRGKSVCPPTTLTSVIERETQTRPPPPIPHHRHQADKAPGSSTLQKIVKEAVIDYFDVQD

SEQ ID NO: 14186 - protein, 818 aa, Mus musculus
MAEAPPVSGTFKFNTDAAEFIPQERKTSGLNCGTQRRLDSSRIGRRNYSSSPPCHLPRHIPYEDISAVHQHSYASGSKPKSPQGFFQSSNKSLKNHGLQNQPWQKARNEKHQNRNKKAQGLSEQTSDTSSLESVARSESGTNPREHSPSESEKEVVIADPRGAKPKKAAQLTYNYGRGPKAKGRLRSEWGNRMSPKSEDENTRPVAISHTDSSDASCRKPVVDPCVCRRNEQRRYPQKRPPWEVEGARPRPGRNPPKQESQRHINAGPKTNMSPIPKDNLRERPTKSACDTGNLAVVSKSSRRVNQEKTAVRRQDPQVLSPFPRGKQNHMLKNVETHTGSLIEQLTTEKYECMVCCELVQVTAPVWSCQSCFHVFHLNCIKKWARSPASHADGQSGWRCPACQNVSAHVPNTYTCFCGKVKNPEWSRNEIPHSCGEVCRKKQPGQDCPHSCNLLCHPGPCPPCPAFTTKTCECGRTRHTVRCGQPVSVHCSNACENILNCGQHHCAELCHGGQCQPCRIILNQVCYCGSTSRDVLCGTDVGKSDGFGDFSCLKICGKDLKCGSHTCSQVCHPQPCQPCPRLPHLVRYCPCGQTPLSQLLEHGSNARKTCMDPVPSCGKVCGKPLACGSSDFIHTCEKLCHEGDCGPCSRTSVISCRCSFRTKELPCTSLKSEDATFMCDKRCNKKRLCGRHKCNEICCVDKEHKCPLICGRKLRCGLHRCEEPCHRGNCQTCWQASFDELTCHCGASVIYPPVPCGTRPPECTQTCARIHECDHPVYHSCHSEEKCPPCTFLTQKWCMGKHEELTIKKLWTFKETLDF

SEQ ID NO: 14187 - protein, 818 aa, Mus musculus
MAEAPPVSGTFKFNTDAAEFIPQERKTSGLNCGTQRRLDSSRIGRRNYNSSPPCHLPRHIPYEDISAVHQHSYASGSKPKSPQGFFQSSNKSLKNHGLQNQPWQKARNEKHQNRNKKAQGLSEQTSDTSSLESVARSESGTNPREHSPSESEKEVVIADPRGAKPKKAAQLTYNYGRGPKAKGRLRSEWGNRMSPKSEDENTRPVAISHTDSSDASCRKPVVDPCVCRRNEQRRYPQKRPPWEVEGARPRPGRNPPKQESQRHINAGPKTNMSPIPKDNLRERPTKSACDTGNLAVVSKSSRRVNQEKTAVRRQDPQVLSPFPRGKQNHMLKNVETHTGSLIEQLTTEKYECMVCCELVQVTAPVWSCQSCFHVFHLNCIKKWARSPASHADGQSGWRCPACQNVSAHVPNTYTCFCGKVKNPEWSRNEIPHSCGEVCRKKQPGQDCPHSCNLLCHPGPCPPCPAFTTKTCECGRTRHTVRCGQPVSVHCSNACENILNCGQHHCAELCHGGQCQPCRIILNQVCYCGSTSRDVLCGTDVGKSDGFGDFSCLKICGKDLKCGSHTCSQVCHPQPCQPCPRLPHLVRYCPCGQTPLSQLLEHGSNARKTCMDPVPSCGKVCGKPLACGSSDFIHTCEKLCHEGDCGPCSRTSVISCRCSFRTKELPCTSLKSEDATFMCDKRCNKKRLCGRHKCNEICCVDKEHKCPLICGRKLRCGLHRCEEPCHRGNCQTCWQASFDELTCHCGASVIYPPVPCGTRPPECTQTCARIHECDHPVYHSCHSEEKCPPCTFLTQKWCMGKHEELTIKKLWTFKETLDF

SEQ ID NO: 14188 - protein, 842 aa, Mus musculus
MRPEIARLLTPHIYQDLENHPSVLKYEQIKGVSSNLFFVEHNFPEQEIQEGKSHQNQHEAHFVVELCQYLLCQEYLPSQITILTTYTGQLFCLRKLMPVKTFAGIKVHVVDKYQGEENDIILLSLVRSNQEGKVGFLQIPNRICVALSRAKKGMYCIGNMQMLAKVPLWSRIIHTLRENNQIGPSLRLCCQNHPETHTLVSKASDFQKVPEGGCSRPCEFRLACGHVCTRACHPYDSSHKEFQCMKPCQKVLCQDGHRCPNVCFQECQPCQVKVPKIILKCGHKQMVPCSMSESEFCCQEPCSKILRCGHRCSHLCGEDCVRLCSERVTVELKCGHSQLVKCGNVEDIKYGLPVKCTTKCDTTLDCGHPCPGSCHSCFEGRFHERCQQPCKRLLICSHKCQEPCTGECPPCQRTCQNRCVHSQCKKKCGELCSPCVEPCVWRCQHYQCTKLCSEPCNRPPCYVPCTKLLACGHPCIGLCGEPCPKKCRVCQPDEVTQIFFGFEDEPDARFVQLEDCSHIFEVQALDRFMNEQKDDEVAIKLKVCPICQVPIRKNLRYGTSIKQRLEEIEIVKEKIQGSAGEISTSQEQLKALLKSKTLFHQLRPEEFLILQEKLAQKNLSVKDLGLVENSIRFYDHLANLEGSLEKVHCGEQQSVRTRLEQVHEWLAKKRLSFSSQELSDLQSEIQRLTYLVNLLMRCKMAEKVKGSIAEEVSSIRNILEKTSKFTQEDEQLVQKKMDALKTTLPCSGLGISDEERVQIVTAMGVPRGHWFKCPNGHIYVITECGGAMQRSTCPECQEVIGGENHTLERSNHLASEMDGAQHPAWSNTANNFMNFEEIHRMM

SEQ ID NO: 14189 - protein, 598 aa, Mus musculus
HASGQKVLCQDGHRCPNVCFQECQPCQVKVPKIILKCGHKQMVPCSMSESEFCCQEPCSKILRCGHRCSHLCGEDCVRLCSERVTVELKCGHSQLVKCGNVEDIKYGLPVKCTTKCDTTLDCGHPCPGSCHSCFEGRFHERCQQPCKRLLICSHKCQEPCTGECPPCQRTCQNRCVHSQCKKKCGELCSPCVEPCVWRCQHYQCTKLCSEPCNRPPCYVPCTKLLACGHPCIGLCGEPCPKKCRVCQPDEVTQIFFGFEDEPDARFVQLEDCSHIFEVQALDRFMNEQKDDEVAIKLKVCPICQVPIRKNLRYGTSIKQRLEEIEIVKEKIQGSAGEISTSQEQLKALLKSKTLFHQLRPEEFLILQEKLAQKNLSVKDLGLVENSIRFYDHLANLEGSLEKVHCGEQQSVRTRLEQVHEWLAKKRLSFSSQELSDLQSEIQRLTYLVNLLMRCKMAEKVKGSIAEEVSSIRNILEKTSKFTQEDEQLVQKKMDALKTTLPCSGLGISDEERVQIVTAMGVPRGHWFKCPNGHIYVITECGGAMQRSTCPECQEVIGGENHTLERSNHLASEMDGAQHPAWSNTANNFMNFEEIHRMM

SEQ ID NO: 14190 - protein, 245 aa, Mus musculus
MLRCQNHTCMKECHKVTEVDSSTGKNKAGPECFHCEEGCSKSRPAGCPHPCVLPCHPGKCPPCVQMLRIKCHCKITSLYVECRKITTADVSEKNLLSCCKNQCPKELPCGHRCKEMCHPGECPFNCNQKVKLRCPCKRIKRELPCNKVRENQVSVECDATCKEMKRKASEVKEAEANAALEEEKRRQQAELEAFENRLKGRRKKSRKRDEVAVELSPWQKYKSYLLPVCAVVVAVLMWYIFHGVD

SEQ ID NO: 14191 - protein, 994 aa, Rattus norvegicus
MERSPKCRFEYKRSETPSRYYCYCGKVEDPPLDPWLVPHSCGQVCEREFKPSCGHKCLLLCHPGPCPPCPKMVTTTCYCKKAKPIPRRCSAKQWSCQLPCGRKLLCGQHSCENPCHAGNCQPCPRVSRQKCVCGKKVAERSCASPVWHCDQVCRKTLPCGNHTCEQVCHVGACGECPRSGKRSCPCQKSKFSLPCTEDVPTCGDSCDKILECGIHRCSQRCHRGPCETCRQEVEKQCRCGKHTKRMPCHKTYLCETKCVKMRDCQKHQCRRKNYTGTPRERCLPHTGGEYVRTGYRVHLSAGHCSCYPCPETVDVKCNCGNAKVTVPCGRERTTRPPKCKELCRECLGKHEVSPLPCHAVGPYSCKRLCGRMLNCQNHTCTKECHKVTEVDGCPGRHKAGPECLQCEEGCSKSRPAGCPHPCVLPCHPGKCPPCVQMLRIKCHCKITNLYVECRKITTADVSEKNLLSCCKNQCPKELPCGHRCKEMCHPGECPYNCNQKVKLRCPCKRIKRELPCNKIRGNQVSVECDAACKEMKRKASEIKEAEANAALEEEKRRQQAELEAFENRLKGRRKKNRKRDEVAVQLSPWQKYKSYLFPVGQDVLVFSEPAVPGPVRYCTVIMAAGRNSCWLRGEPLQGWFRLGLGGTEETASSSGCKHWGLVQLRGTLATGMKMLQKFEKNGGMPGGTEHLLQGQLPQLHQGAELGKETHLRLQERTPICRLLNSGPQVELADVSPGLWILRQGPCEWRSVSEHRLLSGSLSALQLVPKRTVLHSRGLESEARTVMGRVSFNVRVSSVRRARCSCPGRCYLSCRVPPTTALHALNGFGRAGVLGETAGGTVGLGPSGTRGFLSGSKFQASGSLKDCFGAPPAPDGLGVRWLPPGSLLRKAGTGPASAGRERACLGRRPEVLSYQVLLELSAGLLCRSSRGGRMIVGALCAASQFWGPSSLFPEGVSIATRDFEVLLWGIWNRESYKLMEDSIIVSVPSWLVLQA

SEQ ID NO: 14192 - protein, 744 aa, Anopheles gambiae str. PEST
QEKFNQVQRQHAETAKKYAAEYVSSEEEEEGEDASGQEAGAAASNDAATRNILGDVLKNYHGAEADVGKTQEYLQHLLESRNAVCLICIETVKRADRIWSCAACYTFFHLMCIQRWANDSMSMKRINHEQQEGYYNNRGEYIPKPALDVHWDCPKCRREYEPEAIPRHYECFCGKEREPNAHPWLIPHSCGEPCEKQLNPACGHTCRLLCHPGPCPPCPQTVNVSCRCGSSPVKTIRCAQKSWTCARKCKRKLACGIHECGAQCHDAGQCPPCQNRSKQPCLCGAQTKEVNCHESRWQCDSVCNKPFPCGLHHCESVCHAGPCGPSICEGRCKRTRTCGKHQCNRKCCDGQCPPCDRVCGKTLPCGKHKCSSLCHQGPCYPCNQKSTIKCRCGGTVAEVACGRERKANAPKCKLPCRAASKCHHPNTHTCHPGDCPACVLPCGQPNDTTNCEHPCRAKCHDAVQVVTREKNFKPVGPWDVPKETVEVKTLPHPACTVKVPVMCLGGHETADWPCSSSKPSSCGRQCGRLLKCGVHRCPLACHKVTHRASTTQDSRCEPCSAGCTLPRPEGCVHSCALRCHKPPCDPCLVSIKSQCYCGLTQVFYKCHEFYPTGMEGKEPEELAELARRRESFLSCGQKCIKNFPCGHRCTSICHPGRCPNPEQCSKKVKVACKCGQRKVEVSCKVARATPTLDCDQQCEAVRAQKQEEQERKEREARAEEELQNQRELEEYERKFGKRKHRERK

SEQ ID NO: 14193 - protein, 1015 aa, Anopheles gambiae str. PEST
MATSDGNAASSGSSNTFDDFISQFNARVQIQQQLQYLRTHHTTNTNEHHQQQPATFQYYGFTSNLTPTAAEFVPRKYQTEANDGNGGGAPPQTMVSMATTMPAGSVRPAAVADNEDDYDGDDRENIHRAGSSNHYGGGGGTGVGGAGGSRSSGGGRPRRNESLKPRNGWHTRDDRPVARQGKWKANQQTAGSGRFRPHDDDYAAGDAPPRNGETNSRRNGQRQWGNRTIQPDPDERRTNGQSKGAGAAPQPESPSATPLSKCSQREKLMREIECYRLECLVCCEIVKPMQSTWSCGNCYHILHLGCVTKWATSSQSEDGSGWRCPACQHVSKKVPREYFCFCGKQKNPAYNREDLAHSCGEVCGRRDVCEHACTLLCHPGPCPPCQASVQRRCGCGRLEKTVQCCQKEELLCEAVCEKPLNCGLHRCGRQCHAGSCDTCTEQVQHSCHCGKGERSVVCSVENLAVQRYGCGKACERPLGCGNHRCARLCHEGECEACADAPDRVRSCPCGREPIVPGSRQSCLDPVPTCSGPCGRKLACGPPGANHCCEAACHRGACPPCKKSTTVKCRCGGMDQPMRCKELTTRADDARCKKRCVRRRSCAKHKCNQVCCIDLDHICPKTCSLPLSCGRHRCDKPCHKGNCRPCHRVSFDELACDCGANVIYPPVPCGTRKPACDRPCGRRHACDHPALHNCHAEAECPPCVVLTTKYCHGRHEQRKTIPCYQESFSCGMPCAKPLACGRHKCIRACHEDECAPEGAAGVCKQSCTRTREACPHPCNAPCHEGECPDVPCKIVVEVTCECGNRKQQRTCHDFSKEYRRIATAQLASSVQEMQRGGSVELSDILGPVRPKNNKTLECNEECRMLERNRRLAIALQIRNPDLPSKLQPNYSETLRAYAKKDPALVQMIHDKLTELVKLAKESKQKSRSYSFPVMNREKRAIVHEMCHMFGVESVAYDAEPNRNVVATADRFTSWLPSMSLMEVLQRENGQRRIVVPSLNAWGKTTLTGAAASSSSK

SEQ ID NO: 14194 - protein, 251 aa, Enchytraeus buchholzi
MASHAHAEAHCGCGTECHCPKGSCGSGCGTSTTAGSCGVAGCPCGSHCKCEKGECRRGCSKGCCTPKCGVEGCPCGSQCKCEKGECKKGCKEGCCAPKCGVAGCSCGSGCKCEKGECKPGCTKRCCGTKCGVEDCPCGPSCKCEKGDCKVNCSKGCCTPKCGVVGCPCGSQCTCEKGSCKKGCSKGCCTPKCGMQDCPCGSHCKCEKGSCEKGCTQGCCAPKCDNVNCKCGSSCRCEKGTCTPSCAQTCCA

SEQ ID NO: 14195 - protein, 820 aa, Arabidopsis thaliana
MTNMAGTATTEFRWKSPPQPPSQEQPISDSDSDSGSDSENHQHRHNDLSNSIFEAYLDCHSSSSPSSIDLAKIQSFLASSSSGAVSCLICLERIKRTDPTWSCTSSCFAVFHLFCIQSWARQCLDLQAARAVTRPSSNPTEPEAVWNCPKCRSSYQKSKIPRRYLCYCGKEEDPPADNPWILPHSCGEVCERPLSNNCGHCCLLLCHPGPCASCPKLVKAKCFCGGVEDVRRCGHKQFSCGDVCERVLDCNIHNCREICHDGECPPCRERAVYKCSCGKVKEEKDCCERVFRCEASCENMLNCGKHVCERGCHAGECGLCPYQGKRSCPCGKRFYQGLSCDVVAPLCGGTCDKVLGCGYHRCPERCHRGPCLETCRIVVTKSCRCGVTKKQIWDDMTNKIVYCKISTHARGMTLFVACSLQRSMCSLSNNGNNILCLWCHGPRPPPNREFILKPTKKMLHIQAESTPGSPCPRCPEPVWRPCVGHHLAAEKRMICSDRTQFACDNLCGNPLPCGNHYCSYFCHALDIRSSSLDKRSESCEKCDLRCQKERTPRCQHPCPRRCHPEDCPPCKTLVKRSCHCGAMVHAFECIYYNTMSEKDQMKARSCRGPCHRKLPNCTHLCPEICHPGQCPLPEKCGKKVSICQFISIWDAVSVTSEILLVSILSWIKVVVRCKCLTLKKEWVCQDVQAAHRATGSDPKEVPKNQFGVGLLPCDSNCKSKLQVAESVLTQRNVKEIEEKEEPSGKNASKRRKRRGRGQDIQETTRLQKLAVTTKRILMVVMLVAMLAAVSYYGYKGLLWLSDWMNEVEEQRQKSRRYPRI

SEQ ID NO: 14196 - protein, 1188 aa, Arabidopsis thaliana
MSFQVRRDRSDDRSHRFNHQQTWIPRNSSTSSVVVNEPLLPPNTDRNSETLDAGSASRPVYLQRQHNASGPPSYNHHQRSSNIGPPPPNQHRRYNAPDNQHQRSDNIGPPQPNQHRRYNAPDNQHQRSDNSGPPQPYRHRRNNAPENQHQRSDNIGPPPPNRQRRNNASGTLPDNRQRVASRTRPVNQGKRVAKEENVVLTDPNLPQLVQELQEKLVKSSIECMICYDKVGRSANIWSCSSCYSIFHINCIKRWARAPTSVDLLAEKNQGDNWRCPGCQSVQLTSSKEISYRCFCGKRRDPPSDPYLTPHSCGEPCGKPLEKEFAPAETTEEDLCPHVCVLQCHPGPCPPCKAFAPPRSCPCGKKMVTTRCSERRSDLVCGQRCDKLLSCGRHQCERTCHVGPCDPCQVLVNATCFCKKKVETVICGDMNVKGELKAEDGVYSCSFNCGKPLGCGNHFCSEVCHPGPCGDCDLLPSRVKTCYCGNTRLEEQIRQSCLDPIPSCSNVCRKLLPCRLHTCNEMCHAGDCPPCLVQVNQKCRCGSTSRAVECYITTSSEAEKFVCAKPCGRKKNCGRHRCSERCCPLLNGKKNDLSGDWDPHVCQIPCQKKLRCGQHSCESLCHSGHCPPCLEMIFTDLTCACGRTSIPPPLSCGTPVPSCQLPCPIPQPCGHSDTHGCHFGDCPPCSTPVEKKCVGGHVVLRNIPCGLKDIRCTKICGKTRRCGMHACARTCHPEPCDSFNESEAGMRVTCRQKCGAPRTDCRHTCAALCHPSAPCPDLRCEFSVTITCSCGRITATVPCDAGGRSANGSNVYCAAYDEASVLQKLPAPLQPVESSGNRIPLGQRKLSCDDECAKLERKRVLQDAFDITPPNLEALHFSENSAMTEIISDLYRRDPKWVLAVEERCKFLVLGKARGSTSALKVHIFCPMQKDKRDTVRLIAERWKLGVSNAGWEPKRFTVVHVTAKSKPPTRIIGARGGAISIGGPHPPFYDSLVDMDPGLVVSFLDLPREANISALVLRFGGECELVWLNDKNALAVFHDHARAATAMRRLEHGSVYHGAVVVQSGGQSPSLNNVWGKLPGSSAWDVDKGNPWRRAVIQESDDSWGAEDSPIGGSSTDAQASALRSAKSNSPIVTSVNRWSVLEPKKASTSTLEPIAQIEESSSSKTTGKQPVEGSGEEVVDDWEKVCE

SEQ ID NO: 14197 - protein, 695 aa, Glycine max
  unsure (1)..(695): unsure at all Xaa locations
XHASVHLFCIQSWARQASDLAAARAATRLPISPATASASALWNCPKCRSEYPKSHIPKTYFCFCGKIENPPNDPWILPHSCGEVCGRPLKHSCGHHCLLLCHPGPCPSCPKLVKVRCFCGCLEDVRRCGFKEFSCNKPCSKFLDCGVHRCIELCHPGACPPCRTRGVHACQCAKVKEERECCDRVFQCGNPCEKRLGCGKHVCERGCHSGKCGECPLKGKRTCPCGKRVYEGMPCDAPVQLCGATCDKMLPCGYHRCPERCHRGQCVETCRVVVKKSCRCGSLKKDVMAIALPALRYAAGSFDVRTINALLHAXXRALCSLPNNGDNFMCMWCHGAKPPPNPEFTLKPKKKKIIQQSESVPGTPCPPCPELVWRSCVGKHIGAERMMVCSDKSQFSCENLCGNPLPCGNHYCTKTCHALENQLQXXSQPCEDCYLSCQKRXPACPHHCPRRCHPGDCPPCKVLIKRSCHCGAMVHVFECLYYNGLSAKGQETVRSCGGPCHRKLPNCTHLCPETCHSGQCTNAEKCCKKVTVRCKCHTLKKEWVCQDVQAAYHLAGCHPRDIPKNQFGIGLIPCNSDCNSKVQVVESELQLRKTRVTEVQEPDVEKSVRKRRKRREQVLESKETSKLQKIISRMKRLLLFVFILVILLAATYYGYKGLLWLNDWMNEVDERRQRYSRIKXLFISLIAPFIHHFFH

SEQ ID NO: 14198 - protein, 999 aa, Glycine max
  unsure (1)..(999): unsure at all Xaa locations
XARAARAARAARAILQESNLPQLLQEIQDKLVKGAVECMICYDMVRRSAPIWSCSGCFSIFHLTCIKKWARAPISVDLSVEKNQGGFNWRCPGCQSVQLTSSKDIRYLCFCGKRPDPPSDLYLMPHSCGEPCGKPLERDLQGDKELLCPHLCVLQCHPGPCPPCKAFAPPRLCPCGKKNITTRCSDRQSVLTCGQRCQKLLQCGRHRCQQICHLGPCHPCQVPINASCFCAQKMEVILCGEMAVKGEIRADGGVFSCGSTCQKKLNCGNHICIETCHPGSCGDCELLPSRIKTCCCGKTRLEEKRHSCLDPIPTCSQVCGKYLPCGIHHCEEPCHAGDCSPCLVLVSQKCRCGSTSRTVECCKTKMENEKFTCERPCGQKKNCGRHRCSERCCPLSNPNNILNADWDPHFCQLPCGKKLRCGQHACESLCHSGHCPPCLETIFTDLTCACGKTSIPPPLPCGTPPPSCQLPCSVPQPCSHPASHSCHFGDCPPCSMPIAKECIGGHVVLRNIPCGSKDIKCNKLCGKTRQCGLHACGRTCHLPPCDNLSAVPGIRASCGQTCGAPRRDCRHTCTAPCHPSTPCPDTRCKFPVTITCSCGRITENVPCDAGGSCANYDAXYCTXEASIIQKLPVLLQPVAANGKKVPLGQRKLMCNDDCAKLERKRVLADAFEITAPNLDSLHFGENSVASELLADMLRRDSKWVLSVEERCKFLVLGKSRGNAHGPKVHVFCPMLKDKRDAVRVIAERWKLAVNAAGREPKHFVVVHVTPKSRAPARVLGFKGTTTVNVPLPPAFDPLVDMDPRLVVSFIDLPMDADISALVLRFGGECELVWLNDKNALAVFNDPARAATAMRRLDHGTVYQGAVVVVVPXMSGHQXPSATNAWGGSGTMKGGALAALKSNPWKKDVIQEPGWREDAWGDEEWATGSANVXXLPIQKKEARISASVNPWSVLNQESSSSSSVEPLKLMEHSESSVITKLEPRDGGSSDVVDDWEKACE

SEQ ID NO: 14199 - protein, 316 aa, Glycine max
  unsure (1)..(316): unsure at all Xaa locations
PRVRKKSCRCGSLKKDXLACERKCQRMRDCGRHACKRRCCDGDCPPCSEPHKCHYGACHPCRLPCAKEYQCGHTCKLRCHGAKPPPNPEFTLKPKKKKIIQQSESIPGTPCPPCPELVWRSCVGKHIGAERMMVCSDNHSSXCEIYVVILYHVGIVIEKVNLPYISNXXDWXXRFMVSDAKLLTPKLYCFSMFSLNXEEVCFYXSALQWXCLLXXLLKVQEPDVEXXSVRKRRKRREQVLESKETSKLQKIISRMKRLLLFVFILVILLAATYYGYKGLLWLNDWMNEVDERRQRYSRIKXLFISLIAPFIHHFFH

SEQ ID NO: 14200 - protein, 708 aa, Oryza sativa (japonica cultivar-group); identical to SEQ ID NO: 457

SEQ ID NO: 14201 - protein, 378 aa, Triticum aestivum
  unsure (1)..(378): unsure at all Xaa locations
MPSSYAAAAAAASSSRKPAPFTTATATTRKPAPLXXAPAPPPSNPSHVSDSDPSSYSSSGEETDLSACDPATASVLSTYLSVAGXNGADLSKVGIFLNSAARRRSPPCLICLDPIRPSDPVWSCSASCFALLHLPCIQSWAHQSASAAPSPTWGCPKCRVAYPKSQTPTSYHCFCSKTEDPPADPWILPHSCGDVCGRRLNSNPDSGCEHTCLLLCHPGPCPPCPAVVPNARCFCGAHRRPRRCAHQRYSCKGKCNKRLSCELHRCPVDCHDGPCPPCAVRGNHKCECGETMVERLCSERVFQCKRECSGMLECGKHMCERGCHGGKCGECPLRGQRTCPCGKKDYSRLECYVEAATCGSTCEKVLGCGLHKFPERCX

SEQ ID NO: 14202 - protein, 167 aa, Triticum aestivum
  unsure (1)..(167): unsure at all Xaa locations
NYQIAPICAQKYVTLVNVRCACNTLKKEWVCQDVLKEYRRSXGRDPKEVAKGQFGVGLIACGGDCVKKVNVPAAELHQRKVQENKNPAAEVANVPKRRKKRDRGAQEPVQVSMWQRIKXXYLVVITALAGLVVLGLVIWKGVYQISDWMNEMEEQKARERLLRAGRL

SEQ ID NO: 14203 - protein, 184 aa, Triticum aestivum
  unsure (1)..(184): unsure at all Xaa locations
XGVFSCSEVCSHNLACGNHACQDVCHPGPCGECELLPGKVTTCHCGKTRLQEKRASCLDPIPTCDKVCDKRLPCGVHRCKVACHEGECPPCLVRVEQRCRCGSSGQMVECYKVLKEEFRCNKPCGRKKNCGRHRCSELCCPLSKPFAQHQGDSMDPHFCQIPCGKKLRCGQHGCQHLCHSGHCX

SEQ ID NO: 14204 - protein, 144 aa, Triticum aestivum
  unsure (1)..(144): unsure at all Xaa locations
XLPCHQDLTCXRKCQRLRACXRHACKRRCCVGDCPPCAETCDRRLRCGNHKCLSPCHRGACSPCPLMKTISCFCGKTYFEVPXCGTEKNQKPPKCSKRCNIDRAXCRHKLECRPHKCHYGACPPCKLXLXGNNFXCGHKCKERC

SEQ ID NO: 14205 - protein, 262 aa, Zea mays
  unsure (1)..(262): unsure at all Xaa locations
MPSSYAAAAAGSSSRKPNRTSSAAAPTLRPPAPSPSPAPAPLAVNPSVISDSDPSSYSSSSADEADFAASDSATASVVSAYLSVAGEGADLSKVGIFLSSAARRRSPPCLICFDPIRPSDPVWSCSSSCFAILHLPCIQSWAHQSASGPAVPCPTWGCPKCRFAYPKSEIPSSYVCFCSKTIDPAPDPWILPHSCGDVCGRRLDANLDSGCEHTCLLLCHPGPCPPCPXXVVPKATCFCGAHRXPRRCAHQRYSLXXKCTNX

SEQ ID NO: 14206 - protein, 194 aa, Zea mays
  unsure (1)..(194): unsure at all Xaa locations
XGRVCSERIFQCKRECGGMLDCGKHKCERGCHGGKCGECPLRGRRTCPCGKKNYPRLECDAEAATCGSTCEKVLGCGRHRCPERCHRGPCDGTCRLVVTKACRCGGLKKEVPCYQELTCERKCQRLRNCGRHACKRRCCAGDCPPCSEPHKCHYGACPPCKLICXERFPCXHTCKERCHGPISPPTXEXTLKPX

SEQ ID NO: 14207 - protein, 527 aa, Zea mays
  unsure (1)..(527): unsure at all Xaa locations
XACLQRRPLGDMGLPQLVQEIQDKLSRGAVECMICYEMVRRSAAIWSCGSCFSIFHLPCIRKWVRYPASAAAPAAEPASPSWRCPGCQFVYATPARELTYSCFCGRRRDPPNDHFLTPHSCGEPCSKPLDRAEPPGAKGEDVDATRCPHVCVLQCHPGPCPPCKAFAPDRPCPCGKQIIVRRCADRSTPVTCGRPCEQMLPCKRHRCKKVCHTGSCGDCAVLISVCCFCRNKNETLLCGDLMVKGELSEEDGVFSCNEVCGRTLACGNHACKDMCHPGPCGECELMPRKVSTCHCGKTRLQERRASCLDAIPTCDKICDKKLPCGVHKCKVNCHEGECPPCLVLVEQKCRCGSSGQMVECXTSSQXEEFRCKKPCGLKKNCGRHRCSEICCPLSRKVAHLEGGNWDPHLCQISCGKKLRCGQHACQLLCHSGHCPPCLETIFTDLTCACGRTSLLPPLPCGTPTPSCPHQCSVPQPCGHPASHSCHFGDCPPCIVPVMRECIGGHVMLKNIPCXSKDIRCTQPCGKE

SEQ ID NO: 14208 - protein, 291 aa, Zea mays
  unsure (1)..(291): unsure at all Xaa locations
XTRPLLCGNHYCTKSCHVLEVPLNHLNALAMPCEQCNLPCQRVREPPCSHPCPLPCHLNDCPSCKVLVKRPCHCGAMVHAFECVFYNILNAKDQIKIRSCGGPCHRKLPNCPHLCSEVCHPGVCPSVDQCMKKVNTRCACSTLKQEWRCQDVLKEYRKSGRDPKEVPKSQFGVGLLACGEDCKKKLKAPDSELHLRKSQENKIPAVEVVNAPKRRKRRDRGQEVXXISKFQEVKTFVLRALLIILLSIIVAAGLYLLWKGIFWLSDWMNEMEEQRASQRYPEGCNVVKKKR

SEQ ID NO: 14209 - protein, 186 aa, Zea mays
  unsure (1)..(186): unsure at all Xaa locations
XLICFDPIRPSDSEWTCSLLCFALLHLPCMQXWAPRSGPVEPCPTWGCPKCRLVYPKGEIHSYYVMIMXSRTVKRVSHPWILPHCCGDVCGRRLDANVEYGCEHICLVVGHPWLXTPCHVVDLKATXSCXSDRQPLCXGHNRYSCGGKCKRRISCGLHHCTDNCHDGPCPTGAVLSRHKCECAEIX

SEQ ID NO: 14210 - protein, 1077 aa, Schizosaccharomyces pombe
METSKNPSDLPKKPANVKKNRRRFQKSQKKSISPSSGSELPNFKTTISQNNEEVKTSLKEDSSKFHPSASAPIFVPTSSVQLNVSKNNGHKASDIVDAVSSKDEELRKHAKGEGKRSKNRKRSSKHSEKQAVDLKSSNSSQETSSSKGSVNNKSERSREAKSRMPKNSKEIKKGLDLSKLDMTSRMIVELKNRLYECSVCTDTINPSTSIWSCGTCYHVFHLSCIRKWCKNSIEQRNEDAWRCPYCQSNQTETSLHYLCWCGKQEKPEFVKNLVPHSCGDPCGKTRGQDCEHPCPLLCHPGPCPPCTATVEKFCLCGKESIHARCSNISKVNTEPFRCENVCDELLPCGEHTCKKRCHSGLCGACFEPINAKCYCGLHSKTYPCSSLPSPSISKKDENGSVKEWFGYYSCNNPCTLFFDCGLHKCSKTCHPISETRAHCPFATDVLTKCPCGKEDISFLLKGHERKSCSDPIPTCENICGKLLSCGHRCKYKCHLGSCGTCSETLTIPCRCTANEVQVTCEQLQNGFIPTCERLCTILLSCGRHQCNKKCCSGYSKAQTRLARRPKGAKLRYHLLTEEFEEEHICFRPCNKKLSCGNHFCQHMCHRGPCPRCLEASFEELPCTCGRTRLYPPVACGTPIPDCPYLCVLPKSCHHPQVKHNCHPTSEPCPPCPYFVKKRCLCGKHILENQPCYRENVRCGELCNKLLSCKTHFCEKLCHPDGECESSCKKECGKRRMYCEHVCQSPCHAGHPCDERIPCKAPLEVSCECGRIRKKVTCDASYDNPDPQHKVSCTLECSQQQRNKLFAEALNIKTDRRSNDVAQYTKSLLVFYGKHSDFADEVESLLRNFVNNKASSFRFPSMRREQRAFVHMFAKLLGLESVSFDPEPKRNVMVYNKGEAKLPNMLLKEANLYHLQHPEIPLKPDSLLGPEEENATASHIDGSSNASDSGYNAFVLKELLKEVNDESAIFSVLDDIVDFNHLTWSILFGENYIILKPLNTDLIVNKTGKLVALRPLVNRRLADAGIASRCEICEINDKNEIVKTRSQRIHSKKKAFLSLVPDKSIGVINRYKELATEL

SEQ ID NO: 14211 - protein, 965 aa, Saccharomyces cerevisiae
MTEHESLGLEQNQDGGDTYRHHNLSDGCISSVEDANEQPSSYEEESDDDMQYYERAIQEISSGDSYVCMICTVEMDYTCQMFACKRCYRVFDYGCIREWALKSTEKTVDRIWKCPNCYYVSKRVPVKNRPTCWCGKVVNPDPNPLDPNSCGQTCNASTCMHGCSKICHLGPHPECTRMVEIMCHCGKHSKSIFCYQSKVMKKNFNCQEVCGLPLSCSIHTCKKKCHPGLCGPCPEMIISKDSPKKQIKCYCGNHTRANIKCSETKFPKSGKSSKDENGNRWIGVFACADNRVVDYSCRKHSFIESCISPPTINGEKACPFLPSSLKTCPCGRTALEELTKPRKHCDDPIPTCDSRCGKPLKCGKHSCPFTCHDKACMEPCLQIDSVKCACEQSTFSVPCGFQGRPRCNIKCESLMSCRRHRCTDRCCSGRPSAIRRKKNLFRTQDLLDESLVEAKHICLKPCNLTLSCGIHKCQRKCHPGKCPPCLESDSNDLVCPCGNTVVPAPVRCGTKLPTCNHPCIKVVRGESTCGHKPMPHTCHSLDVSCPPCTETVFKPCKCGKKTKVRTVCFQTDVSCGIKCGIPLSYCYHTCQKTCHLPGNCQKVCKQTCGQKRLNCNHECPKPCHGKTECPDLPCATLVKIYCKCGRIKKSVTCGAKSDRVSVTESSVLDCNEECEALKRLKELKEAFGIKEETNNFTSNELDALKKLVSVATTFEELQLPFTEAALSVYSKQERWCSQIEAILNKLMDDKTRSSLHFKPMRPPQRHFIRELAKAYGLYSESQDREPMRSVFIKKEDNGASNKPVLSLAEAYPLYESFKQLQKERKAQEFQARTTAKLINFEVQDTEPKVEVAKKNGFLVQNLVAGNTAEDLRRFFEPHLKHTLVVNPQYLILDDGKTALVYPENYETASVNTERDMELLVGHFDFMAKEAFLADSISLCSTEEELERRLDTPVIQEDSPVMDNNT

SEQ ID NO: 14212 - protein, 909 aa, Neurospora crassa
MADVQPATHEGGSDRGGRGGRGGRGRGRGRGGRPRRGHHGSERPNPGGDASQPVQSAESSRNLLETANANVPPPLVLTPDAPSGHSREEGEGRRRRGGGGGGPRRGRGVSSAQRSIVVSHRGRAPPPGTAAAPSTAEEHDTASGAGLSADAPAFVPGQPLAVPTQQPRAAAAKRQKEHRPAPSNTSKSSAPDLTTRIHEDIASGLYECVICTNELTRNTRIWSCSVCWTVTHLSHECGERCCPGEKKAAERRKKKNRGPNENYEAEHICLQVCGRTLKCGQHTCQQLCHKGQCPSCVEAVFDEISCSCGRTVLYPPQPCGTRPPECRFPCRRRQPCGHPTVPHSCHPDDTPCPKCPSLMDKLCICGKEIMKNRPCWNNEVHCGLPCGKKLKCGSHVCKKTCHKPGDCEDAGIPGSHCTQACGKVRKSCDHTCAEQCHAPYPCKEDKPCQSKTFITCPCQNRKQEVRCMATMLSPSSARESSLKCDDECLRLQRNRKLANALKIDDTHTDDHIPYSDKTLKMFKENVNWSQTQEREFRVFASSPDEKRLRFKPMPSSQRAFLHSLAEDFGLDSESQDPEPHRHVCIFKTPRFVAAPSKTLAQCARIAKPTASLLRPAAAAPVVAPPKQESFNALLLKEPRFGLTIEELDQALAADIRSVAKSGLTAVGFTTNFLPTEEILIKAVPASTAAAIANSPIAPTPQAIESALMTLKSAVTKTVSLSKLATGGVVLCHADDSLNVVRREAESAKGGAGGWNAVASRGSWRRLGGGSKTSTAEPEKAAAPLTRSFVTLRKIMEKKPVVEAKKRPEVVEEDWEAAAEKEEEQEQEKEKSGTSGSDSEGEAEGQSKIASVDGDVQEGNGVTSDTERSVDTAVHEEKEPEQSLVDGGSSSASGEQAETETGTATATMIA

SEQ ID NO: 14213 - protein, 1119 aa, Caenorhabditis elegans [sequence omitted]

SEQ ID NO: 14214 - protein, 840 aa, Drosophila melanogaster
MEKFNKAQAKNLAAAQKLVDTYASSSEDEGELDENHILELLYKNYKPSDNAGSSKEAARTSTFLENTLHSGAATCLICIGSIRRVEAIWSCESCYCFFHLKCIQRWANDSMMQMKVKAAEQQNGQGHYNHLGEFVPPKRQKSLHWCCPKCRRDYQPADKPTQYNCFCGKEVNPENQPFLVPHSCGEHCGKLLQPKCGHDCKLLCHPGPCPPCAQQAQVSCLCGKSSPRSVRCIDKQWTCQQTCKELLACGKHKCNQVCHQPGKCPPCTSKSLQPCECQRESKMVNCSDRKWKCQNVCGAPFACGLHICEKVCHAGPCGDGECPLQVRSCPCGKNTQVRPCNETEETCGDTCQKLLSCGQHTCTQRCHRGPCISCPIRTKKKCRCGLHEKELPCSKEFACETKCKQMRDCGKHACNRKCCGDQCPPCEKICGKQLSCNKHKCQSVCHNGPCYPCKLESQINCRCGKTKKSVPCGRERSARIVCLELCRITPKCHHAIKHRCHKGDCPPCGQVCGLPNDTSKCGHICKARCHEAVRVNKPKEARPQAKKYEYKALPHPRCEEGVIVTCIGGHEVATWPCWNSKPTSCQRSCARQLKCGNHKCSLVCHFVPLPQDMSAQTGCANCEEGCTVPRPTGCIHACPKGCHPPPCAPCNFVIKTKCHCGLNQLVYKCNEYYDETGSVQEIIERREKLRSCGNRCLKNYPCGHRCTAICHTGKCPNPELCRKKVRIFCACKRLKQEIACDKHRAGQTFLDCDSNCKAEQIRVQAAEQLQLEQKRRDEEERNRLELEKFEAKFGKRKHKERKTVGSGPAKTKIDWQRRAIYAVSILTVVGAIVVAFYADS

SEQ ID NO: 14215 - protein, 1106 aa, Drosophila melanogaster
MAEYWQQLTNGPGEAGPGNESSAMVDCNGGHESAAVGGSCNRHSNNNYVNFNQFIMQHNLGGGAPSNATSTMQHPVGSSYTNFSLGGGGGAFGLNPPVASASTSHFANVSHQSPNFYSQAMIPTYQNGDGIARVTVTSSYGSVNPSNSNFSSFYTPFGNNPFDFSASKLQASAPEFVPNFAKLSLEETPAAATTNGNSTASLETAINETRPRTLRAQEPAERGANNQCSNHNYERERERERDRDRDRERDRDRDRDRDRDRDRDRDRDSRPGNTRQQRRSDYRDDREDRYERSDRRRPQKQQRYDNHRSNKRRDDWNRNRDRINGFPRAVDDLDTSNESAHPSPEKQSQLQQISPRRGPPLPPADNEKLSQREKLVRDIEQRRLECLVCVEAIKSHQPTWSCRNCYHMLHLKCTITWASSSKSEVGWRCPACQNVLQDLPRDYLCFCGKLKNPPVSRTELAHSCGEVCCRIEGCSHACTLLCHPGPCPPCQANVVRSCGCGRSTKTMQCAMKEEVLCGEICDKLLNCGEHRCQAECHSGKCAACSEQVVQQCHCGKQERKVPCTRESQDKRTYSCKDSCGQPLPCGHHKCKDSCHAGSCRPCKLSPEQITSCPCGKIPVPAGQRSSCLDPIPTCEGICSRTLRCGKPAHPHQCGSKCHLGQCPPCPKQTGVKCRCGHMDQMIKCRQLCNRADDARCKRRCTKKRSCGKHKCNVECCIDIDHDCPLPCNRTLSCGKHKCDQPCHRGNCPPCYRSSFEELYCECGAEVIYPPVPCGTKKPICKLPSSRIHPCDHPPQHNCHSGPTCPPCMIFTTKLCHGNHDWRKTIPCSQPNFSCGMACGKPLPCGGHKCIKPCHEGPCQSAGEICRQSCTKPRPTCGHKCAAACHEGACPETPCKELVEVQCECGNRKQNRSCQELAREHSRIATIQLASSMAEMSRGNYMELSEILAPAKKSNKTLDCNDECRLLERNRRLAAALSSGNSDTKQKCLTKYSEFVRGFAKKNPALTKSVYETLTDLVKLAKESKQRSRSHSFPTMNREKRQLVHELCEVFGIESVSYDKEPNRNVVATAHKDRCWFPATSIMEVLARESGQRRVPVPSNNAWGLKK

SEQ ID NO: 14216 - protein, 1099 aa, Drosophila melanogaster
MAEYWQQLTNGAGEAGPGNESSAMADCNGGHESAAVGGSCNRHSNNNYVNFNQFIMQHNLGGGAPSNATSTMQHPVGSSYTNFSLGGGGGAFGLNPPVASASTSHFANFYSQAMIPTYQNGDGIARVTVTSSYGSVNPSNSNFSSFYTPFGNNPFDFSASKLQASAPEFVPNFAKLSLEETPAAATTNGNSTASLETAINETRPRTLRAQEPAERGANNQCSNHNYERERERERDRDRDRERDRDRDRDRDRDRDRDRDRDSRPGNTRQQRRSDYRDDREDRYERSDRRRPQKQQRYDNHRSNKRRDDWNRNRDRINGFPRAVDDLDTSNESAHPSPEKQSQLQQISPRRGPPLPPADNEKLSQREKLVRDIEQRRLECLVCVEAIKSHQPTWSCRNCYHMLHLKCTITWASSSKSEVGWRCPACQNVLQDLPRDYLCFCGKLKNPPVSRTELAHSCGEVCCRIEGCSHACTLLCHPGPCPPCQANVVRSCGCGRSTKTMQCAMKEEVLCGEICDKLLNCGEHRCQAECHSGKCAACSEQVVQQCHCGKQERKVPCTRESQDKRTYSCKDSCGQPLPCGHHKCKDSCHAGSCRPCKLSPEQITSCPCGKMPVPAGQRSSCLDPIPTCEGICSRTLRCGKPAHPHQCGSKCHLGQCPPCPKQTGVKCRCGHMDQMIKCRQLCNRADDARCKRRCTKKRSCGKHKCNVECCIDIDHDCPLPCNRTLSCGKHKCDQPCHRGNCPPCYRSSFEELYCECGAEVIYPPVPCGTKKPICKLPCSRIHPCDHPPQHNCHSGPTCPPCMIFTTKLCHGNHELRKTIPCSQPNFSCGMACGKPLPCGGHKCIKPCHEGPCQSAGEICRQSCTKPRPTCGHKCAAACHEGACPETPCKELVEVQCECGNRKQNRSCQELAREHSRIATIQLASSMAEMSRGNYMELSEILAPAKKSNKTLDCNDECRLLERNRRLAAALSSGNSDTKQKCLTKYSEFVRGFAKKNPALTKSVYETLTDLVKLAKESKQRSRSHSFPTMNREKRQLVHELCEVFGIESVSYDKEPNRNVVATAHKDRCWFPATSIMEVLARESGQRRVPVPSNNAWGLKK

SEQ ID NO: 14217 - protein, 1106 aa, Drosophila melanogaster [sequence omitted]

SEQ ID NO: 14218 - protein, 733 aa, Homo sapiens
MEASWRQVAGGRGRSRGRATAAPSGNGVHLRGAGGGREKGSVGAVPSGTSPGGVATTAAAGSRHSPAGSQALQTTAASELMSQKKFEEIKKANQAAARKLVEEQFSSSSEEGDEDFEGKQGKILANTFITYTTQTDGDTRELERTKQYVNEAFQAGAMTCLICIASVKRNQAVWSCSGCFCIFHMPCIQKWAKDSQFLVSSVTDDDFGKKDCPWPCPKCRFEYKRSETPSRYYCYCGKVEDPPLDPWLVPHSCGQVCEREFKPPCGHKCLLLCHPGPCPPCPKMVTTTCYCKKAKPIPRRCSAKEWSCQLPCGQKLLCGQHKCENPCHAGSCQPCPRVSRQKCVCGKKVAERSCASPLWHCDQVCGKTLPCGNHTCEQVCHVGACGECPRSGKRFCPCQKSKFSLPCTEDVPTCGDSCDKVLECGIHRCSQRCHRGPCETCRQEVEKHCRCGKHTKRMPCHKPYLCETKCVKMRDCQKHQCRRKCCPGNCPPCDQNCGRTLGCRNHKCPSVCHRGSCYPCPETVDVKCNCGNTKVTVPCGRERTTRPPKCKEQCSRPPTCHHTSQEKHRCHFGSCPPCHQPCQKVLEKCGHLCPAPCHDQALIKQTGRHQPTGPWEQPSEPAFIQTALPCPPCQVPIPMECLGKHEVSPLPCHAVGPYSCKRVCGRILDCQNHTCMKECHKVTKTDGCTGKNKIGKLKLCDLSMILQQESSKSESTVPDLLTPSPMCSSTHVI

SEQ ID NO: 14219 - protein, 1120 aa, Homo sapiens
MAEAPPVSGTFKFNTDAAEFIPQEKKNSGLNCGTQRRLDSNRIGRRNYSSPPPCHLSRQVPYDEISAVHQHSYHPSGSKPKSQQTSFQSSPCNKSPKSHGLQNQPWQKLRNEKHHIRVKKAQSLAEQTSDTAGLESSTRSESGTDLREHSPSESEKEVVGADPRGAKPKKATQFVYSYGRGPKVKGKLKCEWSNRTTPKPEDAGPESTKPVGVFHPDSSEASSRKGVLDGYGARRNEQRRYPQKRPPWEVEGARPRPGRNPPKQEGHRHTNAGHRNNMGPIPKDDLNERPAKSTCDSENLAVINKSSRRVDQEKCTVRRQDPQVVSPFSRGKQNHVLKNVETHTGSLIEQLTTEKYECMVCCELVRVTAPVWSCQSCYHVFHLNCIKKWARSPASQADGQSGWRCPACQNVSAHVPNTYTCFCGKVKNPEWSRNEIPHSCGEVCRKKQPGQDCPHSCNLLCHPGPCPPCPAFMTKTCECGRTRHTVRCGQAVSVHCSNPCENILNCGQHQCAELCHGGQCQPCQIILNQVCYCGSTSRDVLCGTDVGKSDGFGDFSCLKICGKDLKCGNHTCSQVCHPQPCQQCPRLPQLVRCCPCGQTPLSQLLELGSSSRKTCMDPVPSCGKVCGKPLPCGSLDFIHTCEKLCHEGDCGPCSRTSVISCRCSFRTKELPCTSLKSEDATFMCDKRCNKKRLCGRHKCNEICCVDKEHKCPLICGRKLRCGLHRCEEPCHRGNCQTCWQASFDELTCHCGASVIYPPVPCGTRPPECTQTCARVHECDHPVYHSCHSEEKCPPCTFLTQKWCMGKHEFRSNIPCHLVDISCGLPCSATLPCGMHKCQRLCHKGECLVDEPCKQPCTTPRADCGHPCMAPCHTSSPCPVTACKAKVELQCECGRRKEMVICSEASSTYQRIAAISMASKITDMQLGGSVEISKLITKKEVHQARLECDEECSALERKKRLAEAFHISEDSDPFNIRSSGSKFSDSLKEDARKDLKFVSDVEKEMETLVEAVNKGKNSKKSHSFPPMNRDHRRIIHDLAQVYGLESVSYDSEPKRNVVVTAIRGKSVCPPTTLTGVLEREMQARPPPPIPHHRHQSDKNPGSSNLQKITKEPIIDYFDVQD

SEQ ID NO: 14220 - protein, 1024 aa, Homo sapiens
MAEAPPVSGTFKFNTDAAEFIPQEKKNSGLNCGTQRRLDSNRIGRRNYSSPPPCHLSRQVPYDEISAVHQHSYHPSGSKPKSQQTSFQSSPCNKSPKSHGLQNQPWQKLRNEKHHIRVKKAQSLAEQTSDTAGLESSTRSESGTDLREHSPSESEKEVVGADPRGAKPKKATQFVYSYGRGPKVKGKLKCEWSNRTTPKPEDAGPESTKPVGVFHPDSSEASSRKGVLDGYGARRNEQRRYPQKRPPWEVEGARPRPGRNPPKQEGHRHTNAGHRNNMGPIPKDDLNERPAKSTCDSENLAVINKSSRRVDQEKCTVRRQDPQVVSPFSRGKQNHVLKNVETHTGSLIEQLTTEKYECMVCCELVRVTAPVWSCQSCYHVFHLNCIKKWARSPASQADGQSGWRCPACQNVSAHVPNTYTCFCGKVKNPEWSRNEIPHSCGEVCRKKQPGQDCPHSCNLLCHPGPCPPCPAFMTKTCECGRTRHTVRCGQAVSVHCSNPCENILNCGQHQCAELCHGGQCQPCQIILNQVCYCGSTSRDVLCGTDVGKSDGFGDFSCLKICGKDLKCGNHTCSQVCHPQPCQQCPRLPQLVRCCPCGQTPLSQLLELGSSSRKTCMDPVPSCGKVCGKPLPCGSLDFIHTCEKLCHEGDCGPCSRTSVISCRCSFRTKELPCTSLKSEDATFMCDKRCNKKRLCGRHKCNEICCVDKEHKCPLICGRKLRCGLHRCEEPCHRGNCQTCWQASFDELTCHCGASVIYPPVPCGTRPPECTQTCARVHECDHPVYHSCHSEEKCPPCTFLTQKWCMGKHEFRSNIPCHLVDISCGLPCSATLPCGMHKCQRLCHKGECLVDEPCKQPCTTPRADCGHPCMAPCHTSSPCPVTACKAKVELQCECGRRKEMVICSEASSTYQRIAAISMASKITDMQLGGSVEISKLITKKEVHQARLECDEECSALERKKRLAEAFHISEDSDPFNIRSSGSKFSDSLKEDARKDLKFVSDVEKEMETLVEAVNKVEVETSHWTFL

SEQ ID NO: 14221 - protein, 833 aa, Homo sapiens
MAEAPPVSGTFKFNTDAAEFIPQEKKNSGLNCGTQRRLDSNRIGRRNYSSPPPCHLSRQVPYDEISAVHQHSYHPSGSKPKSQQTSFQSSPCNKSPKSHGLQNQPWQKLRNEKHHIRVKKAQSLAEQTSDTAGLESSTRSESGTDLREHSPSESEKEVVGADPRGAKPKKATQFVYSYGRGPKVKGKLKCEWSNRTTPKPEDAGPESTKPVGVFHPDSSEASSRKGVLDGYGARRNEQRRYPQKRPPWEVEGARPRPGRNPPKQEGHRHTNAGHRNNMGPIPKDDLNERPAKSTCDSENLAVINKSSRRVDQEKCTVRRQDPQVVSPFSRGKQNHVLKNVETHTGSLIEQLTTEKYECMVCCELVRVTAPVWSCQSCYHVFHLNCIKKWARSPASQADGQSGWRCPACQNVSAHVPNTYTCFCGKVKNPEWSRNEIPHSCGEVCRKKQPGQDCPHSCNLLCHPGPCPPCPAFMTKTCECGRTRHTVRCGQAVSVHCSNPCENILNCGQHQCAELCHGGQCQPCQIILNQVCYCGSTSRDVLCGTDVGKSDGFGDFSCLKICGKDLKCGNHTCSQVCHPQPCQQCPRLPQLVRCCPCGQTPLSQLLELGSSSRKTCMDPVPSCGKVCGKPLPCGSLDFIHTCEKLCHEGDCGPCSRTSVISCRCSFRTKELPCTSLKSEDATFMCDKRCNKKRLCGRHKCNEICCVDKEHKCPLICGRKLRCGLHRCEEPCHRGNCQTCWQASFDELTCHCGASVIYPPVPCGTRPPECTQTCARVHECDHPVYHSCHSEEKCPPCTFLTQKWCMGKHEQSHYWASTQKKRSHYMKKIPAHACL

SEQ ID NO: 14222 - protein, 1104 aa, Homo sapiens
MEFSSICIEFKSTLRQEAPPPSRAAEPRSSCTVHHLPVTFPGRSLMMKSLLFISIVIIRQEGKPKSQQTSFQSSPCNKSPKSHGLQNQPWQKLRNEKHHIRVKKAQSLAEQTSDTAGLESSTRSESGTDLREHSPSESEKEVVGADPRGAKPKKATQFVYSYARGPKVKEKLKCEWSNRTTPKPEMLDPKVPNLWGFSTLTLQRHPLEKEYWMGMEPDEMSREDTHRKGLPGKWRGPGHDQAEIHQNRRATDIQTQDTETTWAPFQSDDLNERPAKSTCDSENLAVINKSSRRVDPEKCTVRRQDPQVVSPFSRGKQNHVLKNVETHTGSLIEQLTTEKYECMVCCELVRVTAPVWSCQSCYHVFHLNCIKKWARSPASQADGQSGWRCPACQNVSAHVPNTFSCFCGKVKNPEWSRNEIPHSCGEVCRKKQPGQDCPHSCNLLCHPGPCPPCPAFMTKTCECGRTRHTVRCGQAVSVHCSNPCENILNCGQHQCAELCHGGQCQPCQIILNQVCYCGSTSRDVLCGTDVGKSDGFGDFSCLKTCGKDLKCGNHTCSQVCHPQPCQQCPRLPQLVRCCPCGQTPLSQLLELGSSSRKTCMDPVPSCGKVCGKPLPCGSLDFIHTCEKLCHEGDCGPVSRTSVISCRCSFRTKELPCTSLKSEDATFMCDKRCNKKRLCGRHKCNEICCVDKEHKCPLNCGRKLRCGLHRCEEPCHRGNCQTCWQASFDELTCHCGASVIYPPVPCGTRPPECTQTCARVHECDHPVYHSGHSEEKCPPCTFLTQKWCMGKHEFRSNIPCHLVDISCGLPCSATLPCGMHKCQRLCHKGECLVDEPCKQPCTTPRADCGHPCMAPCHTSSPCPVTACKAKVELQCECGRRKEMVICSEASSTYQRIAAISMASKITDMQLGGSVEISKLITKKEVHQARLECDEECSALERKKRLAEAFHISEDSDPFNIRSSGSKFSDSLKEDARKDLKFVSDVEKEMETLVEAVNKGKNSKKSHSFPPMNRDHRRIIHDLAQVYGLESVSYDSEPKRNVVVTAIRGKSVCPPTTLTGVLEREMQARPPPPIPHHRHQSDKNPGSSNLQKITKEPIIDYFDVQD

SEQ ID NO: 14223 - protein, 340 aa, Mus musculus
MAASEDELLLPRLPELFETSKKLLEDVEVATEPTGSRTIQDKVSKGLELLEKAAGMLSQLDLFSRNEDLEEIASTDLKYLMVPALQGALTMKQVNPSKRLDHLQRAREHFVHFLTQCHCYHVAEFQLPQTKTNSAENNTASSSMAYPNLVAMASQRQAKIERYKQKKEVEHRLSALKSAVESGQADDERVREYHLLHLRRWIAVSLEELESIDQEIKILKEKDSPREETACHSSLPEKPPMKPFILTRNKAQAKVFGTGYPSLATMTVSDWYEQHQKYGVLPDRGIAKPASADFQRAAQQQEDQEQKDEESEEKALHRMREWDDWKDTHPRGYGNRQNMG

SEQ ID NO: 14224 - protein, 355 aa, Mus musculus
MAASEDELLLPRLPELFETSKKLLEDVEVATEPTGSRTIQDKVSKGLELLEKAAGMLSQLDLFSRNEDLEEIASTDLKYLMVPALQGALTMKQVNPSKRLDHLQRAREHFVHFLTQCHCYHVAEFQLPQTKTNSAENNTASSSMAYPNLVAMASQRQAKIERYKQKKEVEHRLSALKSAVESGQADDERVREYHLLHLRRWIAVSLEELESIDQEIKILKEKDSPREETACHSSLPEKPPMKPFILTRNKAQAKVFGTGYPSLATMTLISKEQLSSRKIKSKRMRRVRRKPCTGCESGTTGRTPIPGATATDRTWASHARRPKDSVVHTFTPRTTSGGCSEGSRVESCFAFDSVK

SEQ ID NO: 14225 - protein, 340 aa, Rattus norvegicus
MAASEEELLLPRLPELFETSKKLLEELEVATEPTGSRTIQDKVSKGLELLEKAAGMLSQLDLFSRNEDLEEIASIDLKYLMVPALQGALTMKQVNPSKRLDHLQRAREHFIHFLTQCHCYHVAEFQLPQTKNNSAENNTARSSMAYPNLVAMASQRQAKIERYKQKKEVEHRLSALKSAVESGQADDERVREYYLLHLRRWIGISLEEIESIDQEIKILKDKDSPREESACQSSLPEKPPMKPFILTRNKAQAKVFGTGYPSLATMTVSDWYEQHQKYGALPDRGIAKPPSADFQRAAQQQEDQEQKDEENEEKALHRMREWDDWKDTHPRGYGNRQNMG

SEQ ID NO: 14226 - protein, 375 aa, Anopheles gambiae str. PEST
LAKKTSVRSSEMSEATNEIPLDRKLNEIFDEGYSAMNRLDENAALPSNAPEFQVAVKKTIGHFEDATRLVSLVGMFSTNESYEEVPTENLRYFLLPFFLGKMTLRLCNTNREEVVEVAEVYFKDFLARCENYKLYETPDRDTGELAIVPGGQSDKIRELQRMGAQRNEKIRKFQEKKELDEKVKQLRYVVEQPEAKIDDETKREFFLSLLKSAVLEAQEELESVAREKQMLQYRAAAKLRGEEELEEASHGAFGGGTNKRPPVQPLKPIIITRDAVQKAVYGRGYPSLPTMTVAEFYEQRVAEGIFPDPERMKEVNKNSLMNRVHMDNAAEQDREDEQQEQLIERDDEEYLARQRAKDEFKDEHRRGEGNRYNRS

SEQ ID NO: 14227 - protein, 405 aa, Arabidopsis thaliana
MGGLAMEEMPLSVLFEQARKIHLAASESGVDQDVVKKGCEMFQKCEDMIGKLALFSSNETKEDISTNNLKYLLVPYYLAELTEKIIQEDRIQIVKASYAKLKEFFSFCEAMELVPDEELEASSRGGSGAPADRRALKIARFKRQKAAEAKLLEIKERKERRGRSTKASALSTPVESGEDDIPDDDSEEEREAWLSSINLAICKAIDLLEMLKREEEMLSAIKERQLKDGEGGFSRDALDDRTKKAETWHRDAAARIQYSKPAQPITCATFAQDVLEGRASVSQGHEHKNQPLIFGPASIVGGPLSTERERMIAQVFQPSHRMPTMCIEDAGLTEMNIMNDWQEQTKKAIEEATTSWYNDKPLRRKEEDEEDDDEDEEAVMKARAFDDWKDDNPRGAGNKKLTPCG

SEQ ID NO: 14228 - protein, 405 aa, Arabidopsis thaliana
MGGLAMEEMPLSVLFEQARKIHLAASESGVDQDVVKKGCEMFQKCEDMIGKLALFSSNETKEDISTNNLKYLLVPYYLAELTEKIIQEDRIQIVKASYAKLKEFFSFCEAMELVPDEELEASSRGGSGAPADRRALKIARFKRQKAAEAKLLEIKERKERRGRSTKASALSTPVESGEDDIPDDDSEEEREAWLSSINLAICKAIDLLEMLKREEEMLSAIKERQLKDGEGGFSRDALDDRTKKAETWHRDAAARIQYSKPAQPITCATFAQDVLEGRASVSQGHEHKNQPLIFGPASIVGGPLSTERERMIAQVFQPSHRMPTMCIEDAGLTEMNIMNDWQEQTKKAIEEATTSWYNDKPLRRKEEDEEDDDEDDEPVMKARAFDDWKDDNPRGAGNKKLTPCG

SEQ ID NO: 14229 - protein, 413 aa, Arabidopsis thaliana
MGGLAMEEMPLSVLFEQARKIHLAASESGVDQDVVKKGCEMFQKCEDMIGKLALFSSNETKEDISTNNLKYLLVPYYLAELTEKIIQEDRIQIVKASYAKLKEFFSFCEAMELVPDEELEASSRGGSGAPADRRALKIARFKRQKAAEAKLLEIKERKERRGRSTKASALSTPVESGEDDIPDDDSEEERELSCLIAFLCRPGSPQLTWLFAIDLLEMLKREEEMLSAIKERQLKDGEGGFSRDALDDRTKKAETWHRDAAARIQYSKPAQPITCATFAQDVLEGRASVSQGHEHKNQPLIFGPASIVGGPLSTERERMIAQVFQPSHRMPTMCIEDAGLTEMNIMNDWQEQTKKAIEEATTSWYNDKPLRRKEEDEEDDDEDEEAVMKARAFDDWKDDNPRGAGNKKLTPCG

SEQ ID NO: 14230 - protein, 422 aa, Glycine max
  unsure (1)..(422): unsure at all Xaa locations
TRCFRFAHNRRESNRIERKGKCRMDDMPLPALFEQARKIHAAATDSGADQEVVKKGCEALHRCEDMVNNLGLFSPNETKEDISTTNLKYILVPFYLAELTEKIAQDDRIQILKSSQAKLKEFISFCEAMELVPKEELESYIDGAPKTVADQRARKIARFKRQRAAESKLLEIKERKERRGRSTKAAALSTPVEAGEEEVLDDDGEEEREAWITTISLAICKALDMLDMLKKEEEMLSAVKDRQSKDGDKGXFSKDVLDERAKKAEAWHRDSAVRAQYTRPSPPITCATFAQDVLEGRAKASQEHDHKHQPLIFGPASLVNGNITTERERMAAQVFQPSHRMPTMSIEEAGLKEMEIMNKWQERNVKLMEEVNSSWHNDRKSKLGEDDDDEDDDAAQEKARAWDDWKDDNPRGAGNKKLTPCG

SEQ ID NO: 14231 - protein, 410 aa, Glycine max
ATGCFIIESKGSCRMEDVPLPALFEQARKIHNSATATASAADVVKKGCEALHRCEDMVNNLGLFSPNETKEDISTTNLKYILVPFYLAELTEKLAQDDRIHILKASQAKLKEFISFCEAMELVPKEELESYIEGASKTVADQRARKIARFKRQRAAESKLLEIKEQKERRGRSTKAAALSTPVEAGEEEVLDDDGEEEREAWITTISLAICKALDLLDMLKKEEEMLSAVKDRQSKDGDKEFSKDVLDERAKKAEAWHHDSAVRARYTKPSSPITCATFAQDVLEGRAKASQAHDHKHQPLIFGPASLVNGNITTERERMAAQVFQPSHRMPTMSIEEAGLKEMEIMNKWQERNVRLMEEANSSWHNDRKSKPGEDDDEDDAAQEKARAWDDWKDDNPRGAGNKRLTPCG

SEQ ID NO: 14232 - protein, 291 aa, Glycine max
  unsure (1)..(291): unsure at all Xaa locations
TRCFRFAHNRRESNRIESKGKCRMDDMPLPALFEQARKIHAAATDSGADQEVVKKGCEALHRCEDMVNNLGLFSPNETKEDISTTNLKYILVPFYLAELTEKIAQDDRIQILKSSQAKLKEFISFCEAMELVPKEELESYIDGAPKTVADQRARKIARFKRQRAAESKLLEIKERKERRGRSTKAAALXXSAVKDRQSKDGDKEFSKDVLDERAKKAEAWHHDSAVRAXRYTRPSSPITCANFRQDVLEGRAKASQAHDHKHQPLIFGPASLVNGNITTERERMAAQGLPT

SEQ ID NO: 14233 - protein, 419 aa, Triticum aestivum
  unsure (1)..(419): unsure at all Xaa locations
MGEMEDVSNRMEAQLRVRRGGXDDADLPLPALFDRASHLHSLASSSSLDQEGIRKGVDLLRRCDDMVSKLGLFSSNETKEDVSTANLKYLLVPYYLGEMTEQVEQEDRIPVLKASQDHLKEFISVCEALELIPEDELQLYRQGQSETGANRRAQKVARFKRQKAAETKLQEIKERKERRGRSLRATALSAPIEAGEEDDLEADGEEEREAWLATISLALCKAFDLVDMLKKEEEMLLAVKERKEKDGNAFAREMLDERRQKAEAWHQNAASRAPYSKPAAPITCATFAQDVIEGRASVSQAHDHKHQPLIFGPASLVGGGLTSERERMAAQVFQPSFRMPTMSIEQAGLAEMKMMEQWQERTAKMIQEASSSWHKDDTXXLAQDDEDAEEXXKARAFDDWKDENPRGAGXNKKLTPXCG

SEQ ID NO: 14234 - protein, 423 aa, Zea mays
MVDVEEVGNKMQSQMRLHAEPDDAAADLPLPALFDRASRLHALASSSALDQDGIRTGVELLRRCDEMVGRLGLFSPNETKDDVSTANLKYLLVPYYLAEMTEKMAQEDRIPVLKASQDHLKEFIALCEVLELIPEDELELSRQKQSDTMANRRAQKVARFKRQKAAETKLQEIRERKERRGRSLRATALSAPVEAGEEDDLEDDGEEEREAWLATISLAICKAFDLLDMLKKEEEMLLAVKERKAKDGNAFAREMLDERTKKAEAWHHKAASRVAYSKPADPITCATFAQDVIEGRASVSQAHEHKHQPLIFGPASLVGGGLTSERERMAAQVFQPSYRMPTMSIEEAGLREMKMMERWQERTAEMMREANSAWHKGGDSSSSSMPQGEGGDEDAEEAKARAWDDWKDDNPRGAGNKKLTPCG

SEQ ID NO: 14235 - protein, 469 aa, Zea mays
  unsure (1)..(469): unsure at all Xaa locations
IFRGVQRPPGDDASRALSFPRPSPLPRSTRVLPQTSRSLPVPRGNRPTGRNGGCGGDREQVAIADAPPRGAGGRRXADLPLPALFDRASRLHALASSSALDQDGIRTGVDLLRRCDDMVSKLGLFSPNETKEDVSTANLKYLLVPYYLAEMTEKIAQEDRIPVLKTSQDHLKEFIALCEVLELIPEDELELSRQKQPDTMTNRRAQKVARFKRQKAAETKLQEIRERKERXRARSLRAAALSAPIEAGEEDDLENDGEEEREAWLATISLALCKAFDLLDMLKKEEEMLQAVKERKAKDGNAFAREMLDERTKKAETWHHNAANRVAYSKPADPITCATFAQDVIEGRASVSQAHEHKHQPLIFGPASIVGGGLTSERERMTAQVFQPSYRMPTMSIEEAGLREMKMMEKWQERTAELMKESTSAWHKDXXSSSAQEDEDAEEEKARAWDDWKDDNPRGAGNKKLTPCG

SEQ ID NO: 14236 - protein, 171 aa, Zea mays
  unsure (1)..(171): unsure at all Xaa locations
MAEVEDVSNRMEAQLRVHAAEDDADLPLPALFDRASHLHSLASSSSLDQEGIRKGVDLLRRCDDMVSKLGLFSSNETKEDVSTANLKYLLVPYYLGEMTEQVEQEDRIPVLKASQDHLKEFISVCEALELIPEDELQLYRQGXSLKQGQTEEHKRLPGSSGKRLQKRRLQE

SEQ ID NO: 14237 - protein, 323 aa, Schizosaccharomyces pombe
MESKSLRELWEETEKLKDSSSTDEKTRSEIVEGYEKCLKLVLQLRIFSSNEEVDEIKTSELRYLMIDYELAKCVEQWTKGDRLKAVQYAKTHYETFLSICDDYGLKPMQDEKPKTEADTRTLKIARYRMRQNLEKELKALSKDSETNEEQERKFWLTKLQIAVEDTLDSLPHIEMEIDLLKRAQAELMKSEDSPEKDEETLRREERKQKEGSSWRLDLNTRDKILDKNNRPLQPFTIVSDRNETRKNVFGFGYNLPTMTVDEYLDEEMKRGNIISQKDNPPKSDSDDEDDYEKLDAKTMKDRYWDEFKEANPRGSGNTMVNRG

SEQ ID NO: 14238 - protein, 327 aa, Caenorhabditis elegans
MSELSDEEISLQALYDPSKKVIGDIEDGIFSTPELQPRIKTGIDNLQLVTKLVNQMRLFSSNEQIEDVPTNSLPYLLVPCFLGILHQNLMTEPGLKLDELRKSKIYMRNFLDRLRDLCLITTRLPWEDEDTEEQNLKEKPKLAVEEIRRLKLERHKKKQELKMAELRIQKQLEAVSIDEQNLRELYITQLLFWSERCYEELQAIDDELPLLKMMAERASHPHRHPAPPPATKTVPTLKPFIITRDAQQKQVFGLGYPGIPAMSVDEWYHQKFGHNPQNAPQSSAPAGAEAQESEEEVDDDEARAKAMRWDEYKDDHRRGWGNMHNKG

SEQ ID NO: 14239 - protein, 339 aa, Homo sapiens
MAAEDELQLPRLPELFETGRQLLDEVEVATEPAGSRIVQEKVFKGLDLLEKAAEMLSQLDLFSRNEDLEEIASTDLKYLLVPAFQGALTMKQVNPSKRLDHLQRAREHFINYLTQCHCYHVAEFELPKTMNNSAENHTANSSMAYPSLVAMASQRQAKIQRYKQKKELEHRLSAMKSAVESGQADDERVREYYLLHLQRWIDISLEEIESIDQEIKILRERDSSREASTSNSSRQERPPVKPFILTRNMAQAKVFGAGYPSLPTMTVSDWYEQHRKYGALPDQGIAKAAPEEFRKAAQQQEEQEEKEEEDDEQTLHRAREWDDWKDTHPRGYGNRQNMG

SEQ ID NO: 14240 - protein, 290 aa, Homo sapiens
MAAEDELQLPRLPELFETGRQLLDEVEVATEPAGSRIVQEKVFKGLDLLEKAAEMLSQLDLFSRNEDLEEIASTDLKYLLVPAFQGALTMKQVNPSKRLDHLQRAREHFINYLTQCHCYHVAEFELPKTMNNSAENHTANSSMAYPSLVAMASQRQAKIQRYKQKKELEHRLSAMKSAVESGQADDERVREYYLLHLQRWIDISLEEIESIDQEIKILRERDSSREASTSNSSRQERPPVKPFILTRNMAQAKVFGAGYPSLPTMTVSDWYEQHRKYGALPDQGIAKAAP

SEQ ID NO: 14241 - protein, 245 aa, Mus musculus
MDKNELVQKAKLAEQAERYDDMAACMKSVTEQGAELSNEERNLLSVAYKNVVGARRSSWRVVSSIEQKTEGAEKKQQMAREYREKIETELRDICNDVLSLLEKFLIPNASQPESKVFYLKMKGDYYRYLAEVAAGDDKKGIVDQSQQAYQEAFEISKKEMQPTHPIRLGLALNFSVFYYEILNSPEKACSLAKTAFDEAIAELDTLSEESYKDSTLIMQLLRDNLTLWTSDTQGDEAEAGEGGEN

SEQ ID NO: 14242 - protein, 245 aa, Mus musculus
MDKNELVQKAKLAEQAERYDDMAACMKSVTEQGAELSNEERNLLSVAYKNVVGARRSSWRVVSSIEQKTEGAEKKQQMAREYREKIETELRDICNDVLSLLEKFLIPNASQPESKVFYLKMKGDYYRYLAEVAAGDDKKGIVDQSQQAYQEAFEISKKEMQPTHPIRLGLALNFSVFYYEILNSPEKACSLAKTAFDEAIAELDTLSEESYKDSTLIMQLLRDNLTLWTSDTQGDDAEAGEGGEN

SEQ ID NO: 14243 - protein, 245 aa, Mus musculus
MDKNELVQKAKLAEQAERYDDMAACMKSVTEQGAELSNEERNLLSVAYKNVVGARRSSWRVVSSIEQKTEGAEKKQQVAREYREKIETELRDICNDVLSLLEKFLIPNASQPESKVFYLKMKGDYYRYLAEVAAGDDKKGIVDQSQQAYQEAFEISKKEMQPTHPIRLGLALNFSVFYYEILNSPEKACSLAKTAFDEAIAELDTLSEESYKDSTLIMQLLRDNLTLWTSDTQGDDAEAGEGGEN

SEQ ID NO: 14244 - protein, 245 aa, Mus musculus
MDKNELVQKAKLAEQAERYDDMAACMKSVTEQGAELSNEERNLLSVAYKNVVGARRSSWRVVSSIEQKTEGAEKKQQMAREYREKIETELRDICNDVLSLLEKFLIPNASQPESKVFYLKMKGDYYRYLAEVAAGDDKKGIVDQSQQAYQEAFEISKKEMQPTHPIRLGLALNFSVFYYEILNSPEKACSLAKTAFDEAIAELDTLSEESYKDSTLIIELLRDNLTLWTSDTQGDEAEAGEGGEN

SEQ ID NO: 14245 - protein, 246 aa, Mus musculus
MTMDKSELVHKAKLAEQAERYDDMAAAMKAVTEQGHELSNEERNLLSVAYKNVVGARRSSWRVISSIEQKTERDEKKQQMGKEYREKIEAELQDICNDVLELLDKYLILNATQAESKVFYLKMKGDYFRYLSEVASGENKQTTVSNSQQAYQEAFEISKKEMQPTHPIRLGLALNFSVFYYEILNSPEKACSLAKTAFDEAIAELDTLNEESYKDSTLIMQLLRDNLTLWTSENQGDEGDAGEGEN

SEQ ID NO: 14246 - protein, 246 aa, Mus musculus
MTMDKSELVQKAKLAEQAERYDDMAAAMKAVTEQGHELSNEERNLLSVAYKNVVGARRSSWRVISSIEQKTERNEKKQQMGKEYREKIEAELQDICNDVLELLDKYLILNATQAESKVFYLKMKGDYFRYLSEVASGENKQTTVSNSQQAYQEAFEISKKEMQPTHPIRLGLALNFSVFYYEILNSPEKACSLAKTAFDEAIAELDTLNEESYKDSTLIMQLLRDNLTLWTSENQGDEGDAGEGEN

SEQ ID NO: 14247 - protein, 247 aa, Mus musculus
MVDREQLVQKARLAEQAERYDDMAAAMKNVTELNEPLSNEERNLLSVAYKNVVGARRSSWRVISSIEQKTSADGNEKKIEMVRAYREKIEKELEAVCQDVLSLLDNYLIKNCSETQYESKVFYLKMKGDYYRYLAEVATGEKRATVVESFEKAYSEAHEISKEHMQPTHPIRLGLALNYSVFYYEIQNAPEQACHLAKTAFDDAIAELDTLNEDSYKDSTLIMQLLRDNLTLWTSDQQDDDGGEGNN

SEQ ID NO: 14248 - protein, 246 aa, Mus musculus
MGDREQLLQRARLAEQAERYDDMASAMKAVTELNEPLSNEDRNLLSVAYKNVVGARRSSWRVISSIEQKTMADGNEKKLEKVKAYREKIEKELETVCNDVLALLDKFLIKNCNDFQYESKVFYLKMKGDYYRYLAEVASGEKKNSVVEASEAAYKEAFEISKEHMQPTHPIRLGLALNFSVFYYEIQNAPEQACLLAKQAFDDAIAELDTLNEDSYKDSTLIMQLLRDNLTLWTSDQQDEEAGEGN

SEQ ID NO: 14249 - protein, 245 aa, Mus musculus
MEKTELIQKAKLAEQAERYDDMATCMKAVTEQGAELSNEERNLLSVAYKNVVGGRRSAWRVISSIEQKTDTSDKKLQLIKDYREKVESELRSICTTVLELLDKYLIANATNPESKVFYLKMKGDYFRYLAEVACGDDRKQTIENSQGAYQEAFDISKKEMQPTHPIRLGLALNFSVFYYEILNNPELACTLAKTAFDEAIAELDTLNEDSYKDSTLIMQLLRDNLTLWTSDSAGEECDAAEGAEN

SEQ ID NO: 14250 - protein, 248 aa, Mus musculus
MERASLIQKAKLAEQAERYEDMAAFMKSAVEKGEELSCEERNLLSVAYKNVVGGQRAAWRVLSSIEQKSNEEGSEEKGPEVKEYREKVETELRGVCDTVLGLLDSHLIKGAGDAESRVFYLKMKGDYYRYLAEVATGDDKKRIIDSARSAYQEAMDISKKEMPPTNPIRLGLALNFSVFHYEIANSPEEAISLAKTTFDEAMADLHTLSEDSYKDSTLIMQLLRDNLTLWTADSAGEEGGEAPEEPQS

SEQ ID NO: 14251 - protein, 246 aa, Mus musculus
MGDREQLLQRARLADEAERYDDMASAMKAVTELNEPLSNEDRNLLSVAYKNVVGARRSSWRVISSIEQKTMADGNEKKLEKVKAYREKIEKELETVCNDVLALLDKFLIKNCNDFQYESKVFYLKMKGDYYRYLAEVASGEKKNSVVEASEAAYKEAFEISKEHMQPTHPIRLGLALNFSVFYYEIQNAPEQACLLAKQAFDDAIAELDTLNEDSYKDSTLIMQLLRDNLTLWTSDQQDEEAGEGN

SEQ ID NO: 14252 - protein, 248 aa, Mus musculus
MERASLIQKAKLAEQAERYEDMAAFMKSAVEKGEELSCEERNLLSVAYKNVVGGQRAAWRVLSSIEQKSNEEGSEEKGPEVKEYREKVETELRGVCDTVLGLLDSHLIKGAGDAESRVFYLKMKGDYYRYLAEVATGDDKKRIIDSARSAYQEAMDISKKEMPPTNPIRLGLALNFSVFHYEIANSPEEAISLAKTTFDEAMADLHTLSEDSYKDSTLIMQLLRDNLTLWTADSAGEEGGEAPDDPHI

SEQ ID NO: 14253 - protein, 248 aa, Mus musculus
MERASLIQKAKLAEQAERYEDMAAFMKSAVEKGEELSCEERNLLSVAYKNVVVGQRAAWRVLSSIEQKSNEEGSEEKGPEVKEYREKVETELRGVCDTVLGLLDSHLIKGAGDAESRVFYLKMKGDYYRYLAEVATGDDKKRIIDSARSAYQEAMDISKKEMPPTNPIRPGLALNFSVFHYEIANSPEEAISLAKTTFDEAMADLHTLSEDSYKDSTLIMQLLRDNLTLWTADSAGEEGGDWPEEPQS

SEQ ID NO: 14254 - protein, 224 aa, Mus musculus
MATCMKAVTEQGAELSNEERNLLSVAYKNVVGGHRSAWRVISSIEQKTDTSDKKLQLIKDYREKVESELRSICTTVLELLDKYLIANATNPESKVFYLKMKGDYFRHLAEVACGDDRKQTIENSQGAYQEAFDISKKEMQPTHPICLGLALNFSVFYYEILNNPELACTLAKTAFDEAIAEIDTLNKDSYKDSTLIMQLLRDNLTLWTSDSAGEECAAAEGAEN

SEQ ID NO: 14255 - protein, 176 aa, Mus musculus
MGMRRSWRKLKPTGRRLKIEKELETVCNDVLALLDKFLIKNCNDFQYESKVFYLKMKGDYYRYLAEVASGEKKNSVVEASEAAYKEAFEISKEHMQPTHPIRLGLALNFSVFYYETQNAPEQACLLAKQAFDDAIAELDTLNEDSYKDSTLIMQLLRDNLTLWTSDQQDEEAGEGN

SEQ ID NO: 14256 - protein, 216 aa, Mus musculus
MFVNECSVARERLAMNYFTMQNVVEGRRSAWMVISSIEKKTDTSNKKLQLTKDCQEKVELELRSICITVLELLGKYLIANAINPESKVFYLKMNGDYFQDLAEVACGDDGKQMIENSQRAYQEAFDISKKEMQPTHPIRLGLALNLPVFYSVILNNPELAYTLAKTAFDEAITELGTLNKDSYKDSTLIMQLLRDNLTLWTSDSAEECDAAEGAEN

SEQ ID NO: 14257 - protein, 142 aa, Mus musculus
MVLELLDKYLIANATNPESKVFYLNMKGDYFRYLAEVACGDDRKQTIENSQGAYQEAFDISKKEMQPTHLIRLGLALNFSVFYYEILNNPELACTLAKTAFDEAITELDTLNEDSYKDSTLIMQLLRDNLTLWTSDSAGRRM

SEQ ID NO: 14258 - protein, 118 aa, Mus musculus
MKGDYYRYLAEVATGDDKKRIIDSARSAYQEAMDISKKEMPPTNPIRLGLALNFSVFHYEIANSPEEAISLAKTTFDEAMADLHTLSEDSYKDSTLIMQLLRDNLTLWTADSAGEEGW

SEQ ID NO: 14259 - protein, 139 aa, Mus musculus
MKAVTDQGAELSNEERNLLSVAYKNVVGGRRSAWSVISSIEQKTDTSDKKLQLIKDHREKSKVFYLKMKGDYFWYLAEVAYGNDRKQTIENSQGAYQEAFDISKKEMQPTHPIRLGLALNFSVFYYESLNNSELALHTG

SEQ ID NO: 14260 - protein, 117 aa, Mus musculus
MDKNELVQKAKLAEQAERYDDMAACMKSVTEQGAELSNEERNLLSVAYKNVVGARRSSWRVVSSIEQKTEGAEKKQQMAREYREKIETELRDICNDVLAFKDMLYSAQDQAPSVEAL

SEQ ID NO: 14261 - protein, 181 aa, Mus musculus
MAAFMKSAVEKGEELSCEERNLLSVAYKNVYGRPESGLEGPVQHRAEEQRGGVRREGPRGAGDAESRIFYLKMKGDYYRYLAEVATGDEKKSIIDSARPPSTFDEAVADLHTLSEDSYKDSTLIMQFLRDNLTLWTADSAGEEGGGAPELKQPKPPGSALPSSPQSAERTKTEWNSALPKP

SEQ ID NO: 14262 - protein, 212 aa, Mus musculus
MATNMKAMTEQGTELSKELHNLLSVAYKNVDGKTDTSDKKLQLIKDYWEKVESELRSICTMGLELLDKYLIASATNPENKVFYLKIKGDYFQYLAEVACGDDQKETIKNSQGAYQKAFDISKKEMQPSHPIHLVKTGSNEAERREKFPKANSAPLLIVSDMLHSIWLSQVLAGLIVPDGRRQLTTQRSAWFRMSDDDDDDQGGLQMGMDEGT

SEQ ID NO: 14263 - protein, 113 aa, Mus musculus
MRRTPDPARRSPSLAMEKTELIQKAKLAEQAERYDDMATCMKAVTEQGAELSNEERNLLSVAYKNVVGGRRSAWRVISSIEQKTDTSDKKLQLIKDYREKVESELRSICTTVL

SEQ ID NO: 14264 - protein, 97 aa, Mus musculus
MVLELLDKYVIAKATNSKSKVFYLKMKGDYFWYLAEVAYGNDRKQTIENSQGAYQEAFDISKKEMQPTHPIRLGLALNFSVFYYESLNNSELALHTG

SEQ ID NO: 14265 - protein, 188 aa, Mus musculus
MEKTGLIQKAKLAQSYKDTATCMKAMMEQGMEELSNKECSLLLVTYKNMVGEPQVLWRVIWSIEQKTDTSNKKLQLIKDYQEKVELELSSISIMVLELLVKYLIANATNPESEVFYLKMKGDYFRYLAEVIELNNKMAFDETIAELDILNKDSCKDRTIIMQLLRDSLPLWTSDSAGEERDAAQGAEN

SEQ ID NO: 14266 - protein, 273 aa, Mus musculus
MAFDEAIAELDTLNEDSYKDSTLIMQLLRDNLTLWTSDSVGEECDAAEGGYSLQALFIHSAPFTTHKDHGFLYCNGHVEAYSYGQAVSTIKTVLEMPRECPAKPPEVEKDSSGLCLEQYENMRYSVLQVTSVAVESIQYPESWFPMRNSTLVTEAQSTFESGTLETRSICSLRGEYRKDVHGRSKEGKELEDMATKGFRALVMSHKGHLRNDIFRLHKLSAQVNELLCPRVPRGSWSIPASGSSCENVPHDGDIITADYEHLKDQGPAQTLPV

SEQ ID NO: 14267 - protein, 245 aa, Rattus norvegicus
MDKNELVQKAKLAEQAERYDDMAACMKSVTEQGAELSNEERNLLSVAYKNVVGARRSSWRVVSSIEQKTEGAEKKQQMAREYREKIEMELRDICNDVLSLLEKFLIPNASQPESKVFYLKMKGDYYRYLAEVAAGDDKKGIVDQSQQAYQEAFEISKKEMQPTHPIRLGLALNFSVFYYEILNSPEKACSLAKTAFDEAIAELDTLSEESYKDSTLIMQLLRDNLTLWTSDTQGDEAEAGEGGEN

SEQ ID NO: 14268 - protein, 246 aa, Rattus norvegicus
MTMDKSELVQKAKLAEQAERYDDMAAAMKAVTEQGHELSNEERNLLSVAYKNVVGARRSSWRVISSIEQKTERNEKKQQMGKEYREKIEAELQDICSDVLELLDKYLILNATHAESKVFYLKMKGDYFRYLSEVASGDNKQTTVSNSQQAYQEAFEISKKEMQPTHPIRLGLALNFSVFYYEILNSPEKACSLAKTAFDEAIAELDTLNEESYKDSTLIMQLLRDNLTLWTSENQGDEGDAGEGEN

SEQ ID NO: 14269 - protein, 246 aa, Rattus norvegicus
MTMDKSELVQKAKLAEQAERYDDMAAAMKAVTEQGHELSNEERNLLSVAYKNVVGARRSSWRVISSIEQKTERNEKKQQMGKEYREKIEAELQDICSDVLELLDKYLILNATHAESKVFYLKMKGDYFRYLSEVASGDNKQTTVSNSQQAYQEAFEISKKEMQPTEPIRLGLALNFSVFYYEILNSPEKACSLAKTAFDEAIAELDTLNEESYKDSTLIMQLLRDNLTLWTSENQGDEGDAGEGEN

SEQ ID NO: 14270 - protein, 247 aa, Rattus norvegicus
MVDREQLVQKARLAEQAERYDDMAAAMKNVTELNEPLSNEERNLLSVAYKNVVGARRSSWRVISSIEQKTSADGNEKKIEMVRAYREKIEKELEAVCQDVLSLLDNYLIKNCSETQYESKVFYLKMKGDYYRYLAEVATGEKRATVVESSEKAYSEAHEISKEHMQPTHPIRLGLALNYSVFYYEIQNAPEQACHLAKTAFDDAIAELDTLNEDSYKDSTLIMQLLRDNLTLWTSDQQDDDGGEGNN

SEQ ID NO: 14271 - protein, 469 aa, Rattus norvegicus
MINGQMVKLKYCFTCKMFRPPRTSHCSVCDNCVERFDHHCPWVGNCVGRRNYRFFYAFILSLSFLTAFIFACVVTHLTLRPTVLELVICFFSIWSILGLSGFHTYLVASNLTTNEDIKGSWSSKRGGEASVNPYSHKSIITNCCAVLCGPLPPSPFTFKVEPERVWREEEEAGPRPAQATPNPAQGHTTPAKRPAQSKGAAESSIGLKAASSSACLSILGVMERASLIQKAKLAEQAERYEDMAAFMKSAVEKGEELSCEERNLLSVAYKNVVGGQRAAWRVLSSIEQKSNEEGSEEKGPEVKEYREKVETELRGVCDTVLGLLDSHLIKGAGEAESRVFYLKMKGDYYRYLAEVATGDDKKRIIDSARSAYQEAMDISKKEMPPTNPIRLGLALNFSVFHYEIANSPEEAISLAKTTFDEAMADLHTLSEDSYKDSTLIMQLLRDNLTLWTADNAGEEGGEAPEEPQS

SEQ ID NO: 14272 - protein, 248 aa, Rattus norvegicus
MERASLIQKAKLAEQAERYEDMAAFMKSAVEKGEELSFEERNLLSVAYKNVVGGQRSAWRVLSSIEQKINEEGSEEKGPEVKEYREKVETELRGVCDTVLGLLDSHLIKGAGEAESRVFYLKMKGDYYRYLAEVATGDDKKRIIDSARSAYQEAMDISKKEMPPTNPIRLGLALNFSVFHYEIANRPEEAISLAKTTFDEAMADLHTLSEDSYKDSTLIMQLLRDNLTLWTAENAGEEGGEAPEEPQS

SEQ ID NO: 14273 - protein, 188 aa, Rattus norvegicus
SWRVVSSIEQKTEGAEKKQQMAREYREKIETELRDICNDVLSLLEKFLIPNRSQPESKVFYLKMKGDYYRYLAEVAAGDDKKGIVDQSQQAYQEAFEISKKEMQPTHPIRLGLALNFSVFYYEILNSPEKACSLAKTAFDEAIAELDTLSEESYKDSTLIMQLLRDNLTLWTSDTQGDEAEAGEGGEN

SEQ ID NO: 14274 - protein, 683 aa, Rattus norvegicus
MERASLIQKAKLAEQAERYEDMAAFMKSAVEKGEELSCEERNLLSVAYKNVKSNEEGSEGKGPEVKEYREKVETELRGVCDTVLGLLDSHLIKGAGEAESRVFYLKMKGDYYRYLAEVATGDDKKRIIDSARLPGGHGHQQEGDAAHQPHTPGPGLNFSVFHYQIANSPEEAISLAKTTFDEAMADLHTLSEDSYKDSTLIMQLLRDTLTLWTADNAGEEGHRPQGVCSHQRQQAEKDSSTLSPPMARVVLFVSGAVSPVQTLFLLQCGLCIFSADTVSSSVQTLFLLQCRHCCFSSADTVSSVQTLYLHCRCCISSADTVSSSVQTLFLLQCRHCSFFNVDSVSPVQTLFLLQCRHCIFSADTVSSLQVLYLQCRHCFLFSADTVSSPVQTLLLLQCRHCISSADTVSSLQVLYLQCRHCFLFSADTVSSPVQTLFLLQCGLCIFSADTVSSPVQTLLLLQCRHCISSADTVSSSVQTLFLLQCRHCSFFNVDSVSSVQTLFLLQCRHCIFSADTVSSLQVLYLQCRHCFFFSADTVSSSMWTLYLQCRHCFFFSADTVSSPVQTLFLLQCGLCIFSADTVSSPVQTLYLQCRHCIFTAVQTLFPLQCRHCFFSSADTVSSSVQTLFPLQCRHCFLFSADTVSSVQTLYLQCRHCIFTAVQTLFLLQCRHCSFFNVDSVSSV

SEQ ID NO: 14275 - protein, 138 aa, Rattus norvegicus
MQLSPESKVFYLKMKGDYFRCLAEVACGDDRKQTIGNPQGAYQEAFDISKKEMQLTRPIRLGLALHSPVFYYESLNNPEPAYTLAKMAFDEAIAELETLNEDSYKDSALVTQLLRDNLTLWTSDSAGEECDAADGAEN

SEQ ID NO: 14276 - protein, 204 aa, Rattus norvegicus
MSGVSSSDGVVIQEPQQCWHSVRIPTALRGLNRALSHPGHTSGLLWSLTAGTRGPDPADSDFSVASQTLGRDPMGRCVTTFADCLQIAEVATGDDKKRIIDSARSAYQEAMDISKKEMLPTNPIRLGLALNFSVFHYEIANSPEEAISLAKTTFDEAVADLHTLSEDSYKDSALIMQLLRDNLTLWTADNAGEEGGEAPEEPQS

SEQ ID NO: 14277 - protein, 106 aa, Rattus norvegicus
MKGDYVRYLAEIACGDDQKQTIENSQGAYQEAFDISKKEMQLTHLIRLGLALHSSVFYYEILNNPELACTLAKTAFDEAIAELGALNEDSYNDSILIMQLLRDNLT

SEQ ID NO: 14278 - protein, 248 aa, Anopheles gambiae str. PEST
MSTVDKEELVQKAKLAEQSERYDDMAQAMKSVTETGVELSNEERNLLSVAYKNVVGARRSSWRVISSIEQKTESSARKQQLAREYRERVEKELREICYEVLGLLDKFLIPKASNPESKVFYLKMKGDYYRYLAEVATGETRHTVVDDSQAAYQDAFEISKGKMQPTHPIRLGLALNFSVFYYEILNSPDKACQLAKQAFDDAIAELDTLNEDSYKDSTLIMQLLRDNLTLWTSDTQGDGDEPQEGGDN

SEQ ID NO: 14279 - protein, 723 aa, synthetic construct
MVSKGEELFTGVVPILVELDGDVNGHRFSVSGEGEGDATYGKLTLKFICTTGKLPVPWPTLVTTLTWGVQCFSRYPDHMKQHDFFKSAMPEGYVQERTIFFKDDGNYKTRAEVKFEGDTLVNRIELKGIDFKEDGNILGHKLEYNYISHNVYITADKQKNGIKAHFKIRHNIEDGSVQLADHYQQNTPIGDGPVLLPDNHYLSTQSALSKDPNEKRDHMVLLEFVTAARMHMEKTELIQKAKLAEQAERYDDMATCMKAVTEQGAELSNEERNLLSVAYKNVVGGRRSAWRVISSIEQKTDTSDKKLQLIKDYREKVESELRSICTTVLELLDKYLIANATNPESKVFYLKMKGDYFRYLAEVACGDDRKQTIDNSQGAYQEAFDISKKEMQPTHPIRLGLALNFSVFYYEILNNPELACTLAKTAFDEAIAELDTLNEDSYKDSTLIMQLLRDNLTLWTSDSAGGTGGSLRRASLPGTGGSELMVSKGEELFTGVVPILVELDGDVNGHKFSVSGEGEGDATYGKLTLKFICTTGKLPVPWPTLVTTFGYGLMCFARYPDHMKQHDFFKSAMPEGYVQERTIFFKDDGNYKTRAEVKFEGDTLVNRIELKGIDFKEDGNILGHKLEYNYNSHNVYIMADKQKNGIKVNFKIRHNIEDGSVQLADHYQQNTPIGDGPVLLPDNHYLSYQSALSKDPNEKRDHMVLLEFVTAAGITLGMDELYK

SEQ ID NO: 14280 - protein, 265 aa, Arabidopsis thaliana
MSSSREENVYLAKLAEQAERYEEMVEFMEKVAKTVDTDELTVEERNLLSVAYKNVIGARRASWRIISSIEQKEESRGNDDHVSIIKDYRGKIETELSKICDGILNLLDSHLVPTASLAESKVFYLKMKGDYHRYLAEFKTGAERKEAAESTLVAYKSAQDIALADLAPTHPIRLGLALNFSVFYYEILNSPDRACSLAKQAFDEAISELDTLGEESYKDSTLIMQLLRDNLTLWNSDINDEAGGDEIKEASKHEPEEGKPAETGQ

SEQ ID NO: 14281 - protein, 255 aa, Arabidopsis thaliana
MSTREENVYMAKLAEQAERYEEMVEFMEKVAKTVDVEELSVEERNLLSVAYKNVIGARRASWRIISSIEQKEESKGNEDHVAIIKDYRGKIESELSKICDGILNVLEAHLIPSASPAESKVFYLKMKGDYHRYLAEFKAGAERKEAAESTLVAYKSASDIATAELAPTHPIRLGLALNFSVFYYEILNSPDRACSLAKQAFDDAIAELDTLGEESYKDSTLIMQLLRDNLTLWTSDMTDEAGDEIKEASKPDGAE

SEQ ID NO: 14282 - protein, 255 aa, Arabidopsis thaliana
MSTREENVYMAKLAEQAERYEEMVEFMEKVAKTVDVEELSVEERNLLSVAYKNVIGARRASWRIISSIEQKEESKGNEDHVAIIKDYRGEIESELSKICDGILNVLEAHLIPSASPAESKVFYLKMKGDYHRYLAEFKAGAERKEAAESTLVAYKSASDIATAELAPTHPIRLGLALNFSVFYYEILNSPDRACSLAKQAFDDAIAELDTLGEESYKDSTLIMQLLRDNLTLWTSDMTDEAGDEIKEASKPDGAE

SEQ ID NO: 14283 - protein, 268 aa, Arabidopsis thaliana
MSSDSSREENVYLAKLAEQAERYEEMVEFMEKVAKTVETEELTVEERNLLSVAYKNVIGARRASWRIISSIEQKEDSRGNSDHVSIIKDYRGKIETELSKICDGILNLLEAHLIPAASLAESKVFYLKMKGDYHRYLAEFKTGAERKEAAESTLVAYKSAQDIALADLAPTHPIRLGLALNFSVFYYEILNSSDRACSLAKQAFDEAISELDTLGEESYKDSTLIMQLLRDNLTLWTSDLNDEAGDDIKEAPKEVQKVDEQAQPPPSQ

SEQ ID NO: 14284 - protein, 268 aa, Arabidopsis thaliana
MSSDSSREENVYLAKLAEQAERYEEMVEFMEKVAKTVETEELTVEERNLLSVAYKNVIGARRASWRIISSIELKEDSRGNSDHVSIIKDYRGKIETELSKICDGILNLLEAHLIPAASLAESKVFYLKMKGDYHRYLAEFKTGAERKEAAESTLVAYKSAQDIALADLAPTHPIRLGLALNSSVFYYEILNSSDRACSLAKQAFDEAISELDTLGEESYKDSTLIMQLLRDNLTLWTSDLNDEAGDDIKEAPKEVQKVDEQAQPPPSQ

SEQ ID NO: 14285 - protein, 241 aa, Arabidopsis thaliana
MENERAKQVYLAKLNEQAERYDEMVEAMKKVAALDVELTIEERNLLSVGYKNVIGARRASWRILSSIEQKEESKGNEQNAKRIKDYRTKVEEELSKICYDILAVIDKHLVPFATSGESTVFYYKMKGDYFRYLAEFKSGADREEAADLSLKAYEAATSSASTELSTTHPIRLGLALNFSVFYYEILNSPERACHLAKRAFDEAIAELDSLNEDSYKDSTLIMQLLRDNLTLWTSDLEEGGK

SEQ ID NO: 14286 - protein, 254 aa, Arabidopsis thaliana
MENEREKQVYLAKLSEQTERYDEMVEAMKKVAQLDVELTVEERNLVSVGYKNVIGARRASWRILSSIEQKEESKGNDENVKRLKNYRKRVEDELAKVCNDILSVIDKHLIPSSNAVESTVFFYKMKGDYYRYLAEFSSGAERKEAADQSLEAYKAAVAAAENGLAPTHPVRLGLALNFSVFYYEILNSPESACQLAKQAFDDAIAELDSLNEESYKDSTLIMQLLRDNLTLWTSDLNEEGDERTKGADEPQDEV

SEQ ID NO: 14287 - protein, 254 aa, Arabidopsis thaliana
MENEREKQVYLAKLSEQTERYDEMVEAMKKVAQLDVELTVEERNLVSVGYKNVIGARRASWRILSSIEQKEESKGNDENVKRLKNYRKRVEDELAKVCNDILSVIDKHLIPSSNAVESTVFFYKMKGDYYRYLAEFSSGAERKEAADQSLEAYKAAVAAAENGLAPTHPVRLGLALNFSVFYYEILNSPESACQLAKQAFDDAIAELDSLNEESYKDSTLIMQLLRDNLTLWTSDLNEEGDERTKGADEPQDEN

SEQ ID NO: 14288 - protein, 248 aa, Arabidopsis thaliana
MATTLSRDQYVYMAKLAEQAERYEEMVQFMEQLVSGATPAGELTVEERNLLSVAYKNVIGSLRAAWRIVSSIEQKEESRKNEEHVSLVKDYRSKVETELSSICSGILRLLDSHLIPSATASESKVFYLKMKGDYHRYLAEFKSGDERKTAAEDTMIAYKAAQDVAVADLAPTHPIRLGLALNFSVFYYEILNSSEKACSMAKQAFEEAIAELDTLGEESYKDSTLIMQLLRDNLTLWTSDMQEQMDEA

SEQ ID NO: 14289 - protein, 246 aa, Arabidopsis thaliana
MATTLSRDQYVYMAKLAEQAERYEEMVQFMEQLVSGATPAGELTVEERNLLSVAYKNVIGSLRAAWRIVSSIEQKEESRKNEEHVSLVKDYRSKVETELSSICSGILRLLDSHLIPSATASESKVFYLKMKGDYHRYLAEFKSGDERKTAAEDTMIAYKAAQDVAVADLAPTHPIRLGLALNFSVFYYEILNSSEKACSMAKQAFEEAIAELDTLGEESYKDSTLIMQLLRDNLTLWTSDMQMDEA

SEQ ID NO: 14290 - protein, 248 aa, Arabidopsis thaliana
MAATLGRDQYVYMAKLAEQAERYEEMVQFMEQLVTGATPAEELTVEERNLLSVAYKNVIGSLRAAWRIVSSIEQKEESRKNDEHVSLVKDYRSKVESELSSVCSGILKLLDSHLIPSAGASESKVFYLKMKGDYHRYMAEFKSGDERKTAAEDTMLAYKAAQDIAAADMAPTHPIRLGLALNFSVFYYEILNSSDKACNMAKQAFEEAIAELDTLGEESYKDSTLIMQLLRDNLTLWTSDMQEQMDEA

SEQ ID NO: 14291 - protein, 248 aa, Arabidopsis thaliana
MATTLSRDQYVYMAKLAEQAERYEEMVQFMEQLVSGATPAGELTVEERNLLSGAYKNVIGSLRAAWRIVSSLEQKEESRKNEEHVSLVKDYRSKVETELSSICSGILRLLDSHLIPSATARESKVFYLKMKGDYHRYLAEFKSGDERKTAAEDAMIAYKAAQDVAVADLAPTHPIRLGLALNFSVFYYEILNSSEKACSMAKQAFEEAIAELDTLGEESYKDSTLIMQLLRDNLTLWTSDMQEQMDEA

SEQ ID NO: 14292 - protein, 273 aa, Arabidopsis thaliana
MAATLGRDQYVYMAKLAEQAERYEEMVQFMEQLVTGATPAEELTVEERNLLSVAYKNVIGSLRAAWRIVSSIEQKEESRKNDEHVSLVKDYRSKVESELSSVCSGILKLLDSHLIPSAGASESKVFYLKMKGDYHRYMAEFKSGDERKTAAEDTMLAYKAAQDIAAADMAPTHPIRLGLALNFSVFYYEILNSSDKACNMAKQAFEEAIAELDTLGEESYKDSTLIMQLLRDNLTLWTSDMQTNQMHHIRDIKEHVKTEITAKPCVLSYYYSM

SEQ ID NO: 14293 - protein, 251 aa, Arabidopsis thaliana
MAATLGRDQYVYMAKLAEQAERYEEMVQFMEQLVTGATPAEELTVEERNLLSVAYKNVIGSLRAAWRIVSSIEQKEESRKNDEHVSLVKDYRSKVESELSSVCSGILKLLDSHLIPSAGASESKVFYLKMKGDYHRYMAEFKSGDERKTAAEDTMLAYKAAQDIAAADMAPTHPIRLGLALNFSVFYYEILNSSDKACNMAKQAFEEAIAELDTLGEESYKDSTLIMQLLRDNLTLWTSDYAGADGRGLRI

SEQ ID NO: 14294 - protein, 245 aa, Arabidopsis thaliana
MENEREKLIYLAKLGCQAGRYDDVMKSMRKVCELDIELSEEERDLLTTGYKNVMEAKRVSLRVISSIEKMEDSKGNDQNVKLIKGQQEMVKYEFFNVCNDILSLIDSHLIPSTTTNVESIVLFNRVKGDYFRYMAEFGSDAERKENADNSLDAYKVAMEMAENSLAPTNMVRLGLALNFSIFNYEIHKSIESACKLVKKAYDEAITELDGLDKNICEESMYIIEMLKYNLSTWTSGDGNGNKTDG

SEQ ID NO: 14295 - protein, 245 aa, Arabidopsis thaliana
MENEREKLIYLAKLGCQAGRYDDVMKSMRKVCELDIELSEEERDLLTTGYKNVMEAKRVSLRVISSIEKMEDSKGNDQNVKLIKGQQEMVKYEFFNVCNDILSLIDSHLIPSTTTNVESIVLFNRVKGDYFRYMAEFGSDAERKENADNSLDAYKVAMEMAENSLVPTNMVRLGLALNFSIFNYEIHKSIESACKLVKKAYDEAITELDGLDKNICEESMYIIEMLKFNLSTWTSGDGNGNKTDG

SEQ ID NO: 14296 - protein, 218 aa, Arabidopsis thaliana
MRKVCELDIELSEEERDLLTTGYKNVMEAKRVSLRVISSIEKMEDSKGNDQNVKLIKGQQEMVKYEFFNVCNDILSLIDSHLIPSTTTNVESIVLFNRVKGDYFRYMAEFGSDAERKENADNSLDAYKVAMEMAENSLAPTNMVRLGLALNFSIFNYEIHKSIESACKLVKKAYDEAITELDGLDKNICEESMYIIEMLKYNLSTWTSGDGNGNKTDG

SEQ ID NO: 14297 - protein, 159 aa, Arabidopsis thaliana
MGSGKERDTFVYLAKLSEQAERYEEMVESMKSVAKLNVDLTVEERNLLSVGYKNVIGSRRASWRIFSSIEQKEAVKGNDVNVKRIKEYMEKVELELSNICIDIMSVLDEHLIPSASEGESTVFFNKMKGDYYRYLAEFKSGNERKEAADQSLKAYEVFL

SEQ ID NO: 14298 - protein, 241 aa, Arabidopsis thaliana
MENEQSTHVHFASLSSSSERYNETFEEIKKAMKKSVQLKAELSAKERNLVSVGYKNVISARRASLEILSSIVQKEESKGNEENVKKLKNYRNKVEDELAKICNDILSVINKQLIPSSTTVDSSVLFYNMLADFSSNAESKEATDQSLDAYKRLVWYQQFQLYMTLNWTSVFLNSPESAYQLAKQAFDDAINEFDISDESNKDMTLIIQLLRDNLNMWTLDLTEREEVIFLFPYLPPLMIDR

SEQ ID NO: 14299 - protein, 196 aa, Arabidopsis thaliana
MENEQSTHVHFASLSSSSERYNETFEEIKKAMKKSVQLKAELSAKERNLVSVGYKNVISARRASLEILSSIVQKEESKGNEENVKKLKNYRNKVEDELAKICNDILSVINKQLIPSSTTVDSSVLFYNMLADFSSNAESKEATDQSLDAYKRLVWYQQFQLYMTLNWTSVFLNSPESAYQLAKQAFDDAINEFDSK

SEQ ID NO: 14300 - protein, 90 aa, Arabidopsis thaliana
MAATLGRDQYVYMAKLAEQAERYEEMVQFMEQLVTGATPAEELTVEERNLLSVAYKNVIGSLRAAWRIVSSIEQKEESRKNDEHVSLVKD

SEQ ID NO: 14301 - protein, 225 aa, Brassica napus
RYEEMVNFMEKLVTGATPSSELTVEERNLLSVAYKNVIGSLRAAWRIVSSIEQKEESRKNEEHVALVKDYRSKVETELSSVCEGILKLLEENLIPSAAASESKVFYLKMKGDYHRYMAEFKAGEERKAAAEDTMVAYKAAQDIAAADMAPTHPIRLGLALNFSVFYYEILNSSDKACDMAKQAFEEAIAELDTLGEESYKDSTLIMQLLRDNLTLWTSDMQEQMD

SEQ ID NO: 14302 - protein, 179 aa, Brassica napus
MAAATMSRDQYVYMAKLAEQAERYEEMVQFMEQLVTSATPAGELTVEERNLLSVAYKNVIGSLRAAWRIVSSIEQKEESRKNEEHVSLVKDYRSKVETELSTICSGILKLLDTHLIPSASASECRVFYLKMKGDYHRYMAEYKSGDERKTAAEDTMVAYKAAQDVAVADLAPTHPIRLG

SEQ ID NO: 14303 - protein, 163 aa, Brassica napus
AEQAERYEEMVEFMEKVAKSVDVEELSVEERNLLSVAYKNVIGARRASWRIISSIEQKEESKGNEDHVAIIKDYRGKIEAELSKICDGILNVLEAHLIPSASPAEFKVFLLKMKGDYHRYLAEFKAGAERKDAAESTLVAYKSAQDIATAELAPTHPIRLGLA

SEQ ID NO: 14304 - protein, 147 aa, Brassica napus
SWRIISSIEQKEESRGNEDHVAIIKDYRGKIETELSKICDGILNLLDSPLVPAASLAESKVFYLKMKGDYHRYLAEFKTGAERKDAAESTLVAHKSAQDIALADLAPTHPIRLGLANFSVFYYEILNSPDRACSLAKQAFDEAISEL

SEQ ID NO: 14305 - protein, 259 aa, Glycine max
MAAAPSPREENVYMAKLAEQAERYEEMVEFMEKVSAAADNEELTVEERNLLSVAYKNVIGARRASWRIISSIEQKEESRGNEDHVSVIRDYRSKIESELSNICDGILKLLDSRLIPSASSGDSKVFYLKMKGDYHRYLAEFKTGAERKEAAESTLSAYKAAQDIANAELPPTHPIRLGLALNFSVFYYEILNSPDRACNLAKQAFDEAIAELDTLGEESYKDSTLIMQLLRDNLTLWTSDMQDDGADEIKEAAPKQDDQ

SEQ ID NO: 14306 - protein, 261 aa, Glycine max
MASAPTPREEFVYMAKLAEQAERYEEMVEFMEKVSASAESEELTVEERNLLSVAYKNVIGARRASWRIISSIEQKEESRGNEDHVAVIRDYRSKIEAELSNICDGILKLLDTRLVPSAASGDSKVFYLKMKGDYHRYLAEFKTGADRKEAAESTLSAYKAAQDIANTELPPTHPIRLGLALNFSVFYYEILNSPDRACSLAKQAFDEAIAELDTLGEESYKDSTLIMQLLRDNLTLWTSDMQDDGADEIKEAAPKGDGEQN

SEQ ID NO: 14307 - protein, 274 aa, Glycine max
  unsure (1)..(274): unsure at all Xaa locations
LVHEGTMSAEKERETQVYLAKLAEQAERYEEMVECMKKVAKLDLDLTVEERNLLSVGYKNVIGARRASWRIMSSIEQKEESKGNEHNVKLIKSYCQKVEEELSKICGDILTIIDQHLIPSSASAEASVFYYKMKGDYFRYLAEFKTDQERKEAAEQSLKGYEAASATANTDLPSTHPIRLGLALNFSVFYYEIMNSPERACHLAKQAFDEAIAELDTLSEESYKDSTLIMQLLRDNLTLWTSDLPEDGGEDSIKAEETKPSEPEXIDVIQXSEI

SEQ ID NO: 14308 - protein, 299 aa, Glycine max
SLSATMSVEKERETQVYLAKLAEQAERYEEMVECMKKVAKLDLDLTVEERNLLSVGYKNVIGARRASWRIMSSIEQKEESKGNEHNVKLIKSYCQKVEEELSKICGDILTIIDQHLIPSSGSAEASVFYYKMKGDYFRYLAEFKTDQERKEAAEQSLKGYEAASATANTDLPSTHPIRLGLALNFSVFYYEIMNSPERACHLAKQAFDEAIAELDTLSEESYKDSTLIMQLLRDNLTLWTSDLPEDGGEDNIKAEEAKPSEPEQCDSVVRNLRYSPRGHFSAFLAMDLDRTIGTVVAIS

SEQ ID NO: 14309 - protein, 305 aa, Glycine max
SLSATMSVEKERETQVYLAKLAEQAERYEEMVECMKKVAKLDLDLTVEERNLLSVGYKNVIGARRASWRIMSSIEQKEESKGNEHNVKLIKSYCQKVEEELSKICGDILTIIDQHLIPSSGSAEASVFYYKMKGDYFRYLAEFKTDQERKEAAEQSLKGYEAASATANTDLPSTHPIRLGLALNFSVFYYEIMNSPERACHLAKQAFDEAIAELDTLSEESYKDSTLIMQLLRDNLTLWTSDLPEDGGEDNIKAEEAKPSEPEQCDSVVRNLRYSPRGHFSAFLAMDLDPDNRDCGGHFIILVLS

SEQ ID NO: 14310 - protein, 259 aa, Glycine max
MASTKERENFVYTAKLAEQAERYEEMVEAMKNVAKLNVELTVEERNLLSVGYKNVVGARRASWRILSSIEQKEEAKGNDVSVKRIKEYRQKVESELSNICSDIMTVIDEHLIPSSSAGEPSVFFYKMKGDYYRYLAEFKSGDERKEAADHSMKAYQSASTTAEAELPPTHPIRLGLALNFSVFYYEILNSPERACHLAKQAFDEAISELDTLSEESYKDSTLIMQLLRDNLTLWTSDIPEEGAEEQKVDSARAAGGDNA

SEQ ID NO: 14311 - protein, 261 aa, Glycine max; identical to SEQ ID NO: 455

SEQ ID NO: 14312 - protein, 261 aa, Glycine max; identical to SEQ ID NO: 455

SEQ ID NO: 14313 - protein, 318 aa, Glycine max
  unsure (1)..(318): unsure at all Xaa locations
QKQKHSTTNQSQPFGSPTNKIVTTTHLLLAASESLSLFLFLSHPDLAKKKKTQWAASAPTPREEFVYMAKLAEQAERYEEMVEFMXEKVSASAESEELTVEERNLLSVAYKNVIGARRASWRIISSIEQKEESRGNEDHVAVIRDYRSKIEAELSNICDGILKLLDTRLVPSAASGXDSKVFYLKMKGDYHRYLAEFKTGXADRKEAAESTLSAYKAAQDIANTELPPTHPIRLGLALNFSVFYYEILNSPDRACSLAKQAFDEAIAELDTLGEESYKDSTLIMQLLRDNLTLWTSDMQDDGADEIKEAAPKGDGEQN

SEQ ID NO: 14314 - protein, 257 aa, Glycine max
MADSSREENVYMAKLAEQAERYEEMVEFMEKVAKTVEVEELTVEERNLLSVAYKNVIGARRASWRIISSIEQKEESRGNEDHVAIIKEYRGKIEAELSKICDGILNLLESNLIPSAASPESKVFYLKMKGDYHRYLAEFKTGAERKEAAESTLLAYKSAQDIALADLAPTHPIRLGLALNFSVFYYEILNSPDRACNLAKQAFDEAISELDTLGEESYKDSTLIMQLLRDNLTLWTSDITDDAGDEIKETSKQQPGE

SEQ ID NO: 14315 - protein, 259 aa, Glycine max
MASTKERENFVYTAKLAEQAERYEEMVEAMKNVAKLNVELTVEERNLLSVGYKNVVGARRASWRILSSIEQKEEAKGNDVSVKRIKEYRQKVESELSNICSDIMTVIDEHLIPSSSAGEPSVFFYKMKGDYYRYLAEFKSGDERKEAADHSMKAYQLASTTAEAELAPTHPIRLGLALNFSVFYYEILNSPERACHLAKQAFDEAISELDTLSEESYKDSTLIMQLLRDNLTLWTSDIPEDGAEEQKVDSARAAGGDDA

SEQ ID NO: 14316 - protein, 261 aa, Glycine max
MTASKDRENFVYIAKLAEQAERYEEMVESMKNVANLDVELTVEERNLLSVGYKNVIGARRASWRILSSIEQKEETKGNELNAKRIKEYRQKVELELSNICNDVMRVIDEHLIPSAAAGESTVFYYKMKRDYYRYLAEFKSGNEKKEAADQSMKAYESATAAAEADLPPTHPIRLGLALNFSVFYYEILNSPERACHLAKQAFDEAISELDTLNEESYKDSTLIMQLLRDNLTLWTSDIPEDGEDAQKVNGTAKLGGGEDAE

SEQ ID NO: 14317 - protein, 261 aa, Glycine max
  unsure (1)..(261): unsure at all Xaa locations
MTASKDRENFVYIAKLAEQAERYEEMVESMKNVANLDVELTVEERNLLSVGYKNVIGARRASWRILSSIEQKEETKGNELNAKRIKEYRQKVELELSNICNDVMRVIDEHLIPSAAAGESTVFYYKMKGDYYRYLXEFKXGNEKKEAXDXSMKAYESATTAAEADLPPTHPIRLGLALNFSVFYYEILNSPEXACHLAKQAFDEAISELDTLNEESYKDSTLIMQLLRDNLTLWTSDIPEDGEDAQKVNGTAKLGGGEEAE

SEQ ID NO: 14318 - protein, 268 aa, Glycine max
  unsure (1)..(268): unsure at all Xaa locations
FRKDRRWPASKDRENFVYIAKLAEQAERYEEMVESMKNVANLDVELTVEERNLLSVGYXKNVIGARRASWRILSSIEQKEETKGNELNAKRIKEYRQKVELELSNICNDVMTVIDEHLIPSAAAGESTVFYYKMKGDYYRYLAEFKAGNEKKEAADQSMKAYESATTAAEADLPPTHPIRLGLALNFSVFYYEILNSPERACHLAKQAFDEAISELDTLNEESYKDSTLIMQLLRDNLTLWTSDIPEDGEDAQKVNGTAKLGGGEEAE

SEQ ID NO: 14319 - protein, 257 aa, Glycine max
MSDSSREENVYMAKLADEAERYEEMVEFMEKVAKTVEVEELTVEERNLLSVAYKNVIGARRASWRIISSIEQKEESRGNEDHVAIIKEYRGKIEAELSKICDGILNLLESNLIPSAASPESKVFYLKMKGDYHRYLAEFKTGAERKEAAESTLLAYKSAQDIALADLAPTHPIRLGLALNFSVFYYEILNSPDRACNLAKQAFDEAISELDTLGEESYKDSTLIMQLLRDNLTLWTSDITDIAGDEIKETSKQQPGE

SEQ ID NO: 14320 - protein, 257 aa, Glycine max; identical to SEQ ID NO: 14319

SEQ ID NO: 14321 - protein, 259 aa, Glycine max
MASTKERENFVYTAKLAEQAERYEEMVEAMKNVAKLNVELTVEERNLLSVGYKNVVGARRASWRILSSIEQKEEAKGNDVSVKRIKEYRQKVESELSNICSDIMTVIDEHLIPSSSAGEPSVFFYKMKGDYYRYLAEFKSGDERKEAADHSMKAYQLASTTAEAELASTHPIRLGLALNFSVFYYEILNSPERACHLAKQAFDEAISELDTLSEESYKDSTLIMQLLRDNLTLWTSDIPEEGAEEQKVDSARAAGGDDA

SEQ ID NO: 14322 - protein, 258 aa, Glycine max
MASTKERENFVYVAKLAEQAERYEEMVEAMKNVANLNVELTVEERNLLSVGYKNVVGARRASWRILSSIEQKEEAKGNDVSVKRIKEYRLKVESELSNICSDIMTVIDEYLIPSSSSGEPSVFFYKMKGDYYRYLAEFKSGDERKEAADHSMKAYQLASTTAEAELASTHPIRLGLALNFSVFYYEILNSPERACHLAKQAFDEAISELDTLSEESYKDSTLIMQLLRDNLTLWTSDIPEDGEEQKVDSARADGGDDA

SEQ ID NO: 14323 - protein, 258 aa, Glycine max; identical to SEQ ID NO: 14322

SEQ ID NO: 14324 - protein, 263 aa, Glycine max
MATFSKERENFVYVAKLAEQAERYDEMVEAMKKVAKLDVELSVEERNLFSVGYKNVVGSRRASWRILSSIEQKEDSKGNELHVKHIRDYRNKVELELSNICSDIMIILDEHLIPSTNIAESTVFYYKMKGDYYRYLAEFKAGNEKKEVADQSLKAYQTASTTAESELQPTHPIRLGLALNFSVFYYEILNSPERACHLAKQAFDDAVSELDTLNEDSYKDSTLIMQLLRDNLTLWTSDIPEEGEDLKMESAARVDQGEDELGR

SEQ ID NO: 14325 - protein, 263 aa, Glycine max
MATFSKERENFVYVAKLAEQAERYDEMVDAMKKVAKLDVELSVEERNLFSVGYKNVVGSRRASWRILSSIEQKEDSKGNELHVKHIRDYRNKVELELSNICSDIMIILDEHLIPSTNIAESTVFYYKMKGDYYRYLAEFKAGNEKKEVADQSLKAYQTASTTAESELQPTHPIRLGLALNFSVFYYEILNSPERACHLAKQAFDDAVSELDTLNEDSYKDSTLIMQLLRDNLTLWTSDIPEEGEDLKMESAARVDQGEDELGR

SEQ ID NO: 14326 - protein, 263 aa, Glycine max; identical to SEQ ID NO: 14325

SEQ ID NO: 14327 - protein, 256 aa, Glycine max
MAAAEGLNREQYVYLAKLSEQAERYEEMVEFMQKVVVGSTPASELTVEERNLLSVAYKNVIGSLRAAWRIVSSIEQKEEGRKNDDHVSLVKHYRSKVENELTQVCASILSLLDSNLVPSASASESKVFYLKMKGDYHRYLAEFKVGDERKTATEDTMLSYKAAQDIASADLPPTHPIRLGLALNFSVFYYEILNQSDKACAMAKQAFEEAIAELDTLGEESYKDSTLIMQLLRDNLTLWTSDVQDQLDEPVNVTME

SEQ ID NO: 14328 - protein, 273 aa, Glycine max
  unsure (1)..(273): unsure at all Xaa locations
MAAAPSPREENVYMAKLAEQAERYEEMVEFMEKVSAAADNEELTVEERNLLSVAYKNVIGARRASWRIISSIEQKXEESRGNEDHVSVIRDYRSKIESELSNICDGILKLLDSRLIPSASSGDSKVFYLKMKGDYXHRYLAEFKTGRRXRKEAXAESTLSAYKAAQDIANXAELPPTHXPIRXLGLALNFSVFYYEILNSPDRACNLAKQAFDEAIAELDTLGEESYKDSTLIMQLLRDNLTLWTSDMQDDGADEIKEAAPKPDDQXKYFTAN

SEQ ID NO: 14329 - protein, 264 aa, Glycine max
  unsure (1)..(264): unsure at all Xaa locations
MAAAPSPREENVYMAKLAEQAERYEEMVEFMEKVSAAADNEELTVEERNLLSVAYKNVIGARPRPRGRIISSIEQKEESRGNEDHVSVIRDYRSKIESELSNICDGILKLLDSRLIPSASSGDSKVFYLKMKGDYHRYLAEFKTGAXERKEAXAESTLSAYKAAQDIANAELPXPTHPIRXLGLALNFSVFYYEILNSPDRACNLAKQAFDEAIAELDTLGEESYKDSTLIMQLLRDNLTLWTSDMQDDGADEIKEAAPKQDDQ

SEQ ID NO: 14330 - protein, 247 aa, Glycine max
AEGLNREQYVYLANVSEQAERYEEMVEFMQKVVVGSTPASELTVEERNLLSVAYKNVIGSLRAAWRIVSSIEQKEEGRKNDDHVSLVKHYRSKVENELTQVCATILSLLDSNLVPSASASESKVFYLKMKGDYHRYLAEFKVGDERKTATEDTMLSYKAAQDIASADLPPTHPIRLGLALNFSVFYYEILNQSDKACAMAKQAFEEAIAELDTLGEESYKDSTLIMQLLRDNLTLWTSDVQDQLDEP

SEQ ID NO: 14331 - protein, 331 aa, Glycine max
  unsure (1)..(331): unsure at all Xaa locations
LIFFXVLFSXFCLIFDLVRQSLFYAQNLHXMVECMKKVAKLDLDLTVEERNLLSVGYKNVIGARRASWRIMSSIEQKEESKGNEHNVKLIKSYCQKVEEELSKICGDILTIIDQHLIPSSASAEASVFYYKMKGDYFRYLAEFKTDQERKEAAEQSLKGYEAASATANTDLPSTHPIRLGLALNFSVFYYEIMNSPERACHLAKQAFDEAIAELDTLSEESYKDSTLIMQLLRDNLTLWTSDLPEDGGEDSIKAEETKPSEPEQCDSIVRNLRYSQRGHFLAMDLDPDNRDCGWWPFHNSYALLISLPKLEDLHPFFFLQTFFLLPSLCFK

SEQ ID NO: 14332 - protein, 269 aa, Glycine max
  unsure (1)..(269): unsure at all Xaa locations
MTASKDRENFVYIAKLAEQAERYEEMVESMKNVANLDVELTVEERNLLSVGYKNVIWSRRAAWRILSFXIEQKEETKGNXELNAKRXLKEYRQKVELELSNICNDVMXRVIDEHLIPSAAAGESTVFYYKMKGDYYRYLAEFKSGNEKKEAADQSMKAYESATAAAEXADLPPTHPXIRLGLALNFSVFYYEILNSPERACHLAKQAFDEAISELDTLNEESYKDSTLXIMQLLXRDNLTLWTSDIPEDGEDAQKVNGTAKLGGGEDAE

SEQ ID NO: 14333 - protein, 333 aa, Glycine max
  unsure (1)..(333): unsure at all Xaa locations
MLPSMDNTCPCMSDITQIIRKALIPCYCLYFPCIFCVSPNERATLHTNTDLVAMASAPTPREEFVYMAKLXAEQAERYEEMVEFMEKVSASAESEELTVEERNLLXSVAYKNVIGARRASWRIISSIEQKEESRGXNEDHVAVIRDYRSKIEAELSNICDGILKLLDTRLVPSAASGXDSKVFYLKMKGDYPRYLAEFKTGAXDRKEAXAESTLSPYKAAQDIANTEFAXPTSPLSGLGLALNFSXVFYYEILNSPXDRGCSLAKQAFDEAIAELDTLGEESYKDSTLIMQLLRDNLTLWTSDMQDDGADEIKEAAPKGCTGNKIKHTILSAY

SEQ ID NO: 14334 - protein, 219 aa, Glycine max
  unsure (1)..(219): unsure at all Xaa locations
MDKNELVQKAKLAEQAERYDDMAACMKSVTEQGAELSNEERNLLSVAYKNVVGARRSSWRVVSSIEQKTEGAEKKQQMAREYREKIETELRDICNDVLSLLEKFLIPNASQPESKVFYLKMKGDYYRYLAEVAAGDDKKGIVDQSQQAYQEAFEISKKEMQPTHPIRLGLALNFSVFYYEILNSPEKACSLXKTAFDEAIAELDTLSEESYKDSTLIMX

SEQ ID NO: 14335 - protein, 222 aa, Glycine max
  unsure (1)..(222): unsure at all Xaa locations
XSTHASGEKTTEGKNVIGARRASWRILSSIEQKEETKGNELNAKRIKEYRQKVELELSNICNDVMRVIDEHLIPSAAAGESTVFYYKMKGDYYRYLAEFKSGNEKKEAADQSMKAYESATAAAEADLPPTHPIRLGLALNFSVFYYEILNSPERACHLAKQAFDEAISELDTLNEESYKDSTLIMQLLRDNLTLWTSDIPEDGEDAQKVNGTAKLGGGEDAE

SEQ ID NO: 14336 - protein, 258 aa, Glycine max
  unsure (1)..(258): unsure at all Xaa locations
MASTKERENFVYTAKLAEQAERYEEMVEAMKNVAKLNVELTVEERNLLSVGYKNVVGARRASWRILSSIEQKEEAKGNDVSVKRIKEYRQKVESELSNICSDIMTVIDEHLIPSSSAGEPSVFFYKMKGDYYRYLAEFKSGDERKEAADHSMKAYQSASTTAEAELPPTHPIRLGXALNFSXFYYEILNSXERACHLAKXAFXDEAISEXLDTLNQGVYXXPXIIASFLXGQIFTPCGNFXEHFPWKKKGSLXGEPKK

SEQ ID NO: 14337 - protein, 226 aa, Glycine max
  unsure (1)..(226): unsure at all Xaa locations
MGDREQLLQRARLAEQAERYDDMASAMKAVTELNEPLSNEDRNLLSVAYKNVVGARRSSWRVISSIEQKTMADGNEKKLEKVKAYREKIEKELETVCNDVLALLDKFLIKNCNDFQYESKVFYLKMKGDYYRYLAEVASGEKKNSVVEASEAAYKEAFEISKEHMQPTHPIRLGLALNFSVFYYEIQNAPEQACLLAKQAFDDAIAELDTLNEDSYKDXTLIMQLX

SEQ ID NO: 14338 - protein, 222 aa, Glycine max
MEAIHLKSSKFAAMMLAGAPPHLDSMSPENEKEEESRRREKRGNEDHVAIIKEYRGKIEAELSKICDGILNLLESNLIPSAASPESKVLYLKMKGDYHRYLAEFKTGAERKEAAESTLLAYKSAQDIALADLAPTHPIRLGLALNFSVFYYEILNSPDRACNLAKQAFDEAISELDTLGEESYKDSTLIMQLLRDNLTLWTSDITDDAGDEIKETFKQQPGE

SEQ ID NO: 14339 - protein, 259 aa, Glycine max
  unsure (1)..(259): unsure at all Xaa locations
MAGASLEDNGGITKSAEQAXRYXEMVEFMDKVAKTVDVDEFTVEERNLLSVAYKNVIGARRAIGRIIFYIEHNEESRGNEDHVRIIKEYGGKIEAELSKISHGILNLLXSNLMRSSGCGGGEXFYLKMXGDYHRDLAEFKTGAEGKEAAESTLLAYKSAQEIALADLAPTPPXIRLGLALNFSVVCYEILSSPDRAWNLAKXQAFDGAISELHTLGEESYKDRAWIGQLLRGNLTLWASDMRVWVGKECVYCSXPSPGL

SEQ ID NO: 14340 - protein, 165 aa, Glycine max
  unsure (1)..(165): unsure at all Xaa locations
XEMVDAMKKVAKLDVELSVEERNLFSVGYKNVVGSRRASWRILSSIEQKEDSKGNELHVKHIRDYRNKXKGDYYRYLAEFKAGNEKKEVADQSLKAYQTASTTAESELQPTHPIRLGLALNFSVFYYEILNSPERACHLAKQAFDDAVSELDTLNEDSYKDSTLX

SEQ ID NO: 14341 - protein, 179 aa, Glycine max
  unsure (1)..(179): unsure at all Xaa locations
MAASKDRENFVYIAKLAEQAERYEEMVESMKNVTNLDVELTVEERNLLSVGYKNVIGARRASWRILSSIEQKEETKGNELNAKRIKEYRQKVELELSNICNDVMTVIDEHLIPSAAAGESNWVYYKMKGDYYRYLAEXKAGNEKKXAADQAMKAYXKSATTAAKADLPPTIPSEWGLAF

SEQ ID NO: 14342 - protein, 148 aa, Glycine max
  unsure (1)..(148): unsure at all Xaa locations
DLNRFLKMVSAREEFVYMAKLAEQAERYEEMVEFMEKVSASVDGDELTVEERNLLSVAYKNVIGARRASWRIISSIEQKEESRGNDDHVAAIRDYRGKIETELTGICEGILKLLDSRLVPAAASGDSKVXYLKMKGDYHRYLAEFKTG

SEQ ID NO: 14343 - protein, 157 aa, Glycine max
  unsure (1)..(157): unsure at all Xaa locations
DELNAKRIKEYRQKVELELSNICNDVMTVIDEHLIPSAAAGESTVFYYKMKGDYYRYLAEFKAGNEKKEAADQSMKAYESATTAAEADLPPTHPIRLGLALNFSVFYYEILNSPERACHLAKQAFDEAISEQDSMHAFGNETSLLIRVLARDRVPLX

SEQ ID NO: 14344 - protein, 132 aa, Glycine max
  unsure (1)..(132): unsure at all Xaa locations
MSSPREENVYLAKLAEQAERYEEMVEFMEKVAKTVDSEELTVEERNLLSVAYKNVIGARRASWRIISSIEQKEESRGNEDHVAIIKDYRGKIETELSKICDGILNLLDSHLVPAASLAESKVFYLKMKGDYX

SEQ ID NO: 14345 - protein, 147 aa, Glycine max
  unsure (1)..(147): unsure at all Xaa locations
MAVSSREDYVYMAKLSEQAERYEEMVEFMEKLSAAADGTELTVEERNLLSVAYKNVIGARRASWRIISSIEQKEESRGNEDRVKTIRDYKAKIESELAGICDGILKLLESALVPSAASEDSKVFYLKMKGDYYRYLAEFKIGXERDD

SEQ ID NO: 14346 - protein, 140 aa, Glycine max
  unsure (1)..(140): unsure at all Xaa locations
XLDSRLIPCFFSGDSEVFYLMRKGDDLRYLAXFKTGAQRLEGAESTVFAYKAAQDIGNAELPPTGPIMLGLALSFSVFYYEILNSPDRACNLAKQACDEAIAELDTLGEESYRDSTVIMQLLRDNLTLWTSDMADDGADE

SEQ ID NO: 14347 - protein, 134 aa, Glycine max
  unsure (1)..(134): unsure at all Xaa locations
XFXMYVFYRYLAEFKSGTERKDAAENTMVAYKAAQEIALKELPPTHPIRLGLALNFSVFYYEILNSPDRACDLAKQAFDEAISELDSLSEESYKDSTLIMQLLRDNLTLWTSDISEDAAEEMKDAPKGESGDGQ

SEQ ID NO: 14348 - protein, 141 aa, Glycine max
  unsure (1)..(141): unsure at all Xaa locations
XEFGTRESRGNEDHVSVIRDYRSKIESELSNICDGILKLLDSRLIPSASSGDSKVFYLKEKGDYHRYLAEFKTGAERKEAAESTLSAYKAAQDIANAELAPXHPIRLGLXLNFSXFYYEILNSPDRACNLAKQALDEAIAX

SEQ ID NO: 14349 - protein, 133 aa, Glycine max
  unsure (1)..(133): unsure at all Xaa locations
XERYLAEFKTGAERKEAAESTLSAYKAAQAIANAELPPTHPIRLGLALNFSVFYYEILNSPDRACTLAKQAFDEAIAELDPLGEESSKDSTLIMQLLRDTLTLWTSDMQDDGADEIKEAAPKPDDXXKYFTVN

SEQ ID NO: 14350 - protein, 157 aa, Glycine max
  unsure (1)..(157): unsure at all Xaa locations
XRGDPASVVLLRLPSFADFLSLTRSRTRALTLXDSIEQKEESRGNEDHVSVIRDYRAKIECELSNICDGVLKLLDSRLIPSASSGDSKVFYLKMKGDYHRYLAEFKTGAERKEAAESTLSAYKGAQDIANAELAPTHPIRLGLALNFSVFYYEILNX

SEQ ID NO: 14351 - protein, 135 aa, Glycine max
  unsure (1)..(135): unsure at all Xaa locations
MSPAEPTRDESVYMAKLAEQAERYEEMVEFMERVAKATGGAGPGEELSVEERNLLSVAYKNVIGARRASWRIISSIEQKEEGRGNDAHAATIRSYRSKIEAELAKICDGILALLDSHLVPSAGAAESKVFYXQDX

SEQ ID NO: 14352 - protein, 182 aa, Glycine max
  unsure (1)..(182): unsure at all Xaa locations
MASAPTPHKEIMYMAKLAEQAKRYKDMAEFMETVSSSVESXELNVEERTLLSVPYNNEIIARQSSWRIMCLIEQMEESRXTNDHXSVIRDXPSKIEAKLXNICDGMLKLLNTRLVRCDDCGDYKDFYLMMKADYHMHLAEFKTGSNPREADQSTLSCYTASHDIAHTELPTTDPMRLRLALN

SEQ ID NO: 14353 - protein, 123 aa, Glycine max
  unsure (1)..(123): unsure at all Xaa locations
METEREKQVYSAKLSEQTERYDEMVEAMKKVAQMDVELTVEERNLVSVGYKNVIGARRASWRILSSIEQKEESKGNEENVKRIQNYRKRVEEELAKVCNDILSVIDKHLIPSSTAVESTVFFX

SEQ ID NO: 14354 - protein, 162 aa, Glycine max
  unsure (1)..(162): unsure at all Xaa locations
XAAAPSPNEENVYMAKLAEQAERYEEMVEVIENDSAAADNEELTVYERNLLSVTYKNVIGARRTSWRIISSIDHKEESHSNDDHVYVIRDYRSKIYSNLSNICDSILKLLNCLLIPFASSYEFKVFYLDIKADYPQYLIKFKTSTXANEADDNTLFTYKPVH

SEQ ID NO: 14355 - protein, 109 aa, Glycine max
  unsure (1)..(109): unsure at all Xaa locations
XCMPAEAELPPTHPIRLGLALNFSVFYYEILNSPERACHLAKQAFDEAISELDTLSEESYKDSTLIMQLLRDNLTLWTSDIPEEGAEEQKVDSARAAGGDNAXVGYVPI

SEQ ID NO: 14356 - protein, 195 aa, Glycine max
  unsure (1)..(195): unsure at all Xaa locations
XAVVPSSSEXNVYMANVAEQAERYLXMVEFMEKVSAAADNXELTVEDRNLLSVDYYNVDRRRRALCRIISSIDQKEESRGNNDHVYVILDYRSKIESXELSNMCNGILRLVDSHMMLSAFCGDSKVCYLKMKEDDHRYLAEFMSGAKRREASDSTLSACRVAQHDANARSDATASDKRGHALDYMYETXDVLILX

SEQ ID NO: 14357 - protein, 118 aa, Glycine max
  unsure (1)..(118): unsure at all Xaa locations
MAVSAREEFVYMAKLAEQAERYEEMVEFMEKVSAAVDGDELTVEERNLLSVAYKNVIGARRASWRIISSIEQKEESRGNDDHVTAIRDYRSKIETELSGICDGILKLLDSRLVPAAAX

SEQ ID NO: 14358 - protein, 120 aa, Glycine max
  unsure (1)..(120): unsure at all Xaa locations
XTVIDEHLIPSSSAGEPSVFFYKMKGDYYRYLAEFKSGDERKEAADHSMKAYQXACHLAKQAFDEAISELDTLSEESYKDSTLIMQLLRDNLTLWTSDIPEEGAEEQKVDSARAAGGDNA

SEQ ID NO: 14359 - protein, 125 aa, Glycine max
  unsure (1)..(125): unsure at all Xaa locations
MATFFKERENFVYVAKLAEQAERYDEMVDAMKKVAKLDVELSVEERNLFSVGYKNVVGSRRASWRILSSIEQKEDSKGNELHVKHIRDYRNKVELELSNICSDIMIILDEHLIPSTNIAESTVFX

SEQ ID NO: 14360 - protein, 110 aa, Glycine max
  unsure (1)..(110): unsure at all Xaa locations
MSSSSREENVYMAKLAEQAERYEEMVEFMEKVAKSVDNEELTVEERNLLSVAYKNVIGARRASWRIISSIEQKEESKGNEDHVAIIKDYRGXIEAELSXICDGILNVLEX

SEQ ID NO: 14361 - protein, 112 aa, Glycine max
MAQPAELSREENVYMAKLAEQAERYEEMVEFMEKVAKTVDSEELTVEERDLLSVAYKNVIGARRASWRIISSIEQKEESRGNEDRVTLIKDYRGKIEVELTKICDGILKLLD

SEQ ID NO: 14362 - protein, 100 aa, Glycine max
  unsure (1)..(100): unsure at all Xaa locations
SAQDIALADLAXTHPIRLGLALNFSVFYYEIPNSSDRACNLAKQAFDEAISELDTLGEESYKDSTLIMQLLRDNLTLWTSDITDDAGDEIKETSKQQPGE

SEQ ID NO: 14363 - protein, 133 aa, Glycine max
  unsure (1)..(133): unsure at all Xaa locations
MADSSREENVYMAKLAEQAERYEEMVEFMEKVAKTVEVEELTVEERNLLSVAYKNVIGARRASWRIISYIEHKEESRGNEDHVAIIKEYKGKIEFKTGADRKEVXKSTLLAYKSAQDIATADLXPTHPIRLGX

SEQ ID NO: 14364 - protein, 89 aa, Glycine max
  unsure (1)..(89): unsure at all Xaa locations
XDIALADLAPTHPIRLGLALNFSVFYYEILNSTDRACNLAKQAFDEAISELDSLGEESYKDSTLIMQLLRDNLTLWTSDTNEDRGDEIX

SEQ ID NO: 14365 - protein, 108 aa, Glycine max
  unsure (1)..(108): unsure at all Xaa locations
MTAPAELSREENVYMAKLAEQAERYEEMVEFMEKVAKTVDSEELTVEERNLLSVAYKNVIGARRASWRIISSIEQKEESRGXEDRVTLIKEYRGXIETELSKICDGIL

SEQ ID NO: 14366 - protein, 130 aa, Glycine max
MTVSKDRENFVYMVKLVEQAVRLEEMEVSQKNVANLDVELTVEERNLLSDGYKNVIGARRACWRILPFIEQKEETKGNELNAKRIKEYRLNGELELSNICDDDMRVTDEHLIPSAAGGESTEDYYTMNGD

SEQ ID NO: 14367 - protein, 135 aa, Glycine max
  unsure (1)..(135): unsure at all Xaa locations
XLEDDDRYLAEFKACNDTNEAADHSIRAYESAALAVHADTPPTHPMRLGVAGNNSERYYEILNSPRRACHLAKQAFHESISELDTLHEESCXDCTLSMHLLRDNLTVWTSGIPEDGEDAPKVNGTGKLGRGEDAP

SEQ ID NO: 14368 - protein, 115 aa, Glycine max
  unsure (1)..(115): unsure at all Xaa locations
MATAAATREEMVYLAKLAEQAERYEEMVEFMEKVVAAAGTGELTVEERNLLSVAYKNVIGARRASWRIVSSIEQKEEGRGAAGHAAAARGYRALVEAELSNICAGILRLLDERLX

SEQ ID NO: 14369 - protein, 139 aa, Glycine max
  unsure (1)..(139): unsure at all Xaa locations
XASATTPREEFVYMANLAEQAERYDEMVEFMEKVSGNAENXELTVEEHNQLCVTYKNRIRTSRACWRIISXIEQNEESQGNEDHGPVIRSYRSQIKAELXHIVDGILXLIERTXITTSATGHXRVIYXFMKGHYYRSLS

SEQ ID NO: 14370 - protein, 182 aa, Glycine max
  unsure (1)..(182): unsure at all Xaa locations
MDDSSGEENIDTAKLAAQAARYEEMVVFMAKXXNTVVAEVLTKEERNLLCVSYTNGIDTMXRALWMIMSSIVLQDESIGNVDHVVIIKEDRCVNEGELIMNCDGILNLLESNLIPFIAFPDSKIHFLEMKGDSEETLAQFKTGAETKDADESTFIADRXSHDIAFVDLAPTHPIRLGPALTX

SEQ ID NO: 14371 - protein, 105 aa, Glycine max
  unsure (1)..(105): unsure at all Xaa locations
XAXKTAQDIWNAELPPXTHPNRVGPAFNFFGFYYEILNFPDWACNLAKQGFDEAIAELDTLGEESFKDSPLVMQLLCDNLPLWAFAMQGDGADXIKKAAPKPDGQ

SEQ ID NO: 14372 - protein, 114 aa, Glycine max
  unsure (1)..(114): unsure at all Xaa locations
XAASKDRENCSCIAKLAEHAERYEEMVESLKNEANLDVELTEEERNLLSVGYKNVIGARRASWKILSSIRQLEXTKGNEXNAKRIKDNTHXVKLELTNICNDEMTVIDEHLMAS

SEQ ID NO: 14373 - protein, 88 aa, Glycine max
  unsure (1)..(88): unsure at all Xaa locations
XDIAHADLAPTHPIKLSPALNISVLYYEILSTPDRACNIANQASDEAIAALDIPXEEYHKDSTPIMQLLRDNITXWSADTNEDGSDDX

SEQ ID NO: 14374 - protein, 87 aa, Glycine max
  unsure (1)..(87): unsure at all Xaa locations
XSTXKERETHVCVAKLSEQAXRYEEMVECMKTIAKLDLELTVEERNLLSVGYKNVIGARRASWRIMSSIEQKEESXGNESTAXLLKN

SEQ ID NO: 14375 - protein, 93 aa, Glycine max
  unsure (1)..(93): unsure at all Xaa locations
XSAPTTREDYEYMAKLADQSTRYEEMEEFMNKVYLSAXSYELTVEERNLLSVAYKNMIGARRASXRIISSIEQKEESRSNXDHCPVIHDYRSR

SEQ ID NO: 14376 - protein, 88 aa, Glycine max
  unsure (1)..(88): unsure at all Xaa locations
XAAAPSPREENEYMAKLADQAARYEEMVETMENVSAAVDNQELTVKERNLLSPAYKNVIGARRASRRIISSIEQKDESHTNQDHESVI

SEQ ID NO: 14377 - protein, 118 aa, Glycine max
  unsure (1)..(118): unsure at all Xaa locations
XPDLAKKKKTQVASDALPPPQRKSSVYTVRILAGARXRAATREIASLEQKERGRGNXEDHVSRLRDYRSRSRAELSNICDGMLKLLDTRLVPSAASGDSKVFYLKMKGDYHRYLAEFX

SEQ ID NO: 14378 - protein, 74 aa, Glycine max
  unsure (1)..(74): unsure at all Xaa locations
XREENVYMAKLAEHAERYEEMVEFMENVSAAADNEELTVEEMNLLSCAYKNVIXARRASWLIISSIXQIEESRA

SEQ ID NO: 14379 - protein, 68 aa, Glycine max
NSSDRACNLAKQAFDEAISELDTLGEESYKDSTLIMQLLRDNLTLWTSDITDDAGDEIKETSKQQPGE

SEQ ID NO: 14380 - protein, 126 aa, Glycine max
  unsure (1)..(126): unsure at all Xaa locations
NTKESXNGVTITSVAXQAPRYEKMVEALNNEAKLNVXLTVEERNLLSVGYKNLVGAPWASWRILSSIEQKEKSKGNEDSVNRIXKARMLNAESRVSNMCNACTTVMDEHLMAYSSSDEPTVDFYKX

SEQ ID NO: 14381 - protein, 132 aa, Glycine max
  unsure (1)..(132): unsure at all Xaa locations
XADSSREENVFMAKLAEHADRYEEMVEFMEKVAKTVEVEELTVEDRNLLYAAYKNAIAARRALPTTTSSIDRKEETPCAEDHLAMVEEPSGTLAAYIPAICRVRXXLRSYSLIPSASSAPSSTFXVKIDGDY

SEQ ID NO: 14382 - protein, 72 aa, Glycine max
  unsure (1)..(72): unsure at all Xaa locations
MAASAPTPREDFVXMANLAEXAERYEEMVEFMEKVSASAESEELTVEERNLLSVAYKNVIGARRASWRIISX

SEQ ID NO: 14383 - protein, 71 aa, Glycine max
  unsure (1)..(71): unsure at all Xaa locations
MSTAEATREENVYMAKLAEQAERYEEMVEFMEKVAKTADVGELTVEERNLLSVAYKNVIGARRAXXRIISS

SEQ ID NO: 14384 - protein, 79 aa, Glycine max
  unsure (1)..(79): unsure at all Xaa locations
XNDEELTVEERNLLSVAYKNVIGARRASWRIISSIEQKEESRGGXDHVFVIRDYRSKIEYELFYLCYGVLKLLGTGVIA

SEQ ID NO: 14385 - protein, 102 aa, Glycine max
  unsure (1)..(102): unsure at all Xaa locations
XASAPSPREENVCMAKLAVLGERYEEMEASMEKVYADVDNQERTAEEMNHLCVAYKNEIGARRASWRIISSIEQNEESRGIDDHMYVNRCYLFKIQSELSSI

SEQ ID NO: 14386 - protein, 123 aa, Glycine max
  unsure (1)..(123): unsure at all Xaa locations
XWPRKKNMILSKLPWLSGPYEQMVXLMRIVYPXDHDXELTIEERILLSVPYNNVIRARRASWRIIFSIXHKEESRGHXDHLFLILYYRFKIYSYLCNICHRMLKLLHCFLIPSTSSGYFKVLY

SEQ ID NO: 14387 - protein, 104 aa, Glycine max
  unsure (1)..(104): unsure at all Xaa locations
IRLELTHTLCIYLYQPDLVATASAPTPREELVCMAKLAEQAKRYKETVEFMENVCSSAESEELTVEERNLLSVDYKNVNGARRAYRRIISLIEQKEESRGIXDX

SEQ ID NO: 14388 - protein, 77 aa, Glycine max
  unsure (1)..(77): unsure at all Xaa locations
ESTLISERSRCCLKGRESFVYIAXLAEQAARYDEMVESMKNVANLDVELTVEERTLLSVGYKHVIGARRASWRILSX

SEQ ID NO: 14389 - protein, 137 aa, Glycine max
  unsure (1)..(137): unsure at all Xaa locations
RSRITGLTHASGENTTARKSVLGAPRSSWRILSSIQHHAYTNGNYLSANQHIEYIRTVELDLAIICCDVMIVIDEHLMPSAATGESTVFYYHIIRHYYRYLAKFQSSPDTNEAADQSTIASESATAAXSQADLPPTX

SEQ ID NO: 14390 - protein, 75 aa, Glycine max
  unsure (1)..(75): unsure at all Xaa locations
MADSSREEIVYMAPTXGEXVRYEDIVEFLEKVAKIAEVDELTVEERNLLSVAFKNVIGASRASWRIISSIEQKEE

SEQ ID NO: 14391 - protein, 70 aa, Glycine max
  unsure (1)..(70): unsure at all Xaa locations
MAASAPTPREDFVYMAXLAEKAERYEEMVDFMEKVSASAESEELTVEERNLLSVAXKNVMGARRASWRIX

SEQ ID NO: 14392 - protein, 108 aa, Glycine max
  unsure (1)..(108): unsure at all Xaa locations
XHLPHEENVYIDKLAVQAECYEXMVEXLERVSFGADNNELTXEEMNLFLPACWNVIRARRAWWLIISSIEQKEESLSHHDHVSGMLHYRVMIVSELCNICDVVLKLLD

SEQ ID NO: 14393 - protein, 125 aa, Glycine max
  unsure (1)..(125): unsure at all Xaa locations
XGNFSRILEKFKVGNEKKKGANQPLKAYETLSPPVERELHPTLPIRWGRVQNSPGFNKKIMNPPERAGLLAKQAFNNVASNLNPLKEDPSKARPLIMQLLRNTLPXXTSDIPKKVEAQKLETPPR

SEQ ID NO: 14394 - protein, 119 aa, Glycine max
VKHIFGREGNGRENVRPVSGEQEVHKGPSVREPAHQERPAEKERKTQGYLAKLAEQAERYEEMVECRKKAGTLVPDLTAEDRNLLSTGYKNVTGAPRASWSMTPSIEHTDESKGNERTV

SEQ ID NO: 14395 - protein, 81 aa, Glycine max
  unsure (1)..(81): unsure at all Xaa locations
XYFVFQDIANAELPPTHPIRLGLALNFSVFYYEILNSPDRACNLAKQAFXVRFRYSEYLGLCFALFIFVLQHFEQCFGCFP

SEQ ID NO: 14396 - protein, 94 aa, Glycine max
  unsure (1)..(94): unsure at all Xaa locations
MEDAPSPREKNVYMANIAQQAERYEKKVELMKKVSSXSFNTHHPTGEERNRLSVAYKNEMEERRASGEIFSSIXQKEESHAKXDHDAVIREYRX

SEQ ID NO: 14397 - protein, 86 aa, Glycine max
  unsure (1)..(86): unsure at all Xaa locations
SRAXFGSRAFDEAIATLDTLDEESYKDSTLIMQLLRDNLTLWTSDMQDDGADEIKEAAPKPDDSKNILLLIRIELLLKIFLKGEVF

SEQ ID NO: 14398 - protein, 50 aa, Glycine max
  unsure (1)..(50): unsure at all Xaa locations
LQSTHTIGIGHALNFSVIYYEIXNSPERACHLAKQAFDEAIAELNTLSEX

SEQ ID NO: 14399 - protein, 109 aa, Glycine max
  unsure (1)..(109): unsure at all Xaa locations
LELRCSIHLRWFCRTTRKGYLHYRAVTPREEIMYMAKLVVPAQRYEEMVGYKEKDSALNXSEELTVEERNLLFVXLRNVIWARRAFWRIITSTVQKGESRGDEEPLLQL

SEQ ID NO: 14400 - protein, 88 aa, Glycine max
  unsure (1)..(88): unsure at all Xaa locations
XFSXVFYNEIFNSPDGACTLAKQAFDEAIAELDPLGEDSSKDSPLFMQFFCDTLPLWPFYMQDDGPNXIKKPPPKGAGDQNLPPHPFN

SEQ ID NO: 14401 - protein, 150 aa, Glycine max
  unsure (1)..(150): unsure at all Xaa locations
MTTLKDRENFVYIAILVYLAVRFXEMAESMRSAANIPIXELTXAEERNLLSVEHKTATSARTETXRILTCIEQKGETKGNXLYATWTKDSRQEGESKLSNIXXGRMRASDEHFITAGVRGESTALNYXTTGEYDWDRAECKSSKEKKEAX

SEQ ID NO: 14402 - protein, 50 aa, Glycine max
  unsure (1)..(50): unsure at all Xaa locations
LLPAXLLYRLPPTHPIRLGLALNFSVFYYEILNSPDRACSLAKQMFEVSV

SEQ ID NO: 14403 - protein, 67 aa, Glycine max
AFEEAIAELDTLGEESYKDSTLIMQLLRDNLTLWTSDVQVNVTMEYGSHLFTEYFFLLPLITNQNLS

SEQ ID NO: 14404 - protein, 68 aa, Glycine max
  unsure (1)..(68): unsure at all Xaa locations
XKSEAVLSYVCDGILKLLDTRLVPSAASGDSKVFYLKMKGDYHRYLAELKTGADRKEGVVITLSDLQS

SEQ ID NO: 14405 - protein, 61 aa, Glycine max
  unsure (1)..(61): unsure at all Xaa locations
MAASAPTPREDSVYMANLADQAERYEDMVDFMEKVSASAESEELTVEERNLLSVAXKKVIG

SEQ ID NO: 14406 - protein, 110 aa, Glycine max
  unsure (1)..(110): unsure at all Xaa locations
SLIHRSSHASALSLTHTISLSFSHPDLVTRAMSTTPREKVTYMAKHTDHANRYXEMMKLMEKVSAYNDSHELTTEEHNLLSVNYKNVISARHAYXRIISIIEHKEDKRVN

SEQ ID NO: 14407 - protein, 69 aa, Glycine max
MSDSSREENVYMAKLSEQAERYEDMVEFMEKVAKTVEVEEMTVDDKSDFSVFSETVIRARRPFWLILSS

SEQ ID NO: 14408 - protein, 74 aa, Glycine max
  unsure (1)..(74): unsure at all Xaa locations
LTHTFSLSLSHPDRVAIASAPTPRAAFVYMAKLAEQAARYEEMVDFMEKVTASAERDELTVEERNLLSVAYKNX

SEQ ID NO: 14409 - protein, 63 aa, Glycine max
  unsure (1)..(63): unsure at all Xaa locations
MAARAPIPREEFVYMANCPEQAERYEEMVEFMEKVSASAESEELPVEERNFFSVAKKNVLGAX

SEQ ID NO: 14410 - protein, 65 aa, Glycine max
  unsure (1)..(65): unsure at all Xaa locations
DRENFAYICKLSEXCPAFQEMVESMKNAXANLCIVLSGEERNLLSVGLTNMIGARRARWRILSSX

SEQ ID NO: 14411 - protein, 70 aa, Glycine max
  unsure (1)..(70): unsure at all Xaa locations
MAASAHTPSKEFVYMAILADHAHRYXEMVEFMRKVSASADNHELSVEERNLLSVGEHNFIXACRSTWRIX

SEQ ID NO: 14412 - protein, 261 aa, Pisum sativum
MATAPTPREEFVYMAKLAEQAERYEEMVEFMEKVTAAVESEELTVEERNLLSVAYKNVIGARRASWRIISSIEQKEESRGNDEHVTVIRDYRSKIETELSNICNGILKLLDSRLIPSAALGDSKVFYLKMKGDYHRYLAEFKSGAERKDAAESTLTAYKSAQDIANTELPPTHPIRLGLALNFSVFYYEILNSPDRACGLAKQAFDEAIAELDTLGEESYKDSTLIMQLLRDNLTLWTSDMQDDGADEIKEAAPKGNDEPQ

SEQ ID NO: 14413 - protein, 263 aa, Vicia faba
MGITVPENLTKLGVAVPENLNREQYVYLAKLAEQAERYEEMVSFMQKLVLVSTPSSELSVEERNLISVAYKNVIGSLRAAWRIVSSIEQKEEGRKNDDHVVLVKDYRSKVEAELSNVCASILELLDKNLIPSGSSSESKVFYYKMKGDYHRYLAEFKIGEERKSAAEDTMLSYKAAQDIAAADLPSTHPIRLGLALNFSVFYYEILNQSDKACAMAKQAFEEAIAELDTLGEESYKDSTLIMQLLRDNLTLWTSDVQDQLDEP

SEQ ID NO: 14414 - protein, 181 aa, Vicia faba
VAYKNVIGSLRAAWRIVSSIEQKEEGRKNDDHVVLVKDYRSKVEAELSNVCASILELLDKNLIPSGSSSESKVFYYKMKGDYHRYLAEFKIGEERKSAAEDTMLSYKAAQDIAAADLPSTHPIRLGLALNFSVFYYEILNQSDKACAMAKQAFEEAIAELDTLGEESYKDSTLIMQLFRDN

SEQ ID NO: 14415 - protein, 248 aa, Vigna angularis
MAEGLNREQYVYLAKLSEQADGYEEMVEFMQKVVVGWTPATELSVEERNLLSVAYKNVIGSLRAAWRIVSSIEQKEEGRKNEEHVALVKQYRSKVETELSNVCASILNLLDSNLVASASNTESKVFYLKMKGDYHRYLAEFKVGDERKAAAEDTMLSYKAAQDVAYADLPPTHPIRLGLALNFSVFYYEILNQSDKACGMAKQAFEEAIAELDTLGEESYKDSTLIMQLLRDNLTLWTSDVQDQLDEP

SEQ ID NO: 14416 - protein, 242 aa, Oryza sativa (japonica cultivar-group)
MVEAMNSVAKLDEGLTKEERNLLSVGYKNLIGAKRAAMRIIGSIELKEETKGKESHVRQTAEYRRKVEAEMDKICCDVINIIDKYLIPHSSGAESSVFYYKMKGDYYRYLAEFKTGTEKIEVSELSLNAYETASKTAQTDLTPTDPIRLGLALNISVFYCEIMNSPDKACQLAKNAFDEAVAELPSLSEENYKDSTLIMQLLRDNLALWNSDMADDADDIRERTDTTGAKGDPAADGGANSW

SEQ ID NO: 14417 - protein, 260 aa, Lycopersicon esculentum
MADSSREENVYLAKLAEQAERYEEMIEFMEKVAKTADVEELTVEERNLLSVAYKNVIGARRASWRIISSIEQKEESRGNEDHVNTIKEYRSKIEAELSKICDGILSLLESNLIPSASTAESKVFYLKMKGDYHRYLAEFKTGTERKEAAENTLLAYKSAQDIALAELAPTHPIRLGLALNFSVFYYEILNSPDRACNLAKQAFDEAISELDTLGEESYKDSTLIMQLLRDNLTLWTSDNADDVGDDIKEASKPESGEGQQ

SEQ ID NO: 14418 - protein, 260 aa, Lycopersicon esculentum
MADSSREENVYLAKLAEQAERYEEMIEFMEKVAKTADVEELTVEERNLLSVAYKNVIGARRASWRIISSIEQKEESRGNEDHVNTIKEYRSKIEADLSKICDGILSLLESNLIPSASTAESKVFHLKMKGDYHRYLAEFKTGTERKEAAENTLLAYKSAQDIALAELAPTHPIRLGLALNFSVFYYEILNSPDRACNLAKQAFDEAISELDTLGEESYKDSTLIMQLLRDNLTLWTSDNADDVGDDIKEASKPESGEGQQ

SEQ ID NO: 14419 - protein, 230 aa, Lycopersicon esculentum
ENVYMAKLADRAESDEEMVEFMEKVSNSLGSEELTVEERNLLSVAYKNVIGARRASWRIISSIEQKEESRGNEEHVNSIREYRSKIENELSKICDGILKLLDSKLIPSATSGDSKVFYLKMKGDYHRYLAEFKTGAERKEAAESTLTAYKAAQDIASAELAPTHPIRLGLALNFSVFYYEILNSPDRACNLAKQAFDEAIAELDTLGEESYKDSTLIMQLLRDNLTLWTS

SEQ ID NO: 14420 - protein, 256 aa, Lycopersicon esculentum
MASPREENVYMAKFAEQAERSYEEMVEFMEKVVFSLNGEELTVEERNLLSVPYGGLIGARRASWRIISSIEQKEESRGNEDHVASIKKYRSQIENELTSICNGILKLLDSKLIGSAATGDSKVFYLKMKGDYYRYLAEFKTGTERKEAAENTLSAYKSAQDIANGELAPTHPIRLGLALNFSVFYYEILNSPDRACNLAKQAFDEAIAELDTLGEESYKDSTLIMQLLRDNLTLWTSDMQDDGTDEIKEPSKADNE

SEQ ID NO: 14421 - protein, 252 aa, Lycopersicon esculentum
MAALIPENLSREQCLYLAKLAEQAERYEEMVQFMDKLVLNSTPAGELTVEERNLLSVAYKNVIGSLRAAWRIVSSIEQKEESRKNEEHVHLVKEYRGKVENELSQVCAGILKLLESNLVPSATTSESKVFYLKMKGDYYRYLAEFKIGDERKQAAEDTMNSYKAAQEIALTDLPPTHPIRLGLALNFSVFYFEILNSSDKACSMAKQAFEEAIAELDTLGEESYKDSTLIMQLLRDNLTLWTSDAQDQLDES

SEQ ID NO: 14422 - protein, 249 aa, Lycopersicon esculentum
MALPENLTREQCLYLAKLAEQAERYEEMVKFMDKLVIGSGSSELTVEERNLLSVAYKNVIGSLRAAWRIVSSIEQKEEGRKNDEHVVLVKDYRSKVESELSDVCAGILKILDQYLIPSASAGESKVFYLKMKGDYYRYLAEFKVGNERKEAAEDTMLAYKAAQDIAVAELAPTHPIRLGLALNFSVFYYEILNASEKACSMAKQAFEEAIAELDTMGEESYKDSTLIMQLLRDNLTLWTSDMQEQMDEA

SEQ ID NO: 14423 - protein, 249 aa, Lycopersicon esculentum
MALPENLTREQCLYLANVAEQAERYEEMVKFMDKLVIGSGSSELTVEERNLLSVAYKNVIGSLRAAWRIVSSIEQKEEGRKNDEHVVLVKDYRSKVESELSDVCAGILKILDQYLIPSASAGESKVFYLKMKGDYYRYLAEFKVGNERKEAAEDTMLAYKAAQDIAVADVAPTHPIRLGLALNFSVFYYEILNASEKACSMAKQAFEEAIAELDTMGEESYKDSTLIMQLLRDNLTLWTSDMQEQMDEA

SEQ ID NO: 14424 - protein, 231 aa, Lycopersicon esculentum
EFMEKVSNSLGSEELTVEERNLLSVAYKNVIGARRASWRIISSVEQKEESRGNEEHVNSIREYRSKIENELSKICDGILKLLDSKLIPSATSGDSKVFYLKMKGDYHRYLAEFKTGAERKEAAESTLTGYKAAQDIASAELAPTHPIRLGLALNFSVFYYEILNSPDRACNLAKQAFDEAIAELDTLGEESYKDSTLIMQLLRDNLTLWTSDMQDDGADEIKEDPKPEEKN

SEQ ID NO: 14425 - protein, 229 aa, Lycopersicon esculentum
MEKVSNSLGSEELTVEERNLLSVAYKNVIGARRASWRIISSVEQKEESRGNEEHVNSIREYRSKIENELSKICDGILKLLDSKLIPSATSGDSKVFYLKMKGDYHRYLAEFKTGAERKEAAESTLTGYKAAQDIASAELAPTHPIRLGLALNFSVFYYEILNSPDRACNLAKQAFDEAIAELDTLGEESYKDSTLIMQLLRDNLTLWTSDMQDDGADEIKEDPKPEEKN

SEQ ID NO: 14426 - protein, 131 aa, Lycopersicon esculentum
MASSKERENFVYVAKLAEQAERYDEMVEAMKNVANMDVELTVEERNLLSVGYKNVVGSRRASWRILSSIEQKEESRGNEQNVKRIKEYLQKVESELTNICNDIMVVIDQHLIPSCSAGESTVFYHKMKGDY

SEQ ID NO: 14427 - protein, 131 aa, Lycopersicon esculentum
MASSKERESLVYIARLAEQRERYDEMVDAMKNVANLDVELTVEERNLLSVGYKNVVGSRRASWRILSSIEQKEDASGNEQNVKRIQGYRQKVESELTDICNNIMTVIDEHLIPSCTAGESTVFYYKMKGDY

SEQ ID NO: 14428 - protein, 138 aa, Lycopersicon esculentum
MAALIPENLSREQCLYLAKLAEQAERYEEMVQFMDKLVLNSTPADDLTVEERNLLSVAYKNVIGSLRAAWRIVSSIEQKEESRKNEEHVHLVKEYRGKVENELSQVCAGILKLLESNLVPSATTSESKVFHLKMKGDY

SEQ ID NO: 14429 - protein, 272 aa, Nicotiana tabacum
MAESTREENVYMAKLAEQAERYEEMVEFMEKVAKTVDVEELTVEERNLLSVAYKNVIGARRASWRIISSIEQKEESRGNEDHVSSIKEYRGKIEAELSKICDGILNLLESHLIPVASTAESKVFYLKMKGDYHRYLAEFKTGAERKEAAENTLLAYKSAQDIALAELAPTHPIRLGLALNFSVFYYEILNSSDRACNLAKQAFDDAIAELDTLGEESYKDSTLIMQLLRDNLTLWTSDTTVSLSLSQKYTPTNADAPTNNTVHTSKSFLGSA

SEQ ID NO: 14430 - protein, 252 aa, Nicotiana tabacum
MAALLTDNLSREQYLYLAKLAEQAERYEEMVQYMDKLVLSSTPAAELTVEERNLLSVAYKNVIGSLRAAWRIVSSIEQKEESRKNEEHVSLVKEYRGKVENELTEVCAGILKLLESNLVPSASTGESRVFYLKMKGDYYRYLAEFKVGDERKQAAEDTMNSYKAAQEIALADLPPTHPIRLGLALNFSVFYFEILNSSDKACSMAKQAFEEAIAELDTLGEESYKDSTLIMQLLRDNLTLWTSDAQDQLDES

SEQ ID NO: 14431 - protein, 249 aa, Nicotiana tabacum
MAVPENLTREQCLYLAKLAEQAERYEEMVKFMDRLVAVSASSELTVEERNLLSVAYKNVIGSLRAAWRIVSSIEQKEEGRKNEEHVVLVKDYRSKVESELSDVCAGILKILDQYLIPSAAAGESKVFYLKMKGDYYRYLAEFKVGNERKEAAEDTMLAYKAAQDIALAELAPTHPIRLGLALNYSVFYYEILNASEKACSMAKQAFEEAIAELDTLGEESYKDSTLIMQLLRDNLTLWTSDMQEQMDEA

SEQ ID NO: 14432 - protein, 204 aa, Nicotiana tabacum
MAVAPTAREENVYMAKLAEPAEMYQEMVEFMEKVSNSLGSEELTVEERNLLSVAYKNVIGARRASWRIISSIEQKEESRGNEEHVNSIREYRSKIENELSKICDGILKLLDAKLIPSAASGDSKVFYLKMKGDYHRYLAEFKTGAERKEAAESTLTAYKAAQDIATTELAQTHPIRLGLALNFSVFYYEILNSPDRACNLAKQA

SEQ ID NO: 14433 - protein, 259 aa, Solanum tuberosum
MADSREENVYMAKLAEQAERYEEMVEFMEKVAKVDVEELTVEERNLLSVAYKNVIGARRASWRIISSIEQKEESRGNEDHVSSIKEYRVKIEAELSKICDGILSLLESHLVPSASTAESKVFYLKMKGDYHRYLAEFKTGARERKEAAENTLLAYKSAQDIALAELTPTHPIRLGLALNFSVFYYEILNSPDRACNLAKQAFDDAIAELDTLGEESYKDSTLIMQLLRDNLTLWTSDTTDDAEDEIREGSKQESGDGQQ

SEQ ID NO: 14434 - protein, 249 aa, Solanum tuberosum
MALPENLTREQCLYLAKLAEQAERYEEMVKFMDKLVIGSGSSELTVEERNLLSVAYKNVIGSLRAAWRIVSSIEQKEEGRKNDEHVVLVKDYRSKVESELSDVCAGILKILDQYLIPSASAGESKVFYLKMKGDYYRYLAEFKVGNERKEAAEDTMLAYKAAQDIAVAELAPTHPIRLGLALNFSVFYYEILNASEKACSMAKQAFEEAIAELDTLGEESYKDSTLIMQLLRDNLTLWTSDMQEQMDEA

SEQ ID NO: 14435 - protein, 296 aa, Oryza sativa
PRIPRLPPPHSSPPVPGAASKTPTPKSQPRSARSLSRLAMAPSDDLVYMAKLAEQAERYDEMVEAMNSVAKLDEGLTKEERNLLSVGYKNLIGAKRAAMRIIGSIELKEETKGKESHVRQTAEYRRKVEAEMDKICCDVINIIDKYLIPHSSGAESSVFYYKMKGDYYRYLAEFKTGTEKIEVSELSLNAYETASKTAQTDLTPTDPIRLGLALNISVFYCEIMNSPDKACQLAKNAFDEAVAELPSLSEENYKDSTLIMQLLRDNLALWNSDMADDADDIRERTDTTGAKGDPAA

SEQ ID NO: 14436 - protein, 207 aa, Oryza sativa
  unsure (1)..(207): unsure at all Xaa locations
XDFERRPGRYMAKLAEQAERYEEMVEFMEKVAKTTDVGELTVEERNLLSVAYKNVIGARRASWRIISSIEQKEESRGNEAYVASIKEFKSGAEGKEAAENTLVAYKSAQDIALADLPTTHPIRLGLALNFSVFYYEILNSPDRACNLAKQAFDDAIAELDTLGEESYKDSTLIMQLLRDNLTLWTSDNAEDGGDEIKEAAKPEGEGH

SEQ ID NO: 14437 - protein, 224 aa, Oryza sativa
  unsure (1)..(224): unsure at all Xaa locations
CWEVKKMKEREKVVRLAKLAEQAERYDDMVEFMKTLARMDVDMSAEERLLFSVGFKKTIGARRASWRILESLEQKVTAGDQPGVTINGYKKKVEDELRAVCNEVLSIIAIHCLPLANSGENVVFFYKMKGDYYRYLAEFSTGTEKKAATDQSLMAYQHAMVGACSELSPAHQLRLGLALNFGDFXEIMNSAERASQVAKQALDEATAEINSAGVVGYKGSVLMM

SEQ ID NO: 14438 - protein, 151 aa, Oryza sativa
RSHPPPQAGAAESKVFYLKMKGDYHIYLAEFKSGDERKQAAESTMNAYKAAQDIALADLAPTHPIRLGLALNFSVFYYEILNSPDRACNLAKQAFDEAISELDSLGEESYKDSTLIMQLLRDNLTLWTSDANDDGGDEIKEAAAPKEPGDQ

SEQ ID NO: 14439 - protein, 142 aa, Oryza sativa
  unsure (1)..(142): unsure at all Xaa locations
XPKTPGLTFYLKMKGDYHRYLAEFKTGAERKDAADATLAAYQAAQDIAMKELSPTHPIRLGLALNFSVFYYEILNSPDRACTLAKQAFDEAISELDTLGEESYKDSTLIMQLLRDNLTLWTSDMQDDGGDEMRDATKPEDEH

SEQ ID NO: 14440 - protein, 149 aa, Oryza sativa
  unsure (1)..(149): unsure at all Xaa locations
XPSSTAARXSKVFYXLKMKXDYHRYLRIXXDGAERKEAAESTMVAYKAAQDIALADLAPTHPIRLGLALNFSVFYYEILNSPDKACNLAKQAXDEAISELDTLGEESYKDSTLIMQLLRDNLTLWTSDLTEDGGDEVKEASKGDACEGQ

SEQ ID NO: 14441 - protein, 175 aa, Oryza sativa
  unsure (1)..(175): unsure at all Xaa locations
SLNCAKCPPEENVYMVKLADQAERYVDMGEYMGKVAKTAYVEEVTVEECNLLSVAXKSEIGDLRASCRNGSSIEHKEEARGNDEHGTLFMDXRDQIEYELSKICDGVLKLLVSLLVPSSTAAQYTVLYLMMKVDYHRYLAXFKTGAERHGAVEITMRAYKDAQDIALXSDLXSHP

SEQ ID NO: 14442 - protein, 151 aa, Oryza sativa
  unsure (1)..(151): unsure at all Xaa locations
XACSHDTHVYIFFLXSALYITLKKMKGDYYRYLAEFSTGTEKKAATDQSLMAYQHAMVVASSELSPAHQFRLGLALNFSVFXEIMNSPERASQVAKQALDEATAEINSAGVEGYKDSMLMMQLLKENLALWTSELXXGGETSKDDDVVMEG

SEQ ID NO: 14443 - protein, 87 aa, Oryza sativa
IKEYRGKIEAELSKICDGILKLLDSHLVPSSTAAESKVFYLKMKGDYHRYLAEFKTGAERKEAAESTMVAYKAAQDIALADLAPTHP

SEQ ID NO: 14444 - protein, 100 aa, Oryza sativa
  unsure (1)..(100): unsure at all Xaa locations
XVMLLDLHLVPSSTAAESTVSYLKMKGDYHRYLVVFKTGAVRKVAAVSTLVVYMAAQDFGLACLATTHPIRIGLSLNYSGFYYXIINSSDKACYLAMQAF

SEQ ID NO: 14445 - protein, 132 aa, Oryza sativa
  unsure (1)..(132): unsure at all Xaa locations
PWLLRLQCRGGLAPLFCPLFSGFAFSAVHVFLCYLAEQAERYQEMVXFMENVANTTDVGELTAEERNPLSVAYKNVIGARRAFLRNIPFIEHNEESRGNEAYVASTXESPSRIETELNKICDGIPKPLXSHL

SEQ ID NO: 14446 - protein, 140 aa, Oryza sativa
  unsure (1)..(140): unsure at all Xaa locations
XFYLKENDVFHRGIDVAKMGLELKDLVDITVETYNSADAFGLTNLTATYMLRHVLTLYYSVYDYDMLNSPDLDCILEQQASDYCIGVLDTVQNMAYLDSSSNIQAMSIKLSLWTARISEDVRVKTRXXQRPHSEMINSLD

SEQ ID NO: 14447 - protein, 96 aa, Oryza sativa
  unsure (1)..(96): unsure at all Xaa locations
PTYVSGKASPANASCEENAYMAXLAYPAERYKEMRQFMDMAANTTDVLELTVQERNLLSRAYKNMTCARMALWRIISSIEQKEDSPRHAASVASIX

SEQ ID NO: 14448 - protein, 274 aa, Triticum aestivum
  unsure (1)..(274): unsure at all Xaa locations
MATERESKTFLARLCEQAERYDEMVTYMKEVAKLGGELTVDERNLLSVAYKNVVGTRRASWRIISSIEQKEESKGSDKHVSTIKDYRNKIETELEKVCQDVLDVLDDFLIPNAATGESKVFYHKMKGDYHRYLAEFASGEKRKGAATAAHDAYKSATDVAQTELTPTHPIRLGLALNFSVFYYEILNSPDRACHLAKQAFDDAIDELDSLSEESYRDSTLIMQLLRDNLTLWTSSDSAEGEAAGAADAPKKEEGEAAKPAEEXXAEEPAPAPAS

SEQ ID NO: 14449 - protein, 232 aa, Triticum aestivum
  unsure (1)..(232): unsure at all Xaa locations
MGHEDAVYLAKLAEQAERYEEMVENMKIVAGEDRDLTVEERNLLSVAYKNVIGARRASWRIVTSIEQKEESKGNSSQVTLIKEYRQKIEAELAKICEDILEVLDQHLIPSAKSGESKVFYHKMKGDYHRYLAEFAIGDRRKDSADKSLEAYKAATEVAXRPELPPTHPIXRLGLALNFSVFYYEILNAPDQACHLAKQAFDDAIAELDTLSEESYRDSTLIMQLLRDTLTLW

SEQ ID NO: 14450 - protein, 260 aa, Triticum aestivum
  unsure (1)..(260): unsure at all Xaa locations
PRVRYXTRNNVYMAKLAEQAERYDEMVQFTKEVAKMGAELSVEERNLLSVAYKNVIGSRRASWRIVSSIEQKEESKGNSAQVEKIRTYRQKIETELQEVCKDILSVLSEDLIPVAEGGESKVFYYKMKGDYHRYLAEFLTGEARKESATEAHEAYKSATDVAQTELAPTHPIRLGLALNFSVFYYEILNSPDRACHLAKQAGDDAIAELDTLSEESYKDSTLIMQLLRDNLTLWTSDLQDESDKPEPKAEEAEESKXRGS

SEQ ID NO: 14451 - protein, 286 aa, Triticum aestivum
  unsure (1)..(286): unsure at all Xaa locations
EEEEEEMEERGKVVCMAKLAEQAGRYDDMVDFMKKLARMDVDMSVEERHLFSVGFKNTIGARRASWRILSSLEQKVAAGEQAGRMISVYRTKVEDELRMVCNEILSIIAIHCLPLANAGENVVFFHKMKGDYYRYLAEFSTGVEKKSAADQSLMAYQHAMVVAXTELSPAHPIRLGLALNFSVFFYDIMNCHQRACQVAKQAFDEATTEINSAGMDGNNDSTLMMQLLNDNLALWKSELTEGETSKDSDIDMEEGXLECAEGSPACMCAKXPEHNGTKPAGHCWFL

SEQ ID NO: 14452 - protein, 261 aa, Triticum aestivum
  unsure (1)..(261): unsure at all Xaa locations
MSTAEATREENVYMAKLAEQAERYEEMVEFMEKVAKTADVGELTVEERNLLSVAYKNVIGARRASWRIISSIEQKEESRGNEAYVASIKEYRTRIETELSKICDGILKLLDSHLVPSATAAESKVFYLEMKGDYHRYLQQFKAVTERYXSVXSFLXITSNNPCXLCQPVETTHAIESIVXNHYLTLRKKGLSLHLSIMFTCWXAFDEAIAELDSLGEESYKDSTLIMQLLRDNLTLWTSDNAEEGGDEIKEAASKPEGEGH

SEQ ID NO: 14453 - protein, 169 aa, Triticum aestivum
  unsure (1)..(169): unsure at all Xaa locations
XRRIQNVIGARRASWRIVSSIEQKEESRKNQEHVNLIKEYRGKIEAELSNICDGILKLLDSHLVPSSTAAESKVFYLKMKGDYHRYLAEFKTGAERKESAESTMVAYKAAQDIALAELAPTHPIRLGLALNFSVFYYEILNSPDKACNLAKQAFDEAISELDTLGEESX

SEQ ID NO: 14454 - protein, 155 aa, Triticum aestivum
  unsure (1)..(155): unsure at all Xaa locations
XGIRHEGYLAEFASGDKRKTAATAAHEAYKSATDVAQTELTPTHPIRLGLALNFSVFYYEILNSPDRACHLAKQAFDDAIAELDSLSEESYRDSTLIMQLLRDNLTLWTSSDGNEPEPAAASDAPKAEESKTAESVEEPKAEASXRDRSSITKST

SEQ ID NO: 14455 - protein, 192 aa, Triticum aestivum
  unsure (1)..(192): unsure at all Xaa locations
MSTAEATLEENANMANLLNQAKRYEEMCEMMEKAVKTANVVELTADERILLSVAYKNAIGAPRASCTIISSIEQNEETRANEVYVASIKEYRTTIETELSMICDGILNLMDSHLALSDTATESMVFYLKTNGDYHRYLAEFMAGAKRKETLXNTPVAYKTSHYDALVDLTTTHSIRLGLALNFSVIYYEILN

SEQ ID NO: 14456 - protein, 216 aa, Triticum aestivum
  unsure (1)..(216): unsure at all Xaa locations
MAQPAKLSREENVYMAKLAEQAERYEEMVEFMEKVAKTGDSEELTVEERNLLSVAYKNVIGARRASWRIISSIEQKEESRGNEDRVTLIKDYRGKIEVELTKDLXXILXLLDXHLXPSSTXPXSKVXXLXXKGEYYXYLAELXXGTERRXSXETPWAIQTXQKCLXXXIPPLNYRVGGDSTXXVXYXNXIXXPXXNFQXXFXRXXELAFXXGXXXX

SEQ ID NO: 14457 - protein, 122 aa, Triticum aestivum
  unsure (1)..(122): unsure at all Xaa locations
XTLIKDYRGKIETELTKICDGILKLLESHLVPSSTAPESKVFYLKMKGDYYRYLAEFKTGAERKDAAENTMVAYKAAQDIALAELAPTHPIRLGLALNFSVFYYEILNSPDRACSLAKQAFX

SEQ ID NO: 14458 - protein, 115 aa, Triticum aestivum
  unsure (1)..(115): unsure at all Xaa locations
MSSPREENVYLAKLAEQAERYEEMVEFMEKVAKTVDSEELTVEERNLLSVAYKNVIGARRASWRIISSIEQKEESRXNEDHVAIIKDYRGKIETELSKICDGILNLLDSHLVPAX

SEQ ID NO: 14459 - protein, 108 aa, Triticum aestivum
  unsure (1)..(108): unsure at all Xaa locations
MAQPAELSREENVYMAKLAEQAERYEEMVEFMEKVAKTIDSEELTVEERNLLSVAYKNVIGARRASWRIISSIEQKEESRGNEDRVTLIKDYRGKIEVELTKICDGIX

SEQ ID NO: 14460 - protein, 147 aa, Triticum aestivum
  unsure (1)..(147): unsure at all Xaa locations
XVRTADVXELTVDERNLLSVAYENVIGARRASLTIILCIELNEESRWIXAYVASIKEFRPRIETELIMICDGILKLLXDSHLDPSATATESKASYLEMKGDYHRYLAGVKSGAERKEAAVNTLXVAYKSAHDIXASLDLPTTHPIRV

SEQ ID NO: 14461 - protein, 206 aa, Triticum aestivum
  unsure (1)..(206): unsure at all Xaa locations
XPEKELSVXEERNLLSVAYKXNGMRARRAYLRIIFSMEQKXEGGGTDAHADTMRYYRRSTRPDYATICSGILALXVDSHLGPSDGAAGFKVLYXLKMKGDYHRVXLAELKIREERKEAGLSTMNAXKLARISDLGDLVTTXHRIRLGLARQLLLCYYSSSNSNVRACNLAKQASADAIIXSMNSLIARESYIDSTVIMQVLRDNMX

SEQ ID NO: 14462 - protein, 153 aa, Triticum aestivum
  unsure (1)..(153): unsure at all Xaa locations
ERKEPPQSPMNAYKTAQDFPLVDLAPTPPLRVGLALNFFVFYYEILNSPARACTLAKQAFFGVLSKLASLGGESSKARPFFMRLLGANLPFWPSPPHEDAVFXIKEAPAPKKFGAGQWGELKYPFVPCWGQWKSVLVLGLKLLSPPPLFYYAL

SEQ ID NO: 14463 - protein, 104 aa, Triticum aestivum
  unsure (1)..(104): unsure at all Xaa locations
SEELTVGERSLISGGYKNVNGDSRASRRIMSSIEETEERPGIHDRVRLIKEEHRKIXTELNRICDSIINLLETHLIPSSTAPESTVPYRSMGDDYYSYRAQFMX

SEQ ID NO: 14464 - protein, 111 aa, Triticum aestivum
  unsure (1)..(111): unsure at all Xaa locations
MAHEDADYPAKLAEPAARNDQMAENMNIATAEDRDLTGXERNTLSGGNKNAIGASRASCFTVPPTHQNEASKANSTPVTLIKEHRPRIEAELAKICEEILEALDPHPIPSX

SEQ ID NO: 14465 - protein, 67 aa, Triticum aestivum
  unsure (1)..(67): unsure at all Xaa locations
XACNLAKQAFDEAISELDSLGEESYKDSSLIMQLLRGNLTLWTSGTNXDAVNXIKEAPGPKESGKGQ

SEQ ID NO: 14466 - protein, 62 aa, Triticum aestivum
  unsure (1)..(62): unsure at all Xaa locations
XKAAQXIAXVXLAPTHPIRLGLELNFSVFYYEILNSPDRACNLAKQAVVXCFSFLLHLFQXS

SEQ ID NO: 14467 - protein, 81 aa, Triticum aestivum
  unsure (1)..(81): unsure at all Xaa locations
MSTAVQTLYXSVYMAKLAEQAXRYEEMVEFMERVANATVGARPGXELXLQERIRLFLADKNFIRARGSSWKIIFSILHMVX

SEQ ID NO: 14468 - protein, 233 aa, Zea mays
  unsure (1)..(233): unsure at all Xaa locations
MGYEDSVYLAKLAEQAERYEEMVENMKAVASADQELSVEERNLLSVAYKNVIGARRASWRIVTSIEQKEESKGNEAQVGLIKEYRQKIEAELAKICEDILECLDGHLIPSAESGESKVFYHKMKGDYHRYLAEFAVGDKRKTSADKSLEAYKAATEVAASSLAPTHPIRLGLALNFSVFYYEILNSPDQACQXGQQAFDDAIAELDTLSEESYKDSTLIMQLLRDNLTLWTSX

SEQ ID NO: 14469 - protein, 256 aa, Zea mays
MSREENVYMAKLAEQAERYEEMVEYMEKVAKTVDVEELTVEERNLLSVAYKNVIGARRASWRIVSSIEQKEESRKNEEHVNLIKEYRGKIEAELSNICDGILKLLDSHLVPSSTAAESKVFYLKMKGDYHRYLAEFKTGAERKESAESTMVAYKAAQDIALAELAPTHPIRLGLALNFSVFYYEILNSPDKACNLAKQAFDEAISELDSLGEESYKDSTLIMQLLRDNLTLWTSDLTEDGADEGKDAQKGDAGEGQ

SEQ ID NO: 14470 - protein, 256 aa, Zea mays
MSREENVYMAKLAEQAERYEEMVEYMEKVAKTVDVEELTVEERNLLSVAYKNVIGARRASWRIVSSIEQKEESRKNEEHVNLIKEYRGKIEAELSNICDGILKLLDSHLVPSSTAAESKVFYLKMKGDYHRYLAEFKTGPERKESAESTMMAYKAAQDIALAELAPTHPIRLGLALNFSVFYYEILNSPDKACNLAKQAFDEAISQLDTLGEESYKDSTLIMQLLRDNLTLWTSDLTEDGADEGKEAPKGEAGDGQ

SEQ ID NO: 14471 - protein, 256 aa, Zea mays
MAREENVYMAKLAEQAERYEEMVEYMEKVAKTVDVEELTVEERNLLSVAYKNVIGARRASWRIVSSIEQKEESRKNEEHVNLIKEYRAKIEAELSNICDGILKLLDSHLVPSSTAAESKVFYLKMKGDYHRYLAEFKTGPERKESAESTMMAYKAAQDIALAELAPTHPIRLGLALNFSVFYYEILNSPDKACNLAKQAFDEAISQLDTLGEESYKDSTLIMQLLRDNLTLWTSDLTEDGADEGKEAPKGEAGDGQ

SEQ ID NO: 14472 - protein, 256 aa, Zea mays; identical to SEQ ID NO: 14471

SEQ ID NO: 14473 - protein, 256 aa, Zea mays; identical to SEQ ID NO: 14471

SEQ ID NO: 14474 - protein, 232 aa, Zea mays
  unsure (1)..(232): unsure at all Xaa locations
MGHEDAVYLAKLAEQAERYEEMVENMKIVAGEDRDLTVEERNLLSVAYKNVIGARRASWRIVTSIEQKEESKGNSSQVTLIKEYRQKIEAELAKICEDILEVLDQHLIPSAKSGESKVFYHKMKGDYHRYLAEFAIGDRRKDSADKSLEAYKAATEVPXTKLPPTHPXIRLGLALNFSVFYYEILDAPXPACHLAKQAFDDAIAELDTLSEESYKDSTLIMQLLRDHLTLWX

SEQ ID NO: 14475 - protein, 256 aa, Zea mays
MSREENVYMAKLAEQAERYEEMVEYMEKVAKTVDVEELTVEERNLLSVAYKNVIGARRASWRIVSSIEQKEESRKNEEHVNLIKEYRGKIEAELSNICDGILKLLDSHLVPSSTAAESKVFYLKMKGDYHRYLAEFKTGAERKESAESTMVAYKAAQDIALAELAPTHPIRLGLALNFSVFYYEILNSPDKACNLAKQAFDEAISELDSLGEESYKDSTLIMQLLRDNLTLWTSDLTEDGADEGKDAPKGDAGEGQ

SEQ ID NO: 14476 - protein, 256 aa, Zea mays
MSREENVYMAKLAEQAERYEEMVEYMEKVAKTVDVEELTVEERNLLSVAYKNVIGARRASWRIVSSIEQKEESRKNEEHVNLIKEYRGKIEAELSNICDGILKLLDSHLVPSSTAAELKVFYLKMKGDYHRYLAEFKTGAERKESAESTMVAYKAAQDIALAELAPTHPIRLGLALNFSVFYYEILNSPDKACNLAKQAFDEAISELDSLGEESYKDSTLIMQLLRDNLTLWTSDLTEDGADEGKDAPKGDAGEGQ

SEQ ID NO: 14477 - protein, 261 aa, Zea mays
MASAELSREENVYMAKLAEQAERYEEMVEFMEKVAKTVDSEELTVEERNLLSVAYKNVIGARRASWRIISSIEQKEEGRGNEDRVTLIKDYRGKIETELTKICDGILKLLESHLVPSSTAPESKVFYLKMKGDYYRYLAEFKTGAERKDAAENTMVAYKAAQDIALAELAPTHPIRLGLALNFSVFYYEILNSPDRACSLAKQAFDEAISELDTLSEESYKDSTLIMQLLRDNLTLWTSDISEDPAEEIREAPKHDSSEGQ

SEQ ID NO: 14478 - protein, 261 aa, Zea mays; identical to SEQ ID NO: 14477

SEQ ID NO: 14479 - protein, 266 aa, Zea mays
MSPSEPTREESVYMAKLAEQAERYEEMVEFMERVARSAGGAGGGEELSVEERNLLSVAYKNVIGARRASWRIISSIEQKEEGRGNEAHAASIRAYRSKIETELARICDGILALLDSHLVPSAGGAESKVFYLKMKGDYHRYLAEFKSGAERKDAAESTMNAYKAAQDIALADLAPTHPIRLGLALNFSVFYYEILNSPDRACNLAKQAFDEAISELDSLGEESYKDSTLIMQLLRDNLTLWTSDTNEDGGDEIKDAAAPKESAEGQ

SEQ ID NO: 14480 - protein, 236 aa, Zea mays
  unsure (1)..(236): unsure at all Xaa locations
MATERESKTFLARLCEQAERYDEMVTYMKEVAKIGGELTVDERNLLSVAYKNVVGTRRASWRIISSIEQKEEAKGTDKHVGIIREYRQKIELELEKVCEDVLSVLDESLIPKAETGESKVFYHKMKGDYHRYLAEFASGDKRKSAATAAHDAYKNATDVAQTELTPTHPIRLGLALNFSVFYYEILNSPDRACHLAKQAFDDAIAELDSLSEESYRDSTLIMQLLRDXLTLWTSSD

SEQ ID NO: 14481 - protein, 266 aa, Zea mays; identical to SEQ ID NO: 14479

SEQ ID NO: 14482 - protein, 266 aa, Zea mays; identical to SEQ ID NO: 14479

SEQ ID NO: 14483 - protein, 266 aa, Zea mays
MSPSEPTREESVYMAKLAEQAERYEEMVEFMERVARSAGGAGGGEELSVEERNLLSVAYKNVIGARRASWRIISSIEQKEEGRGNEAHAASIRTYRSKIETELARICDGILALLDSHLVPSAGGAESKVFYLKMKGDYHRYLAEFKSGAERKDAAESTMNAYKAAQDIALADLAPTHPIRLGLALNFSVFYYEILNSPDRACNLAKQAFDEAISELDSLGEESYKDSTLIMQLLRDNLTLWTSDTNEDGGDEIKDAAAPKESAEGQ

SEQ ID NO: 14484 - protein, 322 aa, Zea mays
  unsure (1)..(322): unsure at all Xaa locations
LEAGRDHSIRSSPTTPFLRGPSPGAAPRQEEVCSFNNMSREENVYMAKLAEQAERYEEMVEYMEKVAKTVDVEELTVEERNLLSVAYKNVIGARRASWRIVSSIEQKEESRKNEEHVNLIKEYRGKIEAELSNICDGILKLLDSHLVPSSTAAESKVFYLKMKGDYHRYLAEFKTGAERKESAESTMVAYKAAQDIALAELAPTHPIRLGLALNFSVFYYEILNSPDKACNXLAKQAFDEAISELDSLGEESYKDSTLIMQLLRDNLTLWTSDLTEDGADEGKDAPKGVQARDSNLRRGVQSCSSPNVLDALCCRSCAVLLL

SEQ ID NO: 14485 - protein, 268 aa, Zea mays
MSPSEPTREESVYMAKLAEQAERYEEMVEFMERVARSPGGAGGGEELSVEERNLLSVAYKNVIGARRASWRIISSIEQKEEGRGNEAHAASIRAYRSKIEAELARICDGILALLDSHLVPSAGGAESKVFYLKMKGDYHRYLAEFKSGAERKDAAESTMNAYKAAQDIALADLAPTHPIRLGLALNFSVFYYEILNSPDRACNLAKQAFDEAISELDSLGEESYKDSTLIMQLLRDNLTLWTSDTNEDGGDEIKEAAAAPKESAPEGQ

SEQ ID NO: 14486 - protein, 273 aa, Zea mays
  unsure (1)..(273): unsure at all Xaa locations
MTETREINVFMAKLAEQAERYDEMVEAMKNVADLGQELTVEERNLLSVAYKNVIGARRASWRIITSIEQKEESKGNTAHVERIKEYRKKVENEVSKICADVLGTLDNKLIPNAQTTESKVFYYKMKGDYHRYLAEFATSEARKEAADNSLAAYKSATDIANSELAPTHPIRLGLALNASVFYYEIMGSPKQACELARKAFDDAIAELDQLNEESYKDSTLIMQLLRDNLTLWTSDLEXXDKADAEPEAANXESSFPHTTLCINTSIFIYKKKK

SEQ ID NO: 14487 - protein, 268 aa, Zea mays
MSPSEPTREESVYMAKLAEQAERYEEMVEFMERVARYAGGAGGGEELSVEERNLLSVAYKNVIGARRASWRIISSIEQKEEGRGNEAHAASIRAYRSKIEAELARICDGILALLDSHLVPSAGGAESKVFYLKMKGDYHRYLAEFKSGAERKDAAESTMNAYKAAQDIALADLAPTHPIRLGLALNFSVFYYEILNSPDRACNLAKQAFDEAISELDSLGEESYKDSTLIMQLLRDNLTLWTSDTNEDGGDEIKEAAAAPKESAPEGQ

SEQ ID NO: 14488 - protein, 261 aa, Zea mays
MASAELSREENVYMAKLAEQAERYEEMVEFMEKVAKTVDSEELTVEERNLLSVAYKNVIGARRASWRIISSIEQKEEGRGNEDRVTLIKDYRGKIETELTKICDGILKLLESHLVPSSTAPESKVFYLKMKGDYYRYLAEFKTGAERKDAAENTMVAYKAAQDIALAELAPTHPIRLGLALNFSVFYYEILNSPDRACSLAKQAFDEAISELDTLSEESYKDSTLIMQLLHDNLTLWTSDISEDPAEEIREAPKHDLSEGQ

SEQ ID NO: 14489 - protein, 267 aa, Zea mays
  unsure (1)..(267): unsure at all Xaa locations
MSPSEPTREESVYMAKLAEQAERYEEMVEFMERVARSAGGAGGGXEELSVEERNLLSVAYKNVIGARRASWRIISSIEQKEEGRGNEAHAASIRAYRSKIETELARICDGILALLDSHLVPSAGGAESKVFYLKMKGDYHRYLAEFKSGAERKDAAESTMNAYKAAQDIALADLAPTHPIRLGLALNFSVFYYEILNSPDRACNLAKQAFDEAISELDSLGEESYKDSTLIMQLLRDNLTLWTSDTNEDGGDEIKDAAAPKESAEGQ

SEQ ID NO: 14490 - protein, 263 aa, Zea mays
MSREENVYMAKLAEQAERYEEMVEYMEKVAKTVDVEELTVEERNLLSVAYKNVIGARRASWRIVSSIEQKEESRKNEEHVNLIKEYRGKIEAELSNSGSRENTICDGILKLLDSHLVPSSTAAESKVFYLKMKGDYHRYLAEFKTGAERKESAESTMVAYKAAQDIALAELAPTHPIRLGLALNFSVFYYEILNSPDKACNLAKQAFDEAISELDSLGEESYKDSTLIMQLLRDNLTLWTSDLTEDGADEGKDAPKGDAGEGQ

SEQ ID NO: 14491 - protein, 261 aa, Zea mays
MASAELSREENVYMAKLAEQAERYEEMVEFMEKVAKTVDSEELTVEERNLLSVAYKNVIGARRASWRIISSIEQKEEGRGNEDRVTLIKDYCGKIETELTKICDGILKLLESHLVPSSTAPESKVFYLKMKGDYYRYLAEFKTGAERKDAAENTMVAYKAAQDIALAELAPTHPIRLGLALNFSVFYYEILNSPDRACSLAKQAFDEAISELDTLSEESYKDSTLIMQLLRDNLTLWTSDISEDPAEEIREAPKHDSSEGQ

SEQ ID NO: 14492 - protein, 261 aa, Zea mays
MASAELSREENVYMAKLAEQAERYEEMVEFMEKVAKTVDSEELTVEERNLLSVAYKNVIGARRASWRIISSIEQKEEGRGNEDRVTLIKDYRGKIETELTKICDGILKLLETHLVPSSTAPESKVFYLKMKGDYYRYLAEFKTGAERKDAAENTMVAYKAAQDIALAELAPTHPIRLGLALNFSVFYYEILNSPDRACSLAKQAFDEAISELDTLSEESYKDSTLIMQLLRDNLTLWTSDISEDPAEEIREAPKRDSSEGQ

SEQ ID NO: 14493 - protein, 261 aa, Zea mays; identical to SEQ ID NO: 14492

SEQ ID NO: 14494 - protein, 261 aa, Zea mays; identical to SEQ ID NO: 14492

SEQ ID NO: 14495 - protein, 261 aa, Zea mays; identical to SEQ ID NO: 14492

SEQ ID NO: 14496 - protein, 261 aa, Zea mays; identical to SEQ ID NO: 14492

SEQ ID NO: 14497 - protein, 316 aa, Zea mays
MIMMPSETRRFRSTGSSAPPTTVRPSVLPATPIRRPVPSHHTLPPLAAMSPSEPTREESVYMAKLAEQAERYEEMVEFMERVARSAGGAGGGDELSVEERNLLSVAYKNVIGARRASWRIISSIEQKEEGRGNEAHAASIRAYRSKIEAELARICDGILALLDSHLVPSAGGAESKVFYLKMKGDYHRYLAEFKSGAERKDAAESTMNAYKAAQDIAVADLAPTHPIRLGLALNFSVFYYEILNSPDRACNLAKQAFDEAISELDSLGEESYKDSTLIMQLLRDNLTLWTSDTNEDAGDEIKEAAAAPKESAPEGQ

SEQ ID NO: 14498 - protein, 268 aa, Zea mays
MSPSEPTREESVYMAKLAEQAERYEEMVEFMERVARYAGGAGGGDELSVEERNLLSVAYKNVIGARRASWRIISSIEQKEEGRGNEAHAASIRAYRSKIEAELARICDGILALLDSHLVPSAGGAESKVFYLKMKGDYHRYLAEFKSGAERKDAAESTMNAYKAAQDIALADLAPTHPIRLGLALNFSVFYYEILNSPDRACNLAKQAFDEAISELDSLGEESYKDSTLIMQLLRDNLTLWTSDTNEDAGDEIKEAAAAPKESAPEGQ

SEQ ID NO: 14499 - protein, 262 aa, Zea mays
  unsure (1)..(262): unsure at all Xaa locations
MASAELSREENVYMAKLAEQAERYEEMVEFMEKVAKTVDSEELTVEERNLLSVAYKNVIGARRASWRIISSIEQKEEGRGNEDRVTLIKDYRGKIETELTKICDGILKLLETHLVPSSTAPESKVFYLKMKGDYYRYLAEFKTGAERKDAAENTMVAYKAAQDIALAELAPTHPIRLGLALNFSVFYYEILNSPDRACSLAKQAFXDEAISELDTLSEESYKDSTLIMQLLRDNLTLWTSDISEDPAEEIREAPKRDSSEGQ

SEQ ID NO: 14500 - protein, 264 aa, Zea mays
  unsure (1)..(264): unsure at all Xaa locations
MASAELSREENVYMAKLAEQAERYEEMVEFMEKVAKTVDSEELTVEERNLLSVAYKNVIGARRASWRIISSIEQKEEGRGNEDRVTLIKDYRGKIETELTKICDGILKLLESHLVPSSTAPESKVFYLKMKGDYYRYLAEFKTGAERKDAAENTMVAYKAAQDIALAELAPTHPIRLGLALNFSVFYYEILNSPDRAGSLAKQXAFDEAISELDTLSEESYKDSTLIMQLLRDNLTLWXTSDISEDPXAEEIREAPKHDSSEGQ

SEQ ID NO: 14501 - protein, 240 aa, Zea mays
MSTAEATREENVYMAKLAEQAERYEEMVEFMEKVAKTADVGELTVEERNLLSVAYKNVIGARRASWRIISSIEQKEESRGNEAYVASIKEYRTRIETELSKICDGILKLLDSHLVPSATAAESKVFYLKMKGDYHRYLAEFKAGAERKEAAENTLVAYKSAQDIALADLPTTHPIRLGLALNFSVFYYEILNSPDRACNLAKQAFDEAIAELDSLGEESYKDSTLIMQLLRDNLTLWTLI

SEQ ID NO: 14502 - protein, 248 aa, Zea mays
MAKLAEQAERYEEMVEFMEKVAKTVDSEELTVEERNLLSVAYKNVIGARRASWRIISSIEQKEEGRGNEDRVTLIKDYRGKIETELTKICDGILKLLESHLVPSSTAPESKVFYLKMKGDYYRYLAEFKTGAERKDAAENTMVAYKAAQDIALAELAPTHPIRLGLALNFSVFYYEILNSPDRACSLAKQAFDEAISELDTLSEESYKDSTLIMQLLHDNLTLWTSDISEDPAEEIREAPKHDLSEGQ

SEQ ID NO: 14503 - protein, 278 aa, Zea mays
MYICRSGVLQILKLNCKMASAELSREENVYMAKLAEQAERYEEMVEFMEKVAKTVDSEELTVEERNLLSVAYKNVIGARRASWRIISSIEQKEEGRGNEDRVTLIKDYRGKIETELTKICDGILQLLETLLVPSSTGPELKVFYLEMNGDYYRYLAEFKTGAERKDAAENTMVAYKAAQDIALAELAPTHPIRLGLALNFSVFYYEILNSPDRACSLAKQAFDEAISELDTLSEESYKDSTLIMQLLRDNLTLWTSDISEDPAEEIREAPKRDSSEGQ

SEQ ID NO: 14504 - protein, 274 aa, Zea mays
  unsure (1)..(274): unsure at all Xaa locations
MSPSEPTREESVYMAKLAEQAERYEEMVEFMERVARYRRGAPXGGEELSVEERNLLSVAYKNVIGARRASWRIISSIEQKEEGRGNEAHAASIRAXYRSKIEAELARICDGILALLDSHLVPSAXAGAESKVFYLKMKGDYHRYLAEFKSGAERKDAXAESTMNAYKAAQDIALADLAPTHPIRLGXLALNFSVFYYEILNSPDRACNLAKQAFDEAISELDSLGEESXYKDSTLIMQLLRDNLTLWTSDTNEDGGDEIKEAAAAPKESAPEGQ

SEQ ID NO: 14505 - protein, 324 aa, Zea mays
  unsure (1)..(324): unsure at all Xaa locations
YRHPAPRWPRPGTPRPRAHHPRLRARARARATHIVIETTRVLRGPRPCTISPRIPESVFFLLLQYLYSLINMSREENVYMAKLAEQAERYEEMVEYMEKVAKTTDVQELTVEERNLLSVAFKNVIAAPRASWRIISSIEQKEESRKNEEHVAQIKEYRGKIEAELSNICDGILKLLDTHLVPSSTATESKVFYLKMKGDYHRYLAEFKTGAERKESAESTMVAYKAAQDIALAELPPIHPIRLGLALNFSVFYYEIQNSPDKACNLAKEXAFDEAISQLDMLGEDSYKDSNLIMQLLRDNLTLWTEDGIEEGLESSKGDAGEGQ

SEQ ID NO: 14506 - protein, 246 aa, Zea mays
  unsure (1)..(246): unsure at all Xaa locations
MASAELSREENVYMAKLAEQAERYEEMVEFMEKVAKTVDSEELTVEERNLLSVAYKNVIGARRASWRIISSIEQKEEGRGNEDRVTLIKDYRGKIETELTKICDGILKLLETHLVPSSTAPESKVFYLKMKGDYYRYLAEFKTGAERKDAAENTMVGYKAAQDIALGELAPTHPIRLGLGLNFSVCYYEILNSPDRACGLAKQAFDEAISELGTLSEECYKDSTLIMRLLRDNLTLWASDICEDPX

SEQ ID NO: 14507 - protein, 259 aa, Zea mays
  unsure (1)..(259): unsure at all Xaa locations
MSREDNVYMAKLAEQAERYEEMVEYMEKVAKTVDVEELTVEERNLLSVAYKNVIGAXRRASWRIISSIEHKEESRKNEEHVIQIKEYRGKIEAELSNICDGILKLIDSHLVPSSTAAESKVFYLKMKGDYHRYLAEFKTGAERKEAAESTMIAYKAAQDIGVAELASTHPIRLGLALNFSVFYYEILNSPDKACNLARAAFDEAISQLDTLGEDSYKDSTLIMQLXLRDNLTLWTADSTTEDGIEEGNEASKGDAGEGQ

SEQ ID NO: 14508 - protein, 259 aa, Zea mays
MAAAAAAAGTREEMVYMAKLAEQAERYEEMVEFMEKVAAAAELTVEERNLLSVAYKNVIGARRASWRIVSSIEHKEETRGAAGHAAAARGYRARVEAELSGICAGILRLLDERLVPAAAAVDARVFYLKMKGDYHRYLAEFKTGAERKDAADSTLAAYQAAQDIAVKELPPTHPIRLGLALNFSVFYYEILSSPDRACSLAKQAFDEAISELDSLGEESYKDSTLIMQLLRDNLTLWTSDMQEDGGDEMRDANKPDEEQ

SEQ ID NO: 14509 - protein, 264 aa, Zea mays
  unsure (1)..(264): unsure at all Xaa locations
TVDGSAELSREENVYMAKLPEHAERYXEMVDFMETVAKTDDSEELTVHERNLLSAAYRNVIGARRALWRMIYSIEQNEDGRGSEDRVTLIQXDYRGKIETELTMICDGILKLLETHLVPSSTAPESKVFYLKMKGDYYRYLAEFKTGAERKDAAENTMVAYKAAQDIALAELAPTHPIRLGLALNFSVFYYEILNSPDRACSLAKQAFDEAISELDTLSEESYKDSTLIMQLLRDNLTLWTSDISEDPAEEIREAPKRDSSEGQ

SEQ ID NO: 14510 - protein, 232 aa, Zea mays
  unsure (1)..(232): unsure at all Xaa locations
MAQPAELSREENVYMAKLAEQAERYEEMVEFMEKVAKTVDSEELTVEERNLLSVAYKNVIGARRASWRIISSIEQKEESRGNEDRVTLIKDYRGKIEVELTKICDGILKLLDSHLVPSSTAPESKVFYLKMKGDYYRYLAEFKSGTERKDAAENTMVAYKAAQEIALKELPPTHPIRLXLALNFSVFYYEILNSPDRACDLAKQAFDEPISELDSLSEESYQDSTLIXQLLX

SEQ ID NO: 14511 - protein, 237 aa, Zea mays
  unsure (1)..(237): unsure at all Xaa locations
XMVEYMEKVAKTVDVEELTVEERNLLSVAYKNVIGARRASWRIVSSIEQKEESRKNEEHVNLIKEYRGKIEAELSNICDGILKLLDSHLVPSSTAAESKVFYLKMKGDYHRYLAEFKTGAERKESAESTMVAYKXAAQDIALAELAPTHPIRLGLALNFSVFYYEILNSPDKACNLAKQAFDEAISELDSLGEESYKDSTLIMQLLRDNLTLWTSDLTEDGADEGKDAPKGDAGEGQ

SEQ ID NO: 14512 - protein, 328 aa, Zea mays
  unsure (1)..(328): unsure at all Xaa locations
MGDLLGSPRVAFHHSIRTFPDHTVPPRSEPRSSPAPGGKFVLFNNMSRXEENVYMAKLAEQAERYEEMVSIMEKVAKTVDVEELTVEERNLLSVAYKNVIGARRASWRIVSSIEQKEESRKNEEHVNLIKEYRGKIEAELSNSGSRENNICDGILKLLDSHLVPSSTAAESKVFYLKMKGDYHRYLAEFKTGAERKESAESTMVAYKAAQDIALAELAPSHPDRLGLAPNFSVFYYEILNSPDKACNPGKXRAFDEAISELDTLVRESYKDSTLIMQLXLRDNLTLWDTTLTEXDGADEXAKMPPKGDAGRGTVIFGGGCKVVRAPMF

SEQ ID NO: 14513 - protein, 275 aa, Zea mays
  unsure (1)..(275): unsure at all Xaa locations
MSPSEPTREESVYMAKLAEQAERYEEMVEFMERVARSAGGAGGGEELSVEERNLLSXVAYKNVIGARRASXWRIISSIEQKEEGXRGNEAHAASIRAYRSKIETELAXRICDGILALLDSHLVPSAGXGAESKVFYLKMKGDXYHRYLAEFKSGAERKDAAESTMNAYKAAQDIXALADLAPTHPIRXLGLALNFSVFYYEILNSPDRACNLAKQAFDEAISELDSPGERAYRDSTLIMQLXLRDNLTLWTSDTNEDGGDEIKDAAAPKESAEGQ

SEQ ID NO: 14514 - protein, 234 aa, Zea mays
  unsure (1)..(234): unsure at all Xaa locations
MTAPAELSREENVYMAKLAEQAERYEEMVEFMEKVAKTVDSEELTVEERNLLSVAYKNVIGARRAPWRIISSIEQKEESRGNEDRVTLIKEYRGKIETELSKICDGILKLLETHLVPSSTAPESKVFYLKMKGDYYRYLAEFKSGPERKDAAENTMVAYKAAQDIALAELAPTHPIRLGLAXNFSVFYYEILNSPDRACNLAKQAFDEXIXSELDTLSEKIYQDSTLIMQLLHD

SEQ ID NO: 14515 - protein, 264 aa, Zea mays
  unsure (1)..(264): unsure at all Xaa locations
SLNICARDENVYMDKVAEQAEQDEEMAEYMPEXAAKTAHVQHLTXAQDRNLLSXAAYKNVTAARRASWRIASXSIEPQEEPRTNEEHVNLIKEYRGKIEAELSNICDGILKLLDSHLVPSSTAAESKVFYLKMKGDYHRYLAEFKTGAERKESAESTMVAYKAAQDIALAELAPTHPIRLGLALNFSVFYYEILNSPDKACNLAKQAFDEAISELDSLGEESYKDSTLIMQLLRDNLTLWTSDLTEDGADEGKDAPKGDAGEGQ

SEQ ID NO: 14516 - protein, 248 aa, Zea mays
  unsure (1)..(248): unsure at all Xaa locations
DAWATTPFLRAQEQPRARRKFVLLTNVEGGECLHGQVGXAGXKNVIGARRASWRIVSSIEQKEESRKNEEHVNLIKEYRGKIEAELSNICDGILKLLDSHLVPSSTAAESKVFYLKMKGDYHRYLAEFKTGAERKESAESTMVAYKAAQDIALAELAPTHPIRLGLALNFSVFYYEILNSPDKACNLAKQAFDEAISELDSLGEESYKDSTLIMQLLRDNLTLWTSDLTEDGADEGKDAQKGDAGEGQ

SEQ ID NO: 14517 - protein, 254 aa, Zea mays
  unsure (1)..(254): unsure at all Xaa locations
GRDSIRSSPTTPFLRAQEQPRARRKFVLLTNVEGGECLHGQVGXAGXKNVIGARRASWRIVSSIEQKEESRKNEEHVNLIKEYRGKIEAELSNICDGILKLLDSHLVPSSTAAESKVFYLKMKGDYHRYLAEFKTGXAERKESAESPMVAYKAAQDIALAELAPTHPIRLGLALNFSVFYYEILNSPDKACNLAKQAFDEAISELDSLGEESYKDSTLIMQLLRDNLTLWTSDLTEDGADEGKDAPKGDAGEGQ

SEQ ID NO: 14518 - protein, 220 aa, Zea mays
MAAAAAGTREEMVYMAKLAEQAERYEEMVEFMEKVAAAAELTVEERNLLSVAYKNVIGARRASWRIVSSIEHKEETRGAAAVDARVFYLKMKGDYHRYLAEFKTGAERKDAADSTLAAYQAAQDIAVKELPPTHPIRLGLALNFSVFYYEILSSPDRACSLAKQAFDEAISELDSLGEESYKDSTLIMQLLRDNLTLWTSDMQEDGGDEMRDANKPDEEQ

SEQ ID NO: 14519 - protein, 215 aa, Zea mays
  unsure (1)..(215): unsure at all Xaa locations
MSREDNVYMAKLAEQAERYEEMVEYMEKVAKTVDVEELTVEERNLLSVAYKNVIGARRASWRIISSIEHKEESQSKVFYLKMKGDYHRYLAEFKTGAERKEAAESTMIAYKAAQDIALAELASTHPIRLGLALNFSVFYYEILNSPDKACNLAKQAFDEAISELDTLGEESYKDSTLIMQLLRDNLTLWTSDITEEGIEEGKEASKGDAEXPGKP

SEQ ID NO: 14520 - protein, 365 aa, Zea mays
  unsure (1)..(365): unsure at all Xaa locations
EAGRGHRPYPQLPRARDQPRARSNLALLSICSTDENVYMAQLSDQAERYEEMIQYLHNQPETXCVKDLHVLQQNLIPMAHTTIAGVARCSHRQHXVIFXLEQQQESRTNQQHVHLITEYPAQIEAELRNICAGILKLLDSHLEPSSTAAESXLFYLKMKGDYHRYLAEFKTGPERKESADSTMMAYNAAQDIALAELAPTHPIRLGLALNFSVFYYEILNSPDKACNLAKQAFDEAISQLDTLGEESYKDSTLIMQLLRDNLTLWTSDLTEDGADEGKEAPKGEGCDGQXGDSNLGRAHIVRAHCFRCSMLSKAELCRAIIVADFLFPHFFFYISRLVVFELVPHCFVLPLVGIKSVWTGIIHWI

SEQ ID NO: 14521 - protein, 215 aa, Zea mays
  unsure (1)..(215): unsure at all Xaa locations
MSREDNVYMAKLAEQAERYEEMVEYMEKVAKTVDVEELTVEERNLLSVAYKNVIGARRASWRIISSIEHKEESQSKVFYLKMKGDYHRYLAEFKTGAERKEAAESTMIAYKAAQDIALAELASTHPIRLGLALNFSVFYYEILNSPDKACNLARQAFDEAISQLDTLGEDSYKDSTLIMQLLRDNLTLWTADSTTEDGIEEGNEASKGXDAGEGQ

SEQ ID NO: 14522 - protein, 222 aa, Zea mays
  unsure (1)..(222): unsure at all Xaa locations
MSPAEPTRDESVYMAKLAEQAERYEEMVEFMERVAKATGXXQKEEGRGNDAHAATIRSYRSKIEAELAKICDGILALLDSHLVPSAGAAESKVFYLKMKGDYHRYLAEFKSGGERKEAAESTMNAYKAAQDIALADLAPTHPIRLGLALNFSVFYYEILNSPDRACNLAKQAFDEAISELDSLGEESYKDSTLIMQLLRDNLTLWTSDTNEDDVDEIKEAPX

SEQ ID NO: 14523 - protein, 206 aa, Zea mays
  unsure (1)..(206): unsure at all Xaa locations
MSPAEPTRDESVYMAKLAEQAERYEEMVEFMERVAKATGGAGPGEELSVEERNLLSVAYKNVIGARRASWRIISSIEQKEEGRGNDAHAATIRSYRSKIEAELAKICDGILALLDSHLVPSAGAAESKVFYLKMKGDYHRYLAEFKSGGXERKEAAESTMNAYKAAQDIALADLAPTHPIRLGLAFNFSVFYYEILNSPDRACNLX

SEQ ID NO: 14524 - protein, 303 aa, Zea mays
  unsure (1)..(303): unsure at all Xaa locations
SGPKSRKGGAKSRKGQATSTAQHSTSTPSVLGRRGEGNPGPGRVVGRGSAAEEMEEREKLVCLAKLAEQAERYDDMVEFMKNLARMDVDMSAEERHLFSVGFKNTIGAKRASWRIICSHEQKVAAXXRQTGVMIDAYKKKVEEELRKVCNEVLSVIAIHCLPLASTGENIVFFYKMKGDYYRYLAEFSTGTEKKAASDQSLMAYQHAMVVASSELSPAHQIRLGLALNLSVFFYEIMNSHERACQVAKQAFDEALTEINSGEGVYKDSTLMMQLLKDNLALWTSELXXGGEASKGNGDVDMEG

SEQ ID NO: 14525 - protein, 290 aa, Zea mays
  unsure (1)..(290): unsure at all Xaa locations
ARVLPSTAQHSTSTPSVLGRRGEGNPGPGRVVGRGSAAEEMEEREKLVCLAKLAEQAERYDDMVEFMKNLARMDVDMSAEERHLFSVGFKNTIGAKRASWRIICSHEQKVAAXXRQTGVMIDAYKKKVEEELRKVCNEVLSVIAIHCLPLASTGENIVFFYKMKGDYYRYLAEFSTGTEKKAASDQSLMAYQHAMVVASSELSPAHQIRLGLALNLSVFFYEIMNSHERACQVAKQAFDEALTEINSGEGVYKDSTLMMQLLKDNLALWTSELXXGGEASKGNDDVDMEG

SEQ ID NO: 14526 - protein, 389 aa, Zea mays
  unsure (1)..(389): unsure at all Xaa locations
NSARGETEPSGPKSRKGQATSTAQHSTSTPSVLGRRGEGNPGPGRVVGRGSAAEEMEEREKLVCLAKLAEQAERYDDMVEFMKNLARMDVDMSAEERHLFSVGFKNTIGAKRASWRIICSHEQKVAAXXRQTGVMIDAYKKKVEEELRKVCNEVLSVIAIHCLPLASTGENIVFFYKMKGDYYRYLAEFSTGTEKKAASDQSLMAYQHAMVVASSELSPAHQIRLGLALNLSVFFYEIMNSHERACQVAKQAFDEALTEINSGEGVYKDSTIMMQLLKDNLALWTSELXXGGEASKGSXRCGHGGLIHSPCFKETQKARKNIQAVMLANLGPQVFSASELRGALCIFLKFLSVSGFFFEVCLFLSFGHRLVLESVTHYQVFQRSELVSI

SEQ ID NO: 14527 - protein, 222 aa, Zea mays
TFSPRARSKFVLLSILSIWRGRRMSTWPSWLSSRKKEESRKNEEHVNLIKEYRAKIEAELSNICDGILKLLDSHLVPSSTAAESKVFYLKMKGDYHRYLAEFKTGPERKESAESTMMAYKAAQDIALAELAPTHPIRLGLALNFSVFYYEILNSPDKACNLAKQAFDEAISQLDTLGEESYKDSTLIMQLLRDNLTLWTSDLTEDGADEGKEAPKGEAGDGQ

SEQ ID NO: 14528 - protein, 231 aa, Zea mays
TRPRSSPAPETQPRARSKFVLLSILSIWRGRRMSTWPSWLSSRKKEESRKNEEHVNLIKEYRAKIEAELSNICDGILKLLDSHLVPSSTAAESKVFYLKMKGDYHRYLAEFKTGPERKESAESTMMAYKAAQDIALAELAPTHPIRLGLALNFSVFYYEILNSPDKACNLAKQAFDEAISQLDTLGEESYKDSTLIMQLLRDNLTLWTSDLTEDGADEGKEAPKGEAGDGQ

SEQ ID NO: 14529 - protein, 239 aa, Zea mays
  unsure (1)..(239): unsure at all Xaa locations
KKKKKKKRPTASIRSSPAPETQPRARSKFVLLSIWRGRRMSTWPSWLSSRKKEESRKNEEHVNLIKEYRAKIEAELSNICDGILKLLDSHLVPSSTAAESKVFYLKMKGDYHRYLAEFKTGPERKESAESTMMAYKAAQDIALAELAPTHPIRLGLALNFSVFYYEILNSPDKACNLAKQAFDEAISQLDTLGEESYKDSTLIMQLLRDNLTLWTSDLTEXDGADEGKEAPKGEAGDGQ

SEQ ID NO: 14530 - protein, 187 aa, Zea mays
MATERESKTFLARLCEQAERYDEMVTYMKEVAKVAGELTGDERNLLSVAYKNVVGTRRASWRIISSIEQKEESKGTEKHVGTIRDYRQKIETELEQVCQDVLNVLDDSLIPKAESGESKVFYHKMKGDYHRYLAEFASGEKRKVAATAAHEAYKTATDVAQTELTPTHPIRLGLALNFLVFYYEILN

SEQ ID NO: 14531 - protein, 224 aa, Zea mays
  unsure (1)..(224): unsure at all Xaa locations
TFSSLAISIISIKEQTYSWRGGRMSTWPSWLSSRKKEESRKNEEHVNLIKEYRAKIEAELSNICDGILKLLDSHLVPSFTAAESKVFYLKMKGDYHRYLAEFKTGPERKESAESTMMAYKAAQDIALAELAPTHPIRLGLALNFSVFYYEILNSPXDKACTLAKQAFDEAISQLDTXLGEESYKDSTLIMQLLRDNLTLWTSDLTEDGADEGKEAPKGEAGDGQ

SEQ ID NO: 14532 - protein, 187 aa, Zea mays
  unsure (1)..(187): unsure at all Xaa locations
XEESRKTKSXVNLIKEYRGKIEAELSNICDGILKLLDSHLVPSSTAAESKVFYLKMKGDYHRYLAEFKTGAERKESAESTMVAYKAAQDIALAELAPTHPIRLGLALNFSVFYYEILNSPDKACNLAKQAFDEAISELDTLGEESYKDSTLIMQLLRDNLTLWTSDLTEDGADECKEASKGDAGEGQ

SEQ ID NO: 14533 - protein, 191 aa, Zea mays
MASAELSREENVYMAKLAEQAERYEEMVEFMEKVAKTVDSEELTVEERNLLSVAYKNVIGARRASWRIISSIEQNEEGRGNEDRVTLIKDYPGKIETELTKICDGILKLLETHLVPSSTAPESKVFYLKMKGDYYRYLAEFKTGAERKDAAENTMVAYKAAQDLALAELAPTHPIRLGLALNFSVFYYENL

SEQ ID NO: 14534 - protein, 257 aa, Zea mays
  unsure (1)..(257): unsure at all Xaa locations
MSREENXYMAKLAEXAERYXEMVEYXEKVAXTVXVEXLTVEERNPXSXAYKNXXWARRASXRIVSSIEQXEEXRKNEEHVNLIKEYRGKIXAXXSXXCXGILKXPXSHXVPXSXXAESKXFYLKXKGDYHRXLAEFKTCXERKESXXXXTXVAXXAAQDXSLAEPAXTHXIRLGLAXNFSXFYYENXNXPDKACNLAKQXFXEXISXLDSLCEEXXKDSTXIMXLXRDNLTLWTTDLTEDGAEEGKNAXKXEAGEGQ

SEQ ID NO: 14535 - protein, 210 aa, Zea mays
  unsure (1)..(210): unsure at all Xaa locations
SRPAGTASFENXNCKMASAELSREENVYMAKLAEQAERYEEMVEFMEKVAKTVDSEKLLESHLVPSSTAPESKVFYLKMKGDYYRYLAEFKTGAERKDAAENTMVAYKAAQDIALAELAPTHPIRLGLALNFSVFYYEILNSPDRACSLAKQAFDEAISELDTLSEESYKDSTLIMQLLRDNLTLWTSDISEDPAEEIREAPKHDSSEGQ

SEQ ID NO: 14536 - protein, 218 aa, Zea mays
MEEREKLVCLAKLAEQAERYDDMVEFMKNLARMDVDMSAEERHLFSVGFKNTIGAKRASWRIICSHEQKVAADRQTGVMIDAYKKKVEEERRKGDYYRYLAEFSTGTEKKAASDQSLMAYQHAMVVASSELSPAHQIRLGLALNLSVFFYEIMNSHERACQVAKQAFDEALTEINSGEGGYKDSTLMMQLLKDNLALWTSELTGGEASKGNDDVDMEG

SEQ ID NO: 14537 - protein, 219 aa, Zea mays
  unsure (1)..(219): unsure at all Xaa locations
LEAGRAPTSAQLVASAPQDPLRHPQPCDRPCCRRPRSADPSRPTTPYRRSQLLAEQAERYEEMVEFMXXRVARSAGGAESKVFYLKMKGDYHRYLAEFKSGAERKDAAESTMNAYKAAQDIALADLAPTHPIRLGLALNFSVFYYEILNSPDRACNLAKQAFDEAISELDSLGEESYKDSTLIMQLLRDNLTLWTSDTNEDGGDEIKDAAAPKESAEGQ

SEQ ID NO: 14538 - protein, 222 aa, Zea mays
  unsure (1)..(222): unsure at all Xaa locations
IGYLEAGRAPTSAQLVASAPQDPLRHPQPCDRPCCRRPRSADPSRPTTPYRRSQLLAEQAERYEEMVEFMXXRVARSAGGAESKVFYLKMKGDYHRYLAEFKSGAERKDAAESTMNAYKAAQDIALADLAPTHPIRLGLALNFSVFYYEILNSPDRACNLAKQAFDEAISELDSLGEESYKDSTLIMQLLRDNLTLWTSDTNEDGGDEIKDAAAPKESAEGQ

SEQ ID NO: 14539 - protein, 165 aa, Zea mays
IRLELPAVSISIQFSAPTHLPQPTAAVDARVFYLKMKGDYHRYLAEFKTGAERKDAADSTLAAYQAAQDIAVKELPPTHPIRLGLALNFSVFYYEILSSPDRACSLAKQAFDEAISELDSLGEESYKDSTLIMQLLRDNLTLWTSDMQEDGGDEMRDANKPDEEQ

SEQ ID NO: 14540 - protein, 218 aa, Zea mays
  unsure (1)..(218): unsure at all Xaa locations
PRVRRSTGSSAPPQPCDRPCRRRSRSADPSQPRSQPCRRRSRRGRRAXYMAKLAEQAERYEEMVXXFMERVARYAESKVFYLKMKGDYHRYLAEFKSGAERKDAAESTMNAYKAAQDIALADLAPTHPIRLGLALNFSVFYYEILNSPDRACNLAKQAFDEAISELDSLGEESYKDSTLIMQLLRDNLTLWTSDTNEDGGDEIKEAAAAPKESAPEGQ

SEQ ID NO: 14541 - protein, 168 aa, Zea mays
  unsure (1)..(168): unsure at all Xaa locations
KXNKKQNRSSSSTGTLPLWPLPCLPPMAAVDARVFYLKMKGDYHRYLAEFKTGAERKDAADSTLAAYQAAQDIAVKELPPTHPIRLGLALNFSVFYYEILSSPDRACSLAKQAFDEAISELDSLGEESYKDSTLIMQLLRDNLTLWTSDMQEDGGDEMRDANKPDEEQ

SEQ ID NO: 14542 - protein, 140 aa, Zea mays
  unsure (1)..(140): unsure at all Xaa locations
XFYLKMKGDYHRYLAEFKSGAERKDAAESTMNAYKAAQDIALADLAPTHPIRLGLALNFSVFYYEILNSPDRACNLAKQAFDEAISELDSLGEESYKDSTLIMQLLRDNLTLWTSDTNEDGGDEIKEAAAAPKESAPEGQ

SEQ ID NO: 14543 - protein, 140 aa, Zea mays; identical to SEQ ID NO: 14542
  unsure (1)..(140): unsure at all Xaa locations

SEQ ID NO: 14544 - protein, 224 aa, Zea mays
  unsure (1)..(224): unsure at all Xaa locations
MPELVEDDRRRTQQIAEHCKFCPLNCPMAAPEFSRXEDNVTWQKLAQKADRYHEMSESHEKVPRTADSKELTGEERNLLSGAYKNAIGARRASWRIISSIQQKEEGRRYDDRPTLLXDYRAKTETEPXPICDGILKLLDTHLVPSSTAPETTVFYLWMTGDYYTYLAEFTTGGERSDSAENTMMRYPVAHDIALGELAPTHPIRIGLRLNFSMCYYETLNVPDX

SEQ ID NO: 14545 - protein, 129 aa, Zea mays
  unsure (1)..(129): unsure at all Xaa locations
XLDSHLVPSSTAAESKVFYLRIKGAYHGFLAELKTGPERKDSVESTIMAYKVVQDIALADLAPTHPIRLGLALNFSVFYYEILNSPDKACNLAKQAFDEAISQLDTLGEESYKDSTLIMQLLXDNLTLX

SEQ ID NO: 14546 - protein, 130 aa, Zea mays
  unsure (1)..(130): unsure at all Xaa locations
MSSPREENVYLAKLAEQAERYEEMVEFMEKVAKTVDSEELTVEERNLLSVAYKNVIGARRASWRIISSIEQKEESRGNEDHVAIIKDYRGKIETELSKICDGILNLLDSHLVPAASLAESKVFYLKMKGX

SEQ ID NO: 14547 - protein, 135 aa, Zea mays
  unsure (1)..(135): unsure at all Xaa locations
MAVSAREEFVYMAKLAEQAERYEEMVEFMEKVSAAVDGDELTVEERNLLSVAYKNVIGARRASWRIISSIEQKEESRGNDDHVTAIRDYRSKIETELSGICDGILKLLDSRLVPAAASGDSKVFYLKMKGDYXRX

SEQ ID NO: 14548 - protein, 159 aa, Zea mays
  unsure (1)..(159): unsure at all Xaa locations
MAQLAEHAXRCEEMGEYMEKVANTVYGEELTVEERNLLWAAYKNVIGARRASWSIASSIEQKEESRLNEXHVNLIKEYRANIVAELINICDGILMLGDSHLLPSSTAGESNVFYLKMKGDYHRYLAEFKTGPDRNECAGSTMMDYMAAPDIALAELAPX

SEQ ID NO: 14549 - protein, 131 aa, Zea mays
PRVRRYLAEFKSGAERKDAAESTMNAYKAAQDIALADLAPTHPIRLGLALNFSVFYYEILNSPDRACNLAKQAFDEAISELDSLGEESYKDSTLIMQLLRDNLTLWTSDTNEDGGDEIKDAAAPKESAEGQ

SEQ ID NO: 14550 - protein, 196 aa, Zea mays
  unsure (1)..(196): unsure at all Xaa locations
SVAYRLSSARTAAASHLIAALLPRHSEKYEELIEFMEKVAKTVDSEEHYVLSIAYKIVXGTQCASWCIISSIEXGEEGRVNVDCVTLIEDYHNKIEVELSKICDGILKLLDSHRFPSLTAAESKVFYLKMKGDYYGYLAEFETGSRRKDAAXNTMVAHKPAQDIALEELAPTHPIRLWLVLNFSTLWYCVLKKKKK

SEQ ID NO: 14551 - protein, 167 aa, Zea mays
  unsure (1)..(167): unsure at all Xaa locations
GTRXLQVPAHAYPVRATLFLSQXPTEAAAYITVLYLKMKGDYHRYLAENKTGAERKDVEDSTLAANHSAHDIVVKELPPTHPIRLALALNFCEFYYEILSPRVRGRVGAKQAFDEAISELDTLGEESYKDSTLIMQLLRDNLTLWTSDMQEDGSDEMRDASKPDDEX

SEQ ID NO: 14552 - protein, 123 aa, Zea mays
  unsure (1)..(123): unsure at all Xaa locations
XPRVRGRVGSAESTMVAYKAAQDIALAELAPTHPIRLGLALNFSVFYYEILNSPDKACNLAKQAFDEAISELDTLGEESYKDSTLIMQLLRDNLTLWTSDITEEGIEEGKEASKGDAEXPGKP

SEQ ID NO: 14553 - protein, 155 aa, Zea mays
MEKTELIQKAKLAEQAERYDDMATCMKAVTEQGAELSNEERNLLSVAYKNVVGGRRSAWRVISSIEQKTDTSDKKLQLIKDYREKVESELRSICTTVLELVDKCLIANATNPESKVFYLKMKGDYLRYLAEGACGDDRKRTMENWRGAYQEAFGV

SEQ ID NO: 14554 - protein, 152 aa, Zea mays
  unsure (1)..(152): unsure at all Xaa locations
RVGGSAAEEMEEREKLVCLAKLAEQAXXYDDMVEFMKNLARMDVDMSAEERHLFSVGFKNTIGAKRASWRIICSHEQKVAAXXRQTGVMIDAYKKKVEEELRKVCNEVLSVIAIHCLPLASTGENIVFFYKMKGDYYRYLAEFSTGTEKKAX

SEQ ID NO: 14555 - protein, 92 aa, Zea mays
  unsure (1)..(92): unsure at all Xaa locations
XRNLLSVAYKNVIGARXASWRIVTSIEQKEESKGNESQVTLIKEYRQKIETELAKICEDILEVLDKHLIPSAQTGESKVFYHKMKGDYHRYX

SEQ ID NO: 14556 - protein, 186 aa, Zea mays
  unsure (1)..(186): unsure at all Xaa locations
MAREENVYMAKLADSVERYXEEMVDHMHNVPNTVDVEQLTVEERDLWSGAYNXNVIGGRRASWTHCAXLLSETELTESAXRTTEHRXEPLSTEYRAQIEAELINIRDGLLXNVLDSLLVASSTGAVPKVFYLKMNVDYHRDLAESTTVPDRKESADITMMVYYAAHDIASTEMRPTHPISLAIAPN

SEQ ID NO: 14557 - protein, 192 aa, Zea mays
  unsure (1)..(192): unsure at all Xaa locations
SFGTCVPCAKTRARHAEQAXYRNGPYFMENETKTVDSDELTAXERNLLXSAAYNNILAARLAXWRMHAAYMRXQHSMTVLGNEDTVTLINDYRGKTDTELTKICHGMLKLVESHLCAXSSTAPESTVLYLKMKGDYYRYLAEFKTGSDRKDADDNTMVXAYTAAHDIALAELAPTHPIRLALALNFXTFYYE

SEQ ID NO: 14558 - protein, 116 aa, Zea mays
  unsure (1)..(116): unsure at all Xaa locations
XNAFVLDSHLVPSDDTGVSKVXYLKMKGDYHRYLAGFKTGADRKEAADNSLLAYKSAQDIAMADLAPTHTIWLXLALNFFVFYYKILNSPDRACNLIKQAFDEAIFNLFSXLCEEX

SEQ ID NO: 14559 - protein, 163 aa, Zea mays
  unsure (1)..(163): unsure at all Xaa locations
MSTXQPTREDSGNMGKLANQARALSRWIEFMXERVARSAMGNGRGEELSXEERNLLTISYNNVIRGRLASWRILSSIXQKDEGRGNEAHAASIRTYRSEIKIEVDHICDGILGLLDSHVIASDDADKTKVFYLKMKGDYRRYLGEIKSGEEMKDAAXSTMNGY

SEQ ID NO: 14560 - protein, 130 aa, Zea mays
  unsure (1)..(130): unsure at all Xaa locations
MSWEDNAYLHKLDAQVERHEEMVDHMENVAKTVYVEELTVDEHNLLSVDYHNVIGDRRASWSIISSIXHKEDSRNNEEPVIQIKEYRGKIGAEMSNICDGILKVIDSHLVTSSTGAEAKVVYLLMKGDYX

SEQ ID NO: 14561 - protein, 213 aa, Zea mays
  unsure (1)..(213): unsure at all Xaa locations
TTREKTEHTEEESDHERDVYNNVYENVIAAWRTVCCIEYYVEHRENYQHNKHNVNFIKEYGAKMNAKLNNIWDRIDNQLESHLTASYTDAESQVMNVNINGDYDKYNTESKTDAYRKNTVESSMAAYNVAQDIVVPNHATTHAIRLKLALNYXEIYNETDNSPHKANHLSNEAIYESNCHLDSLCEDVYMDMPLLMHLLTDNYXTLLTYDLTX

SEQ ID NO: 14562 - protein, 136 aa, Zea mays
  unsure (1)..(136): unsure at all Xaa locations
XRIICCIEQNEEGRGNDDRVTLIKDYRGEIETELTTICDGILKLLESHLEADFTAPESNVYYLKMNGDYYRYYDEFKTEAERKDATENTMVAYMAAHDIAQDDLAATHAITLGLTLNLSVIYYEILNXTDRSCNLX

SEQ ID NO: 14563 - protein, 108 aa, Zea mays
  unsure (1)..(108): unsure at all Xaa locations
TKTVYEEELTVEERNLLSGAYKNVIGARRASWRIGNSIEQKEESLKNHYPVDLIKEYSGXIEAXLSNICDELLKLLDSHLEPYCNAAESNVFYLKMKGDYHTSLTEFX

SEQ ID NO: 14564 - protein, 212 aa, Zea mays
  unsure (1)..(212): unsure at all Xaa locations
RGXKRQSRAQHITPGVGGGRGKRTPGGGGGSAAEEMEDREKLVCLAKLAEQAERYYYMVEFIXNLGIVRGXXIXXXRHXFSXXFKNTIXXXXASXXIISSHXPKVXXXXXTGVMIDAYKKKVEEELRKVCIEVLSVIAIHCLPLASTGENIVFFYKMKGDYYRYLADFRSGTENEAARSSHLXAYQHAMVVNSSELXPAHRRQQTXHADRLE

SEQ ID NO: 14565 - protein, 236 aa, Zea mays
  unsure (1)..(236): unsure at all Xaa locations
APLSTTSCSKIARSQYVHMIDPAWKTAHLLPTPXVLRQIAMTMTSXLLNVEDTYVLSAAYRNVLECERAACRMISSMEQTKLDAGNERXTTLIRDYRGEIXIRLTLICHGVLQLLRPSSSPASTRPRSQGPLSPTEGDYYTYLAXEVKSGPDTQDAADNKCGYSCQLARXLSTPLLVGLHXXFQVYYNSXLTDXACSLAKQAXFDEAISELDTXLSEESYKDSTLIMQLLRDNCTY

SEQ ID NO: 14566 - protein, 100 aa, Zea mays
  unsure (1)..(100): unsure at all Xaa locations
XENPGSVPTRADCXMRELAPTHPIRLGLASNFSVCYYXILNSPDRACSLAKQAFADAIAQLDTVGGEPYKDRTVIMQLVRDSLTLWTSDMPVCSLSILIX

SEQ ID NO: 14567 - protein, 87 aa, Zea mays
  unsure (1)..(87): unsure at all Xaa locations
XPTRXVNFSVFYYEILNSPDRACNLAKQAFDEAIAELDTLGEESYKDSTLIMQLLRDNLTLWTSDMQDDAADEIKEAAAPKPTEEQQ

SEQ ID NO: 14568 - protein, 101 aa, Zea mays
  unsure (1)..(101): unsure at all Xaa locations
MSREENVYMAKLAXQAERYEEMVEYMEKVAKTVDVEELTVEERNLLSVAYKNVIXARRASWRIVSSIEQRXXNFXREHVNLIKEYRGKIXAELSNICDGIX

SEQ ID NO: 14569 - protein, 122 aa, Zea mays
  unsure (1)..(122): unsure at all Xaa locations
PSSAHTRRIRSQDPLRHRNRVTARAAGDPDPPTPDAGERNLLSVAYKNVIGARRASWRIISSIEQKEEGRGNEAHAASIRAYRSKIEAELARICDGILALLDSHLVPSAXGAEXKXFYLTMK

SEQ ID NO: 14570 - protein, 142 aa, Zea mays
  unsure (1)..(142): unsure at all Xaa locations
XYMAISIISIKEXNLILAPGENVXKWANWVNKAXRKENPVRNKNNLNLTRENVPKFKAKLSNICNGILKLLDSHLVPSFTAAESKVFYLKMKGDYHRYLAEFKTGPERKESAESTMMAYKGAQXEIARVNLEPTHPIRLGLX

SEQ ID NO: 14571 - protein, 82 aa, Zea mays
PRVRSVFYYEILNSPDRACSLAKQAFDEAISELDTLSEESYKDSTLIMQLLRDNLTLWTSDISEDPAEEIREAPKRDSSEGQ

SEQ ID NO: 14572 - protein, 140 aa, Zea mays
  unsure (1)..(140): unsure at all Xaa locations
CSFIRCAAPGSIARCXDLHGRAGGRSTTREENVYMAKLVDQAERDDEMDEYMEKAPKTVDAQQLTVEDXNLLSAAYHNAIAARRASWRIASYIEQKDESRKNEEHGNLINEYPGKIDAELSNICHGILNLLESHLMHCST

SEQ ID NO: 14573 - protein, 103 aa, Zea mays
  unsure (1)..(103): unsure at all Xaa locations
XLSVHERNLSFVAYNNVIGTRRASWRIGSSIEQKEESRKNEEHVNLIKEYRAKIEALLCYILYVILNLLYSHLVPSSTAAESMVFYLMTMVYYQRYLAEFKTX

SEQ ID NO: 14574 - protein, 123 aa, Zea mays
  unsure (1)..(123): unsure at all Xaa locations
MNSTISSYRSACSASLAMYTLSSRVGSDGDMAASGAGTAHASADAWADAWLGLALKFAVFDXEILNSPDRACNLAKQAFDEAISELDSLGEESYKDSTLIMQLLRDNLTLWTSDTNEDAGDEX

SEQ ID NO: 14575 - protein, 86 aa, Zea mays
  unsure (1)..(86): unsure at all Xaa locations
KGDYFRYXLAELKTGPERKESVESTMMAYKAAQDIALTELAPTHPIRLGLALNLSVYYYEILNSPDKACNLAKHAFDETVYEVNTX

SEQ ID NO: 14576 - protein, 123 aa, Zea mays
  unsure (1)..(123): unsure at all Xaa locations
MASGELPRXEEYVYMDNLGEQAERHEEMVLLMDKVATTVDSEELTEEERNLLSGAYRNVIGASRASWPIISFIEQKEEGRCNEDRVTLFEDVRGKIESXLTQICDGILKLLETHLEPSSTAPX

SEQ ID NO: 14577 - protein, 109 aa, Zea mays
  unsure (1)..(109): unsure at all Xaa locations
XLTKICDGILKLLETHLGPTSTDDQFNVFYVKMKGDCYRFLDVFKTGAVRQDAVLNTIVAYIAAHDIALAELATTHPIGLGLALNFSVFYYEILNAPDPXTCMSSKACX

SEQ ID NO: 14578 - protein, 95 aa, Zea mays
  unsure (1)..(95): unsure at all Xaa locations
XDFYRYLAENKTGAERKEAXAENTMEAYKAGQDIALAELAPTHPIRLGLALNFSGGYYESPNSPDRACRLGKQAFDEAISELDTPSEXEADKDRX

SEQ ID NO: 14579 - protein, 159 aa, Zea mays
  unsure (1)..(159): unsure at all Xaa locations
DKVCEGLHFFFLXLEFNSKVFXLEIQVDFEKYEGMIKVMEKVXNTVNSMELXXEEHYLLPVACKNVIGIRCASWRIVSSIEYREXGCVNMDRATLIEGYHNKIEVELNKICVGILKLFASHLPPSLIVPKSKVFYLKMKGDYYRILLSYFTSKKKKKKX

SEQ ID NO: 14580 - protein, 111 aa, Zea mays
  unsure (1)..(111): unsure at all Xaa locations
XKIYAYLSIFSRGILKLLEGGLMASSTATKSDAFYLMMKGDYHRXWLMHLILAADRKESAESTVVAYTAAHDIALSDPSPTHPIRLGLALNFSVFYYEIMYSPDKACNLAK

SEQ ID NO: 14581 - protein, 105 aa, Zea mays
  unsure (1)..(105): unsure at all Xaa locations
KLNCKTASTELYREENVYMAXKLAEQAKRYEEMDEFMXKVTNTVYWXELTVEERNLLYXAYKNVIGARRASWRIIYSIEQKEEGRSNEDRVTLIKDYRGKTETEX

SEQ ID NO: 14582 - protein, 86 aa, Zea mays
  unsure (1)..(86): unsure at all Xaa locations
MSPSEPTREESVYMAKLAEQAERYEEMVEFMERVARSVGGAGGGEELSVEERKLVFVAYKNVMGARKGLWRIISCIEQKEEGRGNX

SEQ ID NO: 14583 - protein, 76 aa, Zea mays
  unsure (1)..(76): unsure at all Xaa locations
MASAKRSREENVYMAKLAQQAERYKEMVEFMDKVAKTVDSDELTVEERSLLSVTYKNVIGARRASWRIISSIEQKX

SEQ ID NO: 14584 - protein, 132 aa, Zea mays
  unsure (1)..(132): unsure at all Xaa locations
XHSLNVYMAKLPERAYRHEEMVYFMENVTKTDDSHELTVEEHYLLSAAYKNVIAVRSALXHMISFIEQHDQGQGAEDTRHTLKGQSGSTETELTKICDGEMKLVXCELVPSYIVPEIKALYLKMKGDYYRYT

SEQ ID NO: 14585 - protein, 61 aa, Zea mays
  unsure (1)..(61): unsure at all Xaa locations
ILNSPDRACNLAKQAFDEAISELDSLGEESYKDSTLIMQLLXDNLTLWTSDTNEDGGDEIK

SEQ ID NO: 14586 - protein, 160 aa, Zea mays
  unsure (1)..(160): unsure at all Xaa locations
LSRNPSLLVLCITDRLPCTSAAPASIVHWPLISSIHPNEEGRGHEERVILVXRDYRSISETDLTKICDCILKLLKCHSLSSTTSTSAKTXFYLKMTGDYYTYFADLRLHLIRKTLISNLWLIYNAAQELLXSELCSTHPITLSLTLYFCLIYYEILNSRX

SEQ ID NO: 14587 - protein, 150 aa, Zea mays
  unsure (1)..(150): unsure at all Xaa locations
XXNCPWSXLAETAGRXRVLVEFMEIVPRXVDSEELMXESEPLSVAYKNVIGALRASWRIICYIVHIEEGRGNVDPLTLIKDYRGRIETELTKICDGILMLFETTLEPVLYGCKRXAFYIRMEGDGYIYLDEFKTGAERKDAVENTMVKFX

SEQ ID NO: 14588 - protein, 91 aa, Zea mays
  unsure (1)..(91): unsure at all Xaa locations
FNLINEYHAKGESELSNISDGILNLLDSHLVPSSTAAXSKVFYLKINGDYHRYLAEFNTVPEIKESSYNSIIYYFASHDITLTYLLPTHPX

SEQ ID NO: 14589 - protein, 93 aa, Zea mays
  unsure (1)..(93): unsure at all Xaa locations
XGKIDAELSNICXDGILXSCIDSHXVPXXRTAAXESKVFYLKMKGDYHRYXLAEFKTGAERKESAESTMVAYTAAQDIALAELAPTHPIRLGX

SEQ ID NO: 14590 - protein, 96 aa, Zea mays
  unsure (1)..(96): unsure at all Xaa locations
REXNVYYAXLAEQAERVEEMVEFMEKVFKTVDLEELTVEERNLLVVAYNNFIGARRSLWRIIFFIEHKEDGQGLDVLVSLIKDYFGKIDTELIKIX

SEQ ID NO: 14591 - protein, 191 aa, Zea mays
  unsure (1)..(191): unsure at all Xaa locations
THAISTTLYRVLNVSLLDLAEQVLSDQKMVDVLCKVICIADSLDLTEMEHLLLLGAYMNAIAARRAFRFLVSSIILRDDIRGIVPRKTLIKDYPLEIVTALNDISAAILKMLEMHLAAAPTALKLQAVYLYRLLDYFSYLAECNSGDAIKDLAENTMEKYKAAHDIALXCSLLSTHPIKIALELNFSVLYX

SEQ ID NO: 14592 - protein, 143 aa, Zea mays
  unsure (1)..(143): unsure at all Xaa locations
YAGGRSLTSTSRILLDRGRSRLVSFCRHAFWYEEMVECMEKVSMTVDSEELTVEEGSLLFVAYKNVIGARRDLLGIIYFSELEEVGLGNEDLVILIKDYRGXIETELTQDCDGILKLVETYIVSVFTFXEFKXFYVKMKGDYY

SEQ ID NO: 14593 - protein, 111 aa, Zea mays
  unsure (1)..(111): unsure at all Xaa locations
AFKAVPQRSDPLSMTVNGIQRAXNITSGXDLSPTHPIKLVLALNFSVFYYQILNFRDLSCNPAKQVFDXAISXLHSLXXEFYKDMTLIMQFLHDNSTLLTSYTYYDGCNXI

SEQ ID NO: 14594 - protein, 91 aa, Zea mays
VFYLKMKGDYHRYLAEFTSGAERTDAVEITMDAYKAAQDIALVDLAVRHPIRVVVALRFSVLYDVILDLPDIVFMLAIQVFYDAIPVVGSL

SEQ ID NO: 14595 - protein, 72 aa, Zea mays
  unsure (1)..(72): unsure at all Xaa locations
XLKMKGDYYRYLSSCKTGAERKDAAENTMVRYKAAQDINLAELAPTHPIRLGLALTFSVFYYEILNSPDRAX

SEQ ID NO: 14596 - protein, 88 aa, Zea mays
REVRYCCRKGDYYRYLAEFSTGTEKKAASDQSLMAYQHAMVVASSELSPAHQIRLGLALNLSVFFYEIMNSHERICSLIFNALFLPFY

SEQ ID NO: 14597 - protein, 119 aa, Zea mays
  unsure (1)..(119): unsure at all Xaa locations
REVRYCCRKGDYYRYLAEFSTGTEKKAASDQSLMAYQHAMVVASSELSPAHQIRLGLALNLSVFFYEIMNSHERSCXSTHLQCLVSPFLLMFQIHRYSYTIIFHFLKRGLSCQVVTIFK

SEQ ID NO: 14598 - protein, 82 aa, Zea mays
  unsure (1)..(82): unsure at all Xaa locations
MASAXLSREENVHMAKLAEYAQRYQEMLEVMEKGPKTVDSEELTVEERNLLSVAYKNAIGARRASCRIISSVHNKEERPRTX

SEQ ID NO: 14599 - protein, 76 aa, Zea mays
  unsure (1)..(76): unsure at all Xaa locations
KLNGERALAELSREENVYMAKLAXQAERYEEMAEFMEKVAKTVDSEELTVEERNLLSAAYKNVIGARRALWRIIFX

SEQ ID NO: 14600 - protein, 83 aa, Zea mays
  unsure (1)..(83): unsure at all Xaa locations
XPRVRKESAESTMVAYKAAQDIALAELPPIHPIRLGLALNFSVFYYEIQNSPDKACNLAKEVGVHLSFYCCTGFLSYNYLRCC

SEQ ID NO: 14601 - protein, 83 aa, Zea mays
  unsure (1)..(83): unsure at all Xaa locations
MSREENVYMAKWAAQAERYEVMAEYMEKVATTVDVVELTVEERNLMYVAYKNVIGARRASWSTVPCMEQIEEFRRIEKHVHLX

SEQ ID NO: 14602 - protein, 111 aa, Zea mays
  unsure (1)..(111): unsure at all Xaa locations
XLLETHLVXXSSLPPIQVFYXKMKGDYXYRYLAEFKTGAERGGAAENTMVAYKAAQDIALAELAPTHPIXLXLGLDKAXFYYXTLNSPNRGGSLXXXXWGPAPPRPAPPPP

SEQ ID NO: 14603 - protein, 98 aa, Zea mays
  unsure (1)..(98): unsure at all Xaa locations
XLPPTEAVVYXSLNLSRLLAYMFYYILNIDKLQPNDYKQAFDEAISELDSLGEESYKDSTLIMQLLRDNLTLWTSDTNEDGGDEIKDAAAPKESAEGQ

SEQ ID NO: 14604 - protein, 116 aa, Zea mays
  unsure (1)..(116): unsure at all Xaa locations
IASPFLSAKFNSKISLEIRVDSEKYEELIEFMEKVAKTVDSEEHYVLSIAYKIVXGTQCASWCIISSIEXGEEGRVNVDCVSLIEDYHNKIEVELIKICDGILKLLDSHRFPSLTX

SEQ ID NO: 14605 - protein, 87 aa, Zea mays
  unsure (1)..(87): unsure at all Xaa locations
RVGLAFNFSXVFYYEILNSPXQSFNLAKQGFYETISQLNPLGEGSYKKSPLIMQLLRGNLTLWTFSPPEDGVYXGKKTPKSXAGYGQ

SEQ ID NO: 14606 - protein, 72 aa, Zea mays
  unsure (1)..(72): unsure at all Xaa locations
XFESARICDGILALVDSHLVPSAGGAESKVFYLKMKGDYHRFLAEFKSGAERKDAVDSSMNVFKADQVIVLX

SEQ ID NO: 14607 - protein, 68 aa, Zea mays
  unsure (1)..(68): unsure at all Xaa locations
MSPSEPTREESVYMAKLAEXAERYEEMVEFMERVARYAGAAGGGDQLSVEERNLLSGPYKNVIGARRA

SEQ ID NO: 14608 - protein, 60 aa, Zea mays
  unsure (1)..(60): unsure at all Xaa locations
MAREENVYMAKLAEQAERYEEMVEYMEKVAKTVHVEQLXVEERNLLSVAYHNVTGARRAX

SEQ ID NO: 14609 - protein, 183 aa, Zea mays
  unsure (1)..(183): unsure at all Xaa locations
RRSAATPIVAAPYLSHDLKEDTYFTNIGEESEHSTTRAIMDQSILPVLVVHGTMLASRNLWGEAYPTVIETHRAMPHAGISVAQMDVCCTNISYVNLIKEDGRSIGAELTNTCEGILNLLVSHLKPSSTAAESQGFYRKNTGDYHRNLAEFNTAADRKESAENTLADYTAAQDIALAELAPXP

SEQ ID NO: 14610 - protein, 180 aa, Zea mays
  unsure (1)..(180): unsure at all Xaa locations
XMYSTLFVWIPISXPRAAHGHCXLGSISNDQEDTMFYXLQMKGDYYXYLSLYKTGTXQRKDAANYTISTXKDTNYINYCDLHATYCIRLQLKLYLPQVYYEKHSXLDYAWSFKQHALYYCMWVLHTLAEECYMDTTLMMNILIHHWMLWTIDISEAPAEDIRWAPNHHCCEGKEDLSYMP

SEQ ID NO: 14611 - protein, 72 aa, Zea mays
  unsure (1)..(72): unsure at all Xaa locations
KLNCEMASPELSREENVSMAKLAEQAERYEEMVEFMEKVPKXTVDSEELTVVERTLLSVAYKIVLGARRASW

SEQ ID NO: 14612 - protein, 90 aa, Zea mays
  unsure (1)..(90): unsure at all Xaa locations
HGELAAGPEDEERXRVMEKVAKTGDSDELTGEERNLLTVVFKNXIGARHASWRIIYSIEHKEEGRGNDDRDTLIKDYRGKIETEHTKDCX

SEQ ID NO: 14613 - protein, 60 aa, Zea mays
  unsure (1)..(60): unsure at all Xaa locations
XHRYLAEFKSGAXRKDASGRTLNAYKAASIALADLASTHPIRLGLALNCSIFYYXILNFP

SEQ ID NO: 14614 - protein, 69 aa, Zea mays
TTRPKTEHLVELTDEERNVLAVAYKNVIAARRASWRIEPSIEQKEDSHKNNKHVNLIKEYRAKIEALLN

SEQ ID NO: 14615 - protein, 83 aa, Zea mays
  unsure (1)..(83): unsure at all Xaa locations
XDKACNLAKQGFDEAIFELDTLGGGSSKDSPLFMQLLRDNLPLWTSALPEDGAYEGKNAPKGDAGEGQYIFGGGCKVVRAPMF

SEQ ID NO: 14616 - protein, 69 aa, Zea mays
  unsure (1)..(69): unsure at all Xaa locations
STSTCGGEDNVYMAKLAEQAERYEEMVEYMEKVAKTVDVEELTVEERNLLYVVYKNVMGGAXCPIRFFX

SEQ ID NO: 14617 - protein, 106 aa, Zea mays
  unsure (1)..(106): unsure at all Xaa locations
MAREENVYMAKLAEQAERYEEMVEYIENVAKTVYVEELTCEERNXLLSGAYKYFIGASFVLCCIVISIXTNEDSLXRTNSLLTLSRDTRPNIQAXLSLFCNGISLX

SEQ ID NO: 14618 - protein, 59 aa, Zea mays
  unsure (1)..(59): unsure at all Xaa locations
MAREENVYMAKLAERAERYDEMVEYTEKVAKTVDVEELTVEEPNLLSVAYNNVIAARRX

SEQ ID NO: 14619 - protein, 72 aa, Zea mays
  unsure (1)..(72): unsure at all Xaa locations
XAXPVLSLEENVYLAKLAAQAKRFEEKLEFMVNATKPVDSKDLTVQERNLLYDAYTNVIGARPAXWRIISSX

SEQ ID NO: 14620 - protein, 98 aa, Zea mays
  unsure (1)..(98): unsure at all Xaa locations
GGGFXSXIPGGAPXVRDIVEYIQNVAITEXIQNGTGVEPNVVGVAYRNVIGARRASWRIGSSIEQKGEARKNEXDGNLIKGYRAEIEAXLSNICDGIX

SEQ ID NO: 14621 - protein, 101 aa, Zea mays
  unsure (1)..(101): unsure at all Xaa locations
KVKTRKGNSRNSSCVKPQESEDLPYSSHAAPIPLNSARGAFDEAISQLDTLGEDSYKDSTLIMQLLRDNLTLWSADSTTLTNRSTXTSSHVCNIHTSKTLM

SEQ ID NO: 14622 - protein, 178 aa, Zea mays
  unsure (1)..(178): unsure at all Xaa locations
YPXRXRPGTHATIVRDERTLTADYRLHQCGDYDTRAPTCTLDCRREXGAVSGPERGGMAKVGHLAAKSQDNVPDXYLRAATCCVSPPELAAHERVXXVVGYRTRAGTTCASWCIILLLPXQRADSRGTDDRPTFIKDYRGKIETELTKICDGILXLLETXHLVPSSTATDXRAFYLKX

SEQ ID NO: 14623 - protein, 100 aa, Zea mays
  unsure (1)..(100): unsure at all Xaa locations
TLTLFQSQRYEEMVDFMDIVAGAVDSEELTVKDRILLYDAYKNVIVTIRASXRIISFIDHMEEDHANVDHVTLINNYLPTIESDLNNIYYNILNLYXIIS

SEQ ID NO: 14624 - protein, 73 aa, Zea mays
  unsure (1)..(73): unsure at all Xaa locations
XSLNSPDKACNVAEQAFDXALSELVSSGEESSKDSPMFMQLLKNNMWLGSRDRSENGAEEGKHAPKGDAGEVX

SEQ ID NO: 14625 - protein, 85 aa, Zea mays
  unsure (1)..(85): unsure at all Xaa locations
XLLSRVREKVAKTVYVEERTXVVERNLLSVAYKNVIGARRASWRIISSIVQKEVSCXNVEHVYLIKEYLGMIXSLYLSIYDIGNX

SEQ ID NO: 14626 - protein, 111 aa, Zea mays
  unsure (1)..(111): unsure at all Xaa locations
XDAYGSQDMXNKTVIPAYXCKKNTEIPRCXNGVIDVLEYHLVQCTARGKYQVLYLKMNDDYHMDLAEFKTSAKRKDTFYSTMNAYTNGHDIGLGKMGVTXHPIKLGLGFNL

SEQ ID NO: 14627 - protein, 182 aa, Zea mays
  unsure (1)..(182): unsure at all Xaa locations
PTVTTPTTPPRRAAAQLPLPSRSASYPFESAPSRPSPVRQVPRVRRRHRIXENLSTTLHAPHLTDVQRNHLPDAYKNANWVHRDAWAIASSVALXEETLFNEKHGILITEYXHGKIHAEHTKSCDVIVDLTDSHLVTTATAAESNAIXLIINADYRRDLAHKHTRAXMTHESAESTMVGXYK

SEQ ID NO: 14628 - protein, 119 aa, Zea mays
  unsure (1)..(119): unsure at all Xaa locations
XXSVTYVTMMCDVVVKLRDTHLVPGFTAGVSNVMYLKTNGNYSRYRDECKTGPGIKVLDDNMLVAYNDSNDIVLAKLGXTLIYYRMNAHLSVXVTYYEILMXADRTXSREKDCWDDASX

SEQ ID NO: 14629 - protein, 248 aa, Geodia cydonium
MSEAPEPSPLTTKARIAEQAERYEDMAKFMKEVTEKATEELSPDDRNLLSVAYKNVVGTRRSSWRVISSIEQKSSDENKKEMAKAYREKIEKELDEICNEVLTLLDDHLLKKATSDESKVFYQKMKGDYYRYLAEVTPSGDKREDVVVKAKDSYNKALEVATEKMPPTHPIRLGLALNFSVFHYEIQNAPEKACEMAKKAFDEAIAELDNLKEDSYKDSTLIMQLLRDNLTLWTSEGQTEEQEDGGDN

SEQ ID NO: 14630 - protein, 214 aa, Schistosoma mansoni
SNNELTNEERNLLSVAYKNVVGARRSSWRVISSIEQKTEGSERKQQMAKDYREKIEKELKDICHEVLTLLDKFLIPKATTAESKVFYLKMKGDYYRYLAEVATGDERQKVIEESQRAYNDAFDIAKNQMQPTHPIRLGLALNFSVFYYEILNAPDRACHLAKQAFDDAIAELDTLNEDSYKDSTLIMQLLRDNLTLWTSDTGGDDDANAPDEHQ

SEQ ID NO: 14631 - protein, 252 aa, Schistosoma mansoni
MTTSWVLQSKDLSNTDLVHIAKLAEQAERYDDMAAAMKRYTEASGNLGNEERNLLSVAYKNVVGARRSAWRVIHGSEMKAVNDRTKKQIAEEYRIKMEKELNTICNQVLALLEDYLLPNASPDDSKVFFLKMQGDYYRYLAEVATDDARTEVVQKSLDAYTKATTAAENLPTTHPIRLGLALNFSVFFYEIQNDAAKACELAKSAFDSAIAELDQLQDDSYKDSTLIMQLLRDNLTLWASDQTAEGDVENDS

SEQ ID NO: 14632 - protein, 248 aa, Caenorhabditis elegans
MSDGKEELVNRAKLAEQAERYDDMAASMKKVTELGAELSNEERNLLSVAYKNVVGARRSSWRVISSIEQKTEGSEKKQQMAKEYREKVEKELRDICQDVLNLLDKFLIPKAGAAESKVFYLKMKGDYYRYLAEVASGDDRNSVVEKSQQSYQEAFDIAKDKMQPTHPIRLGLALNFSVFFYEILNAPDKACQLAKQAFDDAIAELDTLNEDSYKDSTLIMQLLRDNLTLWTSDAATDDTDANETEGGN

SEQ ID NO: 14633 - protein, 248 aa, Caenorhabditis elegans
MSDTVEELVQRAKLAEQAERYDDMAAAMKKVTEQGQELSNEERNLLSVAYKNVVGARRSSWRVISSIEQKTEGSEKKQQLAKEYRVKVEQELNDICQDVLKLLDEFLIVKAGAAESKVFYLKMKGDYYRYLAEVASEDRAAVVEKSQKAYQEALDIAKDKMQPTHPIRLGLALNFSVFYYEILNTPEHACQLAKQAFDDAIAELDTLNEDSYKDSTLIMQLLRDNLTLWTSDVGAEDQEQEGNQEAGN

SEQ ID NO: 14634 - protein, 248 aa, Caenorhabditis elegans
MSDTVEELVQRAKLAEQAERYDDMAAAMKKVTEQGQELSNEERNLLSVAYKNVVGARRSSWRVISSIEQKTEGSEKKQQLAKEYRVKVEQELNDICQDVLKLLDEFLIVKAGAAESKAFYLKMKGDYYRYLAEVASEDRAAVVEKSQKAYQEALDIAKDKMQPTHPIRLGLALNFSVFYYEILNTPEHACQLAKQAFDDAIAELDTLNEDSYKDSTLIMQLLRDNLTLWTSDVGAEDQEQEGNQEAGN

SEQ ID NO: 14635 - protein, 304 aa, Caenorhabditis elegans
MSDGKEELVNRAKLAEQAERYDDMAASMKKVTELGAELSNEERNLLSVAYKNVVGARRSSWRVISSIEQKTEGSEKKQQMAKEYREKVEKELRDICQDVLNLLDKFLIPKAGAAESKVFYLKMKGDYYRYLAEVASGDDRNSVVEKSQQSYQEAFDIAKDKMQPTHPIRLGLALNFSVFFYEILNAPDKACQLAKQVSVANIGQTAYAEALEIANKDLSPTNCVRLGLALNYSVFFYEVAASPDRACQLSKQAFDDAIAELDTLNEDSYKDSTLIMQLLRDNLTLWTSDAATDDTDANETEGGN

SEQ ID NO: 14636 - protein, 125 aa, Caenorhabditis elegans
MVADHFRYLVQYDDINREEHAHKSRIAYQEALGIAKDKMQPTHPIRLGLALNASALNFDVLNLPKEANEIAQSALDSAHRELEKMKSSLDSYDISNLKRARTLYDLLKSTHEQRVDGKEGEEADN

SEQ ID NO: 14637 - protein, 261 aa, Meloidogyne incognita
MTETMLDCSDKVTESKEELVQLAKLAEQAERYDDMAESMKKVTEFGDELSNEERNLLSVAYKNVVGARRSSWRVLSSIEQKTEGGKKTMTKEYREKIECELRDIRKGVMNLLDKFLIPKAGTPDSKVFYLKMKGDYYRYLAEVSSGDELTDVIDKSQQSYQEAFDIAKDKMPPTHPIRLGLALNFSVFYFEILDNKSKACQLAKQSFDEAVAELDTLDENLYKDSTLIMQLLRDNLTLWTSDGGVEEPETAPIVADAEGTN

SEQ ID NO: 14638 - protein, 259 aa, Fritillaria agrestis
MSPAEPSREENVYMAKLAEQAERYEEMVEFMEKVARTVDTEELTVEERNLLSVAYKNVIGARRASWRIISSIEQKEESRGNEDHVALIKDYRGKIEAELSKICDGILKLLDSHLVPSSTAAESKVFYLKMKGDYHRYLAEFKSGAERKEAAESTLLAYKSAQDIALAELAPTHPIRLGLALNFSVFYYEILNSPDRACNLAKQAFDEAISELDTLGEESYKDSTLIMQLLRDNLTLWTSDINEEAGDEIKEASKAGEGQ

SEQ ID NO: 14639 - protein, 248 aa, Drosophila melanogaster
MSTVDKEELVQKAKLAEQSERYDDMAQAMKSVTETGVELSNEERNLLSVAYKNVVGARRSSWRVISSIEQKTEASARKQQLAREYRERVEKELREICYEVLGLLDKYLIPKASNPESKVFYLKMKGDYYRYLAEVATGDARNTVVDDSKNAYQEAFDIAKTKMQPTHPIRLGLALNFSVFYYEILNSPDKACQLAKQAFDDAIAELDTLNEDSYKDSTLIMQLLRDNLTLWTSDTQGDEAEPQEGGDN

SEQ ID NO: 14640 - protein, 248 aa, Drosophila melanogaster
MSTVDKEELVQKAKLAEQSERYDDMAQAMKSVTETGVELSNEERNLLSVAYKNVVGARRSSWRVISSIEQKTEASARKQQLAREYRERVEKELREICYEVLGLLDKYLIPKASNPESKVFYLKMKGDYYRYLAEVATGDARNTVVEDSEKAYQEAFDIAKTKMQPTHPIRLGLALNFSVFYYEIINSPARACHLAKQAFDDAIAELDTLNEDSYKDSTLIMQLLRDNLTLWTSDTQGDEAEPQEGGDN

SEQ ID NO: 14641 - protein, 248 aa, Drosophila melanogaster
MSTVDKEELVQKAKLAEQSERYDDMAQAMKSVTETGVELSNEERNLLSVAYKNVVGARRSSWRVISSIEQKTEASARKQQLAREYRERVEKELREICYEVLGLLDKYLIPKASNPESKVFYLKMKGDYYRYLAEVATGDARNTVVDDSQTAYQDAFDISKGKMQPTHPIRLGLALNFSVFYYEILNSPDKACQLAKQAFDDAIAELDTLNEDSYKDSTLIMQLLRDNLTLWTSDTQGDEAEPQEGGDN

SEQ ID NO: 14642 - protein, 191 aa, Drosophila melanogaster
RKAMKSVTETGVELSNEERNLLSVAYKNVVGARRSSWRVISSIEQKTEASARKQQIAREYRERVEKELREICYEVLGLLDKYLIPKASNPESKVFYLKMKGDYYRYLAGYVDNGNMKVCIGTKSRLSVPSNKEHHYRNLRDRYTNCTYVDGNLKLTWLPNENLDLSFLDNIREVTGYILISHVDVKKVVFP

SEQ ID NO: 14643 - protein, 133 aa, Drosophila melanogaster
MSTVDKEELVQKAKLAEQSERYDDMAQAMKSVTETGVELSNEERNLLSVAYKNVVGARRSSWRVISSIEQKTEASARKQQLAREYRERVEKELREICYEVLGLLDKYLIPKASKLFRLLLRNYQFTSEGLSLS

SEQ ID NO: 14644 - protein, 157 aa, Drosophila melanogaster
MHATVSILSSTPTKTPYPRIVRPNCTIIKSLQTKLQILLQNTAVVDDSQTAYQDAFDISKGKMQPTHPIRLGLALNFSVFYYEILNSPDKACQLAKQVNNTLRLGSINRNVWQASKKGTQNPNPSILKNFFVYSQMVFLTFGFYFLLFYITKSCVNR

SEQ ID NO: 14645 - protein, 199 aa, Plasmodium yoelii yoelii
MKSINDNDIIISNKDEFIYYLKILNQIGFYDVAISGTSFKNALNVKRKEKTTLENVIKNEESSEEEKKCAELLKLKINKDIRTIERDAYFIIKAKCIPKTVDEKILMFYWHLLGDIMRYCTDTFRIEDKKRIQERSLQAYSYSLKYANKMNLPPSNPRLLELLVSLTVLHKDMDTQTNDPIEMAAQAFRDAIQNMHLLE

SEQ ID NO: 14646 - protein, 245 aa, Danio rerio
MDRTELIQKAKLAEQAERYDDMASCMKSVTEAGSELSNEERNLLSVAYKNVVGARRSAWRVISSIEQKTEGNDKKLQMVKEYREKVESELRDICNDVLELLNKYLIENSSNPESKVFYLKMKGDYYRYLAEVAAGDDKKATIENSQDAYQKAFDISKTEMQPTHPIRLGLALNFSVFFYEILNSPEKACSLAKQAFDEAIAELDTLNEESYKDSTLIMQLLRDNLTLWTSDNAPDEGEGGEGGEN

SEQ ID NO: 14647 - protein, 245 aa, Danio rerio
MDKLELIQKAKLAEQAERYDDMAACMKQVTEQGEELSNEERNLLSVAYKNVVGARRSAWRVISSIEQKTEGNDKKLQMVKEYREKVEGELRDICNEVLTLLGKYLIKNSTNSESKVFYLKMKGDYYRYLAEVAAADDKMDTITNSQGAYQDAFEISKKDMQPTHPIRLGLALNFSVFYYEILNSPEQACSLAKQAFDEAIAELDTLNEDSYKDSTLIMQLLRDNLTLWTSDNAADEGEGGDGGEN

SEQ ID NO: 14648 - protein, 229 aa, Danio rerio
MDKSQHVQRAKLAEQAERYDDMADSMKKVTELGEELSDEERNLLSVAYKNVVGARRSAWRVVSSIEQKTEGTDKKQMAQEYREKIEAELKAICNDVLHLLDKFLIRSTSPAESQVFYLKMKGDYYRYLAEVATGDEKTNIIQKSQEGYQAAFDISKDNMQPTHPIRLGLALNFSVFYYEILNSPEQACDLAKKAFDDAISELDQLTEDSYKDSTLIMQLLRDNSDTVDL

SEQ ID NO: 14649 - protein, 247 aa, Fundulus heteroclitus
MSESSQKELVQKAKLAEQAERYDDMAAAMKSVTEEGEELTNEERNLLSVAYKNVVGARRSSWRVVSSIEQKAEGVEGRQAKVKEYREKIEKELKDICNDVLVLLDKFLIPKAEAAESKVFYLKMKGDYYRYLAEVAVGDEKTGIIGDSQEAYKQAFEISKAEMQPTHPIRLGLALNFSVFYYEILNSPEQACKLAKQAFDDAIAELDTLSEESYKDSTLIMQLLRDNLTLWTSDNAVEGEEPEEPKE

SEQ ID NO: 14650 - protein, 262 aa, Populus x canescens
MSPTESSREENVYMAKLAEQAERYEEMVEFMEKVAKTVDNEELTMEERNLLSVAYKNVIGARRASWRIISSIEQKEESRGNEDHVTIIKEYRGKIEAELCKICDGILSLLETHLVPSASAAESKVFYLKMKGDYHRYLAEFKTGAERKEAAESTLLSYKSAQDIALSELAPTHPIRLGLALNFSVFYYEILNSPDRACSLAKQAFDEAISELDTLGEESYKDSTLIMQLLRDNLTLWTSDITDDAGDEIKEASKRESGDGPQ

SEQ ID NO: 14651 - protein, 125 aa, Populus x canescens
AEQAERYEEMVQFMQKLVIGNTPGGELNVEERNLLSVAYKNVIGSLRAAWRIVSSIEQKEEGRKNEDHVVLVKEYRSKVESELSDICASILRLLDSNLIPSATASESKVFYLKMKGDYRTSPPVP

SEQ ID NO: 14652 - protein, 105 aa, Populus x canescens
AEQAERYEEMVLFMQKLVLGNTPGGELNVEERNLLSVAYKNVIGSLRAAWRIVSSIEQKEEGRKNEDHVVLVKEYRSKVESELSDVCASILRLLDSNLVPLCLFR

SEQ ID NO: 14653 - protein, 245 aa, Xenopus laevis
MDKNELVQKAKLAEQAERYDDMAACMKRVTEEGGELSNEERNLLSVAYKNVVGARRSSWRVVSSIEQKTEGAEKKQEMSREYREKIEAELREICNDVLNLLDKFLIANATQPESKVFYLKMKGDYYRYLAEVAAGDAKSDIVGQSQKAYQDAFDISKTEMQPTHPIRLGLALNFSVFYYEILNCPDKACSLAKTAFDEAIAELDTLSEESYKDSTLIMQLLRDNLTLWTSDTHGDEAEQGEGGEN

SEQ ID NO: 14654 - protein, 244 aa, Xenopus laevis
MDKSELVQKAKLSEQAERYDDMAASMKAVTELGAELSNEERNLLSVAYKNVVGARRSSWRVISSIEQKTEGNDKRQQMAREYREKVETELQDICKDVLDLLDRFLVPNATPPESKVFYLKMKGDYYRYLSEVASGDSKQETVANSQQAYQEAFEISKSEMQPTHPIRLGLALNFSVFYYEILNSPDKACSLAKSAFDEAIAELDTLNEESYKDSTLIMQLLRDNLTLWTSETQGEEADNVEGDN

SEQ ID NO: 14655 - protein, 245 aa, Xenopus laevis
MDKNELVQKAKLAEQAERYDDMAACMKRVTEEGGELSNEERNLLSVAYKNVVGARRSSWRVVSSIEQKTEGAEKKQEMSREYREKIEAELREICNDVLNLLDKFLIANATQPESKVFYLKMKGDYYRYLAEVAAGNAKTEIVGQSQKAYQDAFDISKTEMQPTHPIRLGLALNFSVFYYEILNCPDKACALAKAAFDEAIAELDTLSEESYKDSTLIMQLLRDNLTLWTSDTQGDEAEQGEGGEN

SEQ ID NO: 14656 - protein, 235 aa, Xenopus laevis
AKLSEQAERYDDMAASMKAVTELGAELSNEERNLLSVAYKNVVGARRSSWRVISSIEQKTEGNDKRQQMAREYREKVETELQDICKDVLDLLDRFLVPNATPPESKVFYLKMKGDYYRYLSEVASGDSKQETVASSQQAYQEAFEISKSEMQPTHPIRLGLALNFSVFYYEILNSPEKACSLAKSAFDEAIRELDTLNEESYKDSTLIMQLLRDNLTLWTSENQGEEADNVEGDN

SEQ ID NO: 14657 - protein, 246 aa, Xenopus laevis
MDRTAQIQKAKLAEQAERYDDMAASMKDVTECGGELSSEERNLLSVAYKNVVGARRSAWRVISSIEQKSDSEETKLKIAKEYKEKVESELQSICETVLNLLDKHLISASTATESQVFYLKMKGDYYRYLAEVATGENRTKTIADSQAAYQQAFDISKKDMQPTHPIRLGLALNFSVFYYEILNSPEKACALAKTAFDEAIAELDTLNEESYKDSTLIMQLLRDNLTLWTSDTACDDNDAVEPGENN

SEQ ID NO: 14658 - protein, 247 aa, Xenopus laevis
MDKNELVQKAKLAEQAERYDDMAACMKRVTEEGGELSNEERNLLSVAYKNVVGARRSSWRVVSSIEQKTEGAEKKQEMSREYREKIEAELREICNDVLNLLDKFLIANATQPESKVFYLKMKGDYYRYLAEVAAGNAKTEIVGQSQKAYQDAFDISKTEMQPTHPIRLGLALKLLCVLTNEESSTVQDKACALAKAAFDEAIAELDTLSEESYKDSTLIMQLLRDNLTLWTSDTQGDEAEQGEGGEN

SEQ ID NO: 14659 - protein, 255 aa, Homo sapiens
MDDREDLVYQAKLAEQAERYDEMVESMKKVAGMDVELTDEERNLLSVAYENVIGARRTSWRIISSIEQKEENKGGENKLEMIREYQQMVETELKLICCDILDVLDKHLIAAANTGESKVFYYKTKWYYHRYLAEFATGNDRKEAAKNSIVAYKAASDIAMTELPPAHPIRLGLALNFSIFYYEILNSPDRACRLAKAAFNDAVVELDTLSEESYKDCKLIMQLLRDNLTLWTSDMQGDGEEQNKEVLQDVEDKNQ

SEQ ID NO: 14660 - protein, 245 aa, Homo sapiens
MDKNELVQKAKLAEQAERYDDMAACMKSVTEQGAELSNEERNLLSVAYKNVVGARRSSWRVVSSIEQKTEGAEKKQQMAREYREKIETELRDICNDVLSLLEKFLIPNASQAESKVFYLKMKGDYYRYLAEVAAGDDKKGIVDQSQQAYQEAFEISKKEMQPTHPIRLGLALNFSVFYYEILNSPEKACSLAKTAFDEAIAELDTLSEESYKDSTLIMQLLRDNLTLWTSDTQGDEAEAGEGGEN

SEQ ID NO: 14661 - protein, 246 aa, Homo sapiens
MTMDKSELVQKAKLAEQAERYDDMAAAMKAVTEQGHELSNEERNLLSVAYKNVVGARRSSWRVISSIEQKTERNEKKQQMGKEYREKIEAELQDICNDVLELLDKYLIPNATQPESKVFYLKMKGDYFRYLSEVASGDNKQTTVSNSQQAYQEAFEISKKEMQPTHPIRLGLALNFSVFYYEILNSPEKACSLAKTAFDEAIAELDTLNEESYKDSTLIMQLLRDNLTLWTSENQGDEGDAGEGEN

SEQ ID NO: 14662 - protein, 246 aa, Homo sapiens
MGDREQLLQRARLAEQAERYDDMASAMKAVTELNEPLSNEDRNLLSVAYKNVVGARRSSWRVISSIEQKTMADGNEKKLEKVKAYREKIEKELETVCNDVLSLLDKFLIKNCNDFQYESKVFYLKMKGDYYRYLAEVASGEKKNSVVEASEAAYKEAFEISKEQMQPTHPIRLGLALNFSVFYYEIQNAPEQACLLAKQAFDDAIAELDTLNEDSYKDSTLIMQLLRDNLTLWTSDQQDEEAGEGN

SEQ ID NO: 14663 - protein, 246 aa, Homo sapiens [sequence omitted]

SEQ ID NO: 14664 - protein, 245 aa, Homo sapiens
MEKTELIQKAKLAEQAERYDDMATCMKAVTEQGAELSNEERNLLSVAYKNVVGGRRSAWRVISSIEQKTDTSDKKLQLIKDYREKVESELRSICTTVLELLDKYLIANATNPESKVFYLKMKGDYFRYLAEVACGDDRKQTIDNSQGAYQEAFDISKKEMQPTHPIRLGLALNFSVFYYEILNNPELACTLAKTAFDEAIAELDTLNEDSYKDSTLIMQLLRDNLTLWTSDSAGEECDAAEGAEN

SEQ ID NO: 14665 - protein, 246 aa, Homo sapiens
MGDREQLLQRARLAEQAERYDDMASAMKAVTELNEPLSNEDRNLLSVAYKNVVGARRSSWRVISSIEQKTMADGNEKKLEKVKAYREKIEKELETVCNDVLSLLDKFLIKNCNDFQYESKFVYLKMKGDYYRYLAEVASGEKKNSVVEASEAAYKEGFEISKEQMQPTHPIRLGLALNFSVFYYEIQNAPEQACLLAKQAFDDAIAELDTLNEDSYKDSTLIMQLLRDNLTLWTSDLQDEEAGEGN

SEQ ID NO: 14666 - protein, 248 aa, Homo sapiens [sequence omitted]

SEQ ID NO: 14667 - protein, 248 aa, Homo sapiens [sequence omitted]

SEQ ID NO: 14668 - protein, 218 aa, Homo sapiens
VTELNEPLSNEERNLLSVAYKNVVGARRSSWRVISSIEQKTSADGNEKKIEMVRAYREKIEKELEAVCQDVLSLLDNYLIKNCSETQYESKVFYLKMKGDYYRYLAEVATGEKRATVVESSEKAYSEAHEISKEHMQPTHPIRLGLALNYSVFYYEIQNAPEQACHLAKTAFDDAIAELDTLNEDSYKDSTLIMQLLRDNLTLWTSDQQDDDGGEGNN

SEQ ID NO: 14669 - protein, 247 aa, Homo sapiens
MVDPEQLVQKARLAEQAEGYDDMAAAMKNVTELNEPLSNEERNLLSVAYKNVVGARRSSWRVISSIEQKTSADGNEKIEMVRAYREKVEKELEAVCQDVLSLVDNYLYKNCSETQYERKDLYLKMKGDYYRYLAEVATGEKRGDVVESSEKAYSEREISKEHMQPTHPIRLGLALNYSVFYYEIQNAPEQACHLAKTEFEDAIAELDTLNEESYKDSTLIMQLLRDNLTLWTSDQQDDHDGGEGNNN

SEQ ID NO: 14670 - protein, 200 aa, Homo sapiens
MKAVTELNEPLSNEDRNLLSVAYKNVVGARRSSWRVISSIEQKTMADGNEKKLEKVKAYREKIEKELETVCNDVLSLLDKFLIKNCNDFQYESKVFYLKMKGDYYRYLAEVASGEKKTSVVEASEAAYKEAFEISKEQMQPTHPIRLGLALNFSVFYYEIQNAPEQACLLAKQAFDDAIAELDTLNEDSYKDSTLIMQLL

SEQ ID NO: 14671 - protein, 199 aa, Homo sapiens
MKAVTELNEPLSNEDRNLLSVAYKNVVGARRSSWRVISSIEQKTMADGNEKKLEKVKAYREKIEKELETVCNDVLSLLDKFLIKNCNDFQYESKVFYLKMKGDYYRYLAEVASGEKKTSVVEASEAAYKEAFEISKEQMQPTHPIRLGLALNFSVFYYEIQNAPEQACLLAKQAFDDAIAELDTLNEDSYKDSTLIMQL

SEQ ID NO: 14672 - protein, 216 aa, Homo sapiens
MERASLIQKAKLAEQAERYEDMAAFMKGAVEKGEELSCEERNLLSVAYKNVVGGQRAAWRVLSSIEQKSNEEGSEEKGPEVREYRVFYLKMKGDYYRYLAEVATGDDKKRIIDSARSAYQEAMDISKKEMPPTNPIRLGLALNFSVFHYEIANSPEEAISLAKTTFDEAMADLHTLSEDSYKDSTLIMQLLRDNLTLWTADNAGEEGGEAPQEPQS

SEQ ID NO: 14673 - protein, 176 aa, Homo sapiens
MADGNEKKLEKVKAYREKIEKELETVCNDVLSLLDKFLIKNCNDFQYESKVFYLKMKGDYYRYLAEVASGEKKNSVVEASEAAYKEAFEISKEQMQPTHPIRLGLALNFSVFYYEIQNAPEQACLLAKQAFDDAIAELDTLNEDSYKDSTLIMQLLRDNLTLWTSDQQDEEAGEGN

SEQ ID NO: 14674 - protein, 173 aa, Homo sapiens
DKKLQLIKDYREKVESELRSICTTVLELLDKYLIANATNPESKVFYLKMKGDYFRYLAEVACGDDRKQTIDNSQGAYQEAFDISKKEMQPTHPIRLGLALNFSVFYYEILNNPELACTLAKTAFDEAIAELDTLNEDSYKDSTLIMQLLRDNLTLWTSDSAGEECDAAEGAEN

SEQ ID NO: 14675 - protein, 159 aa, Homo sapiens [sequence omitted]

SEQ ID NO: 14676 - protein, 181 aa, Homo sapiens [sequence omitted]

SEQ ID NO: 14677 - protein, 249 aa, Homo sapiens [sequence omitted]

SEQ ID NO: 14678 - protein, 133 aa, Homo sapiens
MKSLTEKEGELSNEERNRLSVPYKNVVGVWILDQSQQAYQEACEITKKEMQPTDPIRLGMALNFSVFYYELLNSPEKSHSLVKAAFDEALAELDTLSEESYKDRLLMQLLRDNLTLWTLDTQGDETEARGRKS

SEQ ID NO: 14679 - protein, 99 aa, Homo sapiens [sequence omitted]

SEQ ID NO: 14680 - protein, 95 aa, Homo sapiens [sequence omitted]

SEQ ID NO: 14681 - protein, 118 aa, Homo sapiens
MPVTRPLQKLVLLQTQEKLEELMQFLIPSASQAESKVFYLKMKGDYYGYLSEVAAGDHKKGIVDQSQQAYQEAFGISKKEMQRAHPIRLGLALNYSVFYYEILNSPRESLLSCKDSCQ

SEQ ID NO: 14682 - protein, 179 aa, Homo sapiens
MLKTLPHSCVERTFLFFSPAPQRWELCPHKDGALKRTDNGGWAHEVCALYIPEVQFANDSTMEPIVLQSVPHDHCNKVETELKLICGDVLDALDKHLIPAATTGKSKVFYYEMKGVYHRYLAEFATGNDRKEVAENSLVAYKAASDIATGFSMLARLGSNSWFQVNLPTWLPKVLRLQA

SEQ ID NO: 14683 - protein, 69 aa, Homo sapiens
ERYDDMAACMKSVTEQGAELSNEERNLLSVAYKNVVGARRSSWRVVSSIEQKTEGAEKKQQMAREYREK

SEQ ID NO: 14684 - protein, 220 aa, Homo sapiens
MALSGVRSDTSSAAYKVQPQTCHPTIRHFQNTVYNEPEPSDQTGTREKSTSVSSPQRDRRRRRAGRGQGRRRGAAESPQRQGLRPELLALQPPRPEGPGRAERSRPEPRRTRDAELPAPPTSLSLVWAAQLGGSRPPAPPQHPRGLCGLSLLSSGLGPVVDGAEMVESVKKLAGMDVELTAEERNLLSVTYKNVIGARRASWRIISSLEQKEGTREEKTS

SEQ ID NO: 14685 - protein, 98 aa, Homo sapiens
MDVELTVEERNLLSVSYNNVIEARRAFWRIISIEQKEENKGEDKLKMIWEYQQMVETELNLICCHFLLAKAAFDDAIAELDTLSEGSYNDTMDFRHAG

SEQ ID NO: 14686 - protein, 114 aa, Homo sapiens
MPGSSNFDSLTKAKLAELARWYDYITTWVKAVTEQGTKLFNEELNLLSVAYTYMRVTLSIEQKTVTSDKKLQLIKGYQEKVESELRSICTTVLELLDEYLIADATNPEIASGDD

SEQ ID NO: 14687 - protein, 245 aa, Bos taurus
MDKNELVQKAKLAEQAERYDDMAAAMKSVTEQGAELSNEERNLLSVAYKNVVGARRSSWRVVSSIEQKTEGAEKKQQMAREYREKIETELRDICNDVLSLLEKFLIPNASQAESKVFYLKMKGDYYRYLAEVAAGDDKKGIVDQSQQAYQEAFEISKKEMQPTHPIRLGLALNFSVFYYEILNSPEKACSLAKTAFDEAIAELDTLSEESYKDSTLIMQLLRDNLTLWTSDTQGDEAEAGEGGEN

SEQ ID NO: 14688 - protein, 245 aa, Bos taurus
  unsure (1)..(245): unsure at all Xaa locations
XMDKSELVQKAKLAEQAERYDDMAAAMKAVTEQGHELSNEERNLLSVAYKNVVGARRSSWRVISSIEQKTERNEKKQQMGKEYREKIEAELQDICNDVLQLLDKYLIPNATQPESKVFYLKMKGDYFRYLSEVASGDNKQTTVSNSQQAYQEAFEISKKEMQPTHPIRLGLALNFSVFYYEILNSPEKACSLAKTAFDEAIAELDTLNEESYKDSTLIMQLLRDNLTLWTSENQGDEGDAGEGEN

SEQ ID NO: 14689 - protein, 244 aa, Bos taurus
MDKSELVQKAKLAEQAERYDDMAAAMKAVTEQGHELSNEERNLLSVAYKNVVGARRSSWRVISSIEQKTERNEKKQQMGKEYREKIEAELQDICNDVLQLLDKYLIPNATQPESKVFYLKMKGDYFRYLSEVASGDNKQTTVSNSQQAYQEAFEISKKEMQPTHPIRLGLALNFSVFYYEILNSPEKACSLAKTAFDEAIAELDTLNEESYKDSTLIMQLLRDNLTLWTSENQGDEGDAGEGEN

SEQ ID NO: 14690 - protein, 246 aa, Bos taurus
  unsure (1)..(246): unsure at all Xaa locations
XVDREQLVQKARLAEQAERYDDMAAAMKNVTELNEPLSNEERNLLSVAYKNVVGARRSSWRVISSIEQKTSADGNEKKIEMVRAYREKIEKELEAVCQDVLSLLDNYLIKNCSETQIESKVFYLKMKGDYYRYLAEVATGEKRATVVESSEKAYSEAHEISKEHMQPTHPIRLGLALNYSVFYYEIQNAPEQACHLAKTAFDDAIAELDTLNEDSYKDSTLIMQLLRDNLTLWTSDQQDDDGGEGN

SEQ ID NO: 14691 - protein, 247 aa, Bos taurus
MVDREQLVQKARLAEQAERYDDMAAAMKNVTELNEPLSNEERNLLSVAYKNVVGARRSSWRVISSIEQKTSADGNEKKIEMVRAYREKIEKELEAVCQDVLSLLDNYLIKNCSETQIESKVFYLKMKGDYYRYLAEVATGEKRATVVESSEKAYSEAHEISKEHMQPTHPIRLGLALNYSVFYYEIQNAPEQACHLAKTAFDDAIAELDTLNEDSYKDSTLIMQLLRDNLTLWTSDQQDDDGGEGNN

SEQ ID NO: 14692 - protein, 246 aa, Ovis aries
MTMDKSELVQKAKLAEQAERYDDMAAAMKAVTEQGHELSNEERNLLSVAYKNVVGARRSSWRVISSIEQKTERNEKKQQMGKEYREKIEAELQDICNDVLQLLDKYLIPNATQPESKVFYLKMKGDYFRYLSEVASGDNKQTTVSNSQQAYQEAFEISKKEMQPTHPIRLGLALNFSVFYYEILNSPEKACSLAKTAFDEAIAELDTLNEESYKDSTLIMQLLRDNLTLWTSENQGDEGDAGEGEN

SEQ ID NO: 14693 - protein, 245 aa, Ovis aries
MDKNELVQKAKLAEQAERYDDMAACMKSVTEQGAELSNEERNLLSVAYKNVVGARRSSWRVVSSIEQKTEGAEKKQQMAREYREKIETELRDICNDVLSLLEKFLIPNRSQPESKVFYLKMKGDYYRYLAEVAAGDDKKGIVDQSQQAYQEAFEISKKEMQPTHPIRLGLALNFSVFYYEILNSPEKACSLAKTAFDEAIAELDTLSEESYKDSTLIMQLLRDNLTLWTSDTQGDEAEAGEGGEN

SEQ ID NO: 14694 - protein, 248 aa, Ovis aries
MERASLIQKAKLAEQAERYEDMAAFMKSAVEKGEELSCEERNLLSVAYKNVVGGQRAAWRVLSSIEQKSNEESSEEKGPEVQEYREKVETELRGVCDTVLGLLDTHLIKEAGDAESRVFYLKMKGDYYRYLAEVATGDDKKRIIDSARSAYQEAMDISKKEMPPTNPIRLGLALNFSVFHYEIANSPEEAISLAKTTFDEAMADLHTLSEDSYKDSTLIMQLLRDNLTLWTADNAGEEGGEAPEEPQS

SEQ ID NO: 14695 - protein, 212 aa, Ovis aries
MDDREDLVYQAKLAEQAERYDEMVESMKKVAGMDVELTVEERNLLSVAYKNVIGARRASWRIISSIEQKEENKGGEDKLKMIREYRQMVETELKLICCDILDVLDKHLIPAANTGESKVFYYKMKGDYHRYLAEFATGNDRKEAAENSLVAYPTHPIRLGLALNFSVFYYEIDSTLIMQLLRDNLTLWTSDMQGDGEEQNKEALQDVEDENQ

SEQ ID NO: 14696 - protein, 152 aa, Ovis aries
MDDREDLVYQAKLAEQAERYDEMVESMKKVAGMDVELTVEERNLLSVAYKNVIGARRASWRIISSIEQKEENKGGEDKLKMIREYRQMVETELKLICCDILDVLDKHLIPAANTGESKVFYYKMKGDYHRYLAEFATGNDRKEAAENSLVAY

SEQ ID NO: 14697 - protein, 162 aa, Ovis aries
MDKNELVQKAKLAEQAERYDDMAACMKSVTEQGAELSNEERNLLSVAYKNVVGARRSSWRVVSSIEQKTEGAEKMKGDYYRYLAEVAAGDDKKGIVDQSQQAYQEAFEISKKEMQPTHPIRLGLALNFSVFYYEILNSPEKAMQLLRDNLTLWTSDTQGDEA

SEQ ID NO: 14698 - protein, 138 aa, Ovis aries
MDKSELVQKAKLAEQAERYDDMAAAMKAVTEQGHELSNEEWRVISSIEQKTERNEKKQMGKEYREKIEAELQDIMKGDYFRYLSEVASGDNKQTTVSNSQQAYQEAFEISMQPTHPIRLGLALNFSWTSENQGDEGDA

SEQ ID NO: 14699 - protein, 45 aa, Ovis aries
DDAIAELDTLNEDSYKDSTLIMQLLRDNLTLWTSDQQDEEAGEGN

SEQ ID NO: 14700 - protein, 217 aa, Mus musculus
MATVEPETTPTTNPPPAEEEKTESNQEVANPEHYIKHPLQNRWALWFFKNDKSKTWQANLRLISKFDTVEDFWALYNHIQLSSNLMPGCDYSLFKDGIEPMWEDEKNKRGGRWLITLNKQQRRSDLDRFWLETLLCLIGESFDDYSDDVCGAVVNVRAKGDKIAIWTTESENRDAVTHIGRVYKERLGLPPKIVIGYQSHADTATKSGSTTKNRFVV

SEQ ID NO: 14701 - protein, 217 aa, Mus musculus
MATVEPETTPTTNPPPAEEEKTESNQEVANPEHYIKHPLQNRWALWFFKNDKSKTWQANLRLISKFDTVEDFWALYNHIQLSSNLMPGCDYSLFKDGIEPMWEDEKNKRGGRWLITLNKQQRRSDLDRFWLETLLCLIGESFDDYSDDVCGAVVNVRAKGDKIAIWTTECENRDAVTHIGRVYKERLGLPPKIVIGYQSHADTATKSGSTTKNRFVV

SEQ ID NO: 14702 - protein, 190 aa, Mus musculus
VANPEHYIKHPLQNRWALWFFKNDKSKTWQANLRLISKFDTVEDFWALYNHIQLSSNLMPGCDYSLFKDGIEPMWEDEKNKRGGRWLITLNKQQRRSDLDRFWLETLLCLIGESFDDYSDDVCGAVVNVRAKGDKIAIWTTECENRDAVTHIGRVYKERLGLPPKIVIGYQSHADTATKSGSTTKNRFVV

SEQ ID NO: 14703 - protein, 217 aa, Mus musculus
MATVEPETTPTTNPPPAEEEKTESNQEVANPEHYIKHPLQNRWALWFFKNDKSKTWQANLRLISKFDTVLDFWALYNHIQLSSNLMPGCDYSLFKDGIEPMWEDEKNKRGGRWLITLNKQQRRSDLDRFWLETLLCLIGESFDDYSDDVCGAVVNVRAKGDKIAIWTTECENRDAVTHIGRVYKERLGLPPKIVIGYQSHADTATKSGSTTKNRFVV

SEQ ID NO: 14704 - protein, 254 aa, Rattus norvegicus
MNVSYRLPYHIAHNPAYSSSLTINEARDSPYNEKPSEATAEGLQGEARDLPGSLKTVKQKAQREHPTKLPRELHPLQFRWVLWFFKNDRSRAWQDNLQLVTKFDTVEDFWATYRHVKLASKLSCGCDYALFKEGIQPMWEDSRNKRGGRWLLSLAKQQRHMELDRLWLETLLCLLGESFEEYSGEVCGAVVNIRTKGDKIALWTSEAENKAGVMHIGHIYKERLGLSTKTIIGYQAHADTAAKSNSLAKNKFVV

SEQ ID NO: 14705 - protein, 132 aa, Rattus norvegicus
MPGCDYSLFKDGIEPMWEDEKNKRGGRWLITLNKQQRRSDLDRFWLETLLCLIGESFDDYSDDVCGAVVNVRAKGDKIAIWMTECENRDAVTHIGRVYKERLGLPPKTVIGYQSHADTATKSGSTTKNRFVV

SEQ ID NO: 14706 - protein, 225 aa, Anopheles gambiae str. PEST
LKCPIMAGKTNEETEQQQQQQNENETTEQSQELAEQSNAPESIDPECLIKHPLQHTWTLWYLEVDRTKKWTDSMNEVTSFSTVEDFWSLFNHIRGPSEIKVGGDYMLFKSHIRPMWEDDANKHGGRWTISMNKRLSDKCWLDTVLCLIGETFEHSDQICGATVNVRQKIDKISIWTADYDNRAAVLDIGRTYKERLGLRENIYYQMHKDTMVKLSSSGTKSTYTV

SEQ ID NO: 14707 - protein, 184 aa, Marsupenaeus japonicus
MSTAVNKYDVLKSNDDSGEEDSGSRDMKDKPLPQVEVKPGEHPLQYTYSLWFSRRAPGKQATTQNYDQNLQLLARFASVEQFWGYYSRCLRPVDLPSHSDIHIFKDGIKPMWEDSANKNGGKWIVRLRKGLASRCWENMILAMLGEQFMVGDEICGAVISVRFQEDIISVWNRTAPDSITTGKI

SEQ ID NO: 14708 - protein, 198 aa, Arabidopsis thaliana
MATDDVNEPLPAAAELPATEAEKQPHKLERKWSFWFDNQSKKGAAWGASLRKAYTFDTVEDFWGLHETIFQTSKLTANAEIHLFKAGVEPKWEDPECANGGKWTWVVTANRKEALDKGWLETLMALIGEQFDEADEICGVVASVRPQSKQDKLSLWTRTKSNEAVLMGIGKKWKEILDVTDKITFNNHDDSRRSRFTV

SEQ ID NO: 14709 - protein, 216 aa, Arabidopsis thaliana
EFGTRPKAVSEENTTAKNMATDDVNEPLPAAAELPATEAEKQPHKLERKWSFWFDNQSKKGAAWGASLRKAYTFDTVEDFWGLHETIFQTSKLTANAEIHLFKAGVEPKWEDPECANGGKWTWVVTANRKEALDKGWLETLMALIGEQFDEADEICGVVASVRPQSKQDKLSLWTRTKSNEAVLMGIGKKWKEILDVTDKITFNNHDDSRRSRFTV

SEQ ID NO: 14710 - protein, 206 aa, Oryza sativa (japonica cultivar-group); identical to SEQ ID NO: 574

SEQ ID NO: 14711 - protein, 228 aa, Capsicum annuum
MATAEMEKTTTFDEAEKVKLNANEADDEVEEGEIVEETDDTTSYLSKEIATKHPLEHSWTFWFDNPVAKSKQAAWGSSLRNVYTFSTVEDFWGAYNNIHHPSKLVVGADLHCFKHKIEPKWEDPVCANGGTWKMSFSKGKSDTSWLYTLLAMIGHQFDHEDEICGAVVSVRGKGEKISLWTKNAANETAQVSIGKQWKQFLDYSDSVGFIFHDDAKRLDRNAKNRYTV

SEQ ID NO: 14712 - protein, 228 aa, Capsicum annuum
MATAEMEKTTTFDEAEKVKLNANEADDEVEEGEIVEETDDTTSYLSKEIATKHPLEHSWTFWFDNPEAKSKQAAWGSSLRNVYTFSTVEDFWGAYNNIHHPSKLVVGANLHCFKHKIEPKWEDPVCANGGTWKMSFSKGKSDTSWLYTLLAMIGHQFDHEDEICGAVVSVRGKGEKISLWTKNAANETAQVSIGKQWKQFLDYSDSVGFIFHDDAKRLDRNAKNRYTV

SEQ ID NO: 14713 - protein, 228 aa, Capsicum annuum
MATAEMEKTTTFDEAEKVKLNANEADDEVEEGEIVEETDDTTSYLSKEIATKHPLEHSWTFWFDNPEAKSKQAAWGSSRRNVYTFSTVEDFWGAYNNIHHPSKLVVGADLHCFKHKIEPKWEDPVCANGGTWKMSFSKGKSDTSWLYTLLAMIGHQFDHEDEICGAVVSVRGKGEKISLWTKNAANETAQVSIGKQWKQFLDYSDSVGFIFHDDAKRLDRNAKNRYTV

SEQ ID NO: 14714 - protein, 231 aa, Lycopersicon esculentum
MAAAEMERTMSFDAAEKLKAADGGGGEVDDELEEGEIVEESNDTASYLGKEITVKHPLEHSWTFWFDNPTTKSRQTAWGSSLRNVYTFSTVENFWGAYNNIHHPSKLIMGADFHCFKHKIEPKWEDPVCANGGTWKMSFSKGKSDTSWLYTLLAMIGHQFDHGDEICGAVVSVRAKGEKIALWTKNAANETAQVSIGKQWKQFLDYSDSVGFIFHDDAKRLDRNAKNRYTV

SEQ ID NO: 14715 - protein, 209 aa, Triticum aestivum
MAEVEAALPVAATETPEVAAEGDAGAAEAKGPHKLQRQWTFWYDIQTKPKPGAAWGTSLKKGYTFDTVEEFWCLYDQIFRPSKLVGSADFHLFKAGVEPKWEDPECANGGKWTVISSRKTNLDTMWLETCMALIGEQFDESQEICGVVASVRQRQDKLSLWTKTASNEAVQVDIGKKWKEVIDYNDKMVYSFHDDSRSQKPSRGGRYTV

SEQ ID NO: 14716 - protein, 209 aa, Triticum aestivum; identical to SEQ ID NO: 14715

SEQ ID NO: 14717 - protein, 209 aa, Triticum aestivum
MAEVEAALPVAATETPEVAAESDAGAAEAKGPHKLQRQWTFWYDIQTKPKPGAAWGTSLKKGYTFDTVEEFWCLYDQIFRPSKLVGSADFHLFKAGVEPKWEDPECANGGKWTVISSRKANLDTMWLETCMALIGEQFDESQEICGVVASVRQRQDKLSLWTKTASNEAVQVDIGKKWKEVIDYNDKMVYSFHDDSRSQKPSRGGRYTV

SEQ ID NO: 14718 - protein, 209 aa, Triticum aestivum; identical to SEQ ID NO: 14717

SEQ ID NO: 14719 - protein, 270 aa, Zea mays
VKLPTPIFISSSSSERPKPSPFLLDASLPQPQPLSLVWYRLSHTPLPQPRKTLEKRRRRDMAEVEAPAAAVAAATPEVATVTEGGAATEAKGPHKLHRQWTFWYDIQSKPKPGAAWGTSLKKAYTFDTVEEFWGLYDHVFRPSKLPGTADFHLFKAGVEPKWEDPECANGGKWTVPCNRKPTFETMWLETLMALVGEQFDETDDICGIVASVRPRGDKLALWTRTASNEAVQVNIGKKWKDVIDYNDKIIYTFHDDSRRDKPSRGGRYTV

SEQ ID NO: 14720 - protein, 255 aa, Zea mays
KGRSRLRSSSTRLFHSRNLYPSSGIVSHTPLPQLRKTLEKRRRRDIAEVEAPAAAVAAATPEVATVTEGGAATEAKGPHKLHRQWTFWYDIQSKPKPGAAWGTSLKKAYTFDTVEEFWGLYDHVFRPSKLPGTADFHLFKAGVEPKWEDPECANGGKWTVPCNRKPTFETMWLETLMALVGEQFDETDDICGIVASVRPRGDKLALWTRTASNEAVQVNIGKKWKDVIDYNDKIIYTFHDDSRRDKPSRGGRYTV

SEQ ID NO: 14721 - protein, 216 aa, Zea mays
MAEVEAPATAVEAPAAAVATTTPEVAAPEAGAATEAKGPHKLHRQWTFWYDIQTKTKSGAAWGTSLKKAYTFDTVEEFWSMYDQIFRPSKLSGNADFHLFKAGVEPKWEDPECANGGKWTVPCNRKATFETMWLETLMALIGEQFDETEDICGIVASVRARGDKLALWTRTASNEAVQVNIGKKWKDVIDYNDKITYTFHDDSKRDKPSRGGRYTV

SEQ ID NO: 14722 - protein, 216 aa, Zea mays; identical to SEQ ID NO: 14721

SEQ ID NO: 14723 - protein, 264 aa, Zea mays
  unsure (1)..(264): unsure at all Xaa locations
ISISSSSLERPKPSPFLLDASLPQPQPLSLVWYRLSHTPLPQPRKTLEKRRRRDMAEVEAPAAAVAAATPEVATVTEGGAATEAKGPHKLHRQWTFWYDIQSKPKPGAAWGTSLXXAYTFDTVEEFWGLYDHVFRPSKLPGTADFHLFKAGVEPKWEDPECANGGKWTVPCNRKPTFETMWLETLMALVGEQFDETDDICGIVASVRPRGDKLALWTRTASNEAVQVNIGKKWKDVIDYNDKITYTFHDDSRRDKPSRGGRYTV

SEQ ID NO: 14724 - protein, 216 aa, Zea mays
MAEVEAPAAAVEAPAAAVAPTTPEVAAPEAGAATEAKGPHKLHRQWTFWYDIQTKTKSGAAWGTSLKKAYTFDTVEEFWSMYDQIFRPSKLSGSADFHLFKAGVEPKWEDPECANGGKWTVPCNRKATFETMWLETLMALIGEQFDETEDICGIVASVRARGDKLALWTRTASNEAVQVNIGKKWKDVIDYNDKITYTFHDDSKRDKPSRGGRYTV

SEQ ID NO: 14725 - protein, 266 aa, Zea mays
  unsure (1)..(266): unsure at all Xaa locations
VASLPQPLPLSLVCDRLSHTPLPQLSLTSKSMAERDMAQDKAPAAARATFTPDEATEXPRSKTTTDANATNNLHRQRTFWYHIYTKPNPDAAWRTSLKTXAYTFDTAXEELCGLYDLAVRPIKHTVTADLLLFDAEPKPECEDPEVANGSXQWTVTCNRNPCCETMWLETLMALVGEQFDETDDICGIVASVRPRGDKLALWTRTASNEAVQVHIGKKWKDVIDYNDKIIYTFHVVSRRDXPSTGGRFPRVSCRRRWSLLFGLDRG

SEQ ID NO: 14726 - protein, 243 aa, Schizosaccharomyces pombe
MADAEDSRHSKNEGFPNTSLITEKLDLLDLFGSPKVKTEREGRPARLLEGLSAVNAETAFVKTHPLQHEWTLWFLKPPTQGLEWSDLLKEIISFKTVEEFWGIFKTISKASMLPAKSDYSYFLKGIRPEWEDPQNMNGGKWAYQSKHKGSNLDELWLYMVLAAIGETLDPTGKEVTGVVCNMRKGFYRIAVWTRNCNDKDVLEKIGLRFKEVLGISDKETIEYSAHEDSSKAGSMRAKTRMSL

SEQ ID NO: 14727 - protein, 218 aa, Schizosaccharomyces pombe
MQTEQPPKESQTENTVSEPQEKALRTVFDDKINFNLKHPLARPWTLWFLMPPTPGLEWNELQKNIITFNSVEEFWGIHNNINPASSLPIKSDYSFFREGVRPEWEDVHNKTGGKWAFQNKGRGGNALDEMWLTTVLAAIGETLDPTGQEVMGVVINMRKGFYRLAVWTKSCNNREVLMEIGTRFKQVLNLPRSETIEFSAHEDSSKSGSTRAKTRMSV

SEQ ID NO: 14728 - protein, 112 aa, Schizosaccharomyces pombe
DPQNMNGGKWAYQSKHKGSNLDELWLYMVLAAIGETLDPTGKEVTGVVCNMRKGFYRIAVWTRNCNDKDVLEKIGLRFKEVLGISDKETIEYSAHEDSSKAGSMRAKTRMSL

SEQ ID NO: 14729 - protein, 213 aa, Saccharomyces cerevisiae
MSVEEVSKKFEENVSVDDTTATPKTVLSDSAHFDVKHPLNTKWTLWYTKPAVDKSESWSDLLRPVTSFQTVEEFWAIIQNIPEPHELPLKSDYHVFRNDVRPEWEDEANAKGGKWSFQLRGKGADIDELWLRTLLAVIGETIDEDDSQINGVVLSIRKGGNKFALWTKSEDKEPLLRIGGKFKQVLKLTDDGHLEFFPHSSANGRHPQPSITL

SEQ ID NO: 14730 - protein, 248 aa, Neurospora crassa
MSEQVDLTTIPISPEGGNTNGDAAAAKDDKTVTVFHDKEHFNVKHPLSNRWTLWFTKPSSGKGDNWNDLLKEVITFETVEEFWGVYNNIAPVSELALKSDYHLFKEGVRPEWEDPQNKHGGKWSYQFKEKRNVNIDEIWLHTMLAAIGETLEDEEDGEVMGVVVNVRKAFFRVGVWTRTIGKHIPGRGDGDISGGKGRSPEKGKEILMAIGRRFKEVLQLPPNEALEFSGHTESAHSGSSRARAKMTV

SEQ ID NO: 14731 - protein, 173 aa, Agaricus bisporus
TVEEFWGLYNNIVPPSQLPQKANYYLFKEGIIPAWEDEANKYGGKWSIQLPKDKNRANVDKMWLYTMLAAIGEMFDPTPDNAEGPLSQSLITGVIVSIRPQFYRISIWTRLAPAPTEEDRLRERIETVGRYFKMNVLGYAEGARLAGPLATEVEFLSHKDSEKKGKSAKKIVV

SEQ ID NO: 14732 - protein, 209 aa, Candida albicans
MSEELAQKTEELSLDSKTVFDSKEEFNAKHPLNSRWTLWYTKPQTNKSENWHDLLKPVITFSSVEEFWGIYNSIPPANQLPLKSDYHLFKEGIRPEWEDEANSKGGKWQFSFNKKSEVNPIINDLWLRGLLAVIGETIEDEENEVNGIVLNIRKQAYRVGIWTKDCDESKLKTVGERLKKVLQLNDEQKVEFMSHDASNTRGAEPQIVL

SEQ ID NO: 14733 - protein, 209 aa, Candida glabrata
MSVDEVTKKFEETVSVDGPKTVLSDAKDFEVKHPLNTKWTLWYTKPAVDKSESWSDLLRPVTSFQSVEEFWAIVQNIPEPHELPLKSDYHVFRNDIRPEWEDEANAKGGKWSFQVRGRGAEIDELWLRTLLAVIGETIDEEDSQINGVVLNVRKGGNRFALWTKSCDKEPLSNIGARFKQVLKLADEDTLEFFPHSTANDRHSQPTITL

SEQ ID NO: 14734 - protein, 175 aa, Guillardia theta
MSSHKYHYQNPWTLWYDSSSNNVISYEWNQLLIRISTFDNLEDFLFLLTNIAYLTDLPLGSSYHVFKNNIEPSWEDESNKNGGKWILLLPKNSCCNINKIWEKSLSFTVFYENCNLINGIVGSVKKNHLRISIWTSKSEAKNDQINLGKNWYFFLKNYFDDFHFKIEYSPHKSFN

SEQ ID NO: 14735 - protein, 281 aa, Leishmania major
MDPNTCAPASAVTDEQPLTLLWGTWEMWCDMPQRQQGQSTENTNWLEQVKSIGLFDSAEGFWGIFNCTILPSQLPPNGSYYLFRKHIAPMWEHEANRRGGKWVIPFTGKASRSEGDLQPVDEAWQTLCLSAIGELFPGDEEEICGVTVSRGRQRTLPSGHATSALSEWKLCLWTRSADNRGSQIRIAEYIRKQLHLQPPSKEASRDGKSGEQDTLMEMPRSPDRSPVAKMREASGIPSAMTYVAHRDLMEAKQEFVKGGSSVAQAFRPKYTLAIDVRNEGV

SEQ ID NO: 14736 - protein, 214 aa, Leishmania major
MSAPSSVPPHKMANLHKLQRAWTLWYDSPSTYNTENWEMSLVPIMTVHSVEEFFVMLRYMKPLHALRTSSQYHFFQEGVKPMWEDPANKKGGKLWVNLDITSANGRSSNNNTSGTSAADGSAAEAKTDLDKAWENVLMATVGEYLDCVDKKDTPTEPFVTGIVMSKRKYHNRLAVWVSDASATDKIEALKKALTKEASLAPIASMVFTKHGEAS

SEQ ID NO: 14737 - protein, 173 aa, Encephalitozoon cuniculi
MELASQWVFWQNSNDESNAKSWGDDLVAVGEVSTVPEFLYLCDEISNAGIGRLCTMNLFRKGIKPMWEDEANIDGGRIIMDVPVSGKDNVGELWKRTMAFCVSNTVDNICGCVFNEKQSFYKIAIWFGKDYNQDVIKDMWQEALGPGRLSIYSFLHKKSLDSSKGKKKWGGRR

SEQ ID NO: 14738 - protein, 183 aa, Hydra vulgaris
  unsure (1)..(183): unsure at all Xaa locations
MVETKLDMDDLNNEQELDNNQDVQLSKEIYSKHPLQNTWALWFYKNEKSKSWEANXRVVTTFXTVEDFWAIYNHIQLASKLTLGCDYALFKEGIKPMWEDARNRMGGRWLVSLNRNQRTTDLDRLWLETLLCLIGQAFGDDSDQVCGAVVNIRIKGDKLAMWTSLAENVDSVLKIGRCYKERL

SEQ ID NO: 14739 - protein, 248 aa, Caenorhabditis elegans
MSTSVAENKALSASGDVNASDASVPPELLTRHPLQNRWALWYLKADRNKEWEDCLKMVSLFDTVEDFWSLYNHIQSAGGLNWGSDYYLFKEGIKPMWEDVNNVQGGRWLVVVDKQRRTQLLDHYWLELLMAIVGEQFDEYGDYICGAVVNVRQKGDKVSLWTRDATRDDVNLRIGQVLKQKLSIPDTEILRYEVHKDSSARTSSTVKPRICLPAKDPAPVKEKGPAATTSPSNPGTEATGTSPATPTP

SEQ ID NO: 14740 - protein, 250 aa, Caenorhabditis elegans
MSTSVAENKALSASGDVNASDASVPPELLTRHPLQNRWALWYLKADRNKEWEDCLKMVSLFDTVEDFWSLYNHIQSAGGLNWGSDYYLFKEGIKPMWEDVNNVQGGRWLVVVDKQLQRRTQLLDHYWLELLMAIVGEQFDEYGDYICGAVVNVRQKGDKVSLWTRDATRDDVNLRIGQVLKQKLSIPDTEILRYEVHKDSSARTSSTVKPRICLPAKDPAPVKEKGPAATTSPSNPGTEATGTSPATPTP

SEQ ID NO: 14741 - protein, 251 aa, Caenorhabditis elegans
MSTSVAENKALSASGDVNASDASVPPELLTRHPLQNRWALWYLKADRNKEWEDCLKMVSLFDTVEDFWSLYNHIQSAGGLNWGSDYYLFKEGIKPMWEDVNNVQGGRWLVVVDKQKLQRRTQLLDHYWLELLMAIVGEQFDEYGDYICGAVVNVRQKGDKVSLWTRDATRDDVNLRIGQVLKQKLSIPDTEILRYEVHKDSSARTSSTVKPRICLPAKDPAPVKEKGPAATTSPSNPGTEATGTSPATPTP

SEQ ID NO: 14742 - protein, 212 aa, Caenorhabditis elegans
MTETEQTTAPIYPLKRNWTWWYLNDERNKSWEDRLKKVYTFNTVSEFWALYDAIRPPSGLNALCDYNVFRDDIQPMWEVPENSNGGRWLIVIDKGKTPEMVDAIWLEILMALVGEQFGKDMESICGLVCNVRGKGSKISVWTKDCNDDETNMRIGVVLKEKLMAASKDHSKPLFDVIRYEDHESCQKKTSSVVKAKLSLHSSDAPVAEKSAV

SEQ ID NO: 14743 - protein, 231 aa, Caenorhabditis elegans
MSDSEIAFEKLKISGEKEGMTETEQTTAPIYPLKRNWTWWYLNDERNKSWEDRLKKVYTFNTVSEFWALYDAIRPPSGLNALCDYNVFRDDIQPMWEVPENSNGGRWLIVIDKGKTPEMVDAIWLEILMALVGEQFGKDMESICGLVCNVRGKGSKISVWTKDCNDDETNMRIGVVLKEKLMAASKDHSKPLFDVIRYEDHESCQKKTSSVVKAKLSLHSSDAPVAEKSAV

SEQ ID NO: 14744 - protein, 228 aa, Caenorhabditis elegans [sequence omitted]

SEQ ID NO: 14745 - protein, 201 aa, Caenorhabditis elegans
MTELTTPIYPLQRNWSWWFLNDDRNASWQDRLKKVYTFNTVPEFWAFYEAILPPSGLNDLCDYNVFRDDIQPKWEAPENWDGGRWLIIINKGKTPEVLDAVWLEILLALIGEQFGKDMESICGLVCNVRGQGSKISVWTKNCNDDDTNMRIGVVLKEKLMAAASKAHSKPLFDVIHYQTHRNCVKKTTSALKYKFSLKSIV

SEQ ID NO: 14746 - protein, 240 aa, Caenorhabditis elegans
MKQKIVYCGTFRDVNLHRLSLQVETKRSKTQPLATVPADMTELTTPIYPLQRNWSWWFLNDDRNASWQDRLKKVYTFNTVPEFWAFYEAILPPSGLNDLCDYNVFRDDIQPKWEAPENWDGGRWLIIINKGKTPEVLDAVWLEILLALIGEQFGKDMESICGLVCNVRGQGSKISVWTKNCNDDDTNMRIGVVLKEKLMAAASKAHSKPLFDVIHYQTHRNCVKKTTSALKYKFSLKSIV

SEQ ID NO: 14747 - protein, 215 aa, Aplysia californica
MAERDSEPRVNIIRPDDEPEVEEERVPDPDMVIKHPLQNSWAMWFFKNDKSRDWKDNLRVITTFDTVEDFWGLYNHTLPASKLQSGCDYSVFKAGIQPMWEDAQNKKGGRWLINLNKTQRQTHLDDFWLETLLCLIGEGFDEHSEEICGATVNIRNKGDKLGLWTRDAQKTEATKKIGIKLKESLSVPPKIVIGFQAHSDTAGKAGSTVKNRFTV

SEQ ID NO: 14748 - protein, 210 aa, Spodoptera frugiperda
MAGNNTEEVEGSATTETKGTTNAEVPPEFLIKHPLQNTWSLWFYDNDRNKTWEENLIELTTFDTVEDFWRLYHHIKLPSELRQGHDYAVFKQGIRPMWEDDANKMGGRWLISLEKKQRNSDLDRFWLDVVLLLIGENFDHSDEICGAVVNVRAKLDKIGVWTADTSKQHANIEIGRKIKEQLGIHGKIGFQVHRDTMVKHSSATKNLYTV

SEQ ID NO: 14749 - protein, 248 aa, Drosophila melanogaster
MVVLETEKTSAPSTEQGRPEPPTSAAAPAEAKDVKPKEDPQETGEPAGNTATTTAPAGDDAVRTEHLYKHPLMNVWTLWYLENDRSKSWEDMQNEITSFDTVEDFWSLYNHIKPPSEIKLGSDYSLFKKNIRPMWEDAANKQGGRWVITLNKSSKTDLDNLWLDVLLCLIGEAFDHSDQICGAVINIRGKSNKISIWTADGNNEEAALEIGHKLRDALRLGRNNSLQYQLHKDTMVKQGSNVKSIYTL

SEQ ID NO: 14750 - protein, 259 aa, Drosophila melanogaster
MQSDFHRMKNFANPKSMFKTSAPSTEQGRPEPPTSAAAPAEAKDVKPKEDPQETGEPAGNTATTTAPAGDDAVRTEHLYKHPLMNVWTLWYLENDRSKSWEDMQNEITSFDTVEDFWSLYNHIKPPSEIKLGSDYSLFKKNIRPMWEDAANKQGGRWVITLNKSSKTDLDNLWLDVLLCLIGEAFDHSDQICGAVINIRGKSNKISIWTADGNNEEAALEIGHKLRDALRLGRNNSLQYQLHKDTMVKQGSNVKSIYTL

SEQ ID NO: 14751 - protein, 229 aa, Drosophila melanogaster
MLTTQQTEFKMMDNGTETLADSPSSSSEDLKTLSDMDIRKPVTEIVDLRLKHPLENTWTLWYLENDRSKNWEDMQNEITSFDMVEDFWSLYNHIKQPSEIRVGSDYSLFKKGIQPMWEDDANKFGGRWVINMGRGSKAELDKLWLDVLLILIGEAFENTEEVCGAVINLRGKSNKISIWTANGHNELAVMEIGLKLRDLLVLPPHQLQYQLHKDTMCKQGSVIKAVYCV

SEQ ID NO: 14752 - protein, 232 aa, Drosophila melanogaster
MASAQVQSFDIMKQQDQQHQLNSIHKHHHHHEGVPLESNSPEPIDEEIYQVEYKHPLEHVWTLWYLENDRTKHWKDMLNEITEIDSVETFWSLYHTIKTPAELKIGCDYSVFKKGIKPMWEDEANIKGGRWLVTVSKSAKAELDQIWLDILLLMVGQNFEYSDEICGAVINIRNKSNKISVWTANGSNEMAILEIGQKLKILLHLQSHSLQYQLHSDAMSKFNSGVKSVYTL

SEQ ID NO: 14753 - protein, 232 aa, Drosophila melanogaster
MASAQVQSFDIMKQQDQQHQLNIIHKHHHHHEGVPLESNSPEPIDEEIYQVEYKHPLEHVWTLWYLENDRTKHWRDMLNEITEIDSVETFWSLYHTIKTPAELKIGCDYSVFKKGIKPMWEDEANIKGGRWLVTVSKSAKAELDQIWLDILLLMVGQNFEYSDEICGAVINIRNKSNKISVWTANGSNEMAILEIGQKLKILLHLQSHSLQYQLHSDAMSKFNSGVKSVYTL

SEQ ID NO: 14754 - protein, 429 aa, Drosophila melanogaster
MLPNSFYRMRDFANPRTMFKSCANNNEYPTQGPQKVESPTDVTQPAAAPQSTEDTQPEKTQEPMNDPNKTSPSEPQKRGKGNRKGKKNQKNAPRTPSQTSKSSRSNNPGKDGKSTGNDDNEKGKGQGKQMVQQKENSPEQEQSTSAQYRKNVLDKDLQDKKLIEKNMQGKIITQENLLGQKVLMRLSEQKLLSLRLEPRIKQNTCPPAKKEDAVVAFDNSLEFLSLNNKCDDDLTIAAENAELLEVEDPQHPLNNCWTLWYLENDRNKSWEEMLHKVTSFDTVEKFWSLITHIKPPSELMLGSDYSLFKKGIRPMWEDEANVNGGRWVINLTKSAKMALDSFWMDAMLCLIGEACKHSDDLCGVVVNIRGKSNKISIWNADGGNQTTVLEIGRILRKVLRMDNIYVLEYQLHKDSKDKLGSTVKRIYTV

SEQ ID NO: 14755 - protein, 244 aa, Drosophila melanogaster
MVYTGYVSNGLQNAEETAWVPYGDPNDWSHGLAVYDGLELMSGNEEELQPSLNRVMKNIDYDLAMKHPLEHTWTLWHLENDRTKRWAEMLVDVTSFNTVEDFFSVYYFVKPPSDLKIFNDYMVFKKNIRPMWEDDTNKNGGRWILLLDKASRTYIDKMWHDLLLCMIGECFQHSDEICGVVINVRNKANKLSLWTKDSRNVEAILSIGRQIKELLHLGIMEIQYQVHKDAMVNHGPNVNAIYTL

SEQ ID NO: 14756 - protein, 173 aa, Drosophila melanogaster
MENLRQTKESSEFKMGTSLDNNKLASLGATNKHRLQNTWTLWGVKYDPEISWEDMLKEIDSFNTVEDFWNLYFRIDTPSKLNRGCDYMLFKKGIRPMWEDPPNKGGGRWTYKVDKRSTAELDKTWLDVLLCMIGEACDHCDQICGAFVRIRKNINKISVWTKADAGDECNEQC

SEQ ID NO: 14757 - protein, 197 aa, Pisaster ochraceus
ENESSSPALLQPEQEIKHPLQNKWALWFFKNDKAKSWADNLRVITAFDTVEDFWALFNHIQSASKLQSGCDYSLFKEGIKPMWEDDKNRKGGRWLLNLGRVKAQDVDRYWLESLLFLIGESCDDEGELVNGGVINVRSKGNKISVWTGNHKQEDGIMKIGKGFKATLNLPAKTLISYEAHADTMSKTGSMAKSRFVV

SEQ ID NO: 14758 - protein, 214 aa, Danio rerio
MASCAVQLIDKVPKKKVEKKKFEPNILKEPCMKHPLQNRWGLWFYKNDKSKMWQDNLRLITKFDTVEDFWGLYNNIQLPSKLSSGCDYSMFKDGIEPMWEDRSNKCGGRWLITLAKQHRHTELDHFWLETLLCLIGEGFSSFSRDICGSVINIRAKGDKIALWTSNAENCETVTYIGRKYKESLGLPQKLVIGYQAHADTATKSNSITKNKFVV

SEQ ID NO: 14759 - protein, 183 aa, Danio rerio
MKHPLQNRWGLWFYKNDKSKMWQDNLRLITKFDTVEDFWGLYNNIQLPSKLSSGCDYSMFKDGIEPMWEDRSNKCGGRWLITLAKQHRHTELDHFWLETLLCLIGEGFSSFSRDICGSVINIRAKGDKIALWTSNAENCETVTYIGRKYKESLGLPQKLVIGYQAHADTATKSNSITKNKFVV

SEQ ID NO: 14760 - protein, 215 aa, Danio rerio
MATAEPETSTNPSNSEEKNEENEQQIVSLEDYIKHPLQNRWALWFFKNDKSKTWQANLRLISKFDTVEDFWALYNHIQLSSNLMSGCDYSLFKDGIEPMWEDERNKRGGRWLITLSKQQRRADLDRFWLETLLCLVGEAFDDHSDDVCGAVVNIRTKGDKIAIWTTDYENKDAIVHIGRVYKERLGVPPKVIIGYQSHADTATKSGSTTKNKFVV

SEQ ID NO: 14761 - protein, 213 aa, Oryzias latipes
TAVVVSTSIPGNLEEKSEISNGKIGNPEACIKHPLQNRWTLWFFKNDKSKTWQANLRLISTFDTVEDFWALYNHIQLSSNLMSGCDYSLFKDGIEPMWEDERNRRGGRWLITLSKHQRKMDLDRFWLETLLCLVGEAFDDHSDDVCGAVINIRAKGDKIAIWTTNCENKEAITQIGRVYKERLGVPPKVIIGYQSHADTATKSSSTTKNKFVA

SEQ ID NO: 14762 - protein, 213 aa, Xenopus laevis
MAAVEPENTNPQSTEEEKETGQEIVSPDQYIKHPLQNRWALWFFKNDKSKTWQANLRLISKFDTVEDFWALYNHIQLSSNLMSGCDYSLFKDGIEPMWEDEKNKRGGRWLITLNKQQRRNDLDRFWLETLMCLIGESFDEHSDDVCGAVVNVRAKGDKIAIWTTEFENKDAVTHIGRVYKERLGLPAKVVIGYQSHADTATKSGSTTKNRFVV

SEQ ID NO: 14763 - protein, 231 aa, Xenopus laevis
MAAVEPENTNPQSTEEEKETGQEIENTNPQSTEEEKETGQEIVSPDQYIKHPLQNRWALWFFKNDKSKTWQANLRLISKFDTVEDFWALYNHIQLSSNLMSGCDYSLFKDGIEPMWEDEKNKRGGRWLITLNKQQRRNDLDRFWLETLMCLIGESFDEHSDDVCGAVVNVRAKGDKIAIWTTEFENKDAVTHIGRVYKERLGLPAKVVIGYQSHADTATKSGSTTKNRFVV

SEQ ID NO: 14764 - protein, 171 aa, Verticillium fungicola
TVEEFWGVYNNVANVSDLAVKSDYHLFKAGVRPEWEDPQNKHGGKWSYQYKDKRNVDVNRLWLQVVMAAIGETLEEEDDGEVMGVVVNVRKAFYRIGVWTRTIGKSIPGRGDGDVAGGKGRSNEKGKDILLSIGRRFKEILELPNSEQVEFSGHTDSAHAGSTRAKAKHVV

SEQ ID NO: 14765 - protein, 217 aa, Homo sapiens [sequence omitted]

SEQ ID NO: 14766 - protein, 217 aa, Homo sapiens
MATVEPETTPTPNPPTTEEEKTESNQEVANPEHYIKHPLQNRWALWFFKNDKSKTWQANLRLISKFDTVEDFWALYNHIQLSSNLMPGCDYSLFKDGIEPMWEDEKNKRGGRWLITLNKQQRRSDLNRFWLETLLCLIGESFDDYSDDVCGAVVNVRAKGDKIAIWTTECENREAVTHIGRVYKERLGLPPKIVIGYQSHADTATKSGSTTKNRFVV

SEQ ID NO: 14767 - protein, 217 aa, Homo sapiens
MATVEPETTPTPNPPTTEKEKTESNQEVANPEHYIKHPLQNRWALWFFKNDKSKTWQANLWLISKFDTVEDFWALYNHIQLSSNLMPGCDYSLFKDGIEPMWEDEKNKRGGRWLITLNKQQRRSDLDRFWLETLLCLIGESFDDYSDDVCGAVVNVRAKGDKIAIWTTECENREAVTHIGRVYKERLGLPPKIVIGYQSHADTATKSGSTTKNRFVV

SEQ ID NO: 14768 - protein, 217 aa, Bos taurus
MATVEPETTPTPNPPPTEEEKTESNQEVANPEHYIKHPLQNRWALWFFKNDKSKTWQANLRLISKFDTVEDFWALYNHIQLSSNLMPGCDYSLFKDGIEPMWEDEKNKRGGRWLITLNKQQRRGDLDRFWLETLLCLIGESFDDYSDDVCGAVVNVRAKGDKIAIWTTECENREAVTHIGRVYKERLGLPPKIVIGYQSHADTATKSGSTTKNRFVV

SEQ ID NO: 14769 - protein, 217 aa, Oryctolagus cuniculus
MATVEPETTPTPNPPPAEEEKTESNQEVANPEHYIKHPLQNRWALWFFKNDKSKTWQANLRLISKFDTVEDFWALYNHIQLSSNLMPGCDYSLFKDGIEPMWEDEKNKRGGRWLITLNKQQRRSDLDRFWLETLLCLIGESFDDYSDDVCGAVVNVRAKGDKIAIWTTECENRDAVTHIGRVYKERLGLPPKIVIGYQSHADTATKSGSTTKNRFVV

SEQ ID NO: 14770 - protein, 235 aa, Arabidopsis thaliana
MAVEDTPKSVVTEEAKPNSIENPIDRYHEEGDDAEEGEIAGGEGDGNVDESSKSGVPESHPLEHSWTFWFDNPAVKSKQTSWGSSLRPVFTFSTVEEFWSLYNNMKHPSKLAHGADFYCFKHIIEPKWEDPICANGGKWTMTFPKEKSDKSWLYTLLALIGEQFDHGDEICGAVVNIRGKQERISIWTKNASNEAAQVSIGKQWKEFLDYNNSIGFIIHEDAKKLDRNAKNAYTA

SEQ ID NO: 14771 - protein, 285 aa, Arabidopsis thaliana
MEQYWALYKELTLSHLRLLYWERTRRSIVNGKITVKRAREKEKSEMVVMDSPVSGRMADQNIDPNTTTSPSPIEKHVSAIKAISGDEKAPSKEKKNYASKKSTTVIQKSHCFQNSWTFWFDNPSSKSNQVIWGSSLRSLYTFATIEEFWSLYNNIHPPTKWVSGSDLYCFKDKIEPKWEDPICANGGKWTMFFPRATLESNWLNTLLALVGEQFDQGDEICGAVLNFRTRGDRISLWTKKAANEEAQLSIGKQWKELLGYNDTIGFIVHEDAKTLDRDAKRRYTV

SEQ ID NO: 14772 - protein, 240 aa, Arabidopsis thaliana
MVVMDSPVSGRMADQNIDPNTTTSPSPIEKHVSAIKAISGDEKAPSKEKKNYASKKSTTVIQKSHCFQNSWTFWFDNPSSKSNQVIWGSSLRSLYTFATIEEFWSLYNNIHPPTKWVSGSDLYCFKDKIEPKWEDPICANGGKWTMFFPRATLESNWLNTLLALVGEQFDQGDEICGAVLNFRTRGDRISLWTKKAANEEAQLSIGKQWKELLGYNDTIGFIVHEDAKTLDRDAKRRYTV

SEQ ID NO: 14773 - protein, 240 aa, Arabidopsis thaliana
MVVTDSPVSGIMADQNIDPNTTTSPSPKEKHVSAIKAISGDEKAPSKEKKNYASKKSTTVIQKSHCFQNSWTFWFDNPSSKSNQVIWGSSLRSLYTFGTIEEFWSLYNNIHPPTKWVSGADLYCFKDKIEPKWEDPICANGGKWSMMFPKATLECNWLNTLLALVGEQFDQGDEICGAVLNFRARGDRISLWTKNAANEEAQLSIGKQWKELLGYNETIGFIVHEDAKTLDRDAKRRYTV

SEQ ID NO: 14774 - protein, 238 aa, Glycine max
  unsure (1)..(238): unsure at all Xaa locations
MVVEDTQKSVITEDQYPSRVVSDNNNDDDDDDLEEGEIPVDGEDSGATATTKXSGRPRPKPXHPLENSWTFWFDNPSSKSKQAAWGSSIRPIYTFATVEEFWSIYNNIHHPSKLGLGADFHCFKHKIEPKWEDPICANGGKWTMTFPRGKSDTSWLYTLLAMIGEQFDHGDEICGAVVNVRSRQDKIAIWTKNASNEAAQVSIGKQWKEFLDYNDTIGFIFHEDAKKLDRGAKNKYVV

SEQ ID NO: 14775 - protein, 234 aa, Glycine max
  unsure (1)..(234): unsure at all Xaa locations
MPKNQPSRRTKTLAGSPTTTTTTKISKRGRXPDDGDDGASATCKASVRPTSATXHPLENSWTFWFDXPFRXSPNXAAWGSSIRPIYTFATRQEXLGAYNPFTTPSXVGVWXGADFHXCFKHRLSPKWEDPICANGGKWTMTFHRRKCDTTCIYTLLAMIGEQFDHRHEICGAVVNAISRHEKTAIWTKNALNESAQVSIGKQCKEXLDHNDTIAXIFHEDAKKLDRGAKNKYVV

SEQ ID NO: 14776 - protein, 215 aa, Triticum aestivum
MAEDTETRPASAGAEEREEGEIADDGDGSSAAAAGRITAHPLENAWTFWFDNPQGKSRQVAWGSTIHPIHTFSTVEDFWGLYNNIHNPSKLNVGADFHCFKNKIEPKWEDPICANGGKWTISCGRGKSDTFWLHTLLAMIGEQFDFGDEICGAVVSVRQKQERVAIWTKNAANEAAQISIGKQWKEFLDYKDSIGFIVHEDAKRSDKGPKNRYTV

SEQ ID NO: 14777 - protein, 215 aa, Triticum aestivum; identical to SEQ ID NO: 14776

SEQ ID NO: 14778 - protein, 215 aa, Triticum aestivum
MTEDTEMRPASAGAEEREEGEIADDGDGSSAAAAGRITAHPLENAWTFWFDNPQGKSRQVAWGSTIHPIHTFSTVEDFWGLYNNIHNPSKLNVGADFHCFKNKIEPKWEDPICANGGKWTISCGRGKSDTFWLHTLLAMIGEQFDFGDEICGAVVSVRQKQERVAIWTKNAANEAAQISIGKQWKEFLDYKDSIGFIVHEDAKRSDKGPKNRYTV

SEQ ID NO: 14779 - protein, 215 aa, Triticum aestivum; identical to SEQ ID NO: 14778

SEQ ID NO: 14780 - protein, 197 aa, Triticum aestivum
EGEIADDGDGSSAAAAGRITAHPLENAWTFWFDNPQGKSRQVAWGSTIHPIHTFSTVEDFWGLYNNIHNPSKLNVGADFHCFKNKIEPKWEDPICANGGKWTISCGRGKSDTFWLHTLLAMIGEQFDFGDEICGAVVSVRQKQERVAIWTKNAANEAAQISIGKQWKEFLDYKDSIGFIVHEDAKRSDKGPKNRYTV

SEQ ID NO: 14781 - protein, 218 aa, Zea mays
MAEETDTRPASAGSRGRPAPEDDDREEGEITDLACAPSPPATHPLEHSWTFWFDNPQSKSKQAAWGSSIRPIHTFSTVEEFWGLYNNINHPSKLIVGADFHCFKNKIEPKWEDPICANGGKWTISCGRGKSDTFWLHTLLAMIGEQFDYGDEICGAVVSVRGKQERIAIWTKNAANEAAQVSIGKQWKELLDYKDSIGFIVHDDAKKMDKGLKNRYTV

SEQ ID NO: 14782 - protein, 218 aa, Zea mays
MAEETDTRPASAGSRGRPAPEDDDREEGEITDLACAPSPPATHPLEHSWTFWFDNPQSKSKQAAWGSSIRPIHTFSTVEEFWGLYNNINHPSKLIVGADFHCFKNKIEPKWEDPICANGGKWTISCGRGKSDTFWLHTLLAMIGEQFDYGDEICGAVVSVRGKQERIAIWTKNAANEAAQVSIGKQWKELLDYKDSIGFIVHDDAKKMDKGLKERYTV

SEQ ID NO: 14783 - protein, 230 aa, Zea mays
  unsure (1)..(230): unsure at all Xaa locations
RKASLTTAATPWAEETDTRPASAGSRGRPAPEDDDREEGEITDLACAPSPPATHPLEHSWTFWFDNPQSKSKQAAWGSSIRPIHTFSTVEEFWGLYNNINHPSKLIVGADFHCFKNKIEPKWEDPICANGGKWTISCGRGKSDTFWLHTLLAMIGEQFDYGDEICGAVVSVRGKQERIAIWTKNAANEAAQVSIGKQWKELLDYKDSIGFIVHDDAKKMDKGLKNXRYTV

SEQ ID NO: 14784 - protein, 220 aa, Zea mays
  unsure (1)..(220): unsure at all Xaa locations
MADEIDTRPAPAGSRGRPAPEDDDREEGEIATDAPSPALPAAHPLEHSWTFWFDNPHGKNKMAAWGSSIRPIHTFSTVEDFWGLYNNIHHPSKLIGGADFHCFKNKIEPKWEDPICANGGKWTISCGRGKSDTLWLHTLLAMIGEQFDYGDEICGAVVSVRSKQERIAIWTKNAANEAAQISIGKQWKXEFLDYKDSIGXFIVHDDAKKMDKGLKNRYTV

SEQ ID NO: 14785 - protein, 221 aa, Zea mays
  unsure (1)..(221): unsure at all Xaa locations
MADEIDTRPASAGSRGRPSAXATEDDDREEGEIAADAPSPALPAAHPLEHSWTFWFDNPHGKNKMAAWGSSIRPIHTFSTAEDFWGLYNNIHHPSKLIGGADFHCFKNKIEPKWEDPICANGGKWTISCGRGKSDTLWLHTLLAMIGEQFDYGDEICGAVVSVRSKQERIAIWTKNAGNEAGQISIGKQWKEFLDYKDSIGFIVHDDAXKMDKGLKKPYTV

SEQ ID NO: 14786 - protein, 219 aa, Zea mays
  unsure (1)..(219): unsure at all Xaa locations
MADEIDTRPASAGSRGRPAPEDDDREEGEIAADAPSPALPAAHPLEHSWTFWFDNPHGKNKMAAWGSSIRPIHTFSTVEDFWGLYNNIHHPSKLIGGADFHCFKNKIEPKWEDPICADGGKWTISCGRGKSDTLWLHTLLAMIGEQFDYGDEICGAVVSVRSKQERIAIWTKNAANEAAQISIGKQWKFLDYNSIGFTXHDDAKLWXRVDKGLKNRYTV

SEQ ID NO: 14787 - protein, 137 aa, Zea mays
  unsure (1)..(137): unsure at all Xaa locations
XGLYNNINHPSKLIVGADFHCFKNKIEPRWEDPICANGGKWTISCGRGKSDTFWLHTLLAMIGEQFDYGDEICGAVVSVRGKQERIAIWTKNAANEAAQVSIGKQWKELLDYKDSIGFIVHDDAKKMDKGLKNRYTV

SEQ ID NO: 14788 - protein, 233 aa, Aspergillus fumigatus
MSAPKLHFNNDQSPIKDESSPTQKAMECPSSSTRKSLHQNILGKLRPLPLQYHWTVWYDRYSESTDYDNRLYVLHEDVADIATFYRVYNNYPWDKIRLRDSVHIFRKGVRPVWEDPENLRGGCWKFRVPKSKAQEFFHEIAILCMANEFQAALEKEHDHVLGVSTSVRFNSHMISVWNKMGTNERSIKILEQTIIDRLSPELRPTSSGSHSYFYKRHDENDGYQEAVAASSSH

SEQ ID NO: 14789 - protein, 245 aa, Mus musculus
MNNKFDALKDDDSGDHDQNEENSTQKDGEKEKTDRDKSQSSGKRKAVVPGPAEHPLQYNYTFWYSRRTPGRPTSSQSYEQNIKQIGTFASVEQFWKFYSHMVRPGDLTGHSDFHLFKEGIKPMWEDDANKNGGKWIIRLRKGLASRCWENLILAMLGEQFMVGEEICGAVVSVRFQEDIISIWNKTASDQATTARIRDTFRRVLNLPPNTIMEYKTHTDSIKMPGRLGPQRLLFQNLWKPRLNVP

SEQ ID NO: 14790 - protein, 234 aa, Mus musculus
MNNKFDALKDDDSGDHDQNEENSTQKDGEKEKTDRDKSQSSGKRKAVVPGPAEHPLQYNYTFWYSRRTPGRPTSSQSYEQNIRQIGTFASVEQFWKFYSHMVRPGDLTGHSDFHLFKEGIKPMWEDDANKNGGKWIIRLRKGLASRCWENLILAMLGEQFMVGEEICGAVVSVRFQEDIISIWNKTASDQATTARIRDTLRRVLNLPPNTIMEYKTHTDSIKDNSSFRNTKITL

SEQ ID NO: 14791 - protein, 245 aa, Mus musculus
MNNKFDALKDDDSGDHDQNEENSTQKDGEKEKTDRDKSQSSGKRKAVVPGPAEHPLQYNYTFWYSRRTPGRPTSSQSYEQNIKQIGTFASVEQFWKFYSHMVRPGDLTGHSDFHLFKEGIKPMWEDDANKNGGKWIIRLRKGLASRCWENLILAMLGEQFMVGEEICGAVVSVRFQEDIISIWNKTASDQATTARIRDTLRRVLNLPPNTIMEYKTHTDSIKMPGRLGPQRLLFQNLWKPRLNVP

SEQ ID NO: 14792 - protein, 257 aa, Mus musculus
MNNKFDALKDDDSGDHDQNEENSTQKDGEKEKTDRDKSQSSGKRKAVVPGPAEHPLQYNYTFWYSRRTPGRPTSSQSYEQNIKQIGTFASVEQFWKFYSHMVRPGDLTGHSDFHLFKEGIKPMWEDDANKNGGKWIIRLRKGLASRCWENLILAMLGEQFMVGEEICGAVVSVRFQEDIISIWNKTASDQATTARIRDTLRRVLNLPPNTIMEYKTHTDSIAPQGTMSSKLCLMVNPLKVTRPHASTFPLGSVHQQI

SEQ ID NO: 14793 - protein, 244 aa, Mus musculus
MNKVEGGGHKEEVVVKEKEVVKEKPSEATAEGVQAGEAKDLPGSLKTQRRKAHREHPPEVLSKLHPLQYRWVLWFFKNDRSRAWQDNLQLVTKFNTVEDFWAVYSHIKLASKLSSGCDYALFKEGILPMWEDNRNKQGGRWLLSIDKQLRHFELDRLWLETLLCLVGNCFEEYSREVCGAVVNIRTKRDKIALWTSEAEDKAGVMQIGQIYKERLGISTKTIIGYQAHADTAAKSNNLANKFVV

SEQ ID NO: 14794 - protein, 303 aa, Mus musculus
MGVSLVIVYASSVTLALYSQLPPPYNDRAPDAREETGRALQGELLLQTHMLPALLHEGADGDLPQKPVEGGGHKEEVVKEKEVVKEKPSEATAEGVQAGEARDLPGSLKTQRRKAHKEHPSEVLSKLHPLQYRWVLWFFKNDRSRAWQDNLQLVSKFNTVEDFWVMYSHIKLASKLSSCCDYALFKEGILPMWEDNRNKWGSRWLLSIDKQLRHFELDRLWLETLVCLVGNCFEEYSGAVVNICTKRDKIALWTNEAEDKAGVMQIGQIYKERLGIPTKTILGYQAHADTAAKSNNLANKFVV

SEQ ID NO: 14795 - protein, 207 aa, Mus musculus
MALPPAAAPPGANEPLDKALSALPPEPGGVPLHSPWTFWLDRSLPGATAAECASNLKKIYTVQTVQIFWSVYNNIPPVTSLPLRCSYHLMRGERRPLWEEESNAKGGVWKMKVPKDSTSTVWKELLLATIGEQFTDCAAADDEIIGVSVSVRDREDVVQVWNVNASLVGEATVLEKIHQLLPHIAFKAVFYKPHEEHHAFEGGRGKH

SEQ ID NO: 14796 - protein, 207 aa, Mus musculus
MALPPAAAPPGANEPLDKALSALPPEPGGVPLHSPWTFWLDRSLPGATAAECASNLKKIYTVQTVQIFWSVYNNIPPVTSLPLRCSYHLMRGERRPLWEEESNAKGGVWKMKVPKDSTSTVGKELLLATIGEQFTDCAAADDEIIGVSVSVRDREDVVQVWNVNASLVGEATVLEKIHQLLPHIAFKAVFYKPHEEHHAFEGGRGKH

SEQ ID NO: 14797 - protein, 162 aa, Mus musculus
MATVEPETTPTTNPPPAEEEKTESNQEVANPEHYIKHPLQNRWALWFFKNDKSKTRQANLRLISKFDTVEDFWALYNHIQLSSNLMPGCDYSLLKDGIEPMWEDEKNKRGGRWLITLNKQQRRSDLDRFLARHCCALLENLSMTTVMMCVELLLMLELKVMR

SEQ ID NO: 14798 - protein, 145 aa, Rattus norvegicus
MVRPGDLTGHSDFHLFKEGIKPMWEDDANKNGGKWIIRLRKGLASRCWENLILAMLGEQFMVGEEICGAVVSVRFQEDIISIWNKTASDQATTARIRDTLRRVLNLPPNTIMEYKTHTDSIKMPGRLGPQRLLFQNLWKPRLNVP

SEQ ID NO: 14799 - protein, 208 aa, Anopheles gambiae str. PEST
KAKASKAKAQSETLQQTFCDNVNNYTKTSCTTLLHTPASLNMSNKYEIKPYASDSDDSGDEDADIDVDKLEPLEAGPGEHKLQYTYCLWFGKKGSHRAASGIKPMWEDPSNSKGGKWVIRLKKSKIDRAWENVCMAMLGEQFLVGSEICGVVLCTQYPEDVLSVWNRTATDTVSTNRIRDTLRRILNLPQSQHIEYKPHGDSLKFVPA

SEQ ID NO: 14800 - protein, 217 aa, Glycine max
PKPSKHNLTRISVAERERQMATSEEVVAAAPEAAALEAGLKHKLERKWTFWCDNQSKPKQGAAWGTSLRKVYTFDTVEEFWCLYDQVFKPSKLQINADFHLFKTGIEPKWEDPECANGGKWSVTSSRKANLDNMWLETMMALIGEQFEDAEDICGVVASVRQWQDKLSLWTKTAANEAAQMSIGRKWKEIIDVNDKITYNFHDDSRTKGASKGRYTV

SEQ ID NO: 14801 - protein, 218 aa, Glycine max
MATSEEVVAAAPEAAGREREMATSEEVVAAAPEAAAPEAGLKHKLERKWTFWCDNQSKPKQGAAWGTSLRKVYTFDTVEEFWCLYDQVFKPSKLQINADFHLFKTGIDPKWEDPECANGGKWSITSSRKANLDNMWLETMMALIGEQFEDAEDICGVVASVRQWQDKLSLWTKTAANEAAQMSIGRKWKEIIDVNDKITYNFHDDSRSKGATKGRYTV

SEQ ID NO: 14802 - protein, 200 aa, Glycine max
  unsure (1)..(200): unsure at all Xaa locations
RVREEHTNTSHHRVHVGAASIQHFLLSTLVGGLSGDITLKARSKHKLDRKWTFWCDNQSKPYLGAAWGASLSKVYTFDTVKXFWWWYDQVFKPRKLQINGDFHLFKTGIDPKWEDPXCANGGKWSITSSRKANLDNMWLETMMALIGEQFEDAEDICGVVASVRQWQDKLSLWTKTVANESGQVVXLSCKXYYAVEMYAM

SEQ ID NO: 14803 - protein, 206 aa, Oryza sativa; identical to SEQ ID NO: 574

SEQ ID NO: 14804 - protein, 206 aa, Oryza sativa
MAEVEAAPIAAAETPEVAAAEGAAAAKAPHKLHRQWAFWYDIQSKPKPGAAWGTSLRKAYTFDTVEEFWGLYDQIFRPSKVTVNADFHLFKVGVEPKWEDPECANGGKWTVPCSRKTTLENMWLETLMALIGEQFDESEEICGVVASVRQRGDKLALWTRTASNEAVQVNIGKKWKEIVDYNDKMVYSFHDDAKREKPSRGGRYNV

SEQ ID NO: 14805 - protein, 1478 aa, Oryza sativa
  unsure (1)..(1478): unsure at all Xaa locations
MATLTCGSHADSAATSDKTEVKTTEGPKTNGFWHRGVVAQVKTQHISLANAAISRSRNLLPLLLLFPLGGGGGFSLLFSLSHRLLVRFPSRRSRGGGGGGGADMAEVEAAPIAAAETPEVAAAEGAAAAKAPHKLHRQWAFWYDIQSKPKPGAAWGTSLRKAYTFDTVEEFWGLYDQIFRPSKVTVNADFHLFKAGVEPKWEDPECANGGKWTVPCSRKTTLENMWLETLMALIGEQFDESEEICGVVASVRQRGDKLALWTRTASNEAVQVNIGKKWKEIVDYNDKMVYSFHIKYVHSSFYLDGASTSMQDDAKREKPSRGGRYNVKTVRRHRNPPTKHIHVPSPLAFDFASAALRPLQHISLASRCDLTLRRSRSSSSSIGSGGLLPKRAMHGARGRPPPPPRPPTSLPRHLTMDTASVTGGEHKGKEKTCRVCGEEVAAREDGKPFVACAECGFPVCKPCYEYERSEGTQCCPQCNTRYKRHKGCPRVEGDEDDGGDMDDFEEEFQIKSPTKQKPPHEPVNFDVYSENGEQPAQKWRPGGPALSSFTGSVAGKDLEQEREMEGGMEWKDRIDKWKTKQEKRGKLNRDDSDDDDDKNDDEYMLLAEARQPLWRKVPIPSSKINPYRIVIVLRLVVLCFFLKFRITTPAMDAVPLWLASVICELWFALSWILDQLPKWSPVTRETYLDRLALRYERDGEPCRLAPIDFFVSTVDPLKEPPIITANTVLSILAVDYPVDRVSCYVSDDGASMLLFDTLSETAEFARRWVPFCKKFTIEPRAPEFYFSQKIDYLKDKVQPTFVKERRAMKREYEEFKVRINALVAKAQKKPEEGWVMQDGTPWPGNNTRDHPGMIQVYLGSQGALDVEGSELPRLVYVSREKRPGYNHHKKAGAMNSLVRVSAVLTNAPFILNLDCDHYVNNSKAVREAMCFLMDKQLGKKLCYVQFPQRFDGIDRHDRYANRNTVFFDINMKGLDGIQGPVYVGTGTVFNRQALYGYDPPRPEKRPKMTCDCWPSWCCCCCCFGGGKRGKSHKNKKGGGGGEGGGLDEPRRGLLGFYKKRSKKDKLGGGAASLAGGKKGYRKHQRGFELEEIEEGLEGYDELERSSLMSQKSFEKRFGQSPVFIASTLVEDGGLPQGAAADPAALIKEAIHVISCGYEEKTEWGKEIGWIYGSVTEDILTGFKMHCRGWKSVYCTPARAAFKGSAPINLSDRLHQVLRWALGSVEIFMSRHCPLWYAYGGRLKWLERFAYTNTIVYPFTSIPLLAYCTIPAVCLLTGKFIIPTLNNLASIWFIALFLSIIATGVLELRWSGVSIEDWWRNEQFWVIGGVSAHLFAVFQGLLKVLXGVDTTFTVTSKAAADETDAFGELYLFKWTTLLVPPTTLIIINMVGIVAGVSDAVNNGYGSWGPLFGKLFFSFWVILHLYPFLKGLMGRQNRTPTIVVLWSILLASIFSLVWVRIDPFIPKPKGPVLKPCGVSC

SEQ ID NO: 14806 - protein, 211 aa, Oryza sativa
  unsure (1)..(211): unsure at all Xaa locations
PLSYFRCCVREREMATSEEVVAAAPEAAAPEAGLKHKLERKWTFWCDNQSKPKQGAAWGTSLRKVYTFDTVEEFWCLYDQVFKPSKLQINADFHLFKTGIDPKWEDPECANGGKWSITSSRKANLDNMWLETMMALIGEQFEDAEDICGVVASVRQWQDKLSLWTKTAANEAAQMSIGRKWKEIIDVNDKITYNFHDDSRSXGSTKGRYTV

SEQ ID NO: 14807 - protein, 599 aa, Neurospora crassa
MNAHWAAENERHTGTYNFRARQNIVVMKGYGMSGSCFRSSSHHGRRANGALVMMVLNKGNLEEFFLTFTIRIVGCAEAIRCSPTVFYGNVVVVVKKKKKKKRKGERNLSRHFELKSCLFHGRVCTYCHFSPPITLLLPCSVHLCQKVTSHVPWNPDSIWQGGAFRASIQRPCSRGTGRQAGQGERPVTVDGGPATARAISPSVAATGHFFGKQSSRRSQAAGAHCSPRGHCGPYLLPFLVSDFSMDTNLWSRRTNSSKLSLTTPGSGGQVDNSSSRTFSKRFGGDSSSHGKTNPFNSITTPGGLVSPTAGASSAFGLGSGAFASFGSAKTPKTTGNPFETTLIGHSAKTPSAEKSSKEGGLGGKTVGKTASNASLADANKRAQGAVSNSPSSGLNHQLRNSWVFWYRPPISKANGFIEYEKTLHPIATCETAEQFFAVYQHLKRPSGLPLVSDYHLFKKGIRPIWEDEENKNGGKWIVRLRKGVADRYWEDILLALIGDQFGDASDDVCGIVLSVRNGEDILSIWARANGQRVLKIRETMRRTLSFPSETKVEWKSHDSSIQQRTAIEESRREKANNRDHSQGDKRTTNRQQQQTDSRP

SEQ ID NO: 14808 - protein, 282 aa, Neurospora crassa
MSSRPGLFTRGLSGLSQSNDASVSSPAAERDDAKRNFLKTMRPLPTQHYWNIWFDRPDKDQQGKSADGSYHSNLEKLGSTIESVQDFWRYNNNMPIENIKMRESIYLFKAGFKPVWEDRRNILGGSWTFRVPKANGADFWTRVQLLAIGEELQDVLEEGDQICGVGLSVRFNAHLISIWHRDASKQKSVDAILQLVLTKAIPDDFPPLKPDNYFYKKHSDHAGFNPSPEMQAVLDSQKAREQHAAAVAKAQAQAAQQTTAQEGGQSQPEPPQIVEVPPSGEA

SEQ ID NO: 14809 - protein, 304 aa, Neurospora crassa
MSSRPGLFTRGLSGLSQSNDASVSSPAAERDDAKRNFLKTMRPLPTQHYWNIWFDRHVLKVCMHMQCAVASNTLHLYRPDKDQQGKSADGSYHSNLEKLGSTIESVQDFWRYNNNMPIENIKMRESIYLFKAGFKPVWEDRRNILGGSWTFRVPKANGADFWTRVQLLAIGEELQDVLEEGDQICGVGLSVRFNAHLISIWHRDASKQKSVDAILQLVLTKAIPDDFPPLKPDNYFYKKHSDHAGFNPSPEMQAVLDSQKAREQHAAAVAKAQAQAAQQTTAQEGGQSQPEPPQIVEVPPSGEA

SEQ ID NO: 14810 - protein, 190 aa, Hydra vulgaris
MATNKFEALAREDSNDSSSKSDEEVENGEVPADESASKEDSKEETNKYVFPDEPVIENGEHRLQDCYCLWFSRKSHGKQPVTQKYEDSIKLIGAFASVEQFWAYYLHMVRPGELTGHSDIHLFKYGIRPMWEDKANKNGGKWIVRLKKGLASRCWETLILAMLGEQFMVGQEICGAVVSIRYQEDIISIW

SEQ ID NO: 14811 - protein, 212 aa, Caenorhabditis elegans
MEAETSTQEVVKQVKNLPILMEDAPVGSDDHQLQYSYTFSYFMRPTGKFDPEDYASYVQPVGIMKSVEQFWSIMVHFKRPTEMCDKADIHFFKTGVKPVWEDPANCKGGKWIIRLKKGLSTRIWENLLMAIIGEQFLVGDELCGAVCSIRNQEDIISLWNRNADDTPVTNRIRETLRSVLQLPQNTVLEYKRHDDCLRDQSSYRHTTKNICK

SEQ ID NO: 14812 - protein, 223 aa, Drosophila melanogaster
MSMEKVANKQYETKNWPDIVDSDDSDVDNQIDVDNLPPLEVGPGENRLQHTYCLWFSRKETQRAAADYSKSLHMVGRCASVQQWWSLYSHLIRPTALKPYRELLLFKQGIIPMWEDPANSKGGQWLIRLRKNKVDRAWENVCMAMLGEQFLVGDEICGVVLQTKYPEDSLSVWHRTATDMTSTTRIRDTLRRILNIPLTTALEYKIHCDSLKYVSINKGPLKS

SEQ ID NO: 14813 - protein, 236 aa, Homo sapiens [sequence omitted]

SEQ ID NO: 14814 - protein, 245 aa, Homo sapiens
MNNKFDALKDDDSGDHDQNEENSTQKDGEKEKTERDKNQSSSKRKAVVPGPAEHPLQYNYTFWYSRRTPGRPTSSQSYEQNIKQIGTFASVEQFWRFYSHMVRPGDLTGHSDFHLFKEGIKPMWEDDANKNGGKWIIRLRKGLASRCWENLILAMLGEQFMVGEEICGAVVSVRFQEDIISIWNKTASDQATTARIRDTLRRVLNLPPNTIMEYKTHTDSIKMPGRLGPQRLLFQNLWKPRLNVP

SEQ ID NO: 14815 - protein, 117 aa, Homo sapiens
MWEDSRNKRGGRWLVSLAKQQRHIELDRLWLETLLCLIGESFEEHSREVCGAVVNIRTKGDKIAVWTREAENQAGVLHVGRVYKERLGLSPKTIIGYQAHADTATKSNSLAKNKFVV

SEQ ID NO: 14816 - protein, 227 aa, Oryza sativa; identical to SEQ ID NO: 575

SEQ ID NO: 14817 - protein, 227 aa, Oryza sativa; identical to SEQ ID NO: 575

SEQ ID NO: 14818 - protein, 396 aa, Mus musculus
MTNEEPLPKKVRLSETDFKVMARDELILRWKQYEAYVQALEGKYTDLNSNDVTGLRESEEKLKQQQQESARRENILVMRLATKEQEMQECTTQIQYLKQVQQPSVAQLRSTMVDPAINLFFLKMKGELEQTKDKLEQAQNELSAWKFTPDSQTGKKLMAKCRMLIQENQELGRQLSQGRIAQLEAELALQKKYSEELKSSQDELNDFIIQLDEEVEGMQSTILVLQQQLKETRQQLAQYQQQQSQASAPSTSRTTSSEPVDQAEVTSKDCSRLANGPSNGSSSRQRTSGSGFHREGSTPEDDFPSSSGNGNKASNSSEERTGRGGSSYINPLSAGYESVDSPTGSENSLTHHSNDTDSSHDPQEEKAVSGKGNRTVGSRHVQNGLDSNVNVQGAVL

SEQ ID NO: 14819 - protein, 379 aa, Mus musculus
  unsure (1)..(379): unsure at all Xaa locations
FKVMARDELILRWKQYEAYVQALEGKYTDLNSNDVTGLRESEEKLKQQQQESARRENILVMRLATKEQEMQECTTQIQYLKQVQQPSVAQLRSTMVDPAINLFFLKMKGELEQTKDKLEQAQNELSAWKFTPDSQTGKKLMAKCRMLIQENQELGRQLSQGRIAQLEAELALQKKYSEELKSSQDELNDFIIQLDEEVEGMQSTILVLQQQLKETRQQLAQYQQQQSQASAPSTSRTTSSEPVDQAEVTSKDCSRLANGPSNGSSSRQRTSGSGFHREGSTPEDDFPSSSGNGNKXSNSSEERTGRGGSSYINPLSAGYESVDSPTGSENSLTHHSNDTDSSHDPQEEKAVSGKGNRTVGSRHVQNGLDSSVNVQGAVL

SEQ ID NO: 14820 - protein, 272 aa, Anopheles gambiae str. PEST
EELQAVKESEAKIKQQYSESQRRERILARRVAVQEQEMRDFSKQIAELKSAQAPGPAALRSALLDPAVNILFQKLKAELQATKAKLEETQNELSAWKFTPDSNTGKRLMAKCRLLYQENEELGKMTSNGRLAKLESELALQKSYNEEVKKSQLELDDFLQELDEDVEGMQGTIVFLQQELKQTKDARNEIEKEVIQLRAYIAANLGPFSGSGNNPTSGSTPTDERSSSMMMMMDVQDSNSNSNSHGHDAYHHPDGGGPDSIGGRGVRLGELG

SEQ ID NO: 14821 - protein, 330 aa, Arabidopsis thaliana
MEFSSQDDDFGGDDSAANATRASGNRRSFGDLEDDEDDIFGSTTVAPGVRTGMILSLRGSLKNCKDDLASCQNELESAKTEIQKWKSAFQNESFVPAGKSPEPRFLIDYIQNLKSSEKSLKEQLEIAKRKEASCIVQYAKREQEMAELKSAVRDLKSQLKPASMQARRLLLDPAIHEEFSRLKNLVEEKDKKIKELQDNIAAVTFTPQSKNGKMLMAKCRTLQEENEEIGHQAAEGKIHELAIKLAMQKSQNAELRSQFEGLYKHMEELTNDVERSNETVIILQEKLEEKEKEIERVKKGLEIVSELVGDKKDEVDEIDEDAKEEIAGGE

SEQ ID NO: 14822 - protein, 346 aa, Glycine max
MASPTHFDDDFDFGGGFGGRHSGNKRSSPDYDDDDNDPFAPTEEASGVTTGMILSLRESLQNCKDTLATCQNELEAAKSEIQSWHSTLKNQPSILAGITPEPKMLINYLQALKSSEESLREQLEKAKKKEAAFIVTFAKREQEIAELKSAVRDLKVQLKPPSMQARRLLLDPAVHEEFTRLKNLVEEKDKKVKELQDNIAAVSFTPQSKMGKMLMAKCRTLQEENEEIGNQASEGKMHELGMKLALQKSQNSQLRNQFEGLQKHMEGLTNDVERSNEMVLMLQEKLEEKDRQIQRLKHEIKQKNLEDQRLKHELQQKNLEDQRLKHELQQKNLEDGNDNNAGEAAN

SEQ ID NO: 14823 - protein, 335 aa, Glycine max
MASPTHFDDDFDFGDGFGGRHSGNKRSSPDYDDDDNDPFAPTTLREDDRRGMILSLRESLQNCKETLATYQNELEAAKSEIQSWHSTLKNEPSKSAGITPEPKMLINYLQTLKFSEESLREQLEKAKKKEAAFIVTFAKREQEIAELKSAVRDLKVQLKPPSMQSRRLLLDPAVHEEFTRLKNLVEEKDKKVKELQDNIAAVSFTPQSKMGKMLMAKCRTLQEENEEIGNQASEGKMHELGMKLALQKSQNSQLRSQFEGLQKHMEGLTNDVERSNEMVLMLQEKLEDRDREIQRLKHELQQKNLEDQRLKHKLQQKNLEDGNDNNETIAGEAAN

SEQ ID NO: 14824 - protein, 299 aa, Glycine max
  unsure (1)..(299): unsure at all Xaa locations
MASPTHFDDDFDFGDGFGGRHSGNKRAYPDYDDDDNDPFAPTKVASDETTGMILSLRESLQNCKETLATYQNELEAAKSEIQSWHSTLKNEPSKSAGITPEPKMLINYLQTLKFSEESLREQLEKAKKKEAAFIVTFAKREQEIAELKSAVRDLKVQLKPPSMQSRRLLLDPAVHEEFTRLKNLVEEKDKKVKELQDNIAAVSFTPQSKMGKMLMAKCRTLQEENEEIGNQASEGKMHELGMKLALQKSQNSQLRSQFEGLQKHMEGLTNDVERSNEMVLIYREKGXLKKKTADMPFNG

SEQ ID NO: 14825 - protein, 193 aa, Glycine max
  unsure (1)..(193): unsure at all Xaa locations
MASPPHFDDDFDFGGGFSGTQSGNKRPSPDYDEDEYENDPSEEAASGVTTGMILSLRESLQNCKDMLATCQNELEAAKSEIQKWHSSFQNEPFISAGTTPAPKSVINYLQALKSSEESLREQLEKAKKKEAAFIVTFAKREQEIAELKSAVRDLKSQFNPASMQAKRLLLDPAVHEEFTRLKNLVERKDKKXX

SEQ ID NO: 14826 - protein, 153 aa, Glycine max
KRVKNLVEEKDKKVKELQDNIAAVNFTPQSKMGKMLMAKCRTLQEENEEIGNQASEGKMHELAMKLSVQKYQNAELRSQFEGLQKHMDGLTNDVDRSNEMVLMLQDKLEEKDQEIQRLKDELQPKSLVVEDGKTDPASNRNDDDETIPTEAAN

SEQ ID NO: 14827 - protein, 106 aa, Glycine max
  unsure (1)..(106): unsure at all Xaa locations
MASPTHFDDDFDFGGGFGGRHSVGSLGNKRSSPDYDDDDNDPFAPTEEASGVTTGMILSLRESLQNCKDTLATCQNELEAAKSEIQSWAXSTLKNSHPYLAGIPPX

SEQ ID NO: 14828 - protein, 124 aa, Glycine max
LFREHLQLRFLHSSSLGFLKLTMASPPHFDEDFDFGGGFSGTHSGNKRSSPDYDEDEYENDPFGHKKAKSKAEEAASGVTTGMILSLRESLQNCKDMLVTCQVCFSPLTTEVVCFCLKILNYCY

SEQ ID NO: 14829 - protein, 352 aa, Triticum aestivum
MADPPSPRLDEDDTFGRDFNASPSRNAAPARSGEKRQFGDLDDDEDDVFASKKGKTKVEESAPGAATGMILSLRESLQTCKENLESNQVELEAAKSEIQKWHSAFQNIPAVPAGTNPEPVSVVTYLNNLKSSEESLKEQLEKAKKREAAFIVTFAKREQEIAELKSAVRDLKTQLRPPSMQTRRLLLDPAIHEEFTRLKNLAEEKEKKIKELQENVAAVNFTPSSKHGKMLMAKCRTLQEENEEIGAMASEGKIHELGMKIAVLKTQNNELRNQFDGLYKHMDGLTNDVERSNEMVSILQEELEAKDVELARLKEMLCQKEATEDDTVVEEREEAANDMNASSDPQPIKVES

SEQ ID NO: 14830 - protein, 97 aa, Triticum aestivum
  unsure (1)..(97): unsure at all Xaa locations
XDHPEIATSLESAFTVTFAKRXEQDIAELKSAIKELDSQLMPPSVQTRLLSLVPTIHXEFTRLNTLAEEIYRRDSQLHENVAAVNSTPSSIHRKMLX

SEQ ID NO: 14831 - protein, 361 aa, Zea mays
MLNATSRFLSGGGGVPPGRMQGFVYRPVNFHEETVKKRARSVSNSSTNPSNSRKSEAKIKVEESAPGAATGVILSLRESLQDCKQSLASCQVELEAAKSEIEKWHSAFQSIPAVPSGTSPDPGFMVSYLSNLKSSEESLKEQLEKAKKREAAFIVTFAKREQEIAELKSAVRDLKTQLRPPSMQTRRLLLDPAIHEEFTRLKNLVEEKEKKIKELQDNVAAVNFTPSSKLGKMLMAKCRTLQEENEEIGAMASEGKIHELGMKIAVLKSQNNELRNQFDVLYKHMDGVTNDVERSNELVAILQEELEAKELEVTRLKEETLSQKEGTPDAPAPAPAPVEEGDGAGNDLKPASDPLQVKLES

SEQ ID NO: 14832 - protein, 230 aa, Zea mays
  unsure (1)..(230): unsure at all Xaa locations
MSSPWSPMSLEEEEEIQELDAEEQQDGEQPQQGDGLQQGSTAEARAQQTGNARSVANSSTKSEAKIKVEESAPGAATGVILSLRESLQDCKQSLASCQVELEAAKSEIEKWHSAFQSIPAVPSGTSPDPVSVVSYLSNLKSSEESLKEQLEKAKKREAAFIVTFAKREQEIAELKSAVRDLKTQLRPPSMQTRRLLLDPAIHEEFTRLKNLVEEKEKKNKXELQDNVAAX

SEQ ID NO: 14833 - protein, 170 aa, Zea mays
  unsure (1)..(170): unsure at all Xaa locations
XTRPEEFTRLKNLVEEKEKKIKELQDNVAAVNFTPSSKLGKMLMAKCRTLQEENEEIGAMASEGKIHELGMKIAVLKSQNNELRNQFDVLYKHMDGVTNDVERSNELVAILQEELEAKELEVTRLKEETLSQKEGTPDAPAPAPAPVEEGDGAGNDLKPASDPLQVKLES

SEQ ID NO: 14834 - protein, 185 aa, Zea mays
  unsure (1)..(185): unsure at all Xaa locations
MSSPWSPLSIEEDEEIQELGADEQQVGEQLRQGDGQQQELTAEARAQETVKKRARSASSSTNPSNSRKSEGKIKVEESAPGAATGVILSLRESLQDCKQSLASCQVELEAAKSEIEKWHSAFQSIPAVPSGTIPNPVSVVSYLSTLKSSEGSLKEQLEKAKXREAAFIVTFXKREQEIAELKSAX

SEQ ID NO: 14835 - protein, 134 aa, Zea mays
  unsure (1)..(134): unsure at all Xaa locations
XISSIQKLXXXLMAKCRTLQEENEEIGAMASEGXIHELGMKIAVLKSQNNELRNQFDVLYKHMDGVTNDVERSNELVAILQEELEAKELEVTRLKEETLSQKEGTQDAPAPAPAPVEEADGAGTSDPLQVKMES

SEQ ID NO: 14836 - protein, 116 aa, Zea mays
  unsure (1)..(116): unsure at all Xaa locations
MEFSLQDDDFGGDFSASNATRAASGSKRSFGDLEDDEDDIFGSKKVRTKAEEAAPGVATGMILSLRESLQNCKDDLASSQNELESAKAEILKWKSAFQNESFIPAGKSPXPXFLIX

SEQ ID NO: 14837 - protein, 91 aa, Zea mays
  unsure (1)..(91): unsure at all Xaa locations
XSASIGRPPPPPPGLRWARRRRQAPTRKRKKIKELQDNVVAVNFTPSNKLGKMLMAKCRTLQEENEDIGVMASKGKACHLWIRLPLEKSKP

SEQ ID NO: 14838 - protein, 229 aa, Zea mays
  unsure (1)..(229): unsure at all Xaa locations
XEFPGRPTRPVAARPEIKVLASAAAXEERGGAGGGAASACVTGGAPASGWEGCKMTNEEPLPKKVRLSETDFKVMARDELILRWKQYEAYVQALEGKYTDLNSNDVTGLRESEEKLKQQQQESARRENILVMRLATKEQEMQECTTQIQYLKQVQQPSVAQLRSTMVDPAINLFFLKMKGELEQTKDXLEQAQNELSAWKFTPDRYILPSQDFPDSPTSRKLWWDSQVL

SEQ ID NO: 14839 - protein, 536 aa, Drosophila melanogaster
MSVAAMTMDDQRPCMNSYDKMPPTKYEQNLNILNSSQNSGATGGPASPTPSGLEDHHHHHHPHPHHHHHQEQQQQQQQQQHLQQQQQQQQQQHAAAVAEAVAAAEQRQRLLEDEIENLKLEQVRMAQQCADAQRREKILMRRLANKEQEFQDYVSQIAEYKAQQAPTALALRTALLDPAVNLLFERLKKELKATKAKLEETQNELSAWKFTPDSNTGKRLMAKCRLLYQENEELGKMTSNGRLAKLETELAMQKSFSEEVKKSQSELDDFLQELDEDVEGMQSTILFLQQELKTTRDRIQTLEKENAQLKQAIKDEVVAPAAATNGGTNTTINKLETIHEDACMANNPTNPDCYNGNTNNEQIAAVPQIPLSDDGSNMNGNAARLARKRNYQEEEALPTVVVVPTPTPVGNNVQEAPPIREVTAPRTLPPKKSKLRGITTRRNSQLEEDHQPVTTPVAVPMIVDNAVAGMASEEAAAAAAAVNNSNTGIIPETGVQVGVPVEGGDPGAPAAPGRILTRRRSVRMQQNGSGAVDYST

SEQ ID NO: 14840 - protein, 539 aa, Drosophila melanogaster
MSVAAMTMDDQRPCMNSYDKMPPTKYEQNLNILNSSQNSGATGGPASPTPSGLEDHHHHHHPHPHHHHHQEQQQQQQQQQQHLQQQQQQQQQQQQHAAAVAEAVAAAEQRQRLLEDEIENLKLEQVRMAQQCADAQRREKILMRRLANKEQEFQDYVSQIAEYKAQQAPTALALRTALLDPAVNLLFERLKKELKATKAKLEETQNELSAWKFTPDSNTGKRLMAKCRLLYQENEELGKMTSNGRLAKLETELAMQKSFSEEVKKSQSELDDFLQELDEDVEGMQSTILFLQQELKTTRDRIQTLEKENAQLKQAIKDEVVAPAAATNGGTNTTINKLETIHEDACMANNPTNPDCYNGNTNNEQIAAAPQIPPSDDGSNMNGNAARLARKRNYQEEEALPTVVVVPTPTPVGNNVQEAPPIREVTAPRTLPPKKSKLRGITTRRNSQLEEDHQPVTTPVAVPMIVDNAVAGMASEEAAAAAAAVNNSNTGIIPETGVQVGVPVEGGDPGAPAAPGRILTRRRSVRMQQNGSGAVDYST

SEQ ID NO: 14841 - protein, 412 aa, Drosophila melanogaster
MAQQCADAQRREKILMRRLANKEQEFQDYVSQIAEYKAQQAPTALALRTALLDPAVNLLFERLKKELKATKAKLEETQNELSAWKFTPDSNTGKRLMAKCRLLYQENEELGKMTSNGRLAKLETELAMQKSFSEEVKKSQSELDDFLQELDEDVEGMQSTILFLQQELKTTRDRIQTLEKENAQLKQAIKDEVVAPAAATNGGTNTTINKLETIHEDACMANNPTNPDCYNGNTNNEQIAAAPQIPPSDDGSNMNGNAARLARKRNYQEEEALPTVVVVPTPTPVGNNVQEAPPIREVTAPRTLPPKKSKLRGITTRRNSQLEEDHQPVTTPVAVPMIVDNAVAGMASEEAAAAAAAVNNSNTGIIPETGVQVGVPVEGGDPGAPAAPGRILTRRRSVRMQQNGSGAVDYST

SEQ ID NO: 14842 - protein, 412 aa, Drosophila melanogaster
MAQQCADAQRREKILMRRLANKEQEFQDYVSQIAEYKAQQAPTALALRTALLDPAVNLLFERLKKELKATKAKLEETQNELSAWKFTPDSNTGKRLMAKCRLLYQENEELGKMTSNGRLAKLETELAMQKSFSEEVKKSQSELDDFLQELDEDVEGMQSTILFLQQELKTTRDRIQTLEKENAQLKQAIKDEVVAPAAATNGGTNTTINKLETIHEDACMANNPTNPDCYNGNTNNEQIAAVPQIPLSDDGSNMNGNAARLARKRNYQEEEALPTVVVVPTPTPVGNNVQEAPPIREVTAPRTLPPKKSKLRGITTRRNSQLEEDHQPVTTPVAVPMIVDNAVAGMASEEAAAAAAAVNNSNTGIIPETGVQVGVPVEGGDPGAPAAPGRILTRRRSVRMQQNGSGAVDYST

SEQ ID NO: 14843 - protein, 396 aa, Homo sapiens
MTNEEPLPKKVRLSETDFKVMARDELILRWKQYEAYVQALEGKYTDLNSNDVTGLRESEEKLKQQQQESARRENILVMRLATKEQEMQECTTQIQYLKQVQQPSVAQLRSTMVDPAINLFFLKMKGELEQTKDKLEQAQNELSAWKFTPDSQTGKKLMAKCRMLIQENQELGRQLSQGRIAQLEAELALQKKYSEELKSSQDELNDFIIQLDEEVEGMQSTILVLQQQLKETRQQLAQYQQQQSQASAPSTSRTTASEPVEQSEATSKDCSRLTNGPSNGSSSRQRTSGSGFHREGNTTEDDFPSSPGNGNKSSNSSEERTGRGGSGYVNQLSAGYESVDSPTGSENSLTHQSNDTDSSHDPQEEKAVSGKGNRTVGSRHVQNGLDSSVNVQGSVL

SEQ ID NO: 14844 - protein, 388 aa, Homo sapiens
EEPLPKKVRLSETDFKVMARDELILRWKQYEAYVQALEGKYTDLNSNDVTGLRESEEKLKQQQQESARRENILVMRLATKEQEMQECTTQIQYLKQVQQPSVAQLRSTMVDPAINLFFLKMKGELEQTKDKLEQAQNELSAWKFTPDSQTGKKLMAKCRMLIQENQELGRQLSQGRIAQLEAELALQKKYSEELKSSQDELNDFIIQLDEEVEGMQSTILVLQQQLKETRQQLAQYQQQQSQASAPSTSRTTASEPVEQSEATSKDCSRLTNGPSNGSSSRQRTSGSGFHREGNTTEDDFPSSPGNGNKSSNSSEERTGRGGSGYVNQLSAGYESVDSPTGSENSLTHQSNDTDSSHDPQEEKAVSGKGNRTVGSRHVQNGLDSSVNV

SEQ ID NO: 14845 - protein, 285 aa, Homo sapiens
MVDPAINLFFLKMKGELEQTKDKLEQAQNELSAWKFTPDSQTGKKLMAKCRMLIQENQELGRQLSQGRIAQLEAELALQKKYSEELKSSQDELNDFIIQLDEEVEGMQSTILVLQQQLKETRQQLAQYQQQQSQASAPSTSRTTASEPVEQSEATSKDCSRLTNGPSNGSSSRQRTSGSGFHREGNTTEDDFPSSPGNGNKSSNSSEERTGRGGSGYVNQLSAGYESVDSPTGSENSLTHQSNDTDSSHDPQEEKAVSGKGNRTVGSRHVQNGLDSSVNVQGSVL

SEQ ID NO: 14846 - protein, 190 aa, Mus musculus
MEKVPGDMEIERRERSEELSEAERKAVQATWARLYANCEDVGVAILVRLFVNFPSAKQYFSQFRHMEDPLEMERSPQLRKHACRVMGALNTVVENLHDPDKVSSVLALVGKAHALKHKVEPMYFKILSGVILEVIAEEFANDFPVETQKAWAKLRGLIYSHVTAAYKEVGWVQQVPNTTTPPATLPSSGP

SEQ ID NO: 14847 - protein, 165 aa, Cichorium intybus x Cichorium endivia
MSFSEEQEALVKEAWEIMKEDIPALSLYFFTQVLEIAPAAKGLFSFLKDAEEIPQDNPKLKSHAVKVFKMTCEAIQLREKGEVVVSGSTLKYLGSVHLQKGVIDAHFAVVKEGVLRTVEKGVGEKWSEEMKGAWSEAYDQLAAAIITEMKKEATEMDEEAEETQT

SEQ ID NO: 14848 - protein, 161 aa, Cichorium intybus x Cichorium endivia
MGFSEKQEALVKESWEVMKQDIPALSLYLYAMILEIAPEARGLFSFLKDTNVIPQNNPKLKSHAVKVFKMVCESAIQLREKGEVVVSGSTLKYLGSVHLEKGIVDPQFEVVKEALIRTVAKAMGEKCSEEMKSAWSEAYDELADAIKTEMKKEAAETQTHI

SEQ ID NO: 14849 - protein, 149 aa, Canavalia lineata
MGAFSEKQESLVKSSWEAFKQNVPHHSAVFYTLILEKAPAAQNMFSFLSNGVDPNNPKLKAHAEKVFKMTVDSAVQLRAKGEVVLADPTLGSVHVQKGVLDPHFLVVKEALLKTFKEAVGDKWNDELGNAWEVAYDELAAAIKKAMGSA

SEQ ID NO: 14850 - protein, 161 aa, Marchantia polymorpha
DSATHSVTFFAKIFEIAPGAKALFSFLKDSDIPFDKNPKLKAHALTVFRLTGDSACMLGEKGAIDALHPKLKELGKKHVGYGVIAAHFDVVKAALLSTIESLLPEDWPAEKKVATCGAWSQAYDELAGVMINEMQAIRDAEKAPAAEEAPEAPAAESKALP

SEQ ID NO: 14851 - protein, 180 aa, Physcomitrella patens
MASAVVNQSEAAAVRAPSKPVKTYSKENEQLVKQSWEILKKDAQRNGINFFRKVFEIAPGAKAMYSFLRDSTIPFEENPKVKNHARYVFMMTGDAAVQLGEKGAYQVLESKLQKLAATHVNAGVTDDQFEIVKEAILYAIEMGVPDLWSPELKSAWGDAYDMLAEQVKAEMHAQRSAATS

SEQ ID NO: 14852 - protein, 177 aa, Ceratodon purpureus
MAPPTVGTQAQAAPAMVPARVYSKDDEVLVKKSWDILKKDAQRNGINFFRKVFEIAPGAKSMYSFLRDSTIPFEENPKVKNHARYVFMMTGDAAVQLGEKGAYQVLDSKLQKLAATHINAGVTDDQFEIVKEAILYAIEMGVPELWSPELKSAWGDAYDMLAAAVKAEMHAQRAAAQ

SEQ ID NO: 14853 - protein, 147 aa, Lotus japonicus
MGFTAQQEALVGSSYETFKKNLPTNSVLFYTVILEIAPTAKDMFSFLKESGPKHSPQLQAHAEKVFALTRDAATQLVAKGEVTLADASLGAVHVQKAVTDPHFVVVKEALLQTVKEAVGADEWSDDLSTAWEGAYDGLATAIKKAMG

SEQ ID NO: 14854 - protein, 137 aa, Lotus japonicus
AGGAYETFKKNLPTNSVLFYTVILEIAPTAKDMFSFLKESGPKHSPQLQAHAEKVFALTRDAATQLVAKGEVTLADASLGAVHVQKAVTDPHFVVVKEALLQTVKEAVGADEWSDDLSTAWEGAYDGLATAIKKAMG

SEQ ID NO: 14855 - protein, 123 aa, Lotus japonicus
GNSVLFYTLILEKAPAAKDMFSFLKASGPTHSPQLQAHAEKVFGLTRDAAAQLLAKGEVTLADASLGAVHVQKAVADPHFAVVKEALLKTVQAAVGDKWSEELSTAWGVAYDGLAAAIKKAMS

SEQ ID NO: 14856 - protein, 123 aa, Lotus japonicus
GNSVLFYTLILEKAPAAKDMFSFLKASGPTHSPQLQAHAEKVFGLTRDAAAQLLAKGEVTLADAGLGAVHVQKAVADPHFAVVKEALLKTVQAAVGDKWSEDLSTAWGVAYDGLAAAIKKAMS

SEQ ID NO: 14857 - protein, 162 aa, Parasponia andersonii
MSSSEVNKVFTEEQEALVVKAWAVMKKNSAELGLQFFLKIFEIAPSAKNLFSYLKDSPVPLEQNPKLKPHATTVFVMTCESAVQLRKAGKVTVKESDLKRIGAIHFKTGVVNEHFEVTRFALLETIKEAVPEMWSPEMKNAWGVAYDQLVAAIKFEMKPSST

SEQ ID NO: 14858 - protein, 155 aa, Parasponia andersonii
VNKVFTEEQEALVVKAWAVMKKNSAELGLQFLKIFEIAPSAKNLFSYLKDSPVPLEQNPKLKPHATTFVMTTESAVQLRKAGKVTVKESDLKRIGAIHFKTGVVNEHFEVTRFALLETIKEAVPEMWSPEMKNAWGVAYDQLVAAIKFEMKPSST

SEQ ID NO: 14859 - protein, 161 aa, Parasponia rigida
SSSEVNKVFTEEQEALVVKAWAVMKKNSAELGLQFFLKIFEIAPSAKNLFSYLKDSPVPLEQNPKLKPHATTVFVMTCESAVQLRKAGKVTVKESDLKRIGAIHFKTGVVNEHFEVTRFALLETIKEAVPEMWSPEMKNAWGVAYDQLVAAIKFEMKPSST

SEQ ID NO: 14860 - protein, 162 aa, Parasponia rigida
MSSSEVNKVFTEEQEALVVKAWAVMKKNSAELGLQFFLKIFEIAPSAKNLFSYLKDSPVPLEQNPKLKPHATTVFVMTCESAVQLRKAGKATVKESDLKRIGAIHFKTGVVNEHFEVTRFALLETIKEAVPEMWSPEMKNAWGVAYDQLVAAIKFEMKPSST

SEQ ID NO: 14861 - protein, 161 aa, Parasponia rigida
SSSEVNKVFTEEQEALVVKAWAVMKKNSADLGLQFFLKIFEIAPSAKNLFSYLKDSPVPLEQNPKLKPHATTVFVMTCESAVQLQKAGKVTVKESDLKRIGAIHFKTGVVNEHFEVTRFALLETIKEAVPEMWSPEMKNAWGVAYDQLVVAIKFEMKPSST

SEQ ID NO: 14862 - protein, 162 aa, Trema tomentosa
MSSSEVDKVFTEEQEALVVKSWAVMKKNSAELGLKFFLKIFEIAPSAKNLFSYLKDSPIPLEQNPKLKPHAMTVFVMTCESAVQLRKAGKVTVRESNLKRLGAIHFKNGVVNEHFEVTRFALLETIKEAVPEMWSPEMKNAWGEAYDQLVAAIKSEMKPSST

SEQ ID NO: 14863 - protein, 161 aa, Trema tomentosa
MSSSEVDKVFTEEQEALVVKSWAVMKKNSAELGLKFFLKIFEIAPSAKNLFSYLKDSPIPLEQNPKLKPHAMTVFVMTCESAVQLRKAGKVTVRESNLKRLGAIHFKNGVVNEHFETRFALLETIKEAVPEMWSPEMKNAWGEAYDQLVAAIKSEMKPSST

SEQ ID NO: 14864 - protein, 160 aa, Casuarina glauca
MSTLEGRGFTEEQEALVVKSWSAMKPNAGELGLKFFLKIFEIAPSAQKLFSFLKDSNVPLERNPKLKSHAMSVFLMTCESAVQLRKAGKVTVRESSLKKLGASHFKHGVADEHFEVTKFALLETIKEAVPETWSPEMKNAWGEAYDKLVAAIKLEMKPSS

SEQ ID NO: 14865 - protein, 163 aa, Gossypium hirsutum
MATYEGKVFTEEQEALVVKSWTVMKKKTAELGLKFFLKIFEIAPSAKKLFSFLRDSNVPLEQNTKLKPHAMSVFVMTCESAVQLRKAGKVTVRESNLKKLGATHFKYGVVDEHFEVTKFALLETIKEAVPDMWSDEMKNAWGEAYDRLVAAIKIEMKACSQAA

SEQ ID NO: 14866 - protein, 159 aa, Gossypium hirsutum
MGFTEKQEGLVKESWEVLKQDIPHSSLRFFSLILEIAPGAKNMFSFLRESEEIPQNNPKLKAHAVKVFKMTCESAIQLREKGEVVVADTTLKYLGTVHVKSGVKDPHFEVVKEALLRTIEEAIGEEKWNEEMKNAWGEAYDQLAEAIKAEMKNHHDETA

SEQ ID NO: 14867 - protein, 160 aa, Arabidopsis thaliana
MESEGKIVFTEEQEALVVKSWSVMKKNSAELGLKLFIKIFEIAPTTKKMFSFLRDSPIPAEQNPKLKPHAMSVFVMCCESAVQLRKTGKVTVRETTLKRLGASHSKYGVVDEHFEVAKYALLETIKEAVPEMWSPEMKVAWGQAYDHLVAAIKAEMNLSN

SEQ ID NO: 14868 - protein, 158 aa, Arabidopsis thaliana
MGEIGFTEKQEALVKESWEILKQDIPKYSLHFFSQILEIAPAAKGLFSFLRDSDEVPHNNPKLKAHAVKVFKMTCETAIQLREEGKVVVADTTLQYLGSIHLKSGVIDPHFEVVKEALLRTLKEGLGEKYNEEVEGAWSQAYDHLALAIKTEMKQEES

SEQ ID NO: 14869 - protein, 161 aa, Brassica napus
MGEIVFTEKQEALVKESWEILKQDIPKYSLHFFSQILEIAPAAKDMFSFLRDTDEVPHNNPKLKAHAVKVFKMTCETAIQLREKGKVVVADTTLQYLGSVHFKSGVLDPHFEVVKEALVRTLKEGLGEKYNEEVEGAWSKAYDHLALAIKAEMKQEDSQKP

SEQ ID NO: 14870 - protein, 162 aa, Glycine max
  unsure (1)..(162): unsure at all Xaa locations
MSAAEGAVVFSEEKEALVLKSWAIMKKDSANLGLRFFLKIFEIAPSARQMFPFLRDSDVPLETNPKLKTHAVSVFVMTCEAAAQLRKAGKITVRETTLKRLGGTHLKYGVADGHFEVTRFALLETIKEXLPADMWGPXXRNXWGEAYDQLXAAIKQXMKPFE

SEQ ID NO: 14871 - protein, 161 aa, Glycine max
MTTTLERGFSEEQEALVVKSWNVMKKNSGELGLKFFLKIFEIAPSAQKLFSFLRDSTVPLEQNPKLKPHAVSVFVMTCDSAVQLRKAGKVTVRESNLKKLGATHFRTGVANEHFEVTKFALLETIKEAVPEMWSPAMKNAWGEAYDQLVDAIKSEMKPPSS

SEQ ID NO: 14872 - protein, 161 aa, Glycine max; identical to SEQ ID NO: 14871

SEQ ID NO: 14873 - protein, 161 aa, Glycine max; identical to SEQ ID NO: 14871

SEQ ID NO: 14874 - protein, 172 aa, Glycine max
  unsure (1)..(172): unsure at all Xaa locations
RVENMEGKGFTEEQEALVVKSWNEMKKNSQELGLKFFKKILEIAPAAQQLFSFLKDSTVPLEENPKLKPHAMAVFVMTCESAVQLRKAGKVTVRESNLKRLGATHFKAGVAAEHFEVTKLALLETIKEAVPEMWSPAMKNAWEEAHDQLAEAIKSEMKPSDXTLVVAFSQIE

SEQ ID NO: 14875 - protein, 133 aa, Glycine max
  unsure (1)..(133): unsure at all Xaa locations
RVENMEGKGFTEEQEALVVKSWNEMKKNSQELGLKFFKKILEIAPAAQQLFSFLKDSTVPLEENPKLKPHAMAVFVMVTKLALLETIKEAVPEMWSPAMKNAWEEAHDQLAEAIKSEMKPSDXTLVVAFSQIE

SEQ ID NO: 14876 - protein, 151 aa, Lupinus luteus
LTESQAALVKSSWEEFNANIPKHTHRFFILVLEIAPAAKDLFSFLKGTSEVPQNNPELQAHAGKVFKLVYEAAIQLQVTGVVVTDATLKNLGSVHVSKGVADAHFPVVKEAILKTIKEVVGAKWSEELNSAWTIAYDELAIVIKKEMNDAA

SEQ ID NO: 14877 - protein, 153 aa, Lupinus luteus
GALTESQAALVKSSWEEFNANIPKHTHRFFILVLEIAPAAKDLFSFLKGTSEVPQNNPELQAHAGKVFKLVYEAAIQLQVTGVVVTDATLKNLGSVHVSKGVADAHFPVVKEAILKTIKEVVGAKWSEELNSAWTIAYDELAIVIKKEMNDAA

SEQ ID NO: 14878 - protein, 153 aa, Lupinus luteus
GALTESQAALVKSSWEEFNANIPKHTHRFFILVLEIAPAAKDLFSFLKGTSEVPQNNPELQAHAGKVFKLVYEAAIQLEVTGVVVTDATLKNLGSVHVSKGVADAHFPVVKEAILKTIKEVVGAKWSEELNSAWTIAYDELAIVIKKEMDDAA

SEQ ID NO: 14879 - protein, 153 aa, Lupinus luteus
GALTESQAALVKSSWEEFNANIPKHTHRFFILVLEIAPAAKDLFSFLKGTSEVPQNNPELQAHAGKVFKLVYEAAIQLEVTGVVVSDATLKNLGSVHVSKGVADAHFPVVKEAILKTIKEVVGAKWSEELNSAWTIAYDELAIVIKKEMDDAA

SEQ ID NO: 14880 - protein, 154 aa, Lupinus luteus
MGVLTDVQVALVKSSFEEFNANIPKNTHRFFTLVLEIAPGAKDLFSFLKGSSEVPQNNPDLQAHAGKVFKLTYEAAIQLQVNGAVASDATLKSLGSVHVSKGVVDAHFPVVKEAILKTIKEVVGDKWSEELNTAWTIAYDELAIIIKKEMKDAA

SEQ ID NO: 14881 - protein, 153 aa, Lupinus luteus
GVLTDVQVALVKSSFEEFNANIPKNTHRFFTLVLEIAPGAKDLFSFLKGSSEVPQNNPDLQAHAGKVFKLTYEAAIQLEVNGAVASDATLKSLGSVHVSKGVVDAHFPVVKEAILKTIKEVVGDKWSEELNTAWTIAYDELAIIIKKEMKDAA

SEQ ID NO: 14882 - protein, 154 aa, Lupinus luteus
MGVLTDVQVALVKSSFEEFNANIPKNTHRFFTLVLEIAPGAKDLFSFLKGSSEVPQNNPDLQAHAGKVFKLTYEAAIQLQVNGAVASDATLKSLGSVHVSKGVVDAHFPVVKEAILKTIKGVVGDKWSEELNTAWTIAYDELAIIIKKEMKDAA

SEQ ID NO: 14883 - protein, 94 aa, Lupinus luteus
ASAHAGKVFKLVYEAAIQLQVTGVVVTDATLKNLGSVHVSKGVADAHFPVVKEAILKTIKEVVGAKWSEELNSAWTIAYDELAIVIKKEMNDAA

SEQ ID NO: 14884 - protein, 160 aa, Medicago sativa
MGTLDTKGFTEEQEALVVKSWNAMKKNSAELGLKLFLKIFEIAPSAQKLFSFLKDSKVPLEQNTKLKPHAMSVFLMTCESAVQLRKSGKVTVRESSLKKLGANHFKYGVVDEHFEVTKFALLETIKEAVPEMWSPAMKNAWGEAYDQLVNAIKSEMKPSS

SEQ ID NO: 14885 - protein, 146 aa, Medicago truncatula
MGFTEKQEALVNSSWELFKQNPGNSVLFYTIILEKAPAAKGMFSFLKDTAGVQDSPKLQSHAEKVFGMVRDSAVQLRATGGVVLGDATLGAIHIQKGVVDPHFVVVKEALLKTIKEVSGDKWSEELSTAWEVAYDALAAAIKKAMG

SEQ ID NO: 14886 - protein, 147 aa, Medicago truncatula
MSFTDKQEALVNSSYEAFKQNLSGYSVFFYTVILEKAPAAKGLFSFLKDSAGVQDSPQLQAHAEKVFGLVRDSASQLRATGGVVLGDAALGAIHIQKGVVDPHFVVVKEALLKTIKEAAGDKWSEELSTAWEVAYDALATEIKKAMS

SEQ ID NO: 14887 - protein, 146 aa, Phaseolus vulgaris
MGAFTEKQEALVNSSWEAFKGNIPQYSVVFYTSILEKAPAAKNLFSFLANGVDPTNPKLTAHAESLFGLVRDSAAQLRANGAVVADAALGSIHSQKGVNDSQFLVVKEALLKTLKEAVGDKWTDELSTALELAYDELAAAIKKAYA

SEQ ID NO: 14888 - protein, 145 aa, Phaseolus vulgaris
GAFTEKQEALVNSSWEAFKGNIPQYSVVFYTSILEKAPAAKNLFSFLANGVDPTNPKLTAHAESLFGLVRDSAAQLRANGAVVADAALGSIHSQKGVSNDQFLVVKEALLKTLKQAVGDKWTDQLSTALELAYDELAAAIKKAYA

SEQ ID NO: 14889 - protein, 146 aa, Phaseolus vulgaris
MGAFTEKQEALVNSSWEAFKGNIPQYSVVFYTSILEKAPAAKNLFSFLANGVDPTNPKLTAHAESLFGLVRDSAAQLRANGAVVADAALGSIHSQKALNDSQFLVVKEALLKTLKEAVGDKWTDELSTALELAYDEFAAGIKKAYA

SEQ ID NO: 14890 - protein, 146 aa, Pisum sativum
MGFTEKQEALVNSSWELFKQNPSYSVLFYTIILKKAPAAKGMFSFLKDSAEVVDSPKLQAHAEKVFGMVHDSAIQLRASGEVVVGDATLGAIHIQKGVVDPHFVVVKEALLETIKEASGEKWSEELSTAWEVAYEGLASAIKKAMN

SEQ ID NO: 14891 - protein, 146 aa, Pisum sativum
MGFTEKQEALVNSSWELFKQNPSYSVLFYTIILKKAPAAKGMFSFLKDSAEVVDSPKLQAHAEKVFGMVHDSAIQLRASGEVVLGDATLGAIHIQKGVVDPHFVVVKEALLETIKEASGEKWSEELSTAWEVAYEGLASAIKKAMN

SEQ ID NO: 14892 - protein, 147 aa, Pisum sativum
MGFTDKQEALVNSSWESFKQNLSGNSILFYTIILEKAPAAKGLFSFLKDTAGVEDSPKLQAHAEQVFGLVRDSAAQLRTKGEVVLGNATLGAIHVQRGVTDPHFVVVKEALLQTIKKASGNNWSEELNTAWEVAYDGLATAIKKAMT

SEQ ID NO: 14893 - protein, 146 aa, Pisum sativum
MGFTEKQEALVNSSWELFKQNPSYSVLFYTIILKKAPAAKGMFSFLKDSAEVVDSPKLQAHAEKVFGMVHDSAIQLRASGEVVLGDVTLGAIHIQKGVIDPHFVVVKEALLDTIKEASGEKWSEELSTAWEIAYEGLASAIKKAMN

SEQ ID NO: 14894 - protein, 146 aa, Pisum sativum
MGFTDKQEALVNSSWELFKQNPGYSVLFYNIILKKAPATKGMFSFLKDSAGVVDSPKLQAHAEKVFGMVHDSAVQLRVSGEVVLGDATLGAIHIQKGVVDSHFVVVKEALLETIKEASGEKWSEELSTAWEVAYEGLASAIKKAMS

SEQ ID NO: 14895 - protein, 147 aa, Pisum sativum
GFTDKQEALVNSSSEFKQNLPGYSILFYTIVLEKAPAAKGLFSFLKDTAGVEDSPKLQAHAEQVFGLVRDSAAQLRTKGEVVLGNATLGAIHVQKGVTNPHFVVVKEALLQTIKKASGNNWSEELNTAWEVAYDGLATAIKKAMKTA

SEQ ID NO: 14896 - protein, 145 aa, Psophocarpus tetragonolobus
MGGFTEKQEALVNSSYEAFKANVPQYSVVFYTSILEKAPAAKDLFPFLANGVDPTNPKLIGHAEKLFGLVHDSAAQLRAKGAVVADAALGSLHAQKGVTDPQFVVVKEALLKTVKEAVGDKWSDELSNAWEVAYNELAAALKKAF

SEQ ID NO: 14897 - protein, 148 aa, Sesbania rostrata
GAFTESQEALVTSSYETFKQNASDLSVLFYTFILEKAPGAKNLFSFLKDSDGVPKDNPNLKAHAAKVFELVVDSAVQLRTKGAVVIADANLGPVHVQKGVTDAHFVVVKEALLKTVKEATGAKWSDELSNAWEVAYDELAAAIKKAMG

SEQ ID NO: 14898 - protein, 148 aa, Sesbania rostrata
MGFTEKQEALVNASYEAFKQNLPGNSVLFYSFILEKAPAAKGMFSFLKDSDGVPQNNPSLQAHAEKVFGLVRDSAAQLRATGVVVLADASLGSVHVQKGVLDPHFVVVKEALLKTLKEAAGATWSDEVSNAWEVAYDGLSAAIKKAMS

SEQ ID NO: 14899 - protein, 147 aa, Sesbania rostrata
GFTDKQEALVNASYEAFKKNLPGHSVLFYSFILEKEPAAKGLFSFLKDSDGVPQNNPSLQAHAEKVFGLVHDAAAQLRATGVVVLADASLGSVHVQKGVTDPHFVVVKEALLKTLKEAAGATWSDEVSIAWEVAYDGLAAAIKKAMS

SEQ ID NO: 14900 - protein, 148 aa, Sesbania rostrata
MGFTEKQEALVNASYEAFKQNLPGNSVLFYSFILEKAPAAKGMFSFLKDFDEVPQNNPSLQAHAEKVFGLVRDSAAQLRATGVVVLADASLGSVHVQKGVLDPHFVVVKEALLKTLKEAGGATWSDEVSNAWEVAYDELSAAIKKAMS

SEQ ID NO: 14901 - protein, 154 aa, Sesbania rostrata
QKKTKNMGFTDKQEALVNTSYEAFKKNLPGHSVLFYSFILEKEPAAKGLFSFLKDSDGVPQNNPSLQAHAEKVFGLVHDAAAQLRATGVVVLADASLGSVHVQKGVTDPHFVVVKEALLKTLKEAAGATWSDEVSIAWEVAYDGLAAAIKKAMS

SEQ ID NO: 14902 - protein, 146 aa, Vicia faba
MGFTEKQEALVNSSWELFKQNPGNSVLFYTIILKKAPTAKGMFSFLKDSAGVVDSPKLQAHAEKVFGMVRDSAVQLRASGEIVLGDATLGAIHIQKGVLDPHFVVVKEALLETIKEISGDKWSEELSAAWEVAYEGLAVAIKKAMS

SEQ ID NO: 14903 - protein, 147 aa, Vicia faba
MGFTDKQEALVNSSWESFKQNLSGNSIFFYTIILEKAPAAKGLFSFLKDTAGVEDSPKLQAHAEQVFGLVRDSAAQLRAKGEVVLGNATLGAIHVQKGVTDPHFVVVKEALLQTIKKASGSNWSVELSTAWEVAYDGLASAIKKAMN

SEQ ID NO: 14904 - protein, 146 aa, Vicia faba
MGFTQQQEALVNSSWESFKQNPSYSVLFYTIILEKAPAAKGMFSFLKDSAGVVDSPKLQAHAEQVFGMVRDSAIQLQATGEVVLKNGSLGAIHIQKGVVDPHFVVVKEALLKTIKEASGDKWSEELSIAWEVAYDGLATAIKKAMS

SEQ ID NO: 14905 - protein, 143 aa, Vicia faba
GFTEKQEALVNSSSQLFKQNPSNYSVLFYTIILQKAPTAKAMFSFLKDSAGVVDSPKLGAHAEKVFGMVRDSAVQLRATGEVVLDGKDGSIHIQKGVLDPHFVVVKEALLKTIKEASGDKWSEELSAAWEVAYDGLATAIKAA

SEQ ID NO: 14906 - protein, 148 aa, Vicia faba
MEFTLRQEALVNSSWEAFNQNLPLFSVLFYTFILEKAPIAKNMFSVLKDANEIPLANPSINAHTEMVFEMVRDAAAQLQTTGQVVLGDTTLGVVHTQKRVDGLHFMVVKEALLKTIKEAVGDKWSEELSNAWEIAYDGLAVAIMKEMS

SEQ ID NO: 14907 - protein, 107 aa, Vicia faba
KGMFSFLKDSAGVVDSPKLQAHAEQVFGMVRDSAIQIRQTGDVFLKDGSLGAIHIQKGVVDPHFVVVKEALLKTIKEASGDKWSEELSIAWEVAYDGLATAIKKAMS

SEQ ID NO: 14908 - protein, 83 aa, Vicia faba
QVFGMVRDSAIQLRTTGDIVLKDGTLGAIHIQKGVVDPHFVVVKEALLKTIKEASGDKWSEELSIAWEVAYDGLATAIKKAMS

SEQ ID NO: 14909 - protein, 145 aa, Vigna unguiculata
MVAFSDKQEGLVNGAYEAFKADIPKYSVVFYTTILEKAPAAKNLFSFLANGVDATNPKLTGHAEKLFGLVRDSAAQLRASGGVVADAALGAVHSQKAVNDAQFVVVKEALVKTLKEAVGDKWSDELGTAVELAYDELAAAIKKAY

SEQ ID NO: 14910 - protein, 145 aa, Vigna unguiculata
MVAFSDKQEALVNGAYEAFKANIPKYSVVFYTTILEKAPAAKNLFSFLANGVDATNPKLTGHAEKLFGLVRDSAAQLRASGGVVADAALGAVHSQKAVNDAQFVVVKEALVKTLKEAVGDKWSDELGTAVELAYDELAAAIKKAY

SEQ ID NO: 14911 - protein, 152 aa, Lycopersicon esculentum
MSSFSEEQEALVVKSWGSMKKDAGEWGLKFFLKIFEIAPSAKKMFSFLKDSNVPLDQNPKLKIHAKSVLVMTCEAAVQLRKAGKVVVRDSTLKKIGATHFKYGVVDEHFEVTKYALLETIKEASQEMWSVEMKNAWGEAYDQLVSAIKTEMK

SEQ ID NO: 14912 - protein, 152 aa, Solanum tuberosum
MSSFSEEQEALVVKSWGSMKKDAGEWGLKFFLKIFEIAPSAKKMFSFLKDSNVPLDQNPKLKVHAKSILVMTCEAAVQLRKAGKVVVRDSTLKKIGATHFKYGVADEHFEVTKYALLETIKEASPEMWSVEMKNAWGEAYDQLVSAIKTEMK

SEQ ID NO: 14913 - protein, 162 aa, Hordeum vulgare
MSAAEGAVVFSEEKEALVLKSWAIMKKDSANLGLRFFLKIFEIAPSARQMFPFLRDSDVPLETNPKLKTHAVSVFVMTCEAAAQLRKAGKITVRETTLKRLGGTHLKYGVADGHFEVTRFALLETIKEALPADMWGPEMRNAWGEAYDQLVAAIKQEMKPAE

SEQ ID NO: 14914 - protein, 290 aa, Oryza sativa
MGSRLVRKQTARPPLVAVVPHPPRRPSSAIRIGGSETINETYLHESTLKPPLVFARPAAHVIEARRERTLQKHAACLPCAGTATRSRSCIRHTDFRLEWISAVVSKSICCSFPPRNQIEAAMALVEGNNGVSGGAVSFSEEQEALVLKSWAIMKKDSANIGLRFFLKIFEVAPSASQMFSFLRNSDVPLEKNPKLKTHAMSVFVMTCEAAAQLRKAGKVTVRDTTLKRLGATHFKYGVGDAHFEVTRFALLETIKEAVPVDMWSPAMKSAWSEAYNQLVAAIKQEMKPAE

SEQ ID NO: 14915 - protein, 169 aa, Oryza sativa
MALVEGNNGVSGGAVSFSEEQEALVLKSWAIMKKDSANIGLRFFLKIFEVAPSASQMFSFLRNSDVPLEKNPKLKTHAMSVFVMTCEAAAQLRKAGKVTVRDTTLKRLGATHFKYGVGDAHFEVTRFALLETIKEAVPVDMWSPAMKSAWSEAYNQLVAAIKQEMKPAE

SEQ ID NO: 14916 - protein, 169 aa, Oryza sativa; identical to SEQ ID NO: 14915

SEQ ID NO: 14917 - protein, 166 aa, Oryza sativa
MALVEDNNAVAVSFSEEQEALVLKSWAILKKDSANIALRFFLKIFEVAPSASQMFSFLRNSDVPLEKNPKLKTHAMSVFVMTCEAAAQLRKAGKVTVRDTTLKRLGATHLKYGVGDAHFEVVKFALLDTIKEEVPADMWSPAMKSAWSEAYDHLVAAIKQEMKPAE

SEQ ID NO: 14918 - protein, 166 aa, Oryza sativa; identical to SEQ ID NO: 14917

SEQ ID NO: 14919 - protein, 167 aa, Oryza sativa
MAFASASNGAVRFTEEQEALVLKSWAIMKDDSANIGHRFFLKIFEVAPSARHLFSFLRNSDVPLEKNPNLKKHAMAVFVMTCEAAAQLRKTGRVTVRDTTIKRLGSTHFKNGVSDTHFEVARFALLETIKDGIPASMWSPEMKNAWGEAYEHLVAAIKEGMKPVALL

SEQ ID NO: 14920 - protein, 167 aa, Oryza sativa; identical to SEQ ID NO: 14919

SEQ ID NO: 14921 - protein, 169 aa, Oryza sativa
MAANGSNVVSRGAVRFTEEQEALVLKSWAIMKNDSAHIGHRFFLKIFEVAPSARQLFSFLRNSDVPLEKNPKLKIHAMAVFVMTCEAAAQLRKTGRVTVRDTTIKRLGSTHFKNGVSDAHFEVAKFALLETIKEAVPASMWSPAMKGAWGEAYDHLVAAIKQGMKPAAA

SEQ ID NO: 14922 - protein, 169 aa, Oryza sativa; identical to SEQ ID NO: 14921

SEQ ID NO: 14923 - protein, 278 aa, Oryza sativa
MLPSCSFPLSQLHSGTQFSRLAWTDIRHIQVVFLLPSVQLEWTWSATTMRLARRHDRQPMAAPIPGPIDQYKSASHCCSLYSDSIASIQQLSCTELDRVDLAAIESITCEIKAGTCASNGAVRFTEEQEALVLKSWAIMKDDSANIGHRFFLKIFEVAPSARHLFSFLRNSDVPLEKNPNLKKHAMAVFVMTCEAAAQLRKTGRVTVRDTTIKRLGSTHFKNGVSDTHFEVARFALLETIKDGIPASMWSPEMKNAWGEAYEHLVAAIKEGMKPVALL

SEQ ID NO: 14924 - protein, 169 aa, Oryza sativa
  unsure (1)..(169): unsure at all Xaa locations
MALVEGNNGVSGGAVXSAXEQEALVLKSWAIMKKDSANIGLRFFLKIFEVAPSEARMFSFLRNSDVPLEKNPKLKTDPGRAILQTCEAAAQXRKAGKVTVRDTTLKRLGATHLKYGVGDAHFEVVKFALLDTIKEEVPADMWSPAMKSAWSEAYDHLVAAIKQEMKPAE

SEQ ID NO: 14925 - protein, 79 aa, Oryza sativa
  unsure (1)..(79): unsure at all Xaa locations
MALVEDNNAVAVSFSEEQEALVLKSWAILKKDSANIALRFFLKIFEVAPSGXAQIFSXFLXNPTVPFEKXPKVXKTHGX

SEQ ID NO: 14926 - protein, 183 aa, Citrus unshiu
MRDGSLKGLFCTAPKSIRSVRRNSGSFNVTAFTEEQEALVVKSWNAMKKNSGELALKFFLRIFEIAPSAKKLFTFLKDSDIPVEQNPKLKPHATTVFVMTCESAVQLRKAGKVTVRESNLKDLGATHFKYGVADEHFEVTKYALLEPIKEPVPEMWSPELKNAWAEAYDQLAAAIKIEMKPPS

SEQ ID NO: 14927 - protein, 162 aa, Trema orientalis
MSSSEVDKVFTEEQEALVVKSWAVMKKNSAELGLKFFLKIFEIAPSANNLFSYLKDSPIPLEQNPKLKPHAMTVFVMTCESAVQFRKAGKVTVRESNLKRIGAIHFKNGVVHEHFEVTRFALLETIKEAVPEMWSPEMKNAWGEAYDQLVAAIKFEVKPSST

SEQ ID NO: 14928 - protein, 161 aa, Trema orientalis
MSSSEVDKVFTEEQEALVVKSWAVMKKNSAELGLKFFLKIFEIAPSANNLFSYLKDSPIPLEQNPKLKPHAMTVFVMTCESAVQFRKAGKVTVRESNLKRIGAIHFKNGVVHEHFETRFALLETIKEAVPEMWSPEMKNAWGEAYDQLVAAIKFEVKPSST

SEQ ID NO: 14929 - protein, 165 aa, Zea mays subsp. parviglumis; identical to SEQ ID NO: 373

SEQ ID NO: 14930 - protein, 161 aa, Trema virgata
MSSSEVDKVFTEEQEALVVKSWAVMKKNSAELGLKFFLKIFEIAPSAKNLFSYLKDSPIPLEQNPKLKPHAMTVFVMTCESAVQLRKAGKVTVRESNLKRLGAIHFKNGVVNEHFETRFALLETIKEAVPEMWSAEMKNAWGEAYDQLVAAIKFEVKPSST

SEQ ID NO: 14931 - protein, 161 aa, Trema virgata
MSSSEVDKVFTEELEALVVKSWAVMKKNSAELGLKFFLKIFEIAPSAKNLFSYLKDSPIPLEQNPKLKPHAMTVFVMTCESAVQLRKAGKVTVRESNLKRLGAIHFKNGVVNEHFETRFALLETIKEAVPEMWSAEMKNAWGEAYDQLVAAIKFEVKPSST

SEQ ID NO: 14932 - protein, 161 aa, Trema virgata
MSSSEVDKVFTEEQEALVVKSWAVMKKNSAELGLKFFLKIFEIAPSAKNLFSYLKDSPIPLEQNPKLKPHAMTVFVMTCESAVQLRKAGKVTVRESNLKRLGAIHFKNGVVNEHFETRFALLETIKEAVPEMWSAEMKNAWGEAYDLLVAAIKFEVKPSST

SEQ ID NO: 14933 - protein, 423 aa, Arabidopsis thaliana
MDKEKSPAPPPSGGLPPPSGRYSAFSPNGSSFAMKAESSFPPLTPSGSNSSDANRFSHDISRMPDNPPKNLGHRRAHSEILTLPDDLSFDSDLGVVGAADGPSFSDDTDEDLLYMYLDMEKFNSSATSTSQMGEPSEPTWRNELASTSNLQSTPGSSSERPRIRHQHSQSMDGSTTIKPEMLMSGNEDVSGVDSKKAISAAKLSELALIDPKRAKRIWANRQSAARSKERKMRYIAELERKVQTLQTEATSLSAQLTLLQRDTNGLGVENNELKLRVQTMEQQVHLQDALNDALKEEVQHLKVLTGQGPSNGTSMNYGSFGSNQQFYPNNQSMHTILAAQQLQQLQIQSQKQQQQQQQHQQQQQQQQQQFHFQQQQLYQLQQQQRLQQQEQQSGASELRRPMPSPGQKESVTSPDRETPLTKD

SEQ ID NO: 14934 - protein, 423 aa, Arabidopsis thaliana
MDKEKSPAPPPSGGLPPPSGRYSAFSPNGSSFAMKAESSFPPLTPSGSNSSDANRFSHDISRMPDNPPKNLGHRRAHSEILTLPDDLSFDSDLGVVGAADGPSFSDDTDEDLLYMYLDMEKFNSSATSTSQMGEPSEPTWRNELASTSNLQSTPGSSSERPRIRHQHSQSMDGSTTIKPEMLMSGNEDVSGVDSKKAISAAKLSELALIDPKRAKRIWANSQSAARSKERKMRYIAELERKVQTLQTEATSLSAQLTLLQRDTNGLGVENNELKLRVQTMEQQVHLQDALNDALKEEVQHLKVLTGQGPSNGTSMNYGSFGSNQQFYPNNQSMHTILAAQQLQQLQIQSQKQQQQQQQHQQQQQQQQQQFHFQQQQLYQLQQQQRLQQQEQQSGASELRRPMPSPGQKESVTSPDRETPLTKD

SEQ ID NO: 14935 - protein, 398 aa, Arabidopsis thaliana
MDKEKSPAPPCGGLPPPSPSGRCSAFSEAGPIGHGSDANRMSHDISRMLDNPPKKIGHRRAHSEILTLPDDLSFDSDLGVVGNAADGASFSDETEEDLLSMYLDMDKFNSSATSSAQVGEPSGTAWKNETMMQTGTGSTSNPQNTVNSLGERPRIRHQHSQSMDGSMNINEMLMSGNEDDSAIDAKKSMSATKLAELALIDPKRAKRIWANRQSAARSKERKTRYIFELERKVQTLQTEATTLSAQLTLLQRDTNGLTVENNELKLRLQTMEQQVHLQDELNEALKEEIQHLKVLTGQVAPSALNYGSFGSNQQQFYSNNQSMQTILAAKQFQQLQIHSQKQQQQQQQQQQQHQQQQQQQQQYQFQQQQMQQLMQQRLQQQEQQNGVRLKPSQAQKEN

SEQ ID NO: 14936 - protein, 154 aa, Cicer arietinum
IAPTTRHYRSVSMDSFIGKLNFNDESSKLPPSPGLMSPGNSVDGNSAAAFSLEFGNGEFSGPELKKIMANEKLAEIAMADPKRAKRILANRQSAARSKERKMRYISELEHKVQTLQTEATTLSAQLTLLQRDSVGLTNQNSELKFRLQSMEQQA

SEQ ID NO: 14937 - protein, 469 aa, Oryza sativa (japonica cultivar-group)
MAESRIFGGLKPTKSRLLGPTIRGPPPNGAATHAPRRILFSFSPESQWLGQSSTRACLPPLRSPCLPAPSAASPAYPRLASSAASASAPARLRSRITLPGGRSPVPPMDPAASAAESSSLSSRDVAAMPDSPPRRAARHRRAQSEILLGAALPDDIAFDADLGVVGEVGGGGGDDYEEEEEDDEEEEMEGAGGSRMFEMFLEAGGKLETPEPAAPLPPPPARPRHQHSMSMDGSTSLASSAAGVAGRMGADAKKAISDAKLAELALVDPKRAKRILANRQSAARSKERKMRYIAELERKVQTLQTEATTLSAQLSMLQRDTTGLTSENSDLKIRVQTMEQQVRLQDALNDRLRDEIQQLKVATGQVNANCGKVGNFGLSSFGGANPQGYQRSHIQSLLAAQQLQQLQIHSQHQQQQMHLQQHHHLSTVQQQLLQEGLPLPGDLKMKGIVAASHAQNAGASESHALRSEP

SEQ ID NO: 14938 - protein, 200 aa, Oryza sativa (japonica cultivar-group)
MDGESSLFEGESAPPDYAKKAMPADRLAELALLDPKRAKRILANRQSAARSKERKIKYTGELERKVQTLQTEATTLSTQLTLLQRDTSGLTAENRELKLRLQSMEEQAKLRDALNDALREEVQRLKIAAGQVPNMNGNSFNGGLQQQQQQQMPTYFSQQQQMHYLSGHQGRHHHPNNPHNSLNGGQSMSGQTLNDSMDFM

SEQ ID NO: 14939 - protein, 444 aa, Lycopersicon esculentum
MAQSNSKPPMSSQNFGVGAVSHVRSLSQSSIFSNSCLPPLSPFPPSEPGMVSGHSSLKDISMEEADVNSQGVGVVSSFTRDGLPPRKGHRRSNSDVPLGFSAMIQSSPQLMPISGQKVLGRAVSLGDSNGKIDERKPKGEVTDELLFSYMNLENIETLNGSGTKDRDKDSIVSGTKVTGSESSNNEAESVMKGNNVSIQPTNLREGTKRSADANIAPAARHFRSLSMDSAIGNFHYGDESPNLPTSLMMRSGQLSPSNSGNESSSKHNLDFGNSEFSEAEMKKIMADERLAEIAVLDPKRAKRILANRLSAARSKERKTRYISELEHKVQKLQTETTTLSTQVTILQKNFVEISSLNSELKFRIQAMEQQAQLRDALHEALTAEVQRLKLAAGEHREEGRLPNNMTQQTPVKHNIFQMQRQQPSQMQQLSVGKASAASATPASA

SEQ ID NO: 14940 - protein, 444 aa, Lycopersicon esculentum
MAQSNSKPPMSSQNFGVGAVSHVRSLSQSSIFSNSCLPPLSPFPPSEPGMVSGRSSLKDISMEEADVNSQGVGVVSSFTRDGLPPRKGHRRSNSDVPLGFSAMIQSSPQLMPISGQKVLGRAVSLGDSNGKIDERKPKGEVTDELLFSYMNLENIETLNGSGTKDRDKDSIVSGTKVTGSESSNNEAESVMKGNNVSIQPTNLREGTKRSADANIAPAARHFRSLSMDSAIGNFHYGDESPNLPTSLMMRSGQLSPSNSGNESSSKHNLDFGNSEFSEAEMKKIMADERLAEIAVLDPKRAKRILANRLSAARSKERKTRYISELEHKVQKLQTETTTLSTQVTILQKNFVEISSLNSELKFRIQAMEQQAQLRDALHEALTAEVQRLKLAAGEHREEGRLPNNMTQQTPVKHNIFQMQRQQPSQMQQLSVGKASAASATPASA

SEQ ID NO: 14941 - protein, 435 aa, Lycopersicon esculentum
MSSQNFGVGAVSHVRSLSQSSIFSNSCLPPLSPFPPSEPGMVSGRSSLKDISMEEADVNSQGVGVVSSFTRDGLPPRKGHRRSNSDVPLGFSAMIQSSPQLMPISGQKVLGRAVSLGDSNGKIDERKPKGEVTDELLFSYMNLENIETLNGSGTKDRDKDSIVSGTKVTGSESSNNEAESVMKGNNVSIQPTNLREGTKRSADANIAPAARHFRSLSMDSAIGNFHYGDESPNLPTSLMMRSGQLSPSNSGNESSSKHNLDFGNSEFSEAEMKKIMADERLAEIAVLDPKRAKRILANRLSAARSKERKTRYISELEHKVQKLQTETTTLSTQVTILQKNFVEISSLNSELKFRIQAMEQQAQLRDALHEALTAEVQRLKLAAGEHREEGRLPNNMTQQTPVKHNIFQMQRQQPSQMQQLSVGKASAASATPASA

SEQ ID NO: 14942 - protein, 368 aa, Oryza sativa
MNREKSPIPGDGGDGLPPQATRRAGPPAAAAAAEYDISRMPDFPTRNPGHRRAHSEILSLPEDLDLCAAGGGDGPSLSDENDEELFSMFLDVEKLNSTCGASSEAEAESSSAAAHGARPKHQHSLSMDESMSIKAEELVGASPGTEGMSSAEAKKAVSAVKLAELALVDPKRAKRIWANRQSAARSKERKMRYIAELERKVQTLQTEATTLSAQLALLQRDTSGLTTENSELKLRLQTMEQQVHLQDALNDTLKSEVQRLKVATGQMANGGGMMMNFGGMPHQFGGNQQMFQNNQAMQSMLAAHQLQQLQLHPQAQQQQVLHPQHQQQQPLHPLQAQQLQQAARDLKMKSPMGGQSQWGDGKSGSSGN

SEQ ID NO: 14943 - protein, 368 aa, Oryza sativa; identical to SEQ ID NO: 14942

SEQ ID NO: 14944 - protein, 460 aa, Oryza sativa
  unsure (1)..(460): unsure at all Xaa locations
MAESRIFGGLKPTKSRLLGPTIRGPPPNGAATHAPRRILFSFSPESQWLGQSSTRACLPPLRSPCLPAPSAASPAYPRLASSAASASAPARLRSRITLPGGRSPVPPMDPAASAAESSSLSSRDVAAMPDSPPRRAGHRRAQSEILLGAALPDDIAFVGGGGGDDYEEEEEDDEEEEMEGAGGSXDVRDVPRGRGQARDPGARGAAAAAAXARPRHQHSMSMDGSTSLASSAAGVAGRMGADAKKAISDAKLAELALVDPKRAKRILANRQSAARSKERKMRYIAELERKVQTLQTEATTLSAQLSMLQRDTTGLTSENSDLKIRVQTMEQQVRLQDALNDRLRDEIQQLKVATGQVNANCGKVGNFGLSSFGGANPQGYQRSHIQSLLAAQQLQQLQIHSQHQQQQMHLQQHHHLSTVQQQLLQEGLPLPGDLKMKGIVAASHAQNAGASESHALRSEP

SEQ ID NO: 14945 - protein, 368 aa, Oryza sativa
  unsure (1)..(368): unsure at all Xaa locations
PARLRSRITLPGGRSPVPPMDPAASAAESSSLSSRDVAAMPDSPPRRAGHRRAQSEILLGAALPDDIAFVGGGGGDDYEEEEEDDEEEEMEGAGGSXDVRDVPRGRGQARDPGARGAAAAAAXARPRHQHSMSMDGSTSLASSAAGVAGRMGADAKKAISDAKLAELALVDPKRAKRILANRQSAARSKERKMRYIAELERKVQTLQTEATTLSAQLSMLQRDTTGLTSENSDLKIRVQTMEQQVRLQDALNDRLRDEIQQLKVATGQVNANCGKVGNFGLSSFGGANPQGYQRSHIQSLLAAQQLQQLQIHSQHQQQQMHLQQHHHLSTVQQQLLQEGLPLPGDLKMKGIVAASHAQNAGASESHAL

SEQ ID NO: 14946 - protein, 362 aa, Zea mays
MNKDKAPMPGDGGPSDGLPPQSTRRVGAPPSSSTPPLECDISRMPDFPTRSTGHRRAHSEILGLPDDLDLSAPGGGEGPSLSDENDEELFSMFLDVDKLNSSCGASSEAEAESSSAAGGGARPRHQHSQSMDGSMSIKAEQLVGAPGMEGMSSAEAKKAVSAAKLAELALVDPKRAKRIWANRQSAARSKERKMQYIGELELKVQTLQTEATTLSAQLALLQRDTTGLTTENSELKIRLQTMEQQVHLQDALNDTLKTEVQRLKVATGQVGNGGGGMMLNFGAMPRLVGGNQQMFHSSQAMQSVLATHQLQQLQLHSQPQQQQLHSLQLQQVARDLKMKGHLGGQGQWGDGKSGSGSRSSGS

SEQ ID NO: 14947 - protein, 321 aa, Zea mays
  unsure (1)..(321): unsure at all Xaa locations
XWVPRGRPGSGKRYSPSLFNPLXHFLSLLLSCNPARRSYSXDENDEELFSMFLDVDKLNSSCGASSEAEAESSSAAGGGARPRHQHSQSMDGSMSIKAEQLVGAPGMEGMSSAEAKKAVSAAKLAELALVDPKRAKRIWANRQSAARSKERKMQYIGELELKVQTLQTEATTLSAQLALLQRDTTGLTTENSELKIRLQTMEQQVHLQDALNDTLKTEVQRLKVATGQVGNGGGGMMLNFGAMPRLVGGNQQMFHSSQAMQSVLATHQLQQLQLHSQPQQQQLHSLQLQQVARDLKMKGHLGGQGQWGDGKSGSGSRSSGS

SEQ ID NO: 14948 - protein, 286 aa, Zea mays
  unsure (1)..(286): unsure at all Xaa locations
XWVPRGRPGSGKRYSPSLFNPLXHFLSLLLSCNPARRSYSXDENDEELFSMFLDVDKLNSSCGASSEAEAESSSAAGGGARPRHQHSQSMDGSMSIKAEQLVGAPGMEGMSSAEAKKAVSAAKLAELALVDPKRAKRIWANRQSAARSKERKMRYIGELELKVQTLQTEATTLSAQLALLQRDTTGLTTENSELKIRLQTMEQQVHLQDALNDTLKTEVQRLKVATGQVGNGWXXGMMLNFXAMPRLVGGNQQMFHSSQAMQSLLAAHQLQQLQLHSQXQQQQLHX

SEQ ID NO: 14949 - protein, 350 aa, Zea mays
  unsure (1)..(350): unsure at all Xaa locations
MNMDKTPIAGDGGDGPEMQSSLDAVAPSPTPHTELDISSMPDTPLRKPGHRRALSEIIGLPDDLDLGGPGAGDAPALSDENEEELFSMFLDVDKLNSRCGASDPGEATETSAAASGAAQGQMHHHNRHSMDASSSIDAEHLFGTTVTEGVSPAEAKKAMSAANLAELALIDPKKAKRIINNRQSAARSKERKMRYIAELERKVQFMQREATALNXQLALLQRDTAGLTVENGDLKIRLESTEQQIHLQDXXLKMATGQAGNQMMNFAEPPHTFGGANQQVFHHPGQAVPPFLVAMQQQQQLLLPXXMNQPLHPLQSQQLHQAATLSIDMEGPPPGQWQWGGDTWSESSSS

SEQ ID NO: 14950 - protein, 303 aa, Zea mays
  unsure (1)..(303): unsure at all Xaa locations
SKLKPSNSSPCSSNFPPGFCPFIELSGGSRMFEMFLENGGKLPAPEPSAHPHSTPPRPRHHHSMSMDGSTSLFGSGLAGMPGRSGTDAKKAMGDAKLAELALVDPKRAKRILANRQSAARSKERKMRYIAELERKVQTLQLEATTLSAQLAMLQRDTTGMTSENSDLKIRVQTMEQQVQLQDALNDRLRDEIQQLKVATGQVNASIGKTGNSGMSSFGGNPQSYQRSHIQSLLAAQHLQRLRIHSQHQQQQTHFQQQQXXPQPQLLLQEAHPFPVDLKMRGFSLSSHAQNAGASDSHAAKSEP

SEQ ID NO: 14951 - protein, 362 aa, Mus musculus
MESKTTYLEDLPPLPEYELSPSKLGDEVDDVYLIRAQGLPWSCTVEDVLNFFSDCRIRNSENGIHFLLNRDGKRRGDALIEMESEQDVQKALEKHRMYMGQRYVEVYEINNEDVDALMKSLQVKPSPVLSDGVVRLRGLPYSCNEKDIVDFFAGLNIVDITFVMDYRGRRKTGEAYVQFEEPEMANQALLKHREEIGNRYIEIFPSRRNEVRTHVGSHKGKKMTSSPPTKYITEPEVVFEEHEVNEDIRPMTAFESDKEIELPKEMSEKLPEAVDFGTLPSLHFVHMRGLPFQANAQDIINFFAPLKPVRITMEYSSSGKATGEADVHFDTHEDAVAAMLKDRSHVQHRYIELFLNSCPKGK

SEQ ID NO: 14952 - protein, 479 aa, Mus musculus
MAGTRWVLGALLRGCGCNCSSCRRTGAACLPFYSAAGTFPSGVSGRRRLLLLLGAAAAAASQTRGLQLGPAAAGRLAGPIPARPSAAAAAAACYSALRAPLFPRSLAAAAGPARGYSQESKTTYLEDLPPLPEYELSPSKLGDEVDDVYLIRAQGLPWSCTVEDVLNFFSDCRIRNSENGIHFLLNRDGKRRGDALIEMESEQDVQKALEKHRMYMGQRYVEVYEINNEDVDALMKSLQVKPSPVLSDGVVRLRGLPYSCNEKDIVDFFAGLNIVDITFVMDYRGRRKTGEAYVQFEEPEMANQALLKHREEIGNRYIEIFPSRRNEVRTHVGSHKGKKMTSSPPTKYITEPEVVFEEHEVNEDIRPMTAFESDKEIELPKEMSEKLPEAVDFGTLPSLHFVHMRGLPFQANAQDIINFFAPLKPVRITMEYSSSGKATGEADVHFDTHEDAVAAMLKDRSHVQHRYIELFLNSCPKGK

SEQ ID NO: 14953 - protein, 344 aa, Mus musculus
LSPSKLGDEVDDVYLIRAQGLPWSCTVEDVLNFFSDCRIRNSENGIHFLLNRDGKRRGDALIEMESEQDVQKALEKHRMYMGQRYVEVYEINNEDVDALMKSLQVKPSPVLSDGVVRLRGLPYSCNEKDIVDFFAGLNIVDITFVMDYRGRRKTGEAYVQFEEPEMANQALLKHREEIGNRYIEIFPSRRNEVRTHVGSHKGKKMTSSPPTKYITEPEVVFEEHEVNEDIRPMTAFESDKEIELPKEMSEKLPEAVDFGTLPSLHFVHMRGLPFQANAQDIINFFAPLKPVRITMEYSSSGKATGEADVHFDTHEDAVAAMLKDRSHVQHRYIELFLNSCPKGK

SEQ ID NO: 14954 - protein, 479 aa, Mus musculus
MAGTRWVLGALLRGCGCNCSSCRRTGAACLPFYSAAGTFPSGVSGRRRLLLLLGAAAAAASQTRGLQLGPAAAGRLAGPIPARPSAAAAAAASYSALRAPLFPRSLAAAAGPARGYSQESKTTYLEDLPPLPEYELSPSKLGDEVDDVYLIRAQGLPWSCTVEDVLNFFSDCRIRNSENGIHFLLNRDGKRRGDALIEMESEQDVQKALEKHRMYMGQRYVEVYEINNEDVDALMKSLQVKPSPVLSDGVVRLRGLPYSCNEKDIVDFFAGLNIVDITFVMDYRGRRKTGEAYVQFEEPEMANQALLKHREEIGNRYIEIFPSRRNEVRTHVGSHKGKKMTSSPPTKYITEPEVVFEEHEVNEDIRPMTAFESDKEIELPKEMSEKLPEAVDFGTLPSLHFVHMRGLPFQANAQDIINFFAPLKPVRITMEYSSSGKATGEADVHFDTHEDAVAAMLKDRSHVQHRYIELFLNSCPKGK

SEQ ID NO: 14955 - protein, 444 aa, Mus musculus
MTESLNFEKSDSVSRYGASQVEDMGNIILAMISEPYNHRFSDPERLNYKFESGTCSKMELIDDSTVVRARGLPWQSSDQDIARFFKGLNIAKGGAALCLNAQGRRNGEALVRFVSEEHRDLALQRHKHHMGTRYIEVYKATGEDFLKIAGGTSNEVAQFLSKENQVIVRMRGLPFTATAEEVVAFFGQHCPITGGKEGILFVTYPDGRPTGDAFVLFACEEYAQNALRKHKELLGKRYIELFRSTAAEVQQVLNRFSSAPLIPLPTPPIIPVLPQQFVPPTNVRDCIRLRGLPYAATIEDILDFLGEFSTDIRTHGVHMVLNHQGRPSGDAFIQMKSTDRAFMAAQKYHKKTMKDRYVEVFQCSAEEMNFVLMGGTLNRNGLSPPPCLSPPSYTFPAPTAVIPTEAAIYQPSLLLNPRALQPSTAYYPAGTQLFMNYTAYYPSV

SEQ ID NO: 14956 - protein, 500 aa, Mus musculus
TAGATGAKLGSDEKELILLLWKVVDLANKKVGQLHEVLVRPDQLELTEDCKEETKIDAENLSSAPQLDQALRQFNQSVSNELNIGVGTSFCLCTDGQLHIRQILHPKASKKNVLLPECFYSFFDLRKEFKKCCPGSPDIDKLDVAAMTESLNFEKSDSVSRYGASQVEDMGNIILAMISEPYNHRFSDPERVNYKFESGTCSKMELIDDSTVVRARGLPWQSSDQDIARFFKGLNIAKGGAALCLNAQGRRNGEALVRFVSEEHRDLALQRHKHHMGTRYIEVYKATGEDFLKIAGGTSNEVAQFLSKENQVIVRMRGLPFTATAEEVVAFFGQHCPITGGKEGILFVTYPDGRPTGDAFVLFACEEYAQNALRKHKELLGKRYIELFRSTAAEVQQVLNRFSSAPLIPLPTPPIIPVLPQQFVPPTNVRDCIRLRGLPYAATIEDILDFLGEFSTDIRTHGVHMVLNHQVRGVIGKCVCSFLRPSAPSSITAQRFTLPL

SEQ ID NO: 14957 - protein, 681 aa, Mus musculus
MTASPDYLVVLFGITAGATGAKLGSDEKELILLLWKVVDLANKKVGQLHEVLVRPDQLELTEDCKEETKIDAENLSSAPQLDQALRQFNQSVSNELNIGVGTSFCLCTDGQLHIRQILHPEASKKNVLLPECFYSFFDLRKEFKKCCPGSPDIDKLDVAAMTESLNFEKSDSVSRYGASQVEDMGNIILAMISEPYNHRFSDPERVNYKFESGTCSKMELIDDSTVVRARGLPWQSSDQDIARFFKGLNIAKGGAALCLNAQGRRNGEALVRFVSEEHRDLALQRHKHHMGTRYIEVYKATGEDFLKIAGGTSNEVAQFLSKENQVIVRMRGLPFTATAEEVVAFFGQHCPITGGKEGILFVTYPDGRPTGDAFVLFACEEYAQNALRKHKELLGKRYIELFRSTAAEVQQVLNRFSSAPLIPLPTPPIIPVLPQQFVPPTNVRDCIRLRGLPYAATIEDILDFLGEFSTDIRTHGVHMVLNHQGRPSGDAFIQMKSTDRAFMAAQKYHKKTMKDRYVEVFQCSAEEMNFVLMGGTLNRNGLSPPPCKLPCLSPPSYTFPAPTAVIPTEAAIYQPSLLLNPRALQPSTAYYPAGTQLFMNYTAYYPSPPGSPNSLGYFPTAANLSSVPPQPGTVVRMQGLAYNTGVKEILNFFQGYQYATEDGLVHTNDQARTLPKEWVCI

SEQ ID NO: 14958 - protein, 479 aa, Mus musculus
MAGTRWVLGALLRGYGCNCSSCRRTGAACLPFYSAAGTFPSGVSGRRRLLLLLGAAAAAASQTRGLQLGPAAAGRLAGPIPARPSAAAAAATSYSALRAPLFPRSLAAAAGPARGYSQESKTTYLEDLPPLPEYELSPSKLGDEVDDVYLIRAQGLPWSCTVEDVLNFFSDCRIRNSENGIHFLLNRDGKRRGDALIEMESEQDVQKALEKHRMYMGQRYVEVYEINNEDVDALMKSLQVKPSPVLSDGVVRLTGLPYSCNEKDIVDFFAGLNIVDITFVMDYRGRRKTGEAYVQFEEPEMANQALLKHREEIGNRYIEIFPSRRNEVRTHVGSHKGKKMTSSPPTKYITEPEVVFEEHEVNEDIRPMTAFESDKEIELPKEMSEKLPEAVDFGTLPSLHFVHMRGLPFQANAQDIINFFAPLKPVRITMEYSSSGKATGEADVHFDTHEDAVAAMLKDRSHVQHRYIELFLNSCPKGK

SEQ ID NO: 14959 - protein, 798 aa, Anopheles gambiae str. PEST
QFDEYTKSLNLDPHCASFRLVTDGQLPLRQCLHPEASAKVIDLPQYYWRFCDLRKEFVRFQAGDLSRALVPVAEAQKLQSMPSLPPTPASVAEIIKDLDLPACQDNNEFYVKEARDMVTIVKHLISLGHKFEANEIINLNLEPGICSIDDEIDGTCIVRARGLPWQSSDQDIAKFFRGLNVAKGGVALCLSPQGRRNGEALVRFVSQEHRDMALKRHKHHIGNRYIEVYRANGEDFLAVAGGASNEAQAFLSKGAQVIIRMRGLPYDCTAKQVLDFFANGENSCNVLDGADGILFVKKPDGRATGDAFVLFEQDSDASKALSKHRESIGQRYIELFRSTTAEVQQVLNRSMDPKTYEPPQPPLIAQLPQMQLLPQHVITSGVEKNCIRLRGLPYEAKVEHILHFLDDFANHIIYQGVHLVYNAQGQFNGEAFIQMDSETAAYQSAQQKHHKNMMFGKKQRYIEVFQCSGEDMNMVLNGGFQQPGSLSKPSLLSPGMLPTAATQPPTQSPQTLSLSQLSLPIPPPLALSLMLQNLGMYMGGPATSVATSLSVSHGAGGAMAATPTYVTAGGGGGAAATAALSSSVTGAASAGGLAAFGHSPATAAGLAAAGLGATSAASGAAAAAGGLPPHLAAAHPGAQYAPLYFMHRHAAMLGSNGGGIPMSLMAPSHAAAAAAAQHAAAYSQLHHFGAGGQVGAGSGASSSLAHHGSAALMHHPSQHHAMQAMAAAAASQSAAAAAGMLPSKRSYDSAFRGDQSALGSGAGSKRPFHGTPAQGTAAAAAAAAAAAALYAPYYHPHI

SEQ ID NO: 14960 - protein, 289 aa, Arabidopsis thaliana
MASFELWADIFGPDVYFPGNKNRRGRKRRPWRQVMYGSRGAMFGSGGYEVGSKRQRMMQSNPYLAVGTGPTSFPPFGYAGGFPVVRLRGLPFNCADIDIFEFFAGLNIVDVLLVSKNGKFSGEAFVVFAGPMQVEIALQRDRHNMGRRYVEVFRCSKQDYYNAVAAEEGAYEYEVRASPPPTGPSRAKRFSEKEKLEYTEVLKMRGLPYSVNKPQIIEFFSGYKVIQGRVQVVCRPDGKATGEAFVEFETGEEARRAMAKDKMSIGSRYVELFPTTREEARRAEARSRQ

SEQ ID NO: 14961 - protein, 248 aa, Arabidopsis thaliana
MFGSGGYEVGSKRQRMMQSNPYLAVGTGPTSFPPFGYAGGFPVVRLRGLPFNCADIDIFEFFAGLNIVDVLLVSKNGKFSGEAFVVFAGPMQVEIALQRDRHNMGRRYVEVFRCSKQDYYNAVAAEEGAYEYEVRASPPPTGPSRAKRFSEKEKLEYTEVLKMRGLPYSVNKPQIIEFFSGYKVIQGRVQVVCRPDGKATGEAFVEFETGEEARRAMAKDKMSIGSRYVELFPTTREEARRAEARSRQ

SEQ ID NO: 14962 - protein, 278 aa, Arabidopsis thaliana
MGPKRQRMIDQGPPGPFYGPHPSSGFMYNPYGFVAPPPPPPFPAVRLRGLPFDCAELDVVEFFHGLDVVDVLFVHRNNKVTGEAFCVLGYPLQVDFALQKNRQNMGRRYVEVFRSTKQEYYKAIANEVAESRVHGMASGGGGGLGGGNGSGGGGGGGGGGGRISGGSSPRRHVQRARSSDDGKEDIEHTGILRLRGLPFSAGKEDILDFFKDFELSEDFVHVTVNGEGRPTGEAFVEFRNAEDSRAAMVKDRKTLGSRYIELFPSSVEELEEALSRGR

SEQ ID NO: 14963 - protein, 350 aa, Arabidopsis thaliana
MYLAGTRLNHSAKATVLIRLREEEEAPSKVPIDLIIQIRRHSNLLRVIDNVLQRLRYVCGECRYGDGPDGREMGPKRQRMIDQGPPGPFYGPHPSSGFMYNPYGFVAPPPPPPFPAVRLRGLPFDCAELDVVEFFHGLDVVDVLFVHRNNKVTGEAFCVLGYPLQVDFALQKNRQNMGRRYVEVFRSTKQEYYKAIANEVAESRVHGMASGGGGGLGGGNGSGGGGGGGGGGGRISGGSSPRRHVQRARSSDDGKEDIEHTGILRLRGLPFSAGKEDILDFFKDFELSEDFVHVTVNGEGRPTGEAFVEFRNAEDSRAAMVKDRKTLGSRYIELFPSSVEELEEALSRGR

SEQ ID NO: 14964 - protein, 274 aa, Glycine max
  unsure (1)..(274): unsure at all Xaa locations
PTRPPTRPVMYGPRGAMLGSGGVSDGYEVGSKRQRMMESNPYFAVSSGTGNXXPYGYAGGFQPPPFPVVRLRGLPFNCTDIDILKFFAGLTIVDVLLVNKSGRFSGEAFVVFAGAMQVEFALQRDRQNMGRRYVEVFRCKKQDYYNAVAAEIKYEGIYDNDYQGSSPPPSRLKRFNDKDQMECTEILKMRGLPFQVTKSQIVEFFKDFKLIEDRVHIACRPDGKSTGEAYVEFVSAEEAKRAMSKDKMTIGSRYVELFPSTPDEARRAESRSRQ

SEQ ID NO: 14965 - protein, 287 aa, Glycine max
  unsure (1)..(287): unsure at all Xaa locations
RIYIHTEREAAKPRQEWHPCCSLQIQCSXRGKFADGGDGREMAAKRQRTVDPGSSFYGASTGSNFMYNPSPYGYVSQPPPPPPFPVVRLRGLPFDCTETDVAEFFHGLDIVDVLFVHKGGKFTGECFCVLGYPLQVDFALQRNRQNMGRRYVEVFRSKRQEYYKAIANEVSDARGGSPRRSASRAKSYDEGKESAEHTGVLRLRGLPFSASKDDIMEFFKDFGLPEDSIHIIMNSEGRPSGEAYAEFESAEDSKAAMVKDRMTLGSRYIELFPSSPGEMEEAISRGR

SEQ ID NO: 14966 - protein, 150 aa, Glycine max
PHLPLLSRLGFPPPPRRPSPPPASSPPHLPREAPAAAAAAAMYGHRGAMMGSGGVSDGYEGSKRPRMMESNPYFAVNAGSPLDVSKRARMMEPGPPYFAGMGSSAGGSGSGFYPTYGGNMAGAAGVNSCIQNFPAVRLRGLPFDCEDVDI

SEQ ID NO: 14967 - protein, 170 aa, Glycine max
  unsure (1)..(170): unsure at all Xaa locations
XHYEGIYDNDYHGSSPPPSRLKRFNDKDQMEYTEILKMRGLPFQVTKSQIVEFFKDFKLIEDRVHIACRPDGKATGEAYVEFVSAEEAKRAMSKDKMTIGSRYVELFPSTPDEARRAESRSRQESEVFYLVLGRLPWSFWGYYNVLNFRLCTLFLLVRLAVIFACLNWMH

SEQ ID NO: 14968 - protein, 158 aa, Glycine max
  unsure (1)..(158): unsure at all Xaa locations
XFFLFIKIVLKQLXXITGKSKRGLNFHKREMAAKRQRTVDPGSSFYGASTGSNFMYNPSPYGYVSQPPPPPFPVVRLRGLPFDCTETDVAEFFHGLDIVDVLFVHKGGKFTGEGFCVLGYPLQVDFALQRNRQNMGRRYVEVFRSKRQEYYKAIANEX

SEQ ID NO: 14969 - protein, 200 aa, Glycine max
  unsure (1)..(200): unsure at all Xaa locations
IYIHTEREAAKPRQEWHPCCSLQIQCSXRGKFADGGDGREMAAKRQRTVDPGSSFYGASTGSNFMGNPSPYGYVSQPPPPPPFPVVRLRGLPFDCTETDVGEFFHGLDIVDVLFVHKGGKFTGECFCGLGDAVEGDFALGRNRRNMGGRYVGVLRSGRRGCYEAIADEGXDARVGGRAGGAGGVRGGGDGVGAPGGGSWG

SEQ ID NO: 14970 - protein, 148 aa, Glycine max
  unsure (1)..(148): unsure at all Xaa locations
LGFASRFGIRLSRDRSAGSVPCSSVYGSAFCSILRRSRKPTRPYMYGPRGAMLGSGGVSDGYEVGSKRQRMMESNPYFAVSSGTGNXXPYGYAGGFPAPSLSXVVRLRGLPFNCTDIDILKFFAGLTMGEVXVVNKSGRFLGEAFXFL

SEQ ID NO: 14971 - protein, 250 aa, Oryza sativa
  unsure (1)..(250): unsure at all Xaa locations
MMGGGGVSDGYEGSKRPRMIESNPYFAXXPQAVPWMSQRGNFPGVRLRGLPFDCDDLDICKFFVGLDIVDCLLVHKNGRFTGEAFVVFPSPMQAEFALHRNRQNMGRRYVEVFRCKKQEYYSAIAAEVNQGGFFDSEYRHSPPPPRPKKPAEDKSSMEYTEVLKLRGLPYSATTEDIIKFFVEYELTDENVHIVYRPDGKATGEAYVEFPTAEVVKTAMCKDKMTIGTRYVELFPSTPEEASRAKSRVRQ

SEQ ID NO: 14972 - protein, 239 aa, Oryza sativa
  unsure (1)..(239): unsure at all Xaa locations
MYGHRGAMMGGGGVSDGYEGSKRPRMIESNPYFAXXPQAVPWMSQRGNFPGVRLRVLPFDCDDLDIFKFFVGLDIVDCLLVHKNGRFTGEAFVVFPSPMQAEFALHRNRQNMGRRYVEVFRCKKQEYYSAIAAEVNQGGFFDSEYRHSPPPPRPKKPAEDKSSMEYTEVLKLRGLPYSATTEDIIKFFVEYELTDENVHIVYRPDGKATGEAYVEFPTAEVVKTAMCKDKMTIGTRMGX

SEQ ID NO: 14973 - protein, 194 aa, Oryza sativa
  unsure (1)..(194): unsure at all Xaa locations
XPRVRPRVRLDIVDCLLVHKNGRFTGEAFVVFPSAMQAEFALHRNRQNMGRRYVEVFRCKKQEYYSAIAAEVNQGGFFDSEYRHSPPPPRPKKPAEDKSSMEYTEVLKLRGLPYSATTEDIIKFFVEYELTDENVHIVYRPDGKATGEAYVEFPTAEVAKTAMCKDKMTIGTRYVELFPSTPEEASRAKSRARQ

SEQ ID NO: 14974 - protein, 263 aa, Oryza sativa
  unsure (1)..(263): unsure at all Xaa locations
GRGGGGFEEGSKRLRMMESNPYFAVTAGPTYLVPNSAIQNFSGVRLLGLPFDCGDLDICKFFVGLDIVDCLLVHKNGCFTDEAFVVFPSAMQGEFALHRNRXNMGRRYVEVFRCKKQEYYSSIAAEVNQDGFFDSKYRHSPPPPRPKKPAEDEQHEKRTPPDVLKLRGLPYFTTAEDIIKFFVEYELTEENVHTAYRLDGKXXSMEFSTTGVAKTAICKDKMTIGTRYMELFPSTPEEASRTKSRFTSQAMNYLIQASTLPWP

SEQ ID NO: 14975 - protein, 108 aa, Oryza sativa
  unsure (1)..(108): unsure at all Xaa locations
VDHASAHASGHAYXLNIFYCLWAHKNGRCTGEAFGGSPSAMQAEPALHRSRANTGRTYVDVCRCERQEYYRATAAEEGGFFDSTCQDSPPDARSKKPAEDTSIMDYTX

SEQ ID NO: 14976 - protein, 184 aa, Triticum aestivum
  unsure (1)..(184): unsure at all Xaa locations
XAAASTVHKNGRFSGEAFVVFPSSMQAEFALHRNRQNMGRRYVEVFRCKKQDYYSAIAAEXEPGRSSAXAGAPAPSPPLRSRRLSEDKSSMEYTEGPTPRGPPRPATIEDIIKFFVEYELSEENVHIAYRGDGKATGEAFVEFPTAEVAKTAMCKDKMTIGTRYVELFPSTPEEASRAKPRGRQ

SEQ ID NO: 14977 - protein, 131 aa, Triticum aestivum
  unsure (1)..(131): unsure at all Xaa locations
SRPXSTVHKNGRFSGEAFVVFPSSADAEAAXEDKSSMEYTEVLKLRGLPHSATIEDIIKFFCGXYELTEENVHIAYRGDGRATGEAFVEFPTAEVAKTAMCKDKMTIGTRYVELFPSTPEEASRAKPRGRQ

SEQ ID NO: 14978 - protein, 67 aa, Triticum aestivum
  unsure (1)..(67): unsure at all Xaa locations
RPLAIRVSAAAAPPVSPAGHFPAVRLRGLPFDCEDVDISKFFAGLDIVDCLLVHKNGRFSGEAFVVX

SEQ ID NO: 14979 - protein, 610 aa, Caenorhabditis elegans
MSEQTTQPTTEDQQSAEIAVKEEEIAVKTQSAPADAPDIHQSTIKEADESMPTKISSGEPPRSQYIRLRGLPFNATEKDIHEFFAGLTIERVKFVCTTGRPNGEAYVEFKNTEEAGKAMENDRKEISNRYIEVFTVEADEAEFEFRPDPDSNGEVNHVIRLRGVPWSCKEDDVRKFFEGLEPPPAEIVIGGTGGPRSRPSGEAFVRFTTQDAAEKAMDYNNRHMGSRYVEVFMSSMVEFNRAKGGGSGEYSASYERTGIRPLMSVDSGYDHGRRGGGGRYGDSSYDRGYDDYNRGSYGGRRDYGYNGGHDQGGRSDYGRGGDDPLRVYMRGLPYDADDHAIAAFFSPLRCHSVKIGINETGRPSGDAIAEFDNYNDLQVALSRNNQRMGRRYVELFDNRGAPGPMRRLLWKETSGTNASAAPAPDPILNGGRRGGGPPQRDSGYRAGPQAMPPSYRESRDPYGPREPRGYDIEPKYEPRGIPPRSAPIRAPPAAHGRAPDTWGSYGAASTGPSYDQSSAAGGYAASWDAYYASQAQSAYSAEPASTYPTAAHSAYGSGESYSYGASAGGAYDRQREPRDSQPTWAQQQQPSHHSAYGGWGAGAGDHRSGY

SEQ ID NO: 14980 - protein, 618 aa, Caenorhabditis elegans
MNRQTSHPEQRLLLIRVSDGNYDENTKLVVTSFYPRRQEDANNNSTSPSSASSSGSEISTRLVNITPEDVVKFFDEHPTSSYIFTKGPEPIRHVLIPLFARNELCVPHPLHHYYDIKHLYYGNQEEDGMEQEEIEDDVAIARAILDMDDELLEKTHQFVNIEYQPAPILEDQEVGADGDNVVCRARGLPWQASDHHVAQFFAGLDIVPGGIALCLSSEGRRNGEVLVQFSSQESRDLALKRHRNFLLSRYIEVYKAGLDEFMHVATGSSTEAMEFVSANAIIVRMRGLPYDCTDAQIRTFFEPLKLTDKILFITRTDGRPTGDAFVQFETEEDAQQGLLKHRQVIGQRYIELFKSTAAEVQQVVKRCNLINSSPAVANAVEAPEEKKKDCVRLRGLPYEATVQHIVTFLGDFATMVKFQGVHMVYNNQGHPSGEAFIQMINEQAASACAAGVHNNFMSVGKKKRYIEVFQASAEELNLHHLVGQQHQVPPPAPLGFMGQLPPQAPQPQQFWSSYPSPPISPIVPGQVTQLIIYGIHMSIGVPELVANFTTPEHTVDNVLFTRWPTHLCPGEAILTLRNRGAPPPQTSPLSQISQLSAPNFAAYSHHPQNFPLQPILME

SEQ ID NO: 14981 - protein, 614 aa, Caenorhabditis elegans
MITSEQRLLLIRVSDGNYDENTKLVVTSFYPRRQEDANNNSTSPSSASSSGSEISTRLVNITPEDVVKFFDEHPTSSYIFTKGPEPIRHVLIPLFARNELCVPHPLHHYYDIKHLYYGNQEEDGMEQEEIEDDVAIARAILDMDDELLEKTHQFVNIEYQPAPILEDQEVGADGDNVVCRARGLPWQASDHHVAQFFAGLDIVPGGIALCLSSEGRRNGEVLVQFSSQESRDLALKRHRNFLLSRYIEVYKAGLDEFMHVATGSSTEAMEFVSANAIIVRMRGLPYDCTDAQIRTFFEPLKLTDKILFITRTDGRPTGDAFVQFETEEDAQQGLLKHRQVIGQRYIELFKSTAAEVQQVVKRCNLINSSPAVANAVEAPEEKKKDCVRLRGLPYEATVQHIVTFLGDFATMVKFQGVHMVYNNQGHPSGEAFIQMINEQAASACAAGVHNNFMSVGKKKRYIEVFQASAEELNLHHLVGQQHQVPPPAPLGFMGQLPPQAPQPQQFWSSYPSPPISPIVPGQVTQLIIYGIHMSIGVPELVANFTTPEHTVDNVLFTRWPTHLCPGEAILTLRNRGAPPPQTSPLSQISQLSAPNFAAYSHHPQNFPLQPILME

SEQ ID NO: 14982 - protein, 549 aa, Caenorhabditis elegans
MSTAYEVQCRGLPWEATEQELRDFFGNNGIESLEIPRRNGRTSGDAKVVFTNEEDYNNALKKDREHLGSRYIEVFPAGGAPTRRGDRGERGDRGDRDHYRSRGAPPRDRYSDRGGPRSSGPDSIVRLRGLPFSVTSRDISDFLAPLPIVRDGILLPDQQRARPGGEAYVCFETMESVQIAKQRHMKNIGHRYIEVFEATHRDLSRFAEENDLRVPRFGPPPFASAPQTAPRGAYDPYSQPTDPYRNATDYRRAAEPEDPYARSRAPSVQDYGVRASYDPYTQPAAPVSSYPSQQQPSAGYYDNYAPKTAYESYGRERGPDPRDVRDPRDSRMPDPRDSRALSDPYAAESRYSEYGYESREPYWRGGSGGPPSIGGGVGGGGAPLAPTGRDPYSVGESWANGAGGPGGPPPVSSDRDRYGSGGYASEPYAQREAGGAMRRSEYGRPDDRYSKPEPYGYSRDRDYGAPQNQHFVLRMRGVPFRASEADVYDFFHPIRPNQVELLRDHQFQRPSGDARVIFYNRKDYDDALMKDKQYMGERYIEMIPDNGRY

SEQ ID NO: 14983 - protein, 362 aa, Caenorhabditis elegans
MSTAYEVQCRGLPWEATEQELRDFFGNNGIESLEIPRRNGRTSGDAKVVFTNEEDYNNALKKDREHLGSRYIEVFPAGGAPTRRGDRGERGDRGDRDHYRSRGAPPRDRYSDRGGPRSSGPDSIVRLRGLPFSVTSRDISDFLAPLPIVRDGILLPDQQRARPGGEAYVCFETMESVQIAKQRHMKNIGHRYIEVFEATHRDLSRFAEENDLRVPRFGPPPFASAPQTAPRGAYDPYSQPTDPYRNATDYRRAAEPEDPYARSRAPSVQDYGVRASYDPYTQPAAPVSSYPSQQQPSAGYYDNYAPKTAYESYGRERGPDPRDVRDPRDSRMPDPRDSRALSDPYAAESSWRSYAPIRIRSS

SEQ ID NO: 14984 - protein, 967 aa, Drosophila melanogaster
MQVPEHVVSLYIATCGQNGSGLGSDEKEIILLVFVLLEVSTGQIVGTKQILVRPDGYFIKDRTISSSSDNSSVTNNTASSPPLAIGDANNGSGSTSGNGNSLENGSELILPIAEAQAAGKPLSEAIEEFDAYLRSLSLHDTEIKLVTDGQLPLRQCLHREASAKDVELPAYYNRFSDLRKEFLRYKSGDLARALVPVKDVKKMLQAPTLPMPQSIAEMLGELNISSVEDNDFYIRESRDMVTVIQTLLQAGHKFAANELVNLVLEPGICSIDDEVDGNCIVRARGLPWQSSDQDIAKFFRGLNVAKGGVALCLSPLGRRNGEALIRFVCQEHRDMALKRHKHHIGTRYIEVYRASGEDFLAIAGGASNEAQAFLSKGAQVIIRMRGLPYDATAKQVLDFFTTGDTPPCHVLDGNEGVLFVKKPDGRATGDAFVLFANETDAPKALGRHRESIGQRYIELFRSTTAEVQQVLNRSMDPKNYESGGGHSQPPLIAQLPTMQLPLLPQVGAHSLSHSLGASPANLCPPVPPPALPLPTQHLITSGTTKNCIRLRGLPYEAMVEHILHFLDDFAKHIIYQGVHMVINAQGQPSGEAFIQMDLEESARLCAQRRHNHYMMFGKKYRYIEVFQCSGDDMNMVLNGGLASPVAQPPPPHLGHAHKQQSLLAATTGMFSSAGQSPTTVAAGTAQSPLGGTHTHTHPHSHAHAHATGHAHAAAAAAHHGLSASSAMLPGLSAAASASGLASFMSAGQQSAAAAAHSAASLQNAAVALAPQGYALNPFSLPPPGSAAAAAASTPALLAQQQAQFIAQQSLLVRQQAAAAALAAEQQQQQQQQQQLYASAMLQQHPLYLQQQQQQQQLYASAMLQQGQPQFVLMQRPSAAYLPPFPLSYMSAAGAASGVGVAPGAAVAGAAAAASPSASNSSLSQSMKRSYENAFQQEAAGAAAAASAAKRALTRQPSSVYSYYNSGI

SEQ ID NO: 14985 - protein, 891 aa, Drosophila melanogaster
MQVPEHVVSLYIATCGQNGSGLGSDEKEIILLVFVLLEVSTGQIVGTKQILVRPDGYFIKDRTISSSSDNSSVTNNTASSPPLAIGDANNGSGSTSGNGNSLENGSELILPIAEAQAAGKPLSEAIEEFDAYLRSLSLHDTEIKLVTDGQLPLRQCLHREASAKDVELPAYYNRFSDLRKEFLRYKSGDLARALVPVKDVKKMLQAPTLPMPQSIAEMLGELNISSVEDNDFYIRESRDMVTVIQTLLQAGHKFAANELVNLVLEPGICSIDDEVDGNCIVRARGLPWQSSDQDIAKFFRGLNVAKGGVALCLSPLGRRNGEALIRFVCQEHRDMALKRHKHHIGTRYIEVYRASGEDFLAIAGGASNEAQAFLSKGAQVIIRMRGLPYDATAKQVLDFFTTGDTPPCHVLDGNEGVLFVKKPDGRATGDAFVLFANETDAPKALGRHRESIGQRYIELFRSTTAEVQQVLNRSMDPKNYESGGGHSQPPLIAQLPTMQLPLLPQVGAHSLSHSLGASPANLCPPVPPPALPLPTQHLITSGTTKNCIRLRGLPYEAMVEHILHFLDDFAKHIIYQGVHMVINAQGQPSGEAFIQMDLEESARLCAQRRHNHYMMFGKKYRYIEVFQCSGDDMNMVLNGGLASPVAQPPPPHLGHAHKQQSLLAATTGATVLGAHYGGPFPAYGAAPPPPPPHTPLLATPRSHHHPHHHPASAFYPAPLVYWPYPSPPVSPTTYYSQPGAHSPSQAMYPLDFFPPSPLSPPNVSIPNTSTGLILTPTKAAVSFVPPKQFSPSSTGSGSPSSSSVKLAGQAGPAHMPSIAVNGKTEGVTSTGAKDTSTPQETSASQTLLSIDTNHATPTTAAAPPLKTGSQGSAGAAATPLVTNSCVELYIS

SEQ ID NO: 14986 - protein, 736 aa, Danio rerio
MASHSDTLVVFFGATAGANGGKLGSDERELILLVWQIVDLHENKVGKLHRTLVQPDSVDLSEQCKEETGLTAEELCKAEPLESVLQQFHQSVSAELKSLGRSSYTLCVDGPLLIRQVLHPEASKKNLVLPECFYTFVDLKKEFHKCCPNAGPVKDLTLLSMLDYVCIQATVEREAGLREVKDMVLLILHVLADPYNHKFSAFETVNYKFESGACSKTEAVDSETVIRARGLPWQSSDQDIARFFKGLNIAKGGVALCLNAQGRRNGEALVRFINSEHRDMALDRHKHHMGSRYIEVYKATGEEFLKIAGGTSNEVAQFLSKENQMIIRMRGLPFTATPQDVLGFLGPECPVTDGTEGLLFVKYPDGRPTGDAFVLFACEEYAQNALKKHKQILGKRYIELFRSTAAEVQQVLNRYMSTPLISTLPPPPPPMVSVPVLATPPLITTGNTRDCIRLRGLPYTAAIEDILEFMGEHTIDIKPHGVHMVLNQQGRPSGDAFIQMKSADRAFMVAQKCHKKMMKDRYVEVFQCSTEEMSFVLMGGTLNRSGLSPPPCKLPCLSPPTYAAFPAAPAMLPTEAGLYQPPLLATPRTPQAPTHSPAPAFAYYSPQLYMNMNMSYTTYYPSPPVSPSTVSYFAAPPGSVAAAVAAQPTPAILPPQPGALVRMQGLPYNAGVKDILSFFQGYQLQADSVLVLYNWSGQRSGEALVTFPSEKAARRAVAECSNIPLSGHPIHLACCE

SEQ ID NO: 14987 - protein, 688 aa, Xenopus laevis
MTAVSPDYLVVLFTTTAGANGSKLGSDEKEVIQLLWKVINLANKKVGELHEVTVRPDHLELTEECKEITQIETDDLYVAPQLEQALQQFNQSVGNELNIGVGTSFCICTDGQLHVRQVLHPEASKKNILLPECFYSFFDLRKEFMKCCPGSSDINELDVHAMASFLGFEKKNTHYRYGASEVDDMGDIIVTLISEPYNYKFSDPERVNYKFESGTCSKLEMIDDNTIIRARGLPWQSSDQDIARFFKGLNIAKGGAALCLNAQGRRNGEALVRFVSEEHRDLALQRHKHHMGNRYIEVYKATGEDFLKIAGGTSNEVAQFLSKENQVIVRMRGLPFTATAEEVLAFFGQQCPVTGGKEGILFVTYPDNRPTGDAFVLFACEEYAQNALKKHKELLGKRYIELFRSTAAEVQQVLNRYSSAPLIPLPTPPIIPVLPQPFIPPVNVRDCIRLRGLPYAATIEDILEFLGEFSADIRTHGVHMVLNHQGRPSGDSFIQMKSADRAYLAAQKCHKKTMKDRYVEVFQCSAEEMNFVLMGGTLNRNGLSPPPCKLPCLSPPSYTFPAQAAVIPTEAAALYQPSLLLNPRSLQPSAAAYYPAGAQLFMNYTAYYPSPPGSPSSLGFFPASAGVSTMPPHNTGAMVRMQGLAYNSGVKDILNFFQGYQYSPEDGLLPVNDQARALLTHPKEWVCI

SEQ ID NO: 14988 - protein, 658 aa, Xenopus laevis
MAVVIRLQGLPLVAGSTDIRHFFSGLHIPEGGVHITGGKHGEAFIIFPTDEDARRAMSCSGGFIKKSQIDLFLSSKAEMQHTLEMNRKGNKDLGATPDISKLLNVMKKGIYQKNMVHKSNAEAGFDGKEENVPRPKYQGNEGTMPLKENGYGYVFLNGLPYTADEHDVKEFFHGFDVEDINFCVRQNGDKDGKAYVKFATFQDAKASLSRHKEYIGHRYIFLKLSNEHAWIEAVSKTNRREESVHNNREWSPRFSSKNHSRSPGHGSRSPKMHRTRSRSPHNQQFHLHLLNMPYSVDKKDIKLYFGDPDIPDSQVKFLLDRKGVRTREGFVSVKNEKFYQKCLGLHKGLLNGREVWVYPIAGKDMSELIESTERPQLERNTSEDSSPKRKSRDRSNLKRCMYLRNFPFNVGKSEVQKFFAGFPVDERDIFLLYDSRGVGLGEALVIFPSEHHAILAEGLNQQTFLGTEVLLRRISEEQMKELAAFPEDQNERQSKQSTTYRDEYPEIAEQSFVDSDACGSYDQPQPYRADDFGHVSGSGRRSTERLRSPYNMNQNEQYERFHMGNQNVTDYESGPVNRPSLGGASIRLENVPYTATIEEILDFFHGYNVVPDSVKMDYNSKGTAIVHMENYYEAAAAINELNERPIGPRKVHMSLIRS

SEQ ID NO: 14989 - protein, 932 aa, Macaca mulatta
MAVVIRLQGLPIVAGTMDIRHFFSGLTIPDGGVHIVGGELGEAFIVFATDEDARLGMMRTGGTIKGSKVTLLLSSKTEMQNMIELSRRRFETANLDIPPANASRSGPPPSSGMSGRVNLPTTVSNFNNPSPSVVTATTSVHESNKNIQTFSTASIGTAPPNMGASFGSPTFSSTVPSTASPMNTVPPPPIPPIPAMPSLPPMPSIPPIPVPPPVPTLPPVPPVPPIPPVPSVPPMTPLPPMSGMPPLNPPPVAPLPAGMNGSGAPMNLNNNLNPMFLGPLNPVNPIQMNSQSSVKPLPINPDDLYVSVHGMPFSAMENDVRDFFHGLRVDAVHLLKDHVGRNNGNGLVKFLSPQDTFEALKRNRMLMIQRYVEVSPATERQWVAAGGHITFKQNMGPSGQSHPPPQTLPRSKSPSGQKRSRSRSPHEAGFCVYLKGLPFEAENKHVIDFFKKLDIVEDSIYIAYGPNGKATGEGFVEFRNEADYKAALCRHKQYMGNRFIQVHPITKKGMLEKIDMIRKRLQNFSYDQREMMLNPEGDVNSAKVCAHITNIPFSITKMDVLQFLEGIPVDENAVHVLVDNNGQGLGQALVQFKNEDDARKSERLHRKKLNGREAFVHVVTLEDMREIEKNPPAQGKKGLKMPVPGNPAVPGMPNAGLPGVGLPSAGLPGAGLPSTGLPGSAITSAGLPGAGMPSAGIPSAGGEEHAFLTVGSKEANNGPPFNFPGNFGGSNAFGPPIPPPGLGGGAFGDARPGMPSVGNSGLPGLGLDVPGFGGGPNNLSGPSGFGGGPQNFGNGPGSLGGPPGFGSGPPGLGSAPGHLGGPPAFGPGPGPGPGPGPIHIGGPPGFASSSGKPGPTVIKVQNMPFTVSIDEILDFFYGYQVIPGSVCLKYNEKGMPTGEAMVAFESRDEATAAVIDLNDRPIGSRKVKLVLG

SEQ ID NO: 14990 - protein, 415 aa, Homo sapiens
MAGTRWVLGALLRGCGCNCSSCRRTGAAYPALRASLLPQSLAAAAAVPTRSYSQESKTTYLEDLPPPPEYELAPSKLEEEVDDVFLIRAQGLPWSCTMEDVLNFFSDCRIRNGENGIHFLLNRDGKRRGDALIEMESEQDVQKALEKHRMYMGQRYVEVYEINNEDVDALMKSLQVKSSPVVNDGVVRLRGLPYSCNEKDIVDFFAGLNIVDITFVMDYRGRRKTGEAYVQFEEPEMANQALLKHREEIGNRYIEIFPSRRNEVRTHVGSYKGKKIASFPTAKYITEPEMVFEEHEVNEDIQPMTAFESEKEIELPKEVPEKLPEAADFGTTSSLHFVHMRGLPFQANAQDIINFFAPLKPVRITMEYSSSGKATGEADVHFETHEDAVAAMLKDRSHVHHRYIELFLNSCPKGK

SEQ ID NO: 14991 - protein, 424 aa, Homo sapiens
MAGTRWVLGALLRGCGCNCSSCRRTGAACLPFYSAASYPALRASLLPQSLAAAAAVPTRSYSQESKTTYLEDLPPPPEYELAPSKLEEEVDDVFLIRAQGLPWSCTMEDVLNFFSDCRIRNGENGIHFLLNRDGKRRGDALIEMESEQDVQKALEKHRMYMGQRYVEVYEINNEDVDALMKSLQVKSSPVVNDGVVRLRGLPYSCNEKDIVDFFAGLNIVDITFVMDYRGRRKTGEAYVQFEEPEMANQALLKHREEIGNRYIEIFPSRRNEVRTHVGSYKGKKIASFPTAKYITEPEMVFEEHEVNEVFQPMTAFESEKEIELPKEVPEKLPEAADFGTTSSLHFVHMRGLPFQANAQDIINFFAPLKPVRITMEYSSSGKATGEADVHFETHEDAVAAMLKDRSHVHHRYIELFLNSCPKGK

SEQ ID NO: 14992 - protein, 331 aa, Homo sapiens
FLIRAQGLPWSCTMEDVLNFFSDCRIRNGENGIHFLLNRDGKRRGDALIEMESEQDVQKALEKHRMYMGQRYVEVYEINNEDVDALMKSLQVKSSPVVNDGVVRLRGLPYSCNEKDIVDFFAGLNIVDITFVMDYRGRRKTGEAYVQFEEPEMANQALLKHREEIGNRYIEIFPSRRNEVRTHVGSYKGKKIASFPTAKYITEPEMVFEEHEVNEVFQPMTAFESEKEIELPKEVPEKLPEAADFGTTSSLHFVHMRGLPFQANAQDIINFFAPLKPVRITMEYSSSGKATGEADVHFETHEDAVAAMLKDRSHVHHRYIELFLNSCPKGK

SEQ ID NO: 14993 - protein, 358 aa, Homo sapiens
MTEYLNFEKSSSVSRYGASQVEDMGNIILAMISEPYNHRFSDPERVNYKFESGTCSKMELIDDNTVVRARGLPWQSSDQDIARFFKGLNIAKGGAALCLNAQGRRNGEALVRFVSEEHRDLALQRHKHHMGTRYIEVYKATGEDFLKIAGGTSNEVAQFLSKENQVIVRMRGLPFTATAEEVVAFFGQHCPITGGKEGILFVTYPDGRPTGDAFVLFACEEYAQNALRKHKDLLGKRYIELFRSTAAEVQQVLNRFSSAPLIPLPTPPIIPVLPQQFVPPTNVRDCIRLRGLPYAATIEDILDFLGEFATDIRTHGVHMVLNHQGRPSGDAFIQMKSADRAFMAAQKCHKKKHEGQIC

SEQ ID NO: 14994 - protein, 193 aa, Ralstonia metallidurans
MGSTGIIRFAPDWAGRHRHGNQHMSDKGTDTKDKEKKAGKKKTASDRIEVRQSGVHGKGVYAIGQIAEGERVIEYKGEHISWKEALKRHPHDPNDPNHTFYFSLDDGDVIDAKFGGNRARWINHACDPNCEAREKKGRVFIHALRDIEPGEELFYDYGLVIDARYTKKLKQEYECRCGSPKCRGTMLAPKDKK

SEQ ID NO: 14995 - protein, 569 aa, Clytus arietis
MASSEGSGVTTGQPNLHKQDLSKLDVNKLTALSPEVISRQATINIGTIGHVAHGKSTVVKAISGVQTVRFKNELERNITIKLEKLQFDENGTITWPNVLRGRKVDLNQALRDSEEFETERRGVKRKLEKLRRVKPNKDKETYSKEFVVEKILAQEFNQATRQLMFLVKWKGYAVQQSTWEPLEHLTHCTQLLTQFLAETLGTQVFDKLCDKLNISTTLSDQDLLDMLKIYDLSVLPDKLTLQEKLLRLIATPPRDRHIHKLEEGKRAILLYQLVLRREAQLKKLREFEDMINENAKDEAAITVENNADLECLPESFVCINDYLATDGIVIPNEPTKGCDCKECGPKLKSCCGRQPYNGFTYNVRPRVNVNPGAPIYECNKLCKCGPDCRNRVVQKGRKVPLCIFRTSNGCGWGVKAMRKIHSAEFVCEYLAEVITHEEAEIRGRAYDQEGRTYLFDLDYNSRDNPYTVDAAKYGNVSHFINHSCDPNLGVYAVWINCSDPNLPKLALFALREIERDEEVTFDYMMNIDPVVPTTPEKSRFLHTPDKNQVIQNGRNICKCEADSCRRYLF

SEQ ID NO: 14996 - protein, 647 aa, Scoliopteryx libatrix
MASSEGRSASSNLHQQDLTKLDVTKLSALSPEVISRQATINIGTIGHVAHGKSTVVKAISGVQTVRFKNELERNITIKLERVSESVIKMYRERANERHENIFFEKLRRSKKRKLSIESEDDIVMPASKKQKKRKKSQEFIIEKILDFKFQEGKEYFHIKWKGWPDSENTWEPIENLDNCPEVLTEFLVNQELRYCDKIEKLKAEISFGDLLSEDNLLKRLEEVEESDITKLKETLILKMISMISLSECNEEYATELVEDTRDTLQLYCLIRKRCQQLIKLQNWEDHINQVDKSKKLSVENNVDLAGPPVNFTYINLCIPGTGVTIPDEPPIGCECIACNCRSKSCCGMQAGLFAYTAKKRLRVAPGTPIYECNKACKCSSDCCNKVVQTGRNIRLTIFRTSNGCGWGVRTEQKIYQGQFICQYVGEVITFEEAEKRGREYDANGLTYLFDLDFNSVENPYVVDAAHLGNVSHFINHSCDPNLGVWAAWADCLDPNLPMLALFATRDTEIGEEICFDYLQKSSDNDDVDTNSSTVSKEGSVDDIPTGSSCDDIPSGSEATAAIAPVSPVKSRFEIQQQNRAMLRNLTECKCGALKCRYANAKIYKCDNPKCARPTSFISGGSSKDDNFPCLRPACNGRFQLVRHVSFV

SEQ ID NO: 14997 - protein, 567 aa, Scoliopteryx libatrix
MASSEGRSASSNLHQQDLTKLDVTKLSALSPEVISRQATINIGTIGHVAHGKSTVVKAISGVQTVRFKNELERNITIKLERVSESVIKMYRERANERHENIFFEKLRRSKKRKLSIESEDDIVMPASKKQKKRKKSQEFIIEKILDFKFQEGKEYFHIKWKGWPDSENTWEPIENLDNCPEVLTEFLVNQELRYCDKIEKLKAEISFGDLLSEDNLLKRLEEVEESDITKLKETLILKMISMISLSECNEEYATELVEDTRDTLQLYCLIRKRCQQLIKLQNWEDHINQVDKSKKLSVENNVDLAGPPVNFTYINLCIPGTGVTIPDEPPIGCECIACNCRSKSCCGMQAGLFAYTAKKRLRVAPGTPIYECNKACKCSSDCCNKVVQTGRNIRLTIFRTSNGCGWGVRTEQKIYQGQFICQYVGEVITFEEAEKRGREYDANGLTYLFDLDFNSVENPYVVDAAHLGNVSHFINHSCDPNLGVWAAWADCLDPNLPMLALFATRDTEIGEEICFDYLQKSSDNDDVDTNSSTVTPMRKSTNVTTQNVRGPQASYRVDHRRMTISRA

SEQ ID NO: 14998 - protein, 219 aa, Burkholderia fungorum
MSVAGRRGARKAPRLLCASEKAARQTRAFATAADLHPKFFTRIHSMSSRRIAVRRSGVHGKGVFAVEPIAAGERLIEYKGERISWKEALRRHPHNPAEPNHTFYFALDSGKVIDGKVNGNSARWINHSCAPNCEAEEIDGHVYVHALRDIAEGEEVFYDYGLVIDARQTNKLKKEYECRCGARKCRGTMLAPPEKEKGAGKSGKSAKKAGTTVKKAKKK

SEQ ID NO: 14999 - protein, 155 aa, Xylella fastidiosa Dixon
MSRRIVARKSRIHGNGVFAVVSIHQGERIIEYKGRIRTHAAVDANSHGHIESGHTFLFTLNDDYVIDANDAGNIARWINHSCSPNCEAVVEEDTGGNRRKDKIFIQAIRDIASGEELTYNYGIVLAERHTARLKKIWACLCGSDHCTHTMLQPKR

SEQ ID NO: 15000 - protein, 602 aa, Anopheles gambiae str. PEST
TKPHSSDELRTGSNDISLSLTVVPLPLIDGSIMKRPEEKQLLSMEEIKIVGMEEPYYTDKGSDNNCFMNNLLERKTSSDADSGKGSSVDLAIIYRAGNLYWAAQTRKSIHWPCIVHVDPETDQITRLYGDKFLEVHVSYFGDRGRRAWIKEHSILPFEGVDEYCTNAKNMEYGKLLKSALKSERWKNACSIAERYMTLALSERIASFDHEVKLELARHKVMRHRMAIEGRIKNGASQKMPALLPSDNSEVLEHWNKRDRSSSPESPEYELLPGVFPTKNNPIKKIKFSPSMQNCILNDNRSPLDRPLHSMDSEENPPGSATKANGPKAKTLGVSDLENLNSTEYDDILTFIRYYMFDGHTSYEVEKGLQLYIPPLKPPSVNRQLDGVEDSVCRCQPSDDDPCGPTSACLNRAIMMECSSKTCPAKESCSNQRFTKRIYPALEVRFFSDKGFGLVALEDLKSGQFVIEYVGEVINSEEFDRRVMMMQAAKETNYYFLTVEPDLTIDAGPKGNVSRFINHSCEPNCETQKWTIGETRVIGLFAIKDINAGEELTFNYNLESLGNNKRVCLCGAGKCSGFIGEKYRPPNKKDIVISMKSERSLKN

SEQ ID NO: 15001 - protein, 1969 aa, Anopheles gambiae str. PEST
TAEGGSCSSDNELPALVSAAIRRVESGSDAESIRGLSAPTQQYTSSLLRDFVVKTQMLGTVGGGGAGAMPAGVSGSAANSAAPAPKRRGRPPKSSLQAAPAPPPAARPTGSSRSVTIPTVSESPDSGILSTHSSTGSPKTDKTSGSRTSGAAASSYALTSCLDRNTYATERVLYPPRGPKKRGVGRPPKKDTTAHQQPAGAGRGGSANDPAARSQQQAEDRLDPHWQKIDISKKFHEPRLSGYKSDGGHSTICCSKRLASQSGYISDYGGVGASSGRSRLSGYKSDFSSRSRRSCSRAGGYRSDYGRAKSCGYRSDCSTRHRKQVRRKRRKKIGSHQQSQQQHHNQHDQQHHNNNLSDRKNYNASSDGGGGGGSTKSASVGELEIIRRFQKSTSSFALGGIAGSVDLLARIADGTIPKASPTKSVCSKRSRRKSCASDRLEVMSVKSYGVIGSCGKIRQRRLSTMSRSSGLDLKLNVEIDRLSESFSGMCRIVGGTVNNEAGQASSGAGRSVSPPEETTATNAPAAATPTSGKGHQTKRSVKKRKASEHVTDSPSTAGGANAPGGGGGGAAALGNGGGAGGGGGTGKRRNKKTVPTQSPDDHKLPLKKRHYLLTPGEKGNNTNSSFTGSHTVLNPCAFASGARSSANSAAAGSSISGAATKAVTPKKRHLLKSPEPGPVPTDTELQLQINRERQATGASGQPGTTSDNSAGPQHRSTPPARPSVIQSSGSVHPAASSGAYSASSAGPPPGVFEPTVDLELVIPPPSSIPSLIAKVEMLDSPRLAGSALLATISTASASSEKVLEKLLTKTGAHHLLMKKKRKKPNRTGFPTVKKKKKKLPENDPLDDGLSVLDLKPEVGPDLFDSSNLTRHVPSEAEKTRMKERQQQHHPTTGKHAACDRVPKEGEPTDCFIERHTGVGRPRLSVVSLEKLQGKLPLPGGGSRDVATTPPATGGRGHGRKSVPPGLAEPIESARLATRVTASKSVTPTPPVGTVIPTRLKRGKSDETLRAQQLEKPTKKPRKELPGSAEPSPETAAHLSKRSAIVSPIVEPVDPEETAHVLQPASSTEELEHDPLPPDEGPSDFLRLTDTPSPTSSGEARELAMGGAAAAGGRGAGTSKKLPRKKYITAGLFSDCYKDDGTTGGEGRSGPKTPPETLLPPPAYCERFLRRTVRDFQLPYDLWWLQENGKLPGRNSVPSWNYRKIRTNVYYDVKANPSTDNNTQCNCKPDSGCQDDCLNRMVYTECVPEQCPCGDRCRNTCIQRHEYAPGLERFMTEEKGWGIRSRERISKGTFIMEYLGEVVTEREFKERMRTMYLNDTHHYCLNLDGGLVIDGHRMGSDCRFVNHSCAPNCEMQKWSVNGLFRMALFAMRDIPPNEELCYDYNFSLFNPSEGQPCRCGSEQCRGVIGGKSQRIKPIPLDASKAAGADGTAGGNGASGALVVELSPRSAARSRKRQAKKNQPIVHLNGTPLPTFHPPSVKERALIAEHHCFLLRNLNKIRRQKERAATLASAGGGGNGGAGAAATESGGQGAAAGSDQTAGGSGKPSLASQISALRCPRNIRTRGLAFVEDDPELEKTARIAVALKDICTEIATLKGVPFISKLQLPSKKKTPLYYERIPKPIDLAQIETNIEQGVYRMPKVFEEDLLIMLSNAIKYYGINSPEGIASEALKSHYYTCKQQQVPKLQAYIGEENELLRGFVPKKEPAEDAVPPKPKRGRRQEQPEDIIRCICGLFKDEGLMIQCSKCLVWQHIECTKADPAVENYLCEKCDPREVNYEIPLNEFTEEGYQYYVSLMRGKLQIRQTDTVYVLRDIPMSPDPKNPNAPVRKHTYETIGKIEYSECDIFRVESLWKDKEGRRFVYGHHYLRPHETYHEPTRRFYPNEVMRVPLYEVIPIELVVDRCWVLDPITFCKGRPVDSSEPHVYICELRVDKSARLFSKISRHSHPVCMKSYAFHKFEQKLKIAKTFA

SEQ ID NO: 15002 - protein, 1370 aa, Anopheles gambiae str. PEST
RKAAGLGAGSALLATISTASASSEKVLEKLLTKTGAHHLLMKKKRKKPNRTGFPTVKKKKKKLPENDPLDDGLSVLDLKPEVGPDLFDSSNLTRHVPSEAEKTRMKERQQQHHPTTGKHAACDRVPKEGEPTDCFIERHTGVGRPRLSVVSLEKLQGKLPLPGGGSRDVATTPPATGGRGQHESAGKGASQSSTPVRPHSGGIAALHNEDSTSLDSMPLLKRLHSRSISRMQSVITPTVVIEPIATSPKTPGRPRGRPRTTSPITATETPNSPTATTGPGRGRPRTALALTGNPSAASMQRTPASPLSSPSPTVAAAERTAGRKKQRLDGRKSVPPGLAEPIESARLATRVTASKSVTPTPPVGTVIPTRLKRGKSDETLRAQQLEKPTKKPRKELPGSAEPSPETAAHLSKRSAIVSPIVEPVDPEETAHVLQPASSTEELEHDPLPPDEGPSDFLRLTDTPSPTSSGEARELAMGGAAAAGGRGAGTSKKLPRKKYITAGLFSDCYKDDGTTGGEGRSGPKTPPETLLPPPAYCERFLRRTVRDFQLPYDLWWLQENGKLPGRNSVPSWNYRKIRTNVYYDVKANPSTDNNTQCNCKPDSGCQDDCLNRMVYTECVPEQCPCGDRCRNTCIQRHEYAPGLERFMTEEKGWGIRSRERISKGTFIMEYLGEVVTEREFKERMRTMYLNDTHHYCLNLDGGLVIDGHRMGSDCRFVNHSCAPNCEMQKWSVNGLFRMALFAMRDIPPNEELCYDYNFSLFNPSEGQPCRCGSEQCRGVIGGKSQRIKPIPLGSSGGGASGPGGTGGQRNASEAGADTDASKAAGADGTAGGNGASGALVVELSPRSAARSRKRQAKKNQPIVHLNGTPLPTFHPPSVKERALIAEHHCFLLRNLNKIRRQKERAATLASAGGGGNGGAGAAATESGGQGAAAGSDQTAGGSGKPSLASQISALRCPRNIRTRGLAFVEDDPELEKTARIAVALKDICTEIATLKDDKGVPFISKLQLPSKKKTPLYYERIPKPIDLAQIETNIEQGVYRMPKVFEEDLLIMLSNAIKYYGINSPEGIASEALKSHYYTCKQQQVPKLQAYIGEENELLRGFVPKKEPAEDAVPPKPKRGRRQEQPEDIIRCICGLFKDEGLMIQCSKCLVWQHIECTKADPAVENYLCEKCDPREVNYEIPLNEFTEEGYQYYVSLMRGKLQIRQTDTVYVLRDIPMSPDPKNPNAPVRKHTYETIGKIEYSECDIFRVESLWKDKEGRRFVYGHHYLRPHETYHEPTRRFYPNEVMRVPLYEVIPIELVVDRCWVLDPITFCKGRPVDSSEPHVYICELRVDKSARLFSKISRHSHPVCMKSYAFHKFEQKLKIAKTFA

SEQ ID NO: 15003 - protein, 1351 aa, Anopheles gambiae str. PEST
MKALELQPISRTKPPHDDSRRRAETKDRDDSSSSSSSHRTKEHSRHSSSSGSSKHKSSKSSSSHEGATARRLDTSGHRSSRPKEKEEEKQQRDRGEGGEKERTGRKSVSAGGSFLQEETNRDRSIVKKSSKTKDSKRDSSKAKSGVEAVEEKPAEKPLVTESPQKKIEEQPVETRNVPECPPVEQEPAEPFKASPEAPRIVTKASLKMYKMEDSQKQRTSGHGLVRDRDKLMKKSSGAVGDAYGTAEALAGGYSASEMAMQSGGHLQGAAGVSGPAWPVIANEGDSANVELSEEYLRDMEEKLSRFETIRENIYHSDRIVSREAKKMTCDCFLTHEEIERGEHGCGEDCLNRLLMIECGSRCTVGDRCTNRRFQRQEYAHCQVFRTEKKGFGIQASSAIAPGEFIMEYVGEVLNSAQFDERAEAYSREKNKHYYFMALRSDGIIDATTKGNISRFINHSCDPNAETQKWTQSAQLDVGKAVKGAALVAAATAAGVGDRPEGGKSDAAPVAPTKVKKTRKKRTTGRKQRRLEIHEDPDLDEEINNLLKTGLKNQAHTLKLSRLMVRAKDIKSRSRLLTLLQSGELPCRRLFLDYHGLRLLYGWICESTESIEDLKFRIQILDTLDRLPISNKTMLKDSKILHTVEKWARVEKGKQQKEVVPGPTAVPKEEPQPQLPPPAPAAVGEKAEKEVSSRTSSPSDSNGAGSDSSSQPATERQQQQAAAKKDLLGLGSMEVLKNMPALLKLADLGKLKEIISTCDNIQIPEPEDENAPEEQRLGTQIRILSCKLLISWMNLKEVFRIPKKERIEQMKEHEREADMRYQAIGLENDDEKEEKQQHHRHRDGRGWGDSRGFVRGSGEPKRRRSLDDRDAPYGGGLGGKLKRPPPGGLTGVGGYAPLKQDNLSKQQRRHLFEMKVAHEEAERRKKEMWLMHENACLRFGLNPHLTAPMDIPVRMNPATGEYFSEDDRLLPTPPSHAYFKIQPPPMSTNPDDYELPAMKLPPYWRFAIDERGRLYYYHVKERIPQWEPPRKPGASRAAVVADDEDISLSSDSSTTDTCDTSEEELAAQFEQLLKKKRKQQSSFNLDDVLAKPDDMNDDMSKAPVKRESGESGSPQMLTLEEIFGESANASTAAVDEATLQQLLPRRKRKHSLKLVQARIISPRTEEDKQYGQMEMKRYKETKEKLRKRKEEAKRLRARSMFSKTLADNPFGAAPAQQSAADGGGSSAMATAKLAKRKKSSKGDLNSEEAKKIKEKFRVDIAGVIVQHLSSYRKDSCPLGRITNTDDFKHLARKLTHFVMLKELKHCDNTVHELEVTDSVKTKAREFIKKYMAKHGPVYVRGENEPDYSNVAL

SEQ ID NO: 15004 - protein, 298 aa, Giardia lamblia ATCC 50803
MGKVMAMKQGDKLPTAREPLRVFPYVYKRDELAKMRRVFASAIHITEMDAVSLHYTHVKRNIYVGCKRPSAARKTFCTCTCKEGTGCGTSCELRKVHLECYKECCAGSPCSKQFIVRPLFGNSIDLPKDATTLHKDNSRLADCGNQRLQRMQYARTAVYPAGRKGYGLFALTSIQRGALVTEYIGEVITREECMRRKKSAKGHLYFLALDRELYIDAAHKGNESRFINHSCDPNCEVQLWYVGEEPRAAIVALRSIAPHEELSFDYKFDFYPGVKPKYPCFCGSLYCRGYIDAPKLRT

SEQ ID NO: 15005 - protein, 139 aa, Xanthomonas axonopodis pv. citri str. 306
MFALAPLRKGERIIQYKGRLRTHAEVDADDTGDVESGHTFLFTLSDDYVLDANYEGNVARWINHSCDPNCEAVIEEAEGDDRRKDKIFIEAKRDIKPGEELTYNYGITLAERHTPRLKKIWECRCGSKNCTGTMLQPKR

SEQ ID NO: 15006 - protein, 186 aa, Bradyrhizobium japonicum USDA 110
MPAISSNKPYRVGRSKTGLGLFATKPIKKGTRIIRYFGPILDSRIPAHDEIENKYLFELNGRWTIDGSVRKNLARYINHSCRPNAESDVRPRERKVFIRAIKNIEPGDEINYDYGTDYFKAYLKPIGCKCASCETKRKKLRAEERAERAKVKARTEAKAKKAGAKAVKKKKLNGHAVGKANGSARA

SEQ ID NO: 15007 - protein, 179 aa, Ralstonia solanacearum
MPRSSAAAKDSDAHQPTPPEAAGLRRRDRIAVRESGVHGRGVYAVAAIAKGKKIIEYKGEHISWKEALRRHPHDPDDPNHTFYFSLEDGSVIDAKYGGNRARWINHACKPNCEAREKDGRVFIHALRDIDAGEELFYDYGLVIEGRQTKALKAQFACHCGAKKCRGTMLAPPEKKEKKQ

SEQ ID NO: 15008 - protein, 4498 aa, Fugu rubripes
MAHSCRWRFPARPGGSSNSGTGRRAGRIRVTASLRSVPGAHPNAAGLGPGFDAALQVSSVIESNLQKFRDVLGESSDSSSAEEEAFGGFRTVAEQKRIQSPSTTCSETPSPQEKKPRGRPPRVLTAHKSAPSLPSHTSLPSSTQSKPEGPERPAEKIKRLPGRPPGTGEKRRGRPPSSSSKKSWSTTVADDSRQDGSEDGVDTDEDRKSAKRAPFGPSQPNDNEAQLPKGGRGDAKVSNLKRLRATKLSPLKSRLKTLPGVPRRRRGRPPSAERLKAEAAAAAGAAHLSAAIESGEGKHKAFKARMGEQLSMPRSVDDIEDQDSCNSAASPASSKPGRTMGLRKSPRHRKPVRIVPSSKRTDATIAKQLLQRAKKGAQKRLEKEAVASGSRGTGAIEAGIRKTQLKNIRQFIMPVVSTVSLRIIKTPKRFIEDEGSFGTPTPHLKMARLETATSAVSASSQPTASSSPAPAQVSSALNVTAGNSGAPTDNLPPPPPPAPSPSVQSTTPSLLNTNANNATNGRFSSSAASCGSSAVSQHSSQLSSAESSRSSSPSLDDSSCDSQASEATQALSETEDHSPSLQGERKGNLLHSAKLPSPPSEPEPEHVLQERNRRGRRGQGVSRESPNQRPRETLAPVAKKPIISPPTGVLMSSTFVNSQQASSTASSSSSPPPPPLLTPPQLPQSASSSTAAIAEHHPQSTWMSHPVPPFMPGSSVLSGLSDKRNRSILRQPTFRWTSLSHPEHQYFSSAKYAKEGLIRKPIFDNFRPPPLTAEDVGLSRQGVSGAGGTPTVPFPAPSSAAGTGNRLFAPLHSHTHHQHPSSSRFDAPVQKRSPLLRPPRFTPSEAHSRIFESVTLHSSSGSSPGSLSPHQTSPNSNRISRRRRQLGSGTPRGHLRSPSHSMTRRSSQIGGQLSVGKGSSDTSVLTGSVSTSNPSSLQGVSSIPLATSALNPAPFSTFSNVSLSLASQGTTDSRRGTAGNPPPSSNTSSSSSPLFQNFPPSAQDTVRGAGKGAKDKSVSISQEPSPKEKERDSEKNREKEKENKREGRKDSEKKSKIPSPDGSPTAPSSLFTVDGRDTEDPILTLASKKAPGRKKSISVDLVSDTAPSEVRGLHSIGPLSIAKGCLFKKGRPSDKGAEIEDGEKEKEKQSAANQQTASLPGQPGRQQLPVSSLGSVLAQAEKQPVSNKRVVGLLKKANAQLCEINKSKLKPTDQTKVQGQESDSSETSVRGPRIKHVCRRAAVALGRNRAVFPDDMPTLSALPWEEREKILSSMGNDDKSSVAGSEEAEPQSPPIKPRETRQKAIQEAPPKKGRRSRRCGQCSGCQVPEDCGVCTNCLDKPKFGGRNIKKQCCKMRKCQNLQWMPSKIFQKQEKGKKDKKKKLSEKKEGLNPVKIPASDSGQKSSPPLQKEDPHRKKSESPPLKSAEDKLKLQSASKQPSPGLDSSPAPDEPSQAPSAVTAQSPSPPLTADKKGHKPQQSAPTSSSSSSSSSSSSSSSSSSSSSSSSSSSSPSSSAQNSPSQATQSHAPSQQQQRPVNSQASSKKDASPKIPLSETKRKPQQHSAQQQSSSALSDTTDLKQLKKTHSCSVPPSPKQRPKDKPLMAKPSGSSTLNWVNTPSTGSQGRSRAPFDGVHRIRVDFKRDHDVEKVWEAGGLGLLTSVPVTPRVLCFLCASSGNVEFVFCQVCCEPFHLFCLGESERPLQEQFENWCCRRCRFCQACGRQHQKTKQQLLECDKCRNSYHPECLGPNHPTRPTKKKRVWVCNKCVRCKCCGATKPGKSWDAQWSHDFSMCHDCAKLFAKRNICVLCNKCYEDDEADGKMVECGRCHHRVHAKCEKLTDDMYELLSKLPESVAYTCTKCTERHPAEWRTALERQLQGCVHHVLTALLNSRTSSHLLRYKQMVKPPELNPETEESLPSCQQLEGPDPPVLTEVSTTPPSEFPPDLESVKKKTDQGRYSSLEFSDDIVRIIQTAMNGDGGHPESRKANSMVKAFFIRQMERIFPWFKVKESRFWEKQNVSANGLLPNAVLPPSLDHNYAQWQERQELSRAEHSHLMKKIIPAPQPKTPWEPDSPASPPPLPPPPLLPPPPLIPDQEDGPDFPPPPGITDNRQCLLCQKYGDENTNEGGRLLYIGQNEWTHINCALWSSEVFEDDEGSLKNVHTAVLRGKQLHCQKCQLPGATVSCCLTSCTSNYHFMCARHCHCVFLEDKKVYCPKHRDLIKGEVVSEFEVTRRVLVDLEGISLRRKWLSGLEPENVHMMIGSMTIDCLGILTELSDCKRKLFPIGYQCSRVYWSTLDARKRCVYTCRILVCHPTLLESDLKNVMSPEENRTIAHSPPPMTDFPDPFESPRRSDSLSPNNTPKLRVYTRNRHPSYPPCHHSLGPSPIPSLGGNTQPQSQENVTPGEFPANPSIQNINARRNSSAPLSPPLHQLNRQRGVTSLPQILSRPLTSPPPLIPSPARDPEKSKHLSKEVAKSQTLRDDERGRPFSTDRNRQKSSRDQEFRDVDKGQVSSQDQAIKDSEKNPSSRELQKESDKCEVSGREPEKRTSLGKDLDHKESERGKLVSRDQVRDSEKRRQMIRGSDKGRHGSRDPIHRESNKSKSFSREPSNKDMEKSRSLSKEAGLKESDKHKQYSKETGKDSGQGKDRLSSRDTDKGRPSSRDFSQRSTERNKDSGSGKDRNTGTQFKQAGDEAKNPGLVPASSGQYSPPVGTAALTGQQRVGGTKQTDKQGKHGGKDQDDSMSPTSMPRHRLNSYSSQSTGNVMQASFHKDSVIGKTGSLSSIQKSSARKSNDYLPGPVTAAAMKPLWPSWTPAEEDVVKQGSMHLASPAASLAKEKQPKVKTAGSREVSKDHEREKTLQNNSKIPLLNNNTKATGSFTTNATNTSSNNGSNSRVAVLGNSIEAHGNAQGEKLENQGGDRSSSKNRENYHSSERKNSSGADNMHQSSSAPEKEVKTDSESHHKATTNQLPLSSRDKRKFVSFPSVTTLKAEMKLDPNGTGTVGGISSSSNVTPTSTISPASQGTCRSALATLYSPSVSSSDSSESDTQPPIDEDVHTKHLHIKHRDHHSLLSHAAEDEGDGPEDDNDRAMDGKHHEDDSDGSGSAKRRYPRRSARARSNMFFGLTPFYGVRSYGEEDLPFYGSGDGAGAIVKRRTGIRKKSAEGQVDGADDISSTSSSGDSGEDEDDEMKQSGKDPFYYSFTRTIINPGDGLPSIEGIDQCVGRGSQLQRFLKDEAQQQQRAQGKTEEDLLNALTLGKPQIGQLDGVDDGSESDASTSTTTTTTTSSSTPNKSTPKRRGRDRHVEKPDPHDLSKDADNSGGAVSSNTREGRKNQKENCLPLGGAVKSQSQGQDPLETQLSLSSDLLKSDSDNNNSDDCGNILPSDIMEFVLNTPSMSMQALSQQSEPSSSELLLDEGYVDVNRRKNMLFDDFSQPLSNAESGSVVESNVNSSMSVEEPYLPLELPSDLSVLTTRSPTVSTSQNHTAGSLIPDSSDRNMLALTPNSEVISGDKSGDKKRAAVLQSENQHDASTLGNKNTQVTEGHMTPEHFIPSSAIGQVVEPSGNQDVNRSSGTPGLPSSPSLPQKYLQTSTVAAGSPSPVSGPSQTQVTSPAVIKPGPDKLILVNQQFQPLYVLQTVPNGVTQKLSATGVMDNSSQAVLSSMTLATGLNTGLSTAQPIFPAGGKVLGTMAHPSQIHTFTGTTQTGFQTGIPSTTSGLLIGLPHDQSQILVSEAGRPQDLRPSVAIVSSSPSLTSSPAALASAHGKKRPISRLQPRKTKKLARTRSQPALAPSEVNPPNMTLINLSSPQITASIPGQPGGLVELSTISTSQRKVPNIIKRPKSGVMYLDPTTLIQQRIPGPAQSGVLGHDSSSHAHLLPCTVSGLNPSQSVVNVVSVPPNGAAGLLAPGSVSLSTPVLGSTEITGSISNLLFKASPHGLGLSDQPMVLQSAGGAPLMSQLTSSVQTSLSSSICVLPSQQTISMTVNQQAEIEGNNLHLQHQSQPLNRAQTLDSGPNSAVTLAPSSATPLSPTKGCVVGVFTQTSALSQSNRTAPISRSSDPRPAKTNTTVTVLGAEKGKQKTKRSRQSANFTSGKKLKVSQEEEHHSHHAGRAQSNSSSKDLSSLEPMDTGKPAEKTTNKGVLGKKKTSEGHVLPANILGNEKGCVAEGAGSLPVASPPDQENSSDLDLDSKPKKGIIFEICSEDGFHIRCESIEEAWRSLTDKVQEARSNARLKELSFEGVNGLRMLGIVHEAVVFLLEQLYGSRHCHNYRFRFHKPDEPDEPPINPHGSARAEINHRRCVFDIFSFLASKHRQPPEYRPHEDDGDEGQLKTARRISMELPLAVRFKQLKVTSKESVGVYRSPIHGRGLFCKKTIEAGEMVIEYSGNVIRSVLTDKREKYYDGKGIGCYMFRIDDYEVVDATVHGNAARFINHSCEPNCYSRVITVDGKKHIVIFASRRIYRGEELTYDYKFPIEDASSKLPCNCNSKKCRKFLN

SEQ ID NO: 15009 - protein, 2548 aa, Plasmodium falciparum 3D7
MEYKLFKNKKILNEKVNELTKKNRQRNTLDHINCIEIDDDDDDDNDNNEEPKEMNINKTNNNNNDILMKSCNDIRRNTTFYRHNVINEEQKNFEYLLSRKKKNVDSIDNVNFYDFMKNDFFNIFNNNIISEHKKTNQIVNQINNNVDTSKNVVYNINYDEHKGEVVNLSFDKKGKETYPQVDIELYNKKMNPRYQNINEQNTCQTSDDNTTYRNVYSDNCALNSSYTNFLRNKSLKYKKCYKQNRQDESTGAEFDYNLDESVYYDDCNNKLYKRSFLKNNKNIIEKGREEHKQDIYNNISDICKSYIKNFDYLNKRIFHNKSKIWKLSNKKVTIHGDPKKRIERNKQEIEDHRREQDGENDQEEDNYDDYDDEDDDDDNCHIYDNYDDYLENDDYDNHNYFYHKNHDVNKIRKIQNKNCSTDFINYTSINNRNMECPNKNADNLKNMDSFLLYMKERKIKKKKNINDHMENQLSDTLNNSNNYNKDVYDSYYDDMNFCYDKDYNMILKKGVNSNRTKSLDRYPNNISHNYVNNISSEIIKYCKDNNITLKSDIKNIINHFNKKYANSSLTNSKISMYENGYPQRSVDRIYDSSTNDPKSDMNGSNNNNSSSNNNNNITHITNDCDNTQTNKNKHYVNSIVNSIVNIFQKRKNVNEKKENINEQNCISFNTNLRNNKLNNNDDLCSNSYVNNINRNKQITNNENKKDNMLMLKGTYHGDSLNESINIEHNLKNNNSMSDVNFVLNNNDNDKKQNSYDISEVSINCYYDDVIKCYMDYTMHGMEDETNFYLCEFCEQNIFDMNNMIKKDKAKECMYRCNISCGRTFHKACVCYIKNNDNYICFFCLYDINFCTLCKEVLTNDSLLPCYYPLCSVSMHTKCVEKLLLFNSHCLKQYESIILPRDINIEQQKNTQKSASDGIIEQPLNIKKKIKRRHIYRKRRRRGPRKSQITTSNKKINKSELAGGSIINGVDMEQENDQGGNNNNNDDNNDDNNDNNDDNNDNNDDNNDNNDNNDDNNNDNNNNNNNDNNDNNNNNNNNNNNNDNDNNNNNNCDENFKNHLLKKDLLRDEPHHNNYDKILECNTEIKMENNVNMSEEPIYNKLFNGKEETLNNENDEKIIVLKKFICPLHICYVCKEFDINNTESSKKELKNNLFRCIKCYKSVHRKCMNQLKNNDNNDNDNNNNNINIYIISHKHRIICCANHMDDYKKEHMEYLKYIKEVKDICKLDEPIHNNNNNNNILSEKGFYGDENNLSISKFHNNSSYEPIKNKETCIKGKDSNYLSHDNKGITDMNNTNKMNVLNLKSCMVNDMNTSERKKKKSCESRGSNITNKKVVFDLTDELNEKEKSPPLDNVQNKIIYGDNEIEKNVNICQKEDGGLNLGSMNILSIGKNHMRTNNNNNNDSSCSSNNNIISVENEYILKNKNLNKSNNSLLDHNNKIKKNSTLNIKECTDSCINVDEFINKNQNEKDISLENIDALCIKRKRNVSHPYNDTLDDTNILKDISNNKSYYVNISKKKRNVSFNYKEEFMKGDEQFLLKGNNLESNEKNTKNKLCNNDNNNNNNNKGKNTKYNTLDRKNNKNKQINDTINKEPENINHNMQNQQLTDNFVEDNMKYKQEIYHIKLSHILSIEKGLLSLQEINIDQMNDECKKHISILCTFRQDFINYVIFLFSKRLHKENQIEPVNGVDHKKEGNIYHAERKQEKINHNAKHNEQGSINNAKHNEQGSINNAKHNEQDSINNAKQNEQDSINNAKHNEQDSINNAKHNEQDSINNAKHNEDDSLNNAKHNEDDSLNNAKQNEEDSLNNAKQNEEDILNNDDHRNQEELHERWKENMVYNFLANYDKKEKKYISKKEEDAIIKILSNDIVGIMKKELKISLYDFIMLKKKTISTNENHKDNDESVVYVEDGKHHCNDINKMKDNVNNDIIPNIKYNNNNYDDVINTKEKESIPDASYMKVTRNQSIMNNDIYNNNIQIIEKERIMNNNKKNYYDEEKKREEYNGLFSKGKKKSFKNNKMDLKTFFSLTNNGYKVDISILKKYSSFLKFEYISKNIYLNDKNKNLLACKSDDYKCLCQGECNLYTCYNSLSNIQCSKSRCNLPEKIQDRKCFNRPFRKSFVKDLEIKKTEKTGYGVFCKRDIKNGELICEYVGEVLGKREFEKRLEVYQEESKKTDMYNWYIIQINKDVYIDSGKKGSISRFINHSCSPNSVSQKWIVRGFYRIGIFALRDIPSGEEITYNYSYNFLFNNFECLCKSPNCMNYHLLKKGESSGASNIIKETELLNNTIFNPVENFHNLHGKMQDWNIFIEEAHTRLLYEYNKMNAFNLRLMECYSTWIFYDMNFQKNQFFSLKSKPYNVSAEFWKVLVSAFSDGEKNIINTFNLFLPSLIKIGQLRRIQQYSYILHNIIGLEHDMWNLIDKGFADDEVCRKCKSCGNLTMCDKCFQSYHQLCGNMHSKMYKNNELVLCRFCQKYDYKIQWIKENHGSKMKTCIEIRSKAFYKLNRDIMTLLEESVKYTQNQSLDSIHAHNTKAFKSKKLKLRKFQYKYVKI

SEQ ID NO: 15010 - protein, 363 aa, Arabidopsis thaliana
MPASKKISDRNHLGQVFDKLLNQIGESEEFELPEWLNKGKPTPYIFIRRNIYLTKKVKRRVEDDGIFCSCSSSSPGSSSTVCGSNCHCGMLFSSCSSSCKCGSECNNKPFQQRHVKKMKLIQTEKCGSGIVAEEEIEAGEFIIEYVGEVIDDKTCEERLWKMKHRGETNFYLCEITRDMVIDATHKGNKSRYINHSCNPNTQMQKWIIDGETRIGIFATRGIKKGEHLTYDYQFVQFGADQDCHCGAVGCRRKLGVKPSKPKIASDEAFNLVAHELAQTLPKVHQNGLVNRHIDAGKSWNNLSQRDTCSRNCIGVVIRLSRPTSDRCFGLVRHFDEYSRKHSVMFEDGVTEFVDMSREDWEIV

SEQ ID NO: 15011 - protein, 344 aa, Arabidopsis thaliana
MPASKKISDRNHLGQVFDKLLNQIGESEEFELPEWLNKGKPTPYIFIRRNIYLTKKVKRRVEDDGIFCSCSSSSPGSSSTVCGSNCHCGMLFSSCSSSCKCGSECNNKPFQQRHVKKMKLIQTEKCGSGIVAEEEIEAGEFIIEYVGEVIDDKTCEERLWKMKHRGETNFYLCEITRDMVIDATHKGNKSRYINHSCNPNTQMQKWIIDGETRIGIFATRGIKKGEHLTYDYQFVQFGADQDCHCGAVGCRRKLGVKPSKPKIASDEAFNLVAHELAQTLPKVHQNGLVNRHIDAGKSWNNLSQRDTCSRDVRGWCYRVCRHVERRLGDCLILFSDCFEVEKPK

SEQ ID NO: 15012 - protein, 352 aa, Arabidopsis thaliana
MSSSKKGSDRNQIRKSLRKLKKQIGELEKLESPDRLNNVKPIFIKRNIYLKKKLKKKVKDHGIFCSCSLDPGSSTLCGSDCNCGILLSSCSSSCKCSSECTNKPFQQRHIKKMKLVQTEKCGYGIVADEDINSGEFIIEYVGEVIDDKICEERLWKLNHKVETNFYLCQINWNMVIDATHKGNKSRYINHSCSPNTEMQKWIIDGETRIGIFATRFINKGEQLTYDYQFVQFGADQDCYCGAVCCRKKLGAKPCKTKNTTLEEAVKPVACKVTWKTPKLLNSEVRETNLDASGQAWNNHSQRKICCRDCIGAYYTAQMKVLTLVVDIFQVMYEDGVTEIIDMCREVWKVVTA

SEQ ID NO: 15013 - protein, 352 aa, Glycine max
  unsure (1)..(352): unsure at all Xaa locations
MPAMKKNPELTCIGSVFNMLGKELGEPVDFELPDSFNKSKPMQYTYIKRNIYLTKKVKRSRFDDDGIFCSCTXXSPGSTSVCGRDCHCGMLLSSCSSGCKCGSSCLNKPFQNRPVKKMKLVKTEKCGSGIVADEDIKLGEFVIEYVGEVIDDKTCEERLWNMKHSGETNFYLCEINRDMVIDATYKGNKSRYINHSCCPNTEMQKWIIDGETRIGIFATRDIQKGEHLTYDYQFVQFGADQDCHCGAAECRRKLGVRPTKSKLSSDAALKLVAYQVYQNGXXLQIGSSRVVDQPKCLHNCIGEVIRIKHLENERFGIIKRFDKYSRKHSIMFEDGCVEIYDMSXREDFELVR

SEQ ID NO: 15014 - protein, 260 aa, Glycine max
  unsure (1)..(260): unsure at all Xaa locations
KASTEIPPTNGTRRFFRVGYINTFTPSRPFRFPISHSLLQSHFRQNLPLKESKSXANFIGSVFNMLGKELGEPVDFELPDSFNKSKPMQYTYIKRNIYLTKKVKRSRFDDDGIFCSCTXXSPGSTSVCGRDCHCGMLLSSCSSGCKCGSSCLNKPFQNRPVKKMKLVKTEKCGSGIVADEDIKLGEFVIEYVGEVIDDQTCXGRLWNMKHRGETNFILLLMRTFLLVCIVKLENEGSKIASTCVVQVQLYLWKIEWFCCV

SEQ ID NO: 15015 - protein, 895 aa, Oryza sativa (indica cultivar-group)
MASSSSKASDSSSQRPKRPDQGPSGKDAAGLVVLHGKLAQLKRQVQSTRLAAIKERVEANRKALQVHTCALFDVAAAAEVASRGAEGGNALSRGAAEGHCRLVGWDSASGPGERELVHVQEENLVAGTLVLSSSGGSGASHRTVVQLAKLPVVDKIPPYTTWIFLDKNQRMADDQLVCRRRIYYDPIVNEALICSESDDDVPEPEEEKHVFTEGEDQLIWKATQDHGLSREVLNVLCQFVDATPSEIEERSEVLFEKYEKQSQSSYETDFQLFLGKTMDVALDSFDNLFCRRCLVFDCRLHGCSQNLVFPSEKQPYGHGLDENKRPCGDQRYLRRREVYQDTCNDDRNACTTYNTDSRSSSLKVSATILSESEDSNRDEDNIKSTSIVETSRSKITNSEYADKSVTPPPGDASETENVSPDMPLRTLGRRKISKHASKSNDHSPDKRQKIYSSPFPFAMSVLNKQSVPEIGETCPDSIESAVDQLPSLDDPNKKISTKDMCAGSTTNTTENTLRDNNNNLFISNKEHSISHWSALERDLYLKGIEIFGKNSCLIARNLLSGLKTCMEVASYMYNNGAAMAKRPLSGKSILGDFAEAEQGYMEQDLVARTRICRRKGRARKLKYTWKSAGHPTVRKRIGDGKQWYTQYNPCGCQQMCGKDCACVENGTCCEKYCGCSKSCKNRFRGCHCAKSQCRSRQCPCFAASRECDPDVCRNCWVSCGDGSLGEPLARGDGYQCGNMKLLLKQQQRILLGKSDVAGWGAFIKNPVNRNDYLGEYTGELISHREADKRGKIYDRANSSFLFDLNEQYVLDAYRKGDKLKFANHSSNPNCYAKVMLVAGDHRVGIYAKDRIEASEELFYDYRYGPDQAPAWARRPEGSKKDEASVSHHRAHKVAR

SEQ ID NO: 15016 - protein, 1153 aa, Oryza sativa (japonica cultivar-group)
MLRSHSKARALPLDGTVEHLGCGQGVVIGAARQGEDQVGFLQELRSMPTTESMTVRTVRRKLRSAMAWGISEKASGLRSLSWTGWLRSPTTASSSACRPRREDVLVHEIAGELRRLGDHAPHLLHVVVVAGPPPAHHHARDDVAGDTHQRGVDVDVLGVGGTPAERADEARHLLAADMAEPEEERMEPPPPPPYIHIETNDFLHRRHKRQKEEDIAVCECQYNLLDPDSACGDRCLNVLTSTECTPGYCLCGVYCKNQRFQKSQYAATRLVKTEGRGWGLLADENIMVTEFTLILWSANVVKYIQAGQFVMEYCGEVISWKEAKRRSQAYENQGLTDAYIIYLNADESIDATKKGSLARFINHSCQPNCETRKWNVLGEVRVGIFAKQDIPIGTELSYDYNFEWFGGAMVRCLCGAGSCSGFLGAKSRGFQEATYLWEDDDDRFSVENVPLYDSADDEPTSIPKDILIKDEPNTQDGNNNTIQNTGIPIIASSSEFTPMNVEPSIASSNEFTPMNVEPLNVSSNELTPMTIEPLNAIPMGVDFTQNGSIEYGAQCAEDALQNSTRGVANLQNQSAPRDNNHTELVAVKRRPTLRGGKAKRGMRKQLNVVGICDRLASEVAREEILYCEEMKNEAAAEIDSLYDEIRPAIEEHERDSQDSVATSLAEKWIEASCCKYKADFDLFPLFRISRVMGKSEHGNLLVSLSDGLPHYSLAAAVGLAIGVAGLCKALHSSLVIPPVSQKKLLSNSDRLYYTGGLKNLGNNCFLNVILQALASCDGFVSSLDNLLGSEDVLPEEKSEKMPLIFALSSLIKVENKVLVPVTLVVSGITEQWWSGGIVTYCNTVNTLSLDFENFYCLPLSPVATINGDIINGCSLVDCLEHFTALEHLDNYRCDHCWHNVAAKYLSLKSEVDEEKINKLHTCVDYGTCSCRHIFTPEEMTCSISSQATKQLAITHFPKILCIHLLRASVGLDGEFVKRGGHISFPLLLDLSPFAGGALIPGQGPKPSAMNKQRHGQQTLHLWRQLNAEMPVNMFPAATDGDSSSHHCGDESINTLGRSFYVGNRDADSRFLSSSSLTDKLYGLSSVVEHYGVCGGGHYAAYRRVTPNSDSNEPVQSLASFRKEWLYVSDDHVSHVSECEVLAAEATLLFYERL

SEQ ID NO: 15017 - protein, 249 aa, Oryza sativa
  unsure (1)..(249): unsure at all Xaa locations
VHPPKALLLLRPHLASFLRRLPPLRHCSLAYGLELVADPRHRRDLCLPPMPRPAKIRKKHENVFDQLIKAIKAPVDFDLPPVLKEWKSNYYVPIKRNAYITRKRVEDDGIFCSCTPSGSSATCDKDCQCGMLFSCCSSTCKCENKCANKPFQHRTLRKTKLIKTEKCGNGVVAEEDIKKGEFVIEXXXGEVIDDRTCEQRLWKMKRQGDTNFYLCEVSKNMVIDATNKXNMSRFINHSCEPNTEMQKWX

SEQ ID NO: 15018 - protein, 798 aa, Schizosaccharomyces pombe
MQTASSLSVLTPLNEENVDRKSSWSKDTIAVQAVGSSPSSSSSHDFESKEDAEGMNKDESAPSPSTSSPSSASSRSQSKYVRKEALPPQLFHHLDSAKDKALTTFEEIQECQYASANIGKPPENEAMICDCRPHWVDGVNVACGHGSNCINRMTSIECTDEDNVCGPSCQNQRFQRHEFAKVDVFLTEKKGFGLRADANLPKDTFVYEYIGEVIPEQKFRKRMRQYDSEGIKHFYFMMLQKGEYIDATKRGSLARFCNHSCRPNCYVDKWMVGDKLRMGIFCKRDIIRGEELTFDYNVDRYGAQAQPCYCGEPCCVGYIGGKTQTEAQSKLPENVREALGIEDEEDSWENITARRQRRKKGIDETSKIIEEVQPTPLTSESATKVIGVLLQTKDDLLTRKLMERIFLTSDPSVCRSIIALRGYNIFGLMLKKFSIDIEFILRSIKTMLSWPRLTRNKIQDSNIEPVVQEFCDHENEEVKDHAKTLLKEWESLEIAYRIPRRKPGQVAPQSTNAEPSNNQSNPPLRDQEPQRGDKGDIKSAINNSTEDLSKKHPALHSSRPSDSRSRSKFGNDYQSHSKHNLFRKNSFPKRRRLSNSDTPSETTTPNNEQEQVSNQANKVDLNKIISAAMESVNQKNVLKAQKEEEERIAQQKREEKRRLAYEESLKRHAKKLHEKKTKSSQDATIDHHLTSHSPESIAFKAVLAKFFANKTARYQEKLGKAEFKLRVKKMTEIILKKHIQLVLSKKEKALPDELSDSQQRKLRVWAFRYLDTVVSRSGTATTTPTDSPSIGESPKKAA

SEQ ID NO: 15019 - protein, 733 aa, Saccharomyces cerevisiae
MSKNQSVSASEDEKEILNNNAEGHKPQRLFDQEPDLTEEALTKFENLDDCIYANKRIGTFKNNDFMECDCYEEFSDGVNHACDEDSDCINRLTLIECVNDLCSSCGNDCQNQRFQKKQYAPIAIFKTKHKGYGVRAEQDIEANQFIYEYKGEVIEEMEFRDRLIDYDQRHFKHFYFMMLQNGEFIDATIKGSLARFCNHSCSPNAYVNKWVVKDKLRMGIFAQRKILKGEEITFDYNVDRYGAQAQKCYCEEPNCIGFLGGKTQTDAASLLPQNIADALGVTVSMEKKWLKLKKLSGEPIIKNENENINIEFLQSLEVQPIDSPVDVTKIMSVLLQQDNKIIASKLLKRLFTIDDDSLRHQAIKLHGYTCFSKMLKLFITEQPQVDGKGNETEEDDIKFIKGILDFLLELPKTTRNGIESSQIDNVVKTLPAKFPFLKPNCDELLEKWSKFETYKRITKKDINVAASKMIDLRRVRLPPGWEIIHENGRPLYYNAEQKTKLHYPPSGSSKVFSSRSNTQVNSPSSSGIPKTPGALDSKKHKLSDEEYERKKQKRLEYERIALERAKQEELESLKQKLKLENERKSVLEDIIAEFNKQKELQKEESKKLVEAKEAKRLKRKTVSQSQRLEHNWNKFFASFVPNLIKKNPQSKQFDHENIKQCAKDIVKILTTKELKKDSSRAPPDDLTKGKRHKVKEFINSYMDKIILKKKQKKALGLSSASTRMSSPPPSTSS

SEQ ID NO: 15020 - protein, 954 aa, Neurospora crassa
MEDGHHSPDSTKESKSEEHSKMNGSKLKRDGASNAGNAATPNGSQTGISRPPSMSPDEHKAASESTATPSENVPTQKPSRKASQKNMKREPVLFNHLPDVREEACTHFQVIHDCLYGSKNMGASEHDALDCDCAEEWRGDMNHACGEDSDCINRATKMECVDGDCNCGSGCQNQRFQRKQYADVSVIKTEKKGFGLRANTDLQVNDFIFEYIGEVINEPTFRSRMVKYDKEGIKHFYFMSLTKSEFVDATKKGNLGRFCNHSCDPNCYVDKWVVGDKLRMGIFAGRAIKAGEELVFNYNVDRYGADPQPCYCGEPNCTGFIGGKTQTERATKLPPATIEALGIEDGDSWDTAVAATVKKPRKKKATEDDEEYINRFEPRGLDEEGVTKVMATLMQCKEKWIAVKLLGRLQNADDDHVRNRVVKMHGYQILKTTLNTFKEDTNVVLQILDILYQLPRITKNKITDSNIEAAVEPLTHSDHEDVASQSKRLLQEWSKLETAYRIPRKKLDPSAPVTTNSFEDDRRNVNHEEHPSRPVNPFENMVVPTGPRSNIPQRNMNYFNNQRPRKLPTNLPAGWFVTTDSTGKYYFYDKSGHTQWQRPTTPAVDVPKPSAKVEQNQKALQDIIDSLTKEPTPRHSANQTPKSNTPVPDNGKKEKWRSLPVEKQMKIYENTLFPHVKYVMDKFHRRLPKEDLKRFGREINKKLVASDYKNHRVDDPTTISSNQARKIKKFVKDFFDRAVVKHRENEQRAAQKAGPSSSGAPSPTNGGSAKSPLGRNGASNATVKTQQPDADGDIVLTDVEDEGENTPATSSSDRKRKRAEEQEVPAPASEAIPSPKRAKEDSTTEDSIPSPPPPPPPPTDTPLTEEERSMREQEEALMRENEEAQRLEDEEAERRVSVTVQGAAVATSKVNGVNGTKAHHTSEASPAVSDENGMDAGRDEKSHEQMAQQEPVSR

SEQ ID NO: 15021 - protein, 1183 aa, Neurospora crassa
MSQISDADVSGKPDIVSVPSLESAIPLLENEQQNQARQQLQQEQQGAGQGITEPQPDAIVVVPQPPADPSLPAQEPVPDTTGRFPRRARGNNAPVYNLARLTGTYVHGKRASKGDIVLQKKRKPKGRKLQALLAQQALEAEQAAQLAAQGGTPANPAADVPSIQPATQETDKPDSNAPADTLTIPPVHAPAAPEPTFPESAASPDKNGAAEAADAPAEENRVDHESLDASVHEAPLELSTNTAELSSTTKADTAQDINLDPCGALIPALPVDVPDHIPAIAPSATRKPDTRGAKATEKDVVKRPVGRPKKHTVTNIGKAARTALVETAEPATAEKVGTNTIGEAVTSSPKEAVPNVEKEAERGIEKEAEPSGTEDIQTGAWEDVPAETTGDVHTSTASQVKAVKAKGTKTTRGKATKAETIKASAVVPATRRATRHSGVPVEDPILPLITPASGKKAKTAEPALSRVPRELKRLRDTNEFVGIDTRPIRYSVWSNGKYVNVTEEKEPTAPAKKKAKVDSSTATVREDRKDKTVEPEAPTNTDSSRPAVKQKRVKKWLNKGLYAGQQAPEDVTKSLTTQERKRLLNIPELAKSGPPNKVLPLPIFNGLRLLIAGRDFKLPFDVCHPLPPGQPKPAAYRTMTKNRFIGQAAAIWKKTPHFEDFASKCVCTPEDGCAQDCQNRVMLYECDDTNCNVGKEFCQNRAFQMLTERTKKGGRYRIGVEVFKTEDRGYGVRSNRCFEPHQIIMEYTGEIITDEECERRMNEEYKNNECYYLMSFDQNMIIDATTGSIARFVNHSCSPNCRMIKWIVSGQPRMALFAGDRPIQTGEELTYDYNFDPFSAKNVQKCLCGAPNCRGVLGPKPKEVKPPKPPKAEVKGKKKVGKRKLQELLANGIENVVEGEGRSPKKLKVGNAQAGKATEDTAKGAPTFVSRKVSKVSVSAKSKVASAKTTKTFTRKVSIATTRVVKSYSKKGAAAKSKTITLKAPSKGSSLTIVAADAAGSITAAETAGAEEEAGNKASKTARVTPKNTPRAKKMADAVQNTPTIAEGDDGSIFDVPSSSSARKRAPSWKVRDSGVKNVSSLFRKARKSPVKIKDTADPAAKSTAATTKIVKPRKAFTKGKVTRPGKAMPKLTVAKKTGKSVAKPAISKSGKGSVSTKGATKIRLVNKAADGQDENAAPELVV

SEQ ID NO: 15022 - protein, 1604 aa, Caenorhabditis elegans
MFQRKVVLPKKRTEMVQTRRKTAAAVQDGGAVKENKAKPPAPQTPTKRAKRGRPPKIKTDANTLNTPSTSSNLVDDKLLIESESQDSILTNEADSFLEKEVEEIEDSSDILPDKINSPEKPSVLVKRRSSTRLKVKTDEDEKDVPVNIEVAVLEEKSIQIEPTSPAHPEDPQPSTSSLPLVEPIEDIVEPNEPTSSADPPVSNIKDEDIKEEEPLIKKPASDESESMDIANSESGNDSDSSEADPRTIPSFSIPLPDTPPPNFAKRGEIHVDVDQKNSKQSGESQSPWERAREKSASNPLSSPTMSRPRIHFLHPAYQSFTNDSVSPLPPPPPEPAPAREKVENGGPTTFKMTFKKAANIPILKTSAFEQPSSPPPSSSVSSSISLSEVNSSTSIASESSPAKRSSNFDLTASNELPPPQMVELPKLSFFNMPPAVRSAEDDSAMTSEEPILLLRSPNSATPDDDALFLTTPPPPKMTESEIQALKVATEKVNQVIARREDSEKDVRHREDRDDYDRRRDDRDRRSRKTDSERNDQRGRQREDDERRAREREREVTKRHDREREEMRLQKQKDEERRKKDEEERIQKENDEKKQKEDEAKMEEEKKKIKEEEMKIPEFELISESKYLTRNANKKKTESLTCECHRTGGNCSDNTCVNRAMLTECPSSCQVKCKNQRFAKKKYAAVEAFHTGTAKGCGLRAVKDIKKGRFIIEYIGEVVERDDYEKRKTKYAADKKHKHHYLCDTGVYTIDATVYGNPSRFVNHSCDPNAICEKWSVPRTPGDVNRVGFFSKRFIKAGEEITFDYQFVNYGRDAQQCFCGSASCSGWIGQKPEEFSSDEDDDIVTTRHINMDEEEEEKLEGLDHLGNHERNEVIKDMLDDLVIRNKKHARKVITIASAMTDYSQRVDVIQEIFSSDTSVTVQKFYAKEGMATLMAEWLSEDDYSLDNLKLVQAILKALHTELFDSCAKNDRLLRDSTSRWVNAKMDEYVDIQVIADSLIACVEDPVQEYKDVCKVIEKGLVENFTRAKEMAYRLNQYWFNRSVSFKIPKKIRDPVPKDVPVRQEDATTSSQSHDNSSRTVSPNHRHHSSSYSNSCYQEREPSHIRFFNNGNDVHQYRFGGYHGNNYNDNYFSRRPNKDSYRDRRRFNGRRSRSRSRSVSPQNYKRRKLDEHDNNHRQRSPIRDRHTSPGGEKTPSSNNSGERNYKRLDIRGARIKTIKEDLEAAAAAAAAAAVPSEVQAYPHEHTAVHQSVYQMPGYESYGVYDPVNGVYMYPHPGAGYYPPAYPQQPIMLTMDTLPPNDRLGELYEKASIEQLAQRDAIVRQELELIRIQIERKTAQKEAIKAACRRANEEEAKRQEALAKTKYVWAIAKSEAGETYYYNKITKETQWTAPTPVQGLLEPACGASPDTTVVIADEITEEEQQAEVLEKPRVVKEEVIEPGSQSETQKESPEKVRVVVPKVEVERSPSPKSSRDREKDREKSREKDRERDRDRREGSKHRDSYHGHRNGSSSVSERRMREFKHELERSTRSAVRSRLQHQRDASSDKTTWLIKLIYREIFKRESAQSGFDYRFSENTDKKVKNYVKSYIDRKLESNDLWKEYSRP

SEQ ID NO: 15023 - protein, 629 aa, Caenorhabditis elegans
MDIANSESGNDSDSSEADPRTIPSFSIPLPDTPPPNFAKRGEIHVDVDQKNSKQSGESQSPWERAREKSASNPLSSPTMSRPRIHFLHPAYQSFTNDSVSPLPPPPPEPAPAREKVENGGPTTFKMTFKKAANIPILKTSAFEQPSSPPPSSSVSSSISLSEVNSSTSIASESSPAKRSSNFDLTASNELPPPQMVELPKLSFFNMPPAVRSAEKVATEKVNQVIARREDSEKDVRHREDRDDYDRRRDDRDRRSRKTDSERNDQRGRQREDDERRAREREREVTKRHDREREEMRLQKQKDEERRKKDEEERIQKENDEKKQKEDEAKMEEEKKKIKEEEMKIPEFELISESKYLTRNANKKKTESLTCECHRTGGNCSDNTCVNRAMLTECPSSCQVKCKNQRFAKKKYAAVEAFHTGTAKGCGLRAVKDIKKGRFIIEYIGEVVERDDYEKRKTKYAADKKHKHHYLCDTGVYTIDATVYGNPSRFVNHSCDPNAICEKWSVPRTPGDVNRVGFFSKRFIKAGEEITFDYQFVNYGRDAQQCFCGSASCSGWIGQKPEEFSSDEDDDIVTTRHINMDEEEEEKLEGLDHLGNHERNEVIKDMLDDLVIRNKKHARKVITIAVSIYL

SEQ ID NO: 15024 - protein, 1590 aa, Caenorhabditis elegans
MVQTRRKTAAAVQDGGAVKENKAKPPAPQTPTKRAKRGRPPKIKTDANTLNTPSTSSNLVDDKLLIESESQDSILTNEADSFLEKEVEEIEDSSDILPDKINSPEKPSVLVKRRSSTRLKVKTDEDEKDVPVNIEVAVLEEKSIQIEPTSPAHPEDPQPSTSSLPLVEPIEDIVEPNEPTSSADPPVSNIKDEDIKEEEPLIKKPASDESESMDIANSESGNDSDSSEADPRTIPSFSIPLPDTPPPNFAKRGEIHVDVDQKNSKQSGESQSPWERAREKSASNPLSSPTMSRPRIHFLHPAYQSFTNDSVSPLPPPPPEPAPAREKVENGGPTTFKMTFKKAANIPILKTSAFEQPSSPPPSSSVSSSISLSEVNSSTSIASESSPAKRSSNFDLTASNELPPPQMVELPKLSFFNMPPAVRSAEDDSAMTSEEPILLLRSPNSATPDDDALFLTTPPPPKMTESEIQALKVATEKVNQVIARREDSEKDVRHREDRDDYDRRRDDRDRRSRKTDSERNDQRGRQREDDERRAREREREVTKRHDREREEMRLQKQKDEERRKKDEEERIQKENDEKKQKEDEAKMEEEKKKIKEEEMKIPEFELISESKYLTRNANKKKTESLTCECHRTGGNCSDNTCVNRAMLTECPSSCQVKCKNQRFAKKKYAAVEAFHTGTAKGCGLRAVKDIKKGRFIIEYIGEVVERDDYEKRKTKYAADKKHKHHYLCDTGVYTIDATVYGNPSRFVNHSCDPNAICEKWSVPRTPGDVNRVGFFSKRFIKAGEEITFDYQFVNYGRDAQQCFCGSASCSGWIGQKPEEFSSDEDDDIVTTRHINMDEEEEEKLEGLDHLGNHERNEVIKDMLDDLVIRNKKHARKVITIASAMTDYSQRVDVIQEIFSSDTSVTVQKFYAKEGMATLMAEWLSEDDYSLDNLKLVQAILKALHTELFDSCAKNDRLLRDSTSRWVNAKMDEYVDIQVIADSLIACVEDPVQEYKDVCKVIEKGLVENFTRAKEMAYRLNQYWFNRSVSFKIPKKIRDPVPKDVPVRQEDATTSSQSHDNSSRTVSPNHRHHSSSYSNSCYQEREPSHIRFFNNGNDVHQYRFGGYHGNNYNDNYFSRRPNKDSYRDRRRFNGRRSRSRSRSVSPQNYKRRKLDEHDNNHRQRSPIRDRHTSPGGEKTPSSNNSGERNYKRLDIRGARIKTIKEDLEAAAAAAAAAAVPSEVQAYPHEHTAVHQSVYQMPGYESYGVYDPVNGVYMYPHPGAGYYPPAYPQQPIMLTMDTLPPNDRLGELYEKASIEQLAQRDAIVRQELELIRIQIERKTAQKEAIKAACRRANEEEAKRQEALAKTKYVWAIAKSEAGETYYYNKITKETQWTAPTPVQGLLEPACGASPDTTVVIADEITEEEQQAEVLEKPRVVKEEVIEPGSQSETQKESPEKVRVVVPKVEVERSPSPKSSRDREKDREKSREKDRERDRDRREGSKHRDSYHGHRNGSSSVSERRMREFKHELERSTRSAVRSRLQHQRDASSDKTTWLIKLIYREIFKRESAQSGFDYRFSENTDKKVKNYVKSYIDRKLESNDLWKEYSRP

SEQ ID NO: 15025 - protein, 408 aa, Caenorhabditis elegans
MPGTRASTNKKTQLTKKNNSVFVYNTDPKFFPNTRRMDYSFICSPKRKTGLLTVTSCKCGTDCTTEECSNFANHRECPRGCSNCENQRFRKRQFCGVETFLTDNGIGHGLRATEEIATGKLILEYRGEAITKAEHNKRVKRYKKDGIKHSYSFEVGRNYYVDPTRKGNSARFINHSCNPNALVKVWTVPDRPMKSLGIFASKVIKPGEEITFDYGTSFRNDQPCQCGEAACRGWIGKPSTSEVPKDVSKELKKRGRKPKMDPTAPISTTSTGGGDKGKLSGTIPVPKSRRGRKRKTDVTAPVPLATKTKRHSPPAENESEDKENVKPPSEEDITNAMNNLLNKTYDNQNGSKLETVATRGLSNGLHASLQNCQTCLHNPHLCHFIFSMISMISCFNFIFIIIKTSEKK

SEQ ID NO: 15026 - protein, 898 aa, Caenorhabditis elegans
MHRIPGDSSKENCAPQDGIVEKEGPNKPFKKKNVKQRNATPQGAGSETSSNAEDKQEEAPILTNAPKDIISMQIQETKAFLSEYEEFVDTDYPKTTFTHVPRKFLSVSPFTPIEADAEGEFLPDADSKCVICHEEKDKTGKSDLITCHGYINGEMDDGKRLLGNIPMFPCRSKFHASCMINYNSGGFHFQYAARLECQARLLCPLHCCNSCNLDHHKQSAYVGDIAECALCLRAFHLTSCYPSGGRDLNVSITIGGKVEKFEMIICPAHYLPGADVQFYNKHKKRKNAVTVVPKADVTMKSHIKACCVIGCEKSSNSKTIMCKTCCRSFHSGCREVETLNGKPIPDDQCESCVCGDPIPQNTLILAKWTDNSFWLALTLDWYKYPTGNRGNINFERLGYTVVQWLIPQENDKEKQPLMSIVPVSDIARLTKNYFSLAKNSTLRNLWEEKYEEQADTALKRCPYVCKTVFGRLRTSVYYKCEPKLEEYHNNEVCNCEGADRCTKLSCQYLADDYECPPSCSKKGVCHNRQVSMGIVSEKIKLAATLCKGYGVFAKGQIEKDEYICEYVGEIIDKAEKKRRLDSVSISRDFQANHYMMELHKGLTVDAARYGNISRYINHSCDPNAASFVTKVFVKKTKEGSLYDTRSYIRAIRTIDDGDEITFSYNMNNEENLPDCECGAENCMGTMGKAKREKPEVADSSEKAAKKNKSSKKKSVKNQNRKSQEAGKNGTASKKSEISPSKPSTSSASSTSFVQQASWPISQNKKNLKKNSNQPVADTGSTLSTSTELNFHEKPQELLSPVSSRSRAASSSTPRAQKSKSRRDDVESEAPPVKRATPSLQTIQETGKAIEFPATKSAITKARALSTQSVPSPHTVEVKVRAISTRGRVQKETKRFEPI

SEQ ID NO: 15027 - protein, 898 aa, Caenorhabditis elegans
MLPSSGDSSKENCAPQDGIVEKEGPNKPFKKKNVKQRNATPQGAGSETSSNAEDKQEEAPILTNAPKDIISMQIQETKAFLSEYEEFVDTDYPKTTFTHVPRKFLSVSPFTPIEADAEGEFLPDADSKCVICHEEKDKTGKSDLITCHGYINGEMDDGKRLLGNIPMFPCRSKFHASCMINYNSGGFHFQYAARLECQARLLCPLHCCNSCNLDHHKQSAYVGDIAECALCLRAFHLTSCYPSGGRDLNVSITIGGKVEKFEMIICPAHYLPGADVQFYNKHKKRKNAVTVVPKADVTMKSHIKACCVIGCEKSSNSKTIMCKTCCRSFHSGCREVETLNGKPIPDDQCESCVCGDPIPQNTLILAKWTDNSFWLALTLDWYKYPTGNRGNINFERLGYTVVQWLIPQENDKEKQPLMSIVPVSDIARLTKNYFSLAKNSTLRNLWEEKYEEQADTALKRCPYVCKTVFGRLRTSVYYKCEPKLEEYHNNEVCNCEGADRCTKLSCQYLADDYECPPSCSKKGVCHNRQVSMGIVSEKIKLAATLCKGYGVFAKGQIEKDEYICEYVGEIIDKAEKKRRLDSVSISRDFQANHYMMELHKGLTVDAARYGNISRYINHSCDPNAASFVTKVFVKKTKEGSLYDTRSYIRAIRTIDDGDEITFSYNMNNEENLPDCECGAENCMGTMGKAKREKPEVADSSEKAAKKNKSSKKKSVKNQNRKSQEAGKNGTASKKSEISPSKPSTSSASSTSFVQQASWPISQNKKNLKKNSNQPVADTGSTLSTSTELNFHEKPQELLSPVSSRSRAASSSTPRAQKSKSRRDDVESEAPPVKRATPSLQTIQETGKAIEFPATKSAITKARALSTQSVPSPHTVEVKVRAISTRGRVQKETKRFEPI

SEQ ID NO: 15028 - protein, 637 aa, Drosophila erecta
  unsure (1)..(637): unsure at all Xaa locations
MATAEAQIGVNRNLQKQDLSNLDVSKLTPLSPEVISRQATINIGTIGHVAHGKSTVVKAISGVQTVRFKNELERNITIKLERLSEKXLKKLLSSKQQRQQYEIKQRSLLRHLAEMRRHSRFRHLCTMQASFSMPASASSVDRRTTRRSTSQTSLSPSNSSGYGSVFGCEEPDVDKLHSVKGFANLKRRRSSIVGTPTPFSKRSKNNEGLIVKKPPKGEYVVERIECVEVDQYQPVFFVKWLGYKDSANTWESLANVADCAQMEEFVERHQQLYEAYIAKITTELEEQLEALPLMENITVAEVDAFDPLNLQLDLILLAQYRAASSRSQREPQKIGERALKRMQLKRAQFSRRKQLDDLASFEKCMNRVEKPSPPIRVENNVDLDTIDSSFKYIHENIIGKGVPKPEAGLLGCKCIEENGVEECTASTKCCARMAGELFAYDRSTRRLRLRPGGAIFECNSRCSCDSNCSNRLVQHGRQVPLVLFKTSNGSGWGVRASTALRKGQFVCEYIGEIITSDEANERGKAYDDKGRTYLFDLDYNTAQDREYTIDAANYGNISHFINHSCDPNLAVFPCWIEHLNVALPHLVFFTLRPIKAGEELSFDYIRADNEDLPYENLSTAVRVECRCGADNCRKVLF

SEQ ID NO: 15029 - protein, 1137 aa, Plasmodium yoelii yoelii
  unsure (1)..(1137): unsure at all Xaa locations
MKDKNNSKNLTSNKKTKKKSTSNYVDNCKNDAENSNVNKNNKNTNVLVNNENPSFIKNEKLSHDTRFNLMNCGDTNSTIETNNASQREQNAEENLETNIKKRIKNIKLMERLEYIENKHSFNNYQNIIEVDEDDIKEIIYDSVNSTCFLCGYKNASIYCSNENCSVKFHLNCAFYSTIIKNCNDNIFFNYKKLFNLIKFNNDTIFCNLNNLPHKKEEENYIFENNYNDIFPIHIIFKTKKIWCNHXWNDKSVYESFYLKKENVSYCTPSNCVNDQMTYEQNQIIADNTPSKHVEINNLNHIPNLENTLGKKEMLQENSITCVKSENDMENKKLISYTNDKRATSTKFLEMLKQYFNSFLEFYFENGSYYVMDTILHNINESIKIRYKSKPLTVLQEILNKKSKIEKKMKELENVINKYVNKKNDEKYIDDKYNLIIQENTKNISNNNNDIPNERHETKITKKIKRNEEPINNTIVDIQKIIDNKNVSNILKSYFILKNFFYIGNFTTLKNENYFFSKKNENSFVKYLVENEQTLNICLSDVLTTNQIKMSSFACKKKWNENDMANSSTNEYNKMNEMNSPQNYCIKYVEYDNESDDNTSDTNINCSSETEESSQYINDIDNNIEENMKYKKKSINIYFKNLTDMKEKKKVNITKLQQVSSNFIRNRENVHINKIVEEIDEGKNKNLVGKEKLNIFKKRGKPQEYINDRKWSNTSSNASIANMMLKKECFLNLVTNNNDIYIKQINDKYFLNYKYNTATNNNNNLPFNHSKCNVIKIGCHNILNIGEVVKYEGEEMIYPCGFLNMRIFFNLPSSVLFHIYKNANINNLCLKNNVLEKICLQLRATYIFSITLKNNNIFFSIILFPLININYFSEADAQKFVLAESHNINELYKQFLSYFNYQNEIYITEQYKKFTKKYSKLYEYMAKFFFKSAEHNKSLDAHSFFGLTLPCVIYHIKYKLFKFIWANLSSKINTHAKRECERDEIKKKIKNCKREVKYNDNILCKYSNLETSIFKDSEKEMPVIEYIGEYIRNIISDKREKYYEKIESSCYMFRLNENIIIDATKWGNVSRFINHSCEPNCFCKIVSCDQNLKHIVIFAKKDILPHEEITYDYQFGVESEGEKLICLCGSSTCLGRMN

SEQ ID NO: 15030 - protein, 2133 aa, Plasmodium yoelii yoelii
  unsure (1)..(2133): unsure at all Xaa locations
MKEQVIRTVDEDGEADQPLSILSSNTINDDVNNNISNRECIQKGDDDNNNNEIVSRNKNNTNLISIVNCQKEYNTSLITENGEKNGEKYETKHEMACNNNEQECMIIDTDDEIKNSGFICPQENKINDLPSTIMLEGNLEIETSLQQNTQNDLITDTIRNENKTSLIENYQNRENCYISLCSNTVEKSGEKNGEKGGEKNDEKDGEKNDEKDGEDDNENVNIKEKKKMGLKIMKKNFQSNNNDENKKEENSIHTNNNNSNNNSNNNSNNSNNGNVKVARKRGRREKNCLRNENGFLRIYDNNSSVIYSNNYIPSNPTDSNIVKDNTNIKNDNIIDAHGLKNNTPITINDSNSINHSNQLSILNEKEKETHKDCDNNNNNVGEIKEYSPIKFENDNKQPGRRRRRKRKLKKGNANENKKGIRRKRSQSVLANNGNIKYRIGKRNMPIIYEKNXNNDNNNXNNNGNNNGNKNNNSIYYYGYEDEYNTLDNMINKMSNIKISKHFFLKMDDDNTSESSTLSNSIKNENLKKIIIIFDQKYNMGFICNAAKRYLTIEEEGGLLNLVKKINGERFNFKNIISSKDSSIEQFMLYNLFSYDITTLKSSLKLIYTFCLFKNLRLYFQMQNKNICIEGNGMSSWRIKDNLLDTHSIILSMFNNYYRNMNKDKLTAIDFINSYYFNIHNIKFAKKNVQPNKTYDNIIEMDQNNGIDEDNNNNSNRNRREGKIKGRGRRKTKEIVIKKEKGKRRGRKSLKNKSYLYGNYKYENNELNDIDSKKIIKRRRGKWGYKLIAKENENKIIKEEKSTDEIIKDKQDNFIEKKKKKNLNKKENELDEENISYQENINNLDNKLSKNNIDQINDENNDIENNVNMIDVKINRTRNSNNKYNFKNIIKRENSNYYDITSMKNNENEQIDVSKTGENNDDFDVAIPKNEDKNGDKNGDKNGDKKDGERDDERDGERDGERDGENNFDCDTKKRRVVICSDKGSNHSDKENNPEIIDDYNKLNIDSTDADKEMVQAGNGQASNGQDKNEEINLLFVKNKLNYNDVINIGSSNETCLEADNNNNTNNEPSLSYYTTDNKVKCKIEEPNGIENASNNECENDVNIKDSEKCDEENNGIIKDDNVIGVEKNGIKNEGNMEYKKKIILRRRSTKEEKENNYINEMNLTKTGCSINNGNNNGSLIKDEGVFCNPMALIKRRRRRRRISKKTKIQKSIEKGNEKIGRKRRRRRRKNINPDESCTEDVIKLENVSIMLLERIKNNYKMLIENNELNKKKQEMKQYNNNVNTKPYNYIGNHNGSGYLNDKSREIDASNVEGSHQFNANTNCLQPGSVSNNNNNNNNNNNNNNCNATGIIDADNSVRTQNNENMVASNANEGIQYSNNNSRILQDNTSNNFEGTLNNNANVNNLIQNNETNVNTVIYENDNNNNIMENKGNYNNSITNVNKINKINHTNFQNNIIKTELSEKEKKYMLTIDSIYNSNFNILDIKVNTHFSHNYHIALFFLCKYTSYNLFLHPINKNEHIVSSIILNSKNDILTDNGNCFVLKYLLSFLSNKISSLRKCYANALYNSYLLQMPIRIFRHNNLKTKYGPNYGIRYDGIYKIANAFTVNDYSTSEYKRDILYVFKRLYMDKCFIPSNCRFYNNIYERKKNLDEKNSVSINVFFKNEIIMTLRVPYIKNYKSTAFTNFNHIYKFIRKKCITENIATEWLNSDVRIYDECMKEYKQMKVKNSELDSKINENVLDNNIKENETNNDPIKIYQPNEEENKRRQNANKNDLKGKYPFWCLGKYLPMVLMLETLCFEKEINENKMIRTKNLKNLNISIKKCEISINCELAKRPAHLFIPIKSKEAISAYIELKKPFDDDWNPYEDLSAGKEKFKIPVENDVDNDLPPMNFTYVNKTIFFSRLPPYNLLPLCSGCTPQNYNKKDFDEIYINGYCKALKHKRTNEIYCDGNKNYDINDFNVLAACSGNCLCDPLKCINKFPEGLHYPVKVVKTVDVGWDIVSCSHIKANSLIMHYVGEITTRKEMISREHEYDKKGYFNYFIETAEVDETYADDWKIPCIDALFISNVARFLNHSCEPNVNVITIWRGDSYPSVGVFSSRDISPNEPLKYHYGINYKNIKCMCRSKKCKGYIG

SEQ ID NO: 15031 - protein, 203 aa, Arabidopsis thaliana
MRCRFPYDGKQRIILEEGYPVYECNKFCGCSRTCQNRVLQNGIRAKLEVFRTESKGWGLRACEHILRGTFVCEYIGEVLDQQEANKRRNQYGNGDCSYILDIDANINDIGRLMEEELDYAIDATTHGNISRFINHSCSPNLVNHQVIVESMESPLAHIGLYASMDIAAGEEITRDYGRRPVPSEQENEHPCHCKATNCRGLLS

SEQ ID NO: 15032 - protein, 185 aa, Glycine max
  unsure (1)..(185): unsure at all Xaa locations
XRVSYVGPPPPDDISFGKESVPVICVVDQELTHSLHMNGCNGQNISSSMPWETITYVTKPMLDQSLIDSESLQLGCACSYTSCCPETCDHVYLFGNDYDDAKDIFGKPMRGRFPYDENGRIILEEGYLVYECNHMCRCNKSCPNRVLQNGVRVKLEVFXTEKKGWAVRAGEAILHGANLCGYIAE

SEQ ID NO: 15033 - protein, 761 aa, Oryza sativa (japonica cultivar-group)
MPQILAEVSKNPDVGEFLLKLISSEREKLSHVWGFGTDSSNQMHSENQDGSVMVLREDGTHPSPGLKCKICSQEFSDDQGLGLHWTEVHKKEVRWLFRGYSCAVCMDSFTNRRVLERHVQEKHGAQYLQYSTLLRCISCNSNFLNTDLLWQHIVSDHSRDFSLLDHVPRRPRGQSIKRTERASDELLYDNHNLGKDDGLQKFTCRLCGMMFDLLPDLGHHHQVAHTNSGTVSDIPSGREKYQFNRGRHYYSAFKKSLRPSGSLKKRTSSGVEKHFKAQSLDLSMDTSHIVESETTTLGRLLDFQCSDVALTLFSKIQKTRPHPSNLDILSIARSVCCKTSLRAALKAKYGILPDNIFVKAAKLCSDVGIQIDWHQEEFFCPKGCKSRSSSNSLLPLQPTQVDFVMSPPIGDEIWGMDEYHYVLDSEHFGWNLKNEMVIVCEDVSFGREKVPVVCAIDVDAKEFPYMKPGEILQSENSLPWQGFHYVTKRLMDSSLVDSENTMVGCACSHAHCSPEECDHVSLFDSIYENLVDLHGVPMRGRFAYDENSKVILQEGYPIYECNSSCTCDASCQNKVLQRGLLVKLEVFRTENKGWAVRAAEPIPQGTFVCEYIGEVLKMKDDGAIRHVERLEIYWNFSGAFHKLIRKLLDLREAKSGSSYLFEITSQIDRERVQTTGTTAYVIDATRYGNVSRFINHSCSPNLSTRLVSVESKDCQLAHIGLFANQDILMGEELAYDYGQKLLPGDGCPCHCGAKNCRGRVY

SEQ ID NO: 15034 - protein, 72 aa, Triticum aestivum
VSRFINHSCSPNLSARLVLVESKDCQLAHVGLFASQDIAVGEELSFDYRRKLQSGDGCPCHCGAQNCRGRVY

SEQ ID NO: 15035 - protein, 6761 aa, Plasmodium falciparum
MSENSDEGKMQKGKGNEMNEDKIICKKEESNSSSYKFISFIKTIEDVKEKWKSSNLSRMDVLKLKNDDINNDDNMNNMDNMNNMNNMNNINNMNNMNNINNMNNMNNINNMNNMNNMNNMDNMNNNEKHPCSNNNYSFNNYIKESINYNTCTGYDKNNIMLNFLDKHKKSIFLKSRNNVNTFQSDINSSKTSSFFSCMSLKNMNYHNDINKYSNYRMMKNINGLHKLMILKNKNKDKKLFTNTSDKKNYYCLNNGDHIINEKDSFSDTYISYGCRKRRWKKKKKNIYNMLFYDESINDYPYKNLEKTTFSNSSKIYELFFNKYKKKKILNIECSGNKYKGLLRTNHFPPYANFNFTIRRKLQTSNVLGHFMISKCNFNRTICYRKYIKCVNKYKNNKRNRVINMYVKKENVDSIKGTFGNMNNGVHHNNSRRRLNNTSKNNISNNNNNMLKKKKGKKNYKGSFDQMIQEDTTLDQAKKESIKTVSKNERKNNMNKHSHDNKVSKLNKRMSNKRRNNKNCNPSNDMCNEDDVIEKICTTEEVNDDEKKKKLSRHKKFVCERKKGVILQNNNKCKKKNDDNIINNNNDDVNNCGDNINDHHDNRKDYDTTEDQNKCPKILSINFIKCDEKLFEKIYNDMFLRIGKIVTNKRKKYFLIYKIVKDSFFRILILNTEKLEKNILQVMAVQDVILCDKNVKIYSDPIYIRNNNKLYAIKFLKIFSLKYMKKVKNMSEVNFSDDDECKKENKDNISESSKRSNNIGEKKMLHVEKSEEHDDMTSDSNKEDTKIEEGRKKSNEVNIDVDDGEEEENVNNNDNNNDNNNDNDNSSDNNNNDDGSNDTESCSKINKSKYKGKEKKDVKENTDDKNLSDSNSNNSKKKFKVLNKAIKKDNDKKKKYEKKNIEGNSNNNMILVRSNSSSTSTSNSSSKSKSSNCRNKKNNQISICSKMDEKNSEQKKKNIKKKNKTCNEGKSKKDSTKLNCVKKVKNKSTDKKNGKSKINIKNEKKKKINNSKINKGRKGINKKDKGKGDDNNYVCLIYDDEKKFYFNFKKFKDIINVIKGSDESTRFYVDTNNNNHNNNMKKKMKLFKKVEKSLYLENLDIDTDEILFRRPKFFNCIIEESFENYDINYEGEDGNFYVFKNKLNKIRKKVTIKNETDSSDMYIELKDEEKGFKYIGYRVSFELKKDNKKKAQVKVGIIKYYSPKYKQFFIHHLENYKLYQTSDLSKGNNNNNNNNMKENGFVKCGRNSYSRACSKSLNSSIYINKYKNVELNEKITNIIDDDNNNNINSSCIYKNNLSNENNLCADKVLCDGNYNMLENDVDEMNNVDQNQKKRNDLVFSDVKGWYSPYFYNIKILNNYKEFERFDILEKCDKKKEMTDHVNNTLNKNEICSICSKRILFMKGHDHYSCSLSSAIYDMCSEAEKKEIDENNCIDIYWGIKCFTCEKKYHANCLEDDVLITKWFDKNILMKEYKKFIYKNSLKKEKRYFNNNGKNKRTKNGKKKKNTIHKLEDKNNSHVVSTASNSHSIEVSSSESAKKGNEKNTATCKKRKTSCSALYKKVKKGKNKNGENKNGENKNGDIKNDDIKNDDIKNDDIRNDDDKNDENEENTKECKNESNNIDNNNSSNDSLSDVDNNKDNGKSKNKKYRRCINYIPSVEHSDITYKKFICKDCYRCIYCCESIYDYKQTPNVANYVICKNCNMVAHGSCCFPNVPDIYLFNWKCDDCLKCNKCNYSNLCYINYNEWELHLDCCINCYKEYEKKNFCIMCNEKYDEDDSKKWVQCDVCKFWIHLSCDKNESRNIETLSNKNIDYKCPTCSIGTFHDKIERILYLLFLLDKYKNFTFHVPINYSIYWRIVKIPMNLYIMKKKIWEKKYDTILDFLYDFMLIIHNAKMVHMPNTPIYKNACIFEKKGRVIIKNMFNMTNEYLNKCIEDCVENYKNEINNLDSFQIGHDNNNNNDNNINNNNKMEGVNNESVIFMNDGCNNKLYNKEGTNMTCVNMDSINKNLNDMNNNNNNNNKMEVFCGQNNIKLNEYYINKEGYNIISNDNNMNYDNYNNVQNIGMKKMYTNINDYNSSNVPNESVYNKENFINNSSIYNINENNTYDLNCDKKLIFDNKYNLSAYQNEGDIMNYNGMYQKNINISNPPYNNNNNNNNNMVKEGEKYILNNDDMNNISISKDNDINNNCNNIANIYRKRKLEQYKKDITQYELYELFDFKNDSFFINRNKEMFSCSSNDHNLIDYNILYVKLNGKIYFNTFYDKHDEFDVCKILKVHFLKNNRRGGGNHIMCPKIRNNQNLKEDVTQCDEEKIEQNNDNGCDDEYDNNNNNNNNIGSSSISSINKIHMNDTYNNSINDNSLRHNNNCSVFINSNIFMIDVLNEKVKINNIVKETKRIISPINNVLKFLKCIQIVFFYDNNTNECTEKEKNVISSNLCNNNFEKYVNINSIDHNNMSGEKKRKSVEEIMSVVDNKSYYGFNKCSEYILYSSNEYDRAKKKENKRIKLLKNDILKECCYICGSIEYKNNFIYCCICGISVHYSCANIVHPFLFNLNDYKDHKKEINNILNIITRNFKCDNCIKCDNCLLHFDSSLKHNLYFKLKNLNVSCNNNRMERRTYNYLYDVKIKVFTTNKEGTKQTGKCVMKTKENDIIKLDEDNKQKDELNEANKECFYKQDDVHVEKNCDELLYKNSFNSEECNKNEKKKNDNNVDENDDNVDKNDDNNNNNNNGDDNNNIDNTLVDGDMNKLENDLNNSNDFSINEEKKNNKDTKKYMISSKEEINKEIENVSNQMDNKNNDVDKKKNISNEEIILDNTKNSCHDNDSNVLYNESVKKSFNACKIEKKEGIEKDDNLGHVNKLRNKRLIKILSIREEGNKLVKCFCCGKPSHDECFYIIDNNTYKNKICTLKKTVKNYVRKKNVENKCNTKVEMNSDVILLDDNIKDHCSVNKTGDEHMNNNEFIDISKDKISEHNILDESFNSGVVCSDKNRKDQVVFIDGDVKNNDISIIEENVTYYTSKEVNNNSVLKNERDVESTSELYIGGDKHVYNKLETDNAEMESNNNNNNNNNNSDCNNNVSTLSTAAVNTINRSHMSPQKNDNDMNKINQDDIIHTKMNDKKNVKDDNGNMTNLNNNIDKNDRNLDTILKEHSVIMQKLDELKENRNKEHDGEFYNNLILNNQFLIHSFKVEEGVEINKDSIIINKKMFNKYILNKIYELLDNKKRVRIKDLFNLFNLDEFRCSFILYEVLNALNTYLNEKLKEYNLTKIRNGTYKKYENEIRNENFCLFNKYLIVNNRDKINITKVVLKIQSLITEILSDAMNGNIVDEKDKSKKKESISSDFNVVNNVKEYNIQNGCINIDINNYFKGEYINFKPILCSSQFNLDTNAQIFLQNKANLSMFQKSASYNNNFENNLENNFVNNKMNNMNNMKNNMNNMNNIMNNIMNNNMNNIMNNIMNNNMNNIINNNNIFNNDVSNNVDMQHKSDQICIFNSNNIHSVPIFNNKPYMDNNFNNMVLVNKSNDINGDDILCNMKNLYNKSVCNKQEKNGYSVVHKNICDVNFPYNDTKIWNGDITNKSKTYTYTNINNNGSVIDYRKWSSVNRSVSMNNMNCIRSNTNPRILSGTDHILKNNHMNKRNNVNNTYGVNNVNNVNNVNNTNNVSCFMMRRKIRSNSLHDMNDKMNKMNDNINININNLNIINNNINICNMNYPIDRVDSMNNTFNRNNIIISQNTKENTNILNFNGNDFCNNNNNNNNIINKENNFGTSNFNSPFHVGNLAKSYSYNNTMSEKNMNEVICPNVRNNMSNMNNMNNMNNMNNMNNMNNMNNMNNMDSINNVISYSCTNPNMKDINFNSMRRSSSTPKKSTGLLKNYFNIDIDQYNKTNSHIMNYNVSINNDMNNVYINNNNNHNNNNNNSCNNFINNDVINMNNVGTFYNFNQNAESYNNISNNIKCSNINNIIINNNMNVNNLNYFCNNKEVGFKENDLNINQKVHTINKDPYEMNHSKMYVTFPYCNTKDNNSNKSSLKSNVLRLDKIRNRNIKKPLLYNRSSSMHSSDNLIYNVHNNNRNSPAEFTSDIIINKERNMENNYNTSINYVNNNITNNIIVANNNCYHTANNFIQINYSPSSSNIVNINKDSYKYDISLENCIDLGSTNTCMYNLNNIHNKDINNMPLEDCFSHIGSCPNEQNEHEDEINEDNKKDVTKQQKKRKLNSVSKKDMLIKKEMNADDNINCKENTLQNESPKKDDELRENDLKTTTENIKSNEVEDKEFVDKKKKRKLSVKVKVNVNVKVELQDTENDENKEKGIKKEKNDEEKKNDAEKKKKENKKGREKSVKVRKTKNQTQVERENEKENLMENVTNDKTSDIINNKTSDIINNKTSDIINNKTSDIINNKTSDIINNKTSDIINNKTSDIINDKTNDIINNKTSDCLSLVQNNKPVIHIDCNTSLDITDGYNNLISCEGRKKGKYNIEENNINDDNMFQYSDAFDSEGSIKYKEEYDKIYIPNNKNKINNINNFLIKNNLLLKSKFMRITPNTYLCRNCVLLYQNDFSYNTYEEEINKMERSILNEYEKGVIKKNEYVHDAIQNDKVVNTDENIMTNVLADKVDDMKIVEKLNCPLNVEEKGIEENILYVKREGDELINYGKHNDQMKEEEESEVVLGDVDFLKNEKKDNLILPYDEKYTGVNNNNSSIIMSLKKCDKNITKKKGKDKNFNNIKYFKIDNNKSLWYENYMYWMNKISLYNNLFFTNMYYKENVIKCIDMNNLFLNKMNIYKCSICCMLYHCSNMDRNNFFIKNEDKMRKKTKKNDCLKLLYICNLCTIKYDYVLKIITYKENNKCWNEFYTDNYYKNNFYELVYFIIKIIYKNIYINNFFNIFCSIMDNIFKEHKTLNMKLLSLFLFSNKYFKYEEFYHFFNNKMKKDDRVFKKTFHMKNVCFMPRYSKKSIMYYIFSLFCNKIYNINKKKKCIHNKRSYIHNKQSYIHNKRTDVMYDNNVYFHLYELARKKLYDYSEKSQKPFDEIINMCLYLLYLYYLCNVLYKCVRINNVLKGDKDKGDILCDNKKMKYYKKRKNIKLFLNIINSNEYINVNKIFHGKCIYELPFYVNKERIKKKRNSVREFINNNDNNQENNADKKKDHHIYNQNYNHNSYLCDIGKVDESLHSKEDNKKDVIITNNASIDSTSPSINMNKSVVSSIYSYNSNKEKKKNMRKCIKGLHHTIKNKLNLYVKLMLDKYIQESSNYIKNENKDIKKTIESKNKDDKICLLCNFSNYIYKGRLIPFYDIYIHSECLKWSLNCTQCCYEENKNKTIVNNDNGTKVDVNLDNADDIINNNNMNMLDNNMNGPIKNNEENNNNNDNNNNNNNNNNNNNNNNNNNNNNNNNNNNNNNNNNNNNNNNNNNNNNKSKKNTQKKKDHVNDVKINQNNSNNKNNKKKKTSKDNEELKSDNTKNNKTKDSDGNNNDKTKLEKINLIHNKQSNEISCKIDNNNIINDISTNNPYMKEKKCKNKEKNRGSKNNNIKNIKLIDMCEWKEDRNFYNIYENMIEVDEDNVKEIIFDSIKSTCFLCGYNNASVYCSNEDCNVKFHLNCAFYSTVIKDPSNNPFFRYLKCFNLVEFNKDTIFYKNMYHDPNVNNSVSSHVCTDNRYYKEMIEKNYVDIFPVHIIYKIKKIWCNKCWNKKKIYNLFYIQKCFMSPYYYDNIKTEESVPNKITPMKKDKSDITNEVKEEKDDDILYDSKVHKEYFTLRNILMDDNLLNNIIRNKKSCSMEIQENNDKMKGDNNIDNEDVRNVLCDGEERVSYNRNKLNDILLKMDMKDILKYFIDFYFENGSYYILDNILYSVNHCVKIKYKKKSLYNIQDVLNKETKIGTMMRELEGLISKYVNRSNDNNYMDRKYDMLLLKNIKSDINNDNNNDINNNDNNNNENNNENINDNNNNNNNNNNNNNNNNSNNNNNNNYYYYHNNEGKYNEQGSYQHIDIQNIINDKSVENLIKGYFILKNFLHIGNNNITLQNEDLLILKKSENSFVHNLYDNDKVYNVHVPYVYTKKMNTSYMNKKENDKKYNKSVNKNSCKSKNSILDNINFDKNKNKITKKYTAFIIDNNEYTTDCSNEENNTSDDEENENRKNENDDDNIPEHIKMNNIMNSQQKKENDFKNINLYFQLTNVIKKVSINKLEGNFFNYEEKGNLLGSNVSKIKMNELLECNVGEENFCDDDQKFSDNKNYASDDEEKKKKKRKNQTRFYNYPKRISTTNNNKNVNVLVNSLNNNLINKKEYFLNIIMNENNDLYMKKINEKYFPNYHPKKRKKKKLDNTSYINHNYNYNYPYNYNLLSNNSKSRILKVGCHNILNIGDILKYDGDKIIYPCGYLNMRIFYNLPSYYLFQIYKNANIDDINRKTKLLEKIFLQLRATYIFSITLREQNFFFSILLFPLINIDYFSESDATNFILAEGYNINEVYMKFLSLFNSQNYICDDMNNDYSHYNAKYGNIYKCLETYILKSVEHNKFIDSHTFFGLTLPCVVYQIKYKLFKYMYKHLSEKIKTYIKKSKDSVMKKRIKGCTREVVYNDNVLCKYSNLDTTIFKENEKENVRMDLNIFEKNIRKTVKYKYNINSAMSYRYLMNISSNLRLYVKKSSIHGYGLYTCEFINEGEPVFEYIGEYIRNIISDKRKKYYDKIESSCYMFRLNENIIIDATKWGNVSRFINHSCEPNCFCKIVSCDQNLKHIVIFAKRDIAAHEEITYDYQFGVESEGKKLICLCGSSTCLGRMN

SEQ ID NO: 15036 - protein, 2399 aa, Plasmodium falciparum
MLNDMNDKKDSIRNRNYKKNKKDEERNIRKYSNDNINVVNNMKDIYNNNNNNINKSVIDCGNNLKRIEGKKVFERNKFGQFIKKSNSPSLKDTNIKSNNNKNMKNTNHNNEENNNNNNTNNTLSNKEKIKVLIDKMKKIQNKKEVNKTLDKPMYIRNFQDEKKVSTHNNAYKLKRNGDPRNYGDIKNGDNIKNGDNNKNGDNIKNGDNIKNGDNIKNGDNIKNGDNIKNGDNIKNGDNIKNGDDQIIGCLKNNREPRSNVENETNEMSNSYGKFTKNRDLKNSDKIKMNDEYRRNNDANISDYNKKNNNNNVNKSNNVVRSSDESLSSDTINKSDCKNKVEENSSRNADESHKKEDGDLINKDKDEKEGENLSVPKESNETYYRISRRERCRNLKKEDNLKIINDEDNSVSHFIKEGRKRSVRERSNLRNYNYINVNNNIKDDDFVDEPNNGSSIIKMNERKKTILRRGARHRRRNPRKRGRRCSSLRNNRNTINSVTKSNYDMSDGDNYEKGRKFLYDNSSNYNELDPLNSKFSNIKISKNFFLKMNDDEDEEDEDGVGDDDKTSKNSSYSFGFNERNIEKKIIILEQKDGIYEINENYLKYDNMKDMEDRKNMEDMKNMEDRKNMEDMKNMEYMKNMEYMKNMEYMKNMEDMKNMEDMKNMEDMKNMEDMKNMEDMKNMEDDNKKDYMNDNLKDDIVIKDNIVIKDDIVMKDNIVMKDNINDSVKDNINEELENNETSCKSSKLNDVTHNNNNICDDNNIVSHSNGEMKEVNIMYPINNEINIKKKRILNNDEILILLNLLRDININRFNIKHVMTSKDCMYEKFMLYNLFSYNITCLKSSLKMMYAYCLFKNLKLFYQIQYKNMNMTEKSIPNYKIKNNLLDTHCIILSMFENYYENVSKQKMPIADFINSFYLNIHNINIGKKKVQPNKNYENIVLPEKDNRKITSMYTNKSLLYSNYMNKDINMENKAYKLNDINMENYRSDHKNNTFIDNDCNNNHKYNNICKNELNSCISNISNDPNNNKNVHTMNKDLYGNIYTEQNAYHVHNYKDMRNEHENNNNIKKKDNIENSIYYDNKMYLGANEKTPCLKDIHMNKNYEQTYDNYDGTNGYNNNNKKKNDNKKNDNNNNDNNNNDNNNNDNQDDNHHDNNKEEYNNQNHLFLNNESRKRKFFTNILPYKNKKKKLPYTINLNNDNKTYHHESINNENHMPLWDYKELENIKNMINDEKDEEDCTPLAHSIKITKNYDNINMDECNVRNENQEYKDNVTNYKVCQDGNFECYDVNESVLVRDIHMEKNNNVEKNNNDEKKNNDEKKNNDEKKNNDEKKNNDEKKNNDEKKNNDEKNNDDNNNIIEKAKENIESIPYDKNCSQDNIQYNMAYKDTSLLLCEQRDMDKGNKKEDDTIKMEDIHFSADMECSPMLKYRKRNYDNKNDDDYVKNDDDYVKDDDGCVKNDDGCIKNDDGYIKNDDGYIKNDDGYIKNDDDYNNNGEYLHGSDNNLSAHKYNSVCRRRRRVDRNKESNEKEKRVYRNDIMELENVDVMLLERIKKNYKMLIRNDNENKKKKKKNNGTVTILEDVDNVYDDNNNNNNDNNIDNNNNNNNNNNNNNNNNNVESHNNNNNERGSTKIEKCRKNKITFFNKYSKLLNNDNVDKKKSKYMLTTESLYNNNFNILDIKVNTHFAHNYHISLFFFCKYTSYNLYLHPLNKNEHIVSYVILNSKNEVLTDNGNSFVLRYLLSFLTNKISSLRKCYANALYNSYLLQIPIRIFRHHNLENKYSPQYGIRYDGIYKIINAFTINDYSTPEYKRDILYVFKRLYVDKCFIPNMNPKILDKQDKAERKKNFIEKNSVSINVMMNKEIIMTLRIPYLKNYKSTTFTNFNHIYKFIKKKCIQKKKAMPWIQSEVSIYEACMQHIKKTEEKKKEHFLNSQKMNNIKTKVNNTNDIYNNENLNSGDDAFKDCIQAINVDKSVQQINDVRFDMNDGNYKMGDIKKECSNVYENMFPAKNNNKIDINKININSNHFSNSSNNNNCDNYKRLGEPNFPYWCLGKYLPFVLVLETLNFEKEIDIYKGIRTKNLKNLKISIIKTEIPINCEMAKRPAHLFIPIKSKEAISAYIELKKPYDNHWNPYEDLSGGKEIFKIPVENVVDESLPPMNFTYVNKTIFFSRLPPYNLLPLCSGCAPHNYNKKEYVDLYINGYCKGIRHKKTNRIYCDGNKNYDINDFNVLAACSGNCLCDPLKCTNKFPEGLHYPIKVVKTKDIGWDIVSCSFIKANSLIMHYVGEITTRKEMISREHEYDKKGYFNYFIETAEVDETYPDDWKIPCIDALFISNVARFLNHSCEPNVNVITIWRGDNYPSVGIFASRDIQPNEPLKYHYGINYKNIKCMCASKKCKGYIG

SEQ ID NO: 15037 - protein, 410 aa, Caenorhabditis elegans
MFKISNPNLFCLPYFPHIFLSAETFFSRFLLRVTYQLLRPSQISFLFFFSIFYVFKMYVQNVKDHITFAVFFWKFFFILAFIFRTGNFDFCKIFSDFKFSKKQAFLAGNSIFLVLVGNSNFKFFLEKEVVGNMPIIGKEWFTDVAKQQPMVLYEDISQGCERFVVPVYSNPRFFMDSSLFENFKYTSRIIDVAGQLACRSASPTFMCQCAGQCSTNCECSSGVFGEGGTVENMELLMWDTVRECNEYCNCALWCGNRVAQKGAMYPVEIFARDPWCGWGVRASVDIAFGTFIGEYAGELIDDEEAMDRHDSTFLFETKVGSETLTIDAKYSGNYTRFINHSCAPNVKVANISWDYDKIQLIHMCFFTDKAIRKGEELTIDYGEAWWANKKFPCLCKSSECRYQFGNDQRT

SEQ ID NO: 15038 - protein, 244 aa, Caenorhabditis elegans
MNYEKIDSTIPGPGISETDWNDVFEGCNCEAECSSAAGCSCLINKIDNYTVDGKINKSSELLIECSDQCACILLPTSCRNRVVQCGPQKKLEIFSTCEMAKGFGVRAGEQIAAGEFVCEYAGECIGEQEVERRCREFRGDDNYTLTLKEFFGGKPVKTFVDPRLRGNIGRFLNHSCEPNCEIILARLGRMIPAAGIFAKRDIVRGEELCYDYGHSAIEGENRKLCLCKSEKCRKYLPMSATPIE

SEQ ID NO: 15039 - protein, 401 aa, Caenorhabditis elegans
MFKISNPNLFCLPYFPHIFLSAETFFSRFLLRVTYQLLRPSQISFLFFFSIFYVFKMYVQNVKDHITFAVFFWKFFFILAFIFRTGNFDFCKIFSDFKFSKKQAFLAGNSIFLVLVGNSNFKFFLEKEVVGNMPIIGKEWFTDVAKQQPMVLYEDISQGCERFVVPVYSNPRFFMDSSLFENFKYTSRIIDVAGQLACRSASPTFMCQCAGQCSTNCECSSGVFGEGGTVENMELLMWDTVRECNEYCNCALWCGNRVAQKGAMYPVEIFARDPWCGWGVRASVDIAFGTFIGEYAGELIDDEEAMDRHDSTFLFETKVGSETLTIDAKYSGNYTRFINHSCAPNVKVANISWDYDKIQLIHMCFFTDKAIRKGEELTIDYGEAWWANKAEIPVPLQVVGM

SEQ ID NO: 15040 - protein, 3828 aa, Drosophila virilis
MGRSKFPGNPSKSINRKRISVLQLEDEAASAAAAAAAATAATTEQHQQSEQSAGSSASREKGNNCDNDDDDNAPSGAATSGNRGASSGASDAAPEGGNSYGNGSSTGSKTTNGGNVNGGSHHKSATAPAELKECKNQGNQIEPNNCIAAEPDGTEDTNNDDDDDSSNDKKPTAAAAAAAAAAFVPGPSALQRARKGGNKKFKNLNLARPEVMLPSTSKLKQQQQQQLQLNCPSASASSLSSSAAAAAAAAAPTTTTTTASASATLTATATSTSTSSLPGTPLSVIAGGGGGAAAAALLLANPFASVETKVVEVNAAATAAATAAATAAAGAGEDVGMLKASIEMANEAGLEAPAVAVKSSGSSPNPNHNPNAVAGSTSAAAPGAPTATKQKKTVTFKNILETSDDKSVVKRFYNPDNRVPLVSIMKKDSLNRPLNYCRGSEFIVRPSILSKILNKNSNIDKLNSLKFRSVHASSNSIQESSSSTTNLFGSGLSRAFGAPIDDEDAVSGGVTFRKQEPQHKTPEDNDDDGSASSDAIEDDEDIDDDDAEENEEAASEKSAETTASVDEKEADDRQLVMDKHFVLPKRSTRSSRIIKPNKRLLEVGGICSKRSPSDANGKPKPKNYFGLATLPAKCTPRRRRSAATALSQKLGKETFASFATAKVNSSFVLRQPRLQFQTDKSRSFVSAKPTLPTTTVLPASSSAITSANVLSFGALNNANSAVAAASTCAVCSAPVNNKDAPLARKYGVIACEVCRKFNSRMTKISKLSTPMHSNPSTSTAQSGQQLKCTDGGNCSILSLKSQLKNFKKLYKERCKACWLKKCLATLQLPAGHRSRLSAILPASMREEVAPKDDKCPELLSPTASLRFTAPTSSASSGTTIKWKSSAETAVNSIKSNPLAENNVTFGGTPLLRPAILEKPLFLKIGSDNKKAKESKEALGLSPVPSTSEAAVAPGKTTRKAKQDKEKARELEAEKPLSPNAKKTTEANTPETQKDEQPASTTTTVSAASSSTSHTSSAATNSSQLETTEAANASAVPDNLKRQRIDLKGPRVKHVCRSASIVLGQPLATFGDEEEELAAAEAGPAPTTTTTTTSPEVIIKKPKSPQPMQMIIDENDNCASCILTPTEATAEAQPAVKSVLESRSSKSNTQTEAKKTPATSGSSKGKVTTRNATATVTSVASSLVATKKQRNIEVSSSISSSQAAATQSRRALAKEVNRLKALISIDFWENYDPAEVCQTGFGLIVTETVAQRALCFLCGSTGLDPLIFCACCCEPYHQYCVLDEYNLKHSSFEDTLMTSLLETSNNACAISAATNTALNQLTQRLNWLCPRCTVCYTCNMSSGSKVKCQKCQKNYHSTCLGTSKRLLGADRPLICVNCLKCKSCATTKVSKFVGNLPMCTACFKLRKKGNFCPICQKCYDDNDFDLKMMECGDCNQWVHSKCEGLSDEQYNLLSTLPESIEFICKKCARRCDVSRNKADEWRQAVMEEFKSSLYSVLKLLSKSRQACALLKLSPRKNWRCCSAGAQPAKAHSQGKLQPKALQFTYNGLGSDGESQNSDDIYEFKEQHSTNRKPSTPVPCSCLQPLSQSPSFSLVDIKQKIASNAYVSLAEFNYDMSQVIQQSNCDELDIAYKELLSEQFPWFQNETKACTDALEEDMFESCGYEELKESPTTYAEHHTASQAPRTGLLDIPLDDVDDLGGCAVKTRLDTRVCLFCRKSGEGLSGEEARLLYCGHDCWVHINCAMWSAEVFEEIDGSLQNVHSAVARGRMIKCTVCGNRGATVGCNVKSCGEHYHYPCARTIDCAFLTDKSMYCPAHARNALKANGSPSVTYESNFEVSRPVYVELERKRKKLIVPAKVQFHIGSVAVRQLGSIVPRFSDSFEAIVPINFLCSRLYWSSKEPWKIVEYTVRTTIQNSYSSTLTLDAGRNFTVDHTNPNCSLVQLGLAQIARWHSSLARSDLLDTDWAEFPNSYVPADENTEEEPQQNADLLPPEIKDAIFEDLPHELLDGISMLDIFMYEDLGDKTELFAMSEQSKDGTTATSQAGGASVIICDEDTRNSNSLNKHLVLSNCCTASNPVDDAMLCAARSSSQEKECGDVLKKTDTAPTRSWPKLDGGSVAAFKRRKLSKNIAEGVLLSLNQRSKKEMATVAGITRRQSVCGSSELPAEGSATMRTKSFTWSAAKCLFEKNESREEPAKLTIMQMDGVDDSITEYRIIGSDGNLSTAQFTGQVKCERCQCTYRNYDSFQRHLGSCEPMSTSESESETATGTAQLSAESLNELQKQALAAATLSNTGGLNYLQTSFPQVQNLATLGQFGVQGLQGLQTLQLQPQSLGNGFFLSQPNAAQATSNGNDVLQLYANSLQNLAANLGGGFTLTQPTMSTQAQPQLIALSTNPDGTQQFIQLPQSNGATTQLLQTAAPLRCNATYQTLQATNSDKKIVLLFLEAGDPLQEVVTQAAQQATAAAHQKQLKSGHGVKPIQAKLQGQQQQQRHQQHQQHQQHQQQQQQQQQQQQQQQTPITVAQHGGTTQLLGQNLLQPQLLFQSNAQPQTQQLLLPQTQAQNIISFVTGDGSQNQPLQYISIPTTNDFKPQQTTSTPTFLTAPGGGATFLQTDASGNLMLTTAPANSGLQMLTGQLQTQPQVIGTLIQPQTLQLTTGADGTQTATAQQPLILGGATGGGTTGLEFATAPQVILATQPMYYGLETIVQNTVMSSQQFVSTAMPGVLSQNSSFSATTTQVFQASKIEPIVDLPAGYVVLNNAVDASGNTSWLQQSQTQATDDATAQLLQNAGFQFQTTPTTSTQQTMSTDYAPPLVVTAKVPPVAQMKRNTNANKSPISVLSKVQPQPQQSQVVNKVLPTNVIQQQQQQQQQQQQQQQQMQPKQQLAGNANLKLTSQFQRQQQANELKNKQAAGQQTGSTCGAPPSIASKPLQKKTNLIRPIHKVEVKPKIMKQAPKLATSAASMQHHQQQQSPAAINQVAKVALLQQRLAPAPQPQQQEPQEEQQHLHQQQQQQQQQQQHMQQHQQQQQQLSMPQLLRAQQPIISIVNTAEPQAATQFVIRPALQAQAQPIQLQEQQSQQQQQQPAEQLINGKAARLQRYASNSLPTNVVNPLQQQRCASANNSSNSNVTQQNSTITINSRPTNRVLPMQQRQEPTPLSNDVVVQSPTPPKPIEEPVPAGASTQKPIVKCYAQLEQKSPGYETELKTNITLDNLEQTNSITTMQLQQPQQGPIYGEQIFEKQSEAQVQLEKPKHNDLMLLEATSCQQQQQQQQHMEMVVDNGFQLTSNESCLLEKHGFNVEAVPMDTEDHYASMKNGSGGGAAEGIGQVDDAEEDEDDDDDFSLKMATSACNDHEMSDSEEPAVKEKISKILDNLTNDDCSDSIATATTVEASAGYQQMVEDVLATTAAGSVSTDDETFTATAEAVEAAASYINEMAEAHELQLKQLQAGVELDLKKPKLDVPQQQPDTVPPNVVPTAAAPQQPPPMRDPKKISGPHLLYEIQSEDGFTYKSSSIAEIWEKVFEAVQVARRAHGLTPLPEGPLADMSGVQMIGLKTNALKYLIEQLPGVEKCVKYTPKYHKRNGNVSTAAGGGHARTAGSNPAALAAGAESLIDYGSDQEELQENAYECARCEPYVSRSEYDMFSWLASRHRKQPIQVFVQPSDNELVPRRGTGSNLPMAMKYRTLKETYKDYVGVFRSHIHGRGLYCTKDIEAGEMVIEYAGELIRSTLTDKRERYYDSRGIGCYMFKIDDNLVVDATMRGNAARFINHSCEPNCYSKVVDILGHKHIIIFALRRIVQGEELTYDYKFPFEDEKIPCSCGSKRCRKYLN

SEQ ID NO: 15041 - protein, 917 aa, Mus musculus
MSETDRAAKMDGDSEEEQESPDTGEDEDGGDESDLSSESSIKKKFLKRRGKTDSPWIKPARKRRRRSRKKPSSMLGSEACKSSPGSMEQAALGDSAGYMEVSLDSLDLRVRGILSSQTENEGLASGPDVLGTDGLQEVPLCSCRMETPKSREISTLANNQCMATESVDHELGRCTNSVVKYELMRPSNKAPLLVLCEDHRGRMVKHQCCPGCGYFCTAGNFMECQPESSISHRFHKDCASRVNNASYCPHCGEEASKAKEVTIAKADTTSTVTLAPGQEKSLAAEGRADTTTGSIAGAPEDERSQSTAPQAPECFDPAGPAGLVRPTSGLSQGPGKETLESALIALDSEKPKKLRFHPKQLYFSARQGELQKVLLMLVDGIDPNFKMEHQSKRSPLHAAAEAGHVDICHMLVQAGANIDTCSEDQRTPLMEAAENNHLDAVKYLIKAGAQVDPKDAEGSTCLHLAAKKGHYDVVQYLLSNGQMDVNCQDDGGWTPMIWATEYKHVELVKLLLSKGSDINIRDNEENICLHWAAFSGCVDIAEILLAAKCDLHAVNIHGDSPLHIAARENRYDCVVLFLSRDSDVTLKNKEGETPLQCASLSSQVWSALQMSKALRDSAPDKPVAVEKTVSRDIARGYERIPIPCVNAVDSELCPTNYKYVSQNCVTSPMNIDRNITHLQYCVCVDDCSSSTCMCGQLSMRCWYDKDGRLLPEFNMAEPPLIFECNHACSCWRNCRNRVVQNGLRARLQLYRTQDMGWGVRSLQDIPLGTFVCEYVGELISDSEADVREEDSYLFDLDNKDGEVYCIDARFYGNVSRFINHHCEPNLVPVRVFMSHQDLRFPRIAFFSTRLIQAGEQLGFDYGERFWDVKGKLFSCRCGSSKCRHSSAALAQRQASAAQEPQENGLPDTSSAAAADPL

SEQ ID NO: 15042 - protein, 308 aa, Mus musculus
PRVRLRLGVGNRAVRTEKIICRDVARGYENVPIPCVNGVDGEPCPEDYKYISENCETSTMNIDRNITHLQHCTCVDDCSSSNCLCGQLSIRCWYDKDGRLLQEFNKIEPPLIFECNQACSCWRSCKNRVVQSGIKVRLQLYRTAKMGWGVRALQTIPQGTFICEYVGELISDAEADVREDDSYLFDLDNKDGEVYCIDARYYGNISRFINHLCDPNIIPVRVFMLHQDLRFPRIAFFSSRDIRTGEELGFDYGDRFWDIKSKYFTCQCGSEKCKHSAEAIALEQSRLARLDPHPELLPDLSSLPPINT

SEQ ID NO: 15043 - protein, 1263 aa, Mus musculus
MRGLPRGRGLMRARGRGRAAPTGGRGRGRGGAHRGRGRPRSLLSLPRAQASWAPQLPAGLTGPPVPCLPSQGEAPAEMGALLLEKEPRGAAERVHSSLGDTPQSEETLPKANPDSLEPAGPSSPASVTVTVGDEGADTPVGAASLIGDEPESLEGDGGRIVLGHATKSFPSSPSKGGACPSRAKMSMTGAGKSPPSVQSLAMRLLSMPGAQGAATAGPEPSPATTAAQEGQPKVHRARKTMSKPSNGQPPIPEKRPPEVQHFRMSDDMHLGKVTSDVAKRRKLNSGSLSEDLGSAGGSGDIILEKGEPRPLEEWETVVGDDFSLYYDAYSVDERVDSDSKSEVEALAEQLSEEEEEEEEEEEEEEEEEEEEEEEEEDEESGNQSDRSGSSGRRKAKKKWRKDSPWVKPSRKRRKREPPRAKEPRGVNGVGSSGPSEYMEVPLGSLELPSEGTLSPNHAGVSNDTSSLETERGFEELPLCSCRMEAPKIDRISERAGHKCMATESVDGELLGCNAAILKRETMRPSSRVALMVLCEAHRARMVKHHCCPGCGYFCTAGTFLECHPDFRVAHRFHKACVSQLNGMVFCPHCGEDASEAQEVTIPRGDGGTPPIGTAAPALPPLAHDAPGRADTSQPSARMRGHGEPRRPPCDPLADTIDSSGPSLTLPNGGCLSAVGLPPGPGREALEKALVIQESERRKKLRFHPRQLYLSVKQGELQKVILMLLDNLDPNFQSDQQSKRTPLHAAAQKGSVEICHVLLQAGANINAVDKQQRTPLMEAVVNNHLEVARYMVQLGGCVYSKEEDGSTCLHHAAKIGNLEMVSLLLSTGQVDVNAQDSGGWTPIIWAAEHKHIDVIRMLLTRGADVTLTDNEENICLHWASFTGSAAIAEVLLNAQCDLHAVNYHGDTPLHIAARESYHDCVLLFLSRGANPELRNKEGDTAWDLTPERSDVWFALQLNRKLRLGVGNRAVRTEKIICRDVARGYENVPIPCVNGVDGEPCPEDYKYISENCETSTMNIDRNITHLQHCTCVDDCSSSNCLCGQLSIRCWYDKDGRLLQEFNKIEPPLIFECNQACSCWRSCKNRVVQSGIKVRLQLYRTAKMGWGVRALQTIPQGTFICEYVGELISDAEADVREDDSYLFDLDNKDGEVYCIDARYYGNISRFINHLCDPNIIPVRVFMLHQDLRFPRIAFFSSRDIRTGEELGFDYGDRFWDIKSKYFTCQCGSEKCKHSAEAIALEQSRLARLDPHPELLPDLSSLPPINT

SEQ ID NO: 15044 - protein, 615 aa, Mus musculus
CDPLADTIDSSGPSLTLPNGGCLSAVGLPTGPGREALEKALVIQESERRKKLRFHPRQLYLSVKQGELQKVILMLLDNLDPNFQSDQQSKRTPLHAAAQKGSVEICHVLLQAGANINAVDKQQRTPLMEAVVNNHLEVARYMVQLGGCVYSKEEDGSTCLHHAAKIGNLEMVSLLLSTGQVDVNAQDSGGWTPIIWAAEHKHIDVIRMLLTRGADVTLTDNEENICLHWASFTGSAAIAEVLLNAQCDLHAVNYHGDTPLHIAARESYHDCVLLFLSRGANPELRNKEGDTAWDLTPERSDVWFALQLNRKLRLGVGNRAVRTEKIICRDVARGYENVPIPCVNGVDGEPCPEDYKYISENCETSTMNIDRNITHLQHCTCVDDCSSSNCLCGQLSIRCWYDKDGRLLQEFNKIEPPLIFECNQACSCWRSCKNRVVQSGIKVRLQLYRTAKMGWGVRALQTIPQGTFICEYVGELISDAEADVREDDSYLFDLDNKDGEVYCIDARYYGNISRFINHLCDPNIIPVRVFMLHQDLRFPRIAFFSSRDIRTGEELGFDYGDRFWDIKSKYFTCQCGSEKCKHSAEAIALEQSRLARLDPHPELLPDLSSLPPINT

SEQ ID NO: 15045 - protein, 1000 aa, Mus musculus
MSDDMHLGKVTSDVAKRRKLNSGSLSEDLGSAGGSGDIILEKGEPRPLEEWETVVGDDFSLYYDAYSVDERVDSDSKSEVEALAEQLSEEEEEEEEEEEEEEEEEEEEEEEEEDEESGNQSDRSGSSGRRKAKKKWRKDSPWVKPSRKRRKREPPRAKEPRGVNGVGSSGPSEYMEVPLGSLELPSEGTLSPNHAGVSNDTSSLETERGFEELPLCSCRMEAPKIDRISERAGHKCMATESVDGELLGCNAAILKRETMRPSSRVALMVLCEAHRARMVKHHCCPGCGYFCTAGTFLECHPDFRVAHRFHKACVSQLNGMVFCPHCGEDASEAQEVTIPRGDGGTPPIGTAAPALPPLAHDAPGRADTSQPSARMRGHGEPRRPPCDPLADTIDSSGPSLTLPNGGCLSAVGLPPGPGREALEKALVIQESERRKKLRFHPRQLYLSVKQGELQKVILMLLDNLDPNFQSDQQSKRTPLHAAAQKGSVEICHVLLQAGANINAVDKQQRTPLMEAVVNNHLEVARYMVQLGGCVYSKEEDGSTCLHHAAKIGNLEMVSLLLSTGQVDVNAQDSGGWTPIIWAAEHKHIDVIRMLLTRGADVTLTDNEENICLHWASFTGSAAIAEVLLNAQCDLHAVNYHGDTPLHIAARESYHDCVLLFLSRGANPELRNKEGDTAWDLTPERSDVWFALQLNRKLRLGVGNRAVRTEKIICRDVARGYENVPIPCVNGVDGEPCPEDYKYISENCETSTMNIDRNITHLQHCTCVDDCSSSNCLCGQLSIRCWYDKDGRLLQEFNKIEPPLIFECNQACSCWRSCKNRVVQSGIKVRLQLYRTAKMGWGVRALQTIPQGTFICEYVGELISDAEADVREDDSYLFDLDNKDGEVYCIDARYYGNISRFINHLCDPNIIPVRVFMLHQDLRFPRIAFFSSRDIRTGEELGFDYGDRFWDIKSKYFTCQCGSEKCKHSAEAIALEQSRLARLDPHPELLPDLSSLPPINT

SEQ ID NO: 15046 - protein, 1172 aa, Mus musculus
MAAAAGAAAAAAAEGEAPAEMGALLLEKEPRGAAERVHSSLGDTPQSEETLPKANPDSLEPAGPSSPASVTVTVGDEGADTPVGAASLIGDEPESLEGDGGRIVLGHATKSFPSSPSKGGACPSRAKMSMTGAGKSPPSVQSLAMRLLSMPGAQGAATAGPEPSPATTAAQEGQPKVHRARKTMSKPSNGQPPIPEKRPPEVQHFRMSDDMHLGKVTSDVAKRRKLNSGSLSEDLGSAGGSGDIILEKGEPRPLEEWETVVGDDFSLYYDAYSVDERVDSDSKSEVEALAEQLSEEEEEEEEEEEEEEEEEEEEEEEEEDEESGNQSDRSGSSGRRKAKKKWRKDSPWVKPSRKRRKREPPRAKEPRGVSNDTSSLETERGFEELPLCSCRMEAPKIDRISERAGHKCMATESVDGELLGCNAAILKRETMRPSSRVALMVLCEAHRARMVKHHCCPGCGYFCTAGTFLECHPDFRVAHRFHKACVSQLNGMVFCPHCGEDASEAQEVTIPRGDGGTPPIGTAAPALPPLAHDAPGRADTSQPSARMRGHGEPRRPPCDPLADTIDSSGPSLTLPNGGCLSAVGLPPGPGREALEKALVIQESERRKKLRFHPRQLYLSVKQGELQKVILMLLDNLDPNFQSDQQSKRTPLHAAAQKGSVEICHVLLQAGANINAVDKQQRTPLMEAVVNNHLEVARYMVQLGGCVYSKEEDGSTCLHHAAKIGNLEMVSLLLSTGQVDVNAQDSGGWTPIIWAAEHKHIDVIRMLLTRGADVTLTDNEENICLHWASFTGSAAIAEVLLNAQCDLHAVNYHGDTPLHIAARESYHDCVLLFLSRGANPELRNKEGDTAWDLTPERSDVWFALQLNRKLRLGVGNRAVRTEKIICRDVARGYENVPIPCVNGVDGEPCPEDYKYISENCETSTMNIDRNITHLQHCTCVDDCSSSNCLCGQLSIRCWYDKDGRLLQEFNKIEPPLIFECNQACSCWRSCKNRVVQSGIKVRLQLYRTAKMGWGVRALQTIPQGTFICEYVGELISDAEADVREDDSYLFDLDNKDGEVYCIDARYYGNISRFINHLCDPNIIPVRVFMLHQDLRFPRIAFFSSRDIRTGEELGFDYGDRFWDIKSKYFTCQCGSEKCKHSAEAIALEQSRLARLDPHPELLPDLSSLPPINT

SEQ ID NO: 15047 - protein, 309 aa, Mus musculus
MSAEGVEKLSLEIAASEEESVAPTEQQDVACGLENLPVSLWPLGAEPRPKPFQYTPDHVAGPGADIDPTQITFPGCACIETPCVPGTCSCLRHENNYDDNLCFRDVGSEGKYAKPVFECNVLCQCGMRCRNRVVQNGLHFLLQVFQTEKKGWGLRTLEFIPKGRFVCEYAGEVLGFSEVQRRIHLQTSHDSNYIIAVREHIYSGQIMETFVDPTYIGNIGRFLNHSCEPNLLMIPVRIDSMVPKLALFAAKDILPGEELSYDYSGRFLNQVSRKDKEKIDCSPPRKPCYCGAQSCTTFLPYDSSLYMAP

SEQ ID NO: 15048 - protein, 309 aa, Mus musculus
MSAEGVEKLSLEIAASEEESVAPTEQQDVACGLENLPVSLWPLGAEPRPKPFQYTPDHVAGPGADIDPTQITFPGCACIETPCVPGTCSCLRHENNYDDNLCLRDVGSEGKYAKPVFECNVLCQCGMRCRNRVVQNGLHFLLQVFQTEKKGWGLRTLEFIPKGRFVCEYAGEVLGFSEVQRRIHLQTSHDSNYIIAVREHIYSGQIMETFVDPTYIGNIGRFLNHSCEPNLLMIPVRIDSMVPKLALFAAKDILPGEELSYDYSGRFLNQVSSKDKEKIDCSPPRKPCYCGAQSCTTFLPYDSSLYMAP

SEQ ID NO: 15049 - protein, 453 aa, Mus musculus
PEGEGCGHAREKAALSDRYPFGFHGRRRKGRKKWNDPLLKMGEPATLGCSVCCKSSWNQLQDLCRLAKLSCPALGVSKKNLYDFEVEYLCDYKKIREQEYYLVKWRGYPDSENTWEPRQNLKCIRVLKQFHKDLERELVRRHRRSKPPRHLDPNLANYLVQKAKQRRALQRWEQELNAKRSHLGRITVENEVDLDGPPRSFVYINEYRVGEGITLNQVAVGCECQDCLLAPTGGCCPGASLHKFAYNDQGQVRLKAGQPIYECNSRCCCGYDCPNRVVQKGIRYDLCIFRTNDGRGWGVRTLEKIRKNSFVMEYVGEIITSEEAERRGQIYDRQGATYLFDLDYVEDVYTVDAAYYGNISHFVNHSCDPNLQVYNVFIDNLDERLPRIAFFATRTIWAGEELTFDYNMQVDPVDMESTRMDSNFGLAGLPGSPKKRVRIECKCGTTACRKYLF

SEQ ID NO: 15050 - protein, 412 aa, Mus musculus
MAENLKGCSVCCKSSWNQLQDLCRLAKLSCPALGVSKKNLYDFEVEYLCDYKKIREQEYYLVKWRGYPDSENTWEPRQNLKCIRVLKQFHKDLERELVRRHRRSKPPRHLDPNLANYLVQKAKQRRALQRWEQELNAKRSHLGRITVENEVDLDGPPRSFVYINEYRVGEGITLNQVAVGCECQDCLLAPTGGCCPGASLHKFAYNDQGQVRLKAGQPIYECNSRCCCGYDCPNRVVQKGIRYDLCIFRTNDGRGWGVRTLEKIRKNSFVMEYVGEIITSEEAERRGQIYDRQGATYLFDLDYVEDVYTVDAAYYGNISHFVNHSCDPNLQVYNVFIDNLDERLPRIAFFATRTIWAGEELTFDYNMQVDPVDMESTRMDSNFGLAGLPGSPKKRVRIECKCGTTACRKYLF

SEQ ID NO: 15051 - protein, 412 aa, Mus musculus
MAENLKGCSVCCKSSWNQLQDLCRLAKLSCPALGVSKKNLYDFEVEYLCDYKKIREQEYYLVKWRGYPDSENTWEPRQNLKCIRVLKQFHKDLERELVRRHRRSKPPRHLDPNLANYLVQKAKQRRALQRWEQELNAKRSHLGRITVENEVDLDGPPRSFVYINEYRVGEGITLNQVAVGCECQDCLLAPTGGCCPGASLHKFAYNDQGQVRLKAGQPIYECNSRCCCGYDCPNRVVQKGIRYDLCIFRTNDGRGWGVRTLEKIRKNSFVMEYVGEIITSEEAERRGQIYDRQGATYLFDLDYVEDVYTVDAAYYGNISHFVNHSCDPNLQVYNVFIDNLDERLPRIAFFATRTIWAGEELTFGYNMQVDPVDMESTRMDSNFGLAGLPGSPKKRVRIECKCGTTACRKYLF

SEQ ID NO: 15052 - protein, 477 aa, Mus musculus
MATARAKARGSEAGARCHRAPGPPPRPKARRTARRRRAETLTARRSRPSAGERRAGSQRAWSGAPRAAVFGDECARGALFKAWCVPCLVSLDTLQELCRKEKLTCKSIGITKRNLNNYEVEYLCDYKVAKGVEYYLVKWKGWPDSTNTWEPLRNLRCPQLLRQFSDDKKTYLAQERKCKAVNSKSLQPAIAEYIVQKAKQRIALQRWQDYLNRRKNHKGMIFVENTVDLEGPPLDFYYINEYRPAPGISINSEATFGCSCTDCFFDKCCPAEAGVVLAYNKKQQIKIQPGTPIYECNSRCRCGPECPNRIVQKGTQYSLCIFKTSNGCGWGVKTLVKIKRMSFVMEYVGEVITSEEAERRGQFYDNKGITYLFDLDYESDEFTVDAARYGNVSHFVNHSCDPNLQVFSVFIDNLDTRLPRIALFSTRTINAGEELTFDYQMKGSGEASSDSIDHSPAKKRVRTQCKCGAETCRGYLN

SEQ ID NO: 15053 - protein, 477 aa, Mus musculus
MAAARAKARGSEAGARCHRAPGPPPRPKARRTARRRRAETLTARRSRPSAGERRAGSQRAWSGAPRAAVFGDECARGALFKAWCVPCLVSLDTLQELCRKEKLTCKSIGITKRNLNNYEVEYLCDYKVAKGVEYYLVKWKGWPDSTNTWEPLRNLRCPQLLRQFSDDKKTYLAQERKCKAVNSKSLQPAIAEYIVQKAKQRIALQRWQDYLNRRKNHKGMIFVENTVDLEGPPLDFYYINEYRPAPGISINSEATFGCSCTDCFFDKCCPAEAGVVLAYNKKQQIKIQPGTPIYECNSRCRCGPECPNRIVQKGTQYSLCIFRTSNGCGWGVKTLVKIKRMSFVMEYVGEVITSEEAERRGQFYDNKGITYLFDLDYESDEFTVDAARYGNVSHFVNHSCDPNLQVFSVFIDNLDTRLPRIALFSTRTINAGEELTFDYQMKGSGEASSDSIDHSPAKKRVRTQCKCGAETCRGYLN

SEQ ID NO: 15054 - protein, 337 aa, Rattus norvegicus
MGNSNIPQDPVKSLPPNEKPSSWCLAELLLSSSVDTLAGHFTRDQNKNSPHELSLTKEWFGRTLVKFLSCICTRNVSVASDAGPGADMDPTQITFPGCACIKTPCVPGTCSCLRHESNYNDNLCLRDVGSEAKYAKPVFECNVLCQCGEHCRNRVVQSGLQFLLQVFQTEKKGWGLRTLEYIPKGRFVCEYAGEVLGFSEVQRRIHLQTAHDPNYIIALREHTYNGQVMETFVDPTYIGNIGRFLNHSCEPNLLMIPVRIDSMVPKLALFAAKDILPGEELSYDYSGRFLNQISSKDKERIDCGQPRKPCYCGAQSCATFLPYDSSLYGPLENPGTS

SEQ ID NO: 15055 - protein, 1027 aa, Rattus norvegicus
MELQDDGKVDFMFEKAQDVLHSLKQKIKDGSATNGDHTPVTQNEQKNKSNVFPSTSCENPSPEDCIILSTGRKGFLPVNNKTEGSGEKEPPLHASFHHHVCSSACLREAPLSLKGENPLQLPLRCHFQRRHAKTNSPSAALHVNYRTPCGRSLRNMEEVFHYLLETECNFLFTDNFSFNTYVQLTRNHPKQNEVVSDVDISNGVESVSISFCNEVDNSKLPQFKYRTTVWPRAYHLNVSSMFSDSCDCSEGCIDIKKCACLQLTAKNAKACPLSPDGECTGYKYKRLQRLIPSGIYECNLFCKCNRQMCQNRVIQHGPRVRLQVFKSEKKGWGVRCLDDIDKGTFVCIYSGRLLSRATPEKTNIGESESEQQHTVKNSFSKKRKIEVVCSDRQTHCESPKTEGCPPKFSSDLEEPVVEMNNRNISRTQRHSVIRRPKSKTDVFHYNEKNMGFVCSYSAAPEEKNGFKPAQEHLDSKARRAHEDLSSSQVGYSEDKQLTESDVIDTTTSREDTSPAYGCKHAAILNSKNTKKVLEVPVKTSQEEEPAASQSQQVSCGEELASERTKIPSASLVQLSKESLFLLDASKEGNVGRFLNHSCYPNLWVQNVFVETHDRNFPLAAFFTNSQVERSEETRGDEQVPTQGTHLGQLGAMSFRPTMIFTYAMFTVEFMEGRYVKARTELTWDYGYEAGTMPEKEILCQCCYLPSPPRFRETKLETPQLHLEECRYPAMAQETSLTPDPVLTGFCQVTEKMEKRTCVLCPEGHDWSVIYFSPSANIAAHENCLLYSSGLVECEAHDPFNIAKNFDVSSVLEKIWNGSTSKCSFCNNEGAIMGCDETSCAKNYHLLCAKEDRAILQVGVKRTYNQWPKHQEEERKEETTFIGPSRTDAAVKAPFLKKCLEAGLLTELFEQIQQKMISIHGRFMDETASESDYEGIETLVFGCGLFKDTLIKLEEAIKSKTCEYEERLNQMKQKLEALAHLQQNLHSFQECGDLDPSGSTSGSLLPPEDHQCRCQESPEVQAGSGDSL

SEQ ID NO: 15056 - protein, 938 aa, Anopheles gambiae str. PEST
ARQAAKANAPPCPDVDTFLQGVRAMRLGTANRSRTDDNRKLNRRQQKRADKMKLKFMAGLGLQRPSAQQPRNGTDGDDFDVQMSVGESDSSGSEADFVPPQKIGTVGRPNVTLRLRKPETLLENPPRKASLASAAGPANRVPLVTAPSGPVGMPKSSAVNANRQAANAHARQVGKQSNGGRTPLAPANGAGKSRSSASPAQNVATPPILPGTTSPSLQIMLGGGPGSGQPVRTTSGLVASSTRTAVPENESCASDSLVCHCRQKSDIFVAKTVGNGYCTAVDDIDGQQIGCCNELSNDLLNMLRPSARGNFAMCKNAHLFHPKCADKYTLNTPYNPARPGDHAAPTLVLKCPHCNQECPNGEIEVNIQLTSPPVLLPSRKSMVKPAKMTVSKTGSGGSSSTNGISGPSNGKDSFRTTVKSLVPSSVKNMLATDHSSKNGSGVSASTSASSSASRTSSAKDAGSTAGASSTGTKLRHTAKDFTNAVCTKKDDALVSEIITSGFDIETRFREYHHGTCLHVVCSYGTPAMAYLIMCRARSVDYLNIFDRELHTAVMRAVVGSKSDIVKLLLDSGADATLKGPYGMTVLHLAAKQGQHDTVRTILECARQRLTARALMAFVNAVDNGRWTALAWAAENRHKQTVEQLISIGADVNVCDRLNNTSLHWASLSGCSDTLYRLMTKDCNPNLQNSNGETPLHIACRQGHAEICVVLLAMGASLNVRNTSNQLPQDIILDPNSECGNIIAANVKMRNLSNNLKETHIICSDISNGRERHPIQVVYYTRGANERQLTVPKLKYIQSNVQIDYRVTIDTDARNMHVCSCVDSTCTSMDSECLCSERTWYTNDGRLVNDFNYLDPPIITECGDLCDCNLRSCRNRVVQHGLDVPLQLCYIPGKGWGVRTMVPIPKGTFLVEYVGEILPDEAANHRLDDSYLFDLGNGL

SEQ ID NO: 15057 - protein, 669 aa, Arabidopsis thaliana
MQGVPGFNTVPNPNHYDKSIVLDIKPLRSLKPVFPNGNQGPPFVGCPPFGPSSSEYSSFFPFGAQQPTHDTPDLNQTQNTPIPSFVPPLRSYRTPTKTNGPSSSSGTKRGVGRPKGTTSVKKKEKKTVANEPNLDVQVVKKFSSDFDSGISAAEREDGNAYLVSSVLMRFDAVRRRLSQVEFTKSATSKAAGTLMSNGVRTNMKKRVGTVPGIEVGDIFFSRIEMCLVGLHMQTMAGIDYIISKAGSDEESLATSIVSSGRYEGEAQDPESLIYSGQGGNADKNRQASDQKLERGNLALENSLRKGNGVRVVRGEEDAASKTGKIYIYDGLYSISESWVEKGKSGCNTFKYKLVRQPGQPPAFGFWKSVQKWKEGLTTRPGLILPDLTSGAESKPVSLVNDVDEDKGPAYFTYTSSLKYSETFKLTQPVIGCSCSGSCSPGNHNCSCIRKNDGDLPYLNGVILVSRRPVIYECGPTCPCHASCKNRVIQTGLKSRLEVFKTRNRGWGLRSWDSLRAGSFICEYAGEVKDNGNLRGNQEEDAYVFDTSRVFNSFKWNYEPELVDEDPSTEVPEEFNLPSPLLISAKKFGNVARFMNHSCSPNVFWQPVIREGNGESVIHIAFFAMRHIPPMAELTYDYGISPTSEARDESLLHGQRTCLCGSEQCRGSFG

SEQ ID NO: 15058 - protein, 670 aa, Arabidopsis thaliana
MERNGGHYTDKTRVLDIKPLRTLRPVFPSGNQAPPFVCAPPFGPFPPGFSSFYPFSSSQANQHTPDLNQAQYPPQHQQPQNPPPVYQQQPPQHASEPSLVTPLRSFRSPDVSNGNAELEGSTVKRRIPKKRPISRPENMNFESGINVADRENGNRELVLSVLMRFDALRRRFAQLEDAKEAVSGIIKRPDLKSGSTCMGRGVRTNTKKRPGIVPGVEIGDVFFFRFEMCLVGLHSPSMAGIDYLVVKGETEEEPIATSIVSSGYYDNDEGNPDVLIYTGQGGNADKDKQSSDQKLERGNLALEKSLRRDSAVRVIRGLKEASHNAKIYIYDGLYEIKESWVEKGKSGHNTFKYKLVRAPGQPPAFASWTAIQKWKTGVPSRQGLILPDMTSGVESIPVSLVNEVDTDNGPAYFTYSTTVKYSESFKLMQPSFGCDCANLCKPGNLDCHCIRKNGGDFPYTGNGILVSRKPMIYECSPSCPCSTCKNKVTQMGVKVRLEVFKTANRGWGLRSWDAIRAGSFICIYVGEAKDKSKVQQTMANDDYTFDTTNVYNPFKWNYEPGLADEDACEEMSEESEIPLPLIISAKNVGNVARFMNHSCSPNVFWQPVSYENNSQLFVHVAFFAISHIPPMTELTYDYGVSRPSGTQNGNPLYGKRKCFCGSAYCRGSFG

SEQ ID NO: 15059 - protein, 669 aa, Arabidopsis thaliana
MQGVPGFNTVPNPNHYDKSIVLDIKPLRSLKPVFPNGNQGPPFVGCPPFGPSSSEYSSFFPFGAQQPTHDTPDLNQTQNTPIPSFVPPLRSYRTPTKTNGPSSSSGTKRGVGRPKGTTSVKKKEKKTVANEPNLDVQVVKKFSSDFDSGISAAEREDGNAYLVSSVLMRFDAVRRRLSQVEFTKSATSKAAGTLMSNGVRTNMKKRVGTVPGIEVGDIFFSRIEMCLVGLHMQTMAGIDYIISKAGSDEESLATSIVSSGRYEGEAQDPESLIYSGQGGNADKNRQASDQKLERGNLALENSLRKGNGVRVVRGEEDAASKTGKIYIYDGLYSISESWVEKGKSGCNTFKYKLVRQPGQPPAFGFWKSVQKWKEGLTTRPGLILPDLTSGAESKPVSLVNDVDEDKGPAYFTYTSPLKYSETFKLTQPVIGCSCSGSCSPGNHNCSCIRKNDGDLPYLNGVILVSRRPVIYECGPTCPCHASCKNRVIQTGLKSRLEVFKTRNRGWGLRSWDSLRAGSFICEYAGEVKDNGNLRGNQEEDAYVFDTSRVFNSFKWNYEPELVDEDPSTEVPEEFNLPSPLLISAKKFGNVARFMNHSCSPNVFWQPVIREGNGESVIHIAFFAMRHIPPMAELTYDYGISPTSEARDESLLHGQRTCLCGSEQCRGSFG

SEQ ID NO: 15060 - protein, 693 aa, Arabidopsis thaliana
MDKSIPIKAIPVACVRPDLVDDVTKNTSTIPTMVSPVLTNMPSATSPLLMVPPLRTIWPSNKEWYDGDAGPSSTGPIKREASDNTNDTAHNTFAPPPEMVIPLITIRPSDDSSNYSCDAGAGPSTGPVKRGRGRPKGSKNSTPTEPKKPKVYDPNSLKVTSRGNFDSEITEAETETGNQEIVDSVMMRFDAVRRRLCQINHPEDILTTASGNCTKMGVKTNTRRRIGAVPGIHVGDIFYYWGEMCLVGLHKSNYGGIDFFTAAESAVEGHAAMCVVTAGQYDGETEGLDTLIYSGQGGTDVYGNARDQEMKGGNLALEASVSKGNDVRVVRGVIHPHENNQKIYIYDGMYLVSKFWTVTGKSGFKEFRFKLVRKPNQPPAYAIWKTVENLRNHDLIDSRQGFILEDLSFGAELLRVPLVNEVDEDDKTIPEDFDYIPSQCHSGMMTHEFHFDRQSLGCQNCRHQPCMHQNCTCVQRNGDLLPYHNNILVCRKPLIYECGGSCPCPDHCPTRLVQTGLKLHLEVFKTRNCGWGLRSWDPIRAGTFICEFAGLRKTKEEVEEDDDYLFDTSKIYQRFRWNYEPELLLEDSWEQVSEFINLPTQVLISAKEKGNVGRFMNHSCSPNVFWQPIEYENRGDVYLLIGLFAMKHIPPMTELTYDYGVSCVERSEEDEVLLYKGKKTCLCGSVKCRGSFT

SEQ ID NO: 15061 - protein, 755 aa, Arabidopsis thaliana
MVSTPPTLLMLFDDGDAGPSTGLVHREKSDAVNEEAHATSVPPHAPPQTLWLLDNFNIEDSYDRDAGPSTGPVHRERSDAVNEEAHATSIPPHAPPQTLWLLDNFNIEDSYDRDAGPSTSPIDREASHEVNEDAHATSAPPHVMVSPLQNRRPFDQFNNQPYDASAGPSTGPGKRGRGRPKGSKNGSRKPKKPKAYDNNSTDASAGPSSGLGKRRCGRPKGLKNRSRKPKKPKADDPNSKMVISCPDFDSRITEAERESGNQEIVDSILMRFDAVRRRLCQLNYRKDKILTASTNCMNLGVRTNMTRRIGPIPGVQVGDIFYYWCEMCLVGLHRNTAGGIDSLLAKESGVDGPAATSVVTSGKYDNETEDLETLIYSGHGGKPCDQVLQRGNRALEASVRRRNEVRVIRGELYNNEKVYIYDGLYLVSDCWQVTGKSGFKEYRFKLLRKPGQPPGYAIWKLVENLRNHELIDPRQGFILGDLSFGEEGLRVPLVNEVDEEDKTIPDDFDYIRSQCYSGMTNDVNVDSQSLVQSYIHQNCTCILKNCGQLPYHDNILVCRKPLIYECGGSCPTRMVETGLKLHLEVFKTSNCGWGLRSWDPIRAGTFICEFTGVSKTKEEVEEDDDYLFDTSRIYHSFRWNYEPELLCEDACEQVSEDANLPTQVLISAKEKGNVGRFMNHNCWPNVFWQPIEYDDNNGHIYVRIGLFAMKHIPPMTELTYDYGISCVEKTGEDEVIYKGKKICLCGSVKCRGSFG

SEQ ID NO: 15062 - protein, 954 aa, Arabidopsis thaliana
MDKSIPIKAIPVACVRPDLVDDVTKNTSTIPTMVSPVLTNMPSATSPLLMVPPLRTIWPSNKEWYDGDAGPSSTGPIKREASDNTNDTAHNTFAPPPEMVIPLITIRPSDDSSNYSCDAGAGPSTGPVKRGRGRPKGSKNSTPTEPKKPKVYDPNSLKVTSRGNFDSEITEAETETGNQEIVDSVMMRFDAVRRRLCQINHPEDILTTASGNCTKMGVKTNTRRRIGAVPGIHVGDIFYYWGEMCLVGLHKSNYGGIDFFTAAESAVEGHAAMCVVTAGQYDGETEGLDTLIYSGQGGTDVYGNARDQEMKGGNLALEASVSKGNDVRVVRGVIHPHENNQKIYIYDGMYLVSKFWTVTGKSGFKEFRFKLVRKPNQPPAYAIWKTVENLRNHDLIDSRQGFILEDLSFGAELLRVPLVNEVDEDDKTIPEDFDYIPSQCHSGMMTHEFHFDRQSLGCQNCRHQPCMHQNCTCVQRNGDLLPYHNNILVCRKPLIYECGGSCPCPDHCPTRLVQTGLKLHLEVFKTRNCGWGLRSWDPIRAGTFICEFAGLRKTKEEVEEDDDYLFDTSKIYQRFRWNYEPELLLEDSWEQVSEFINLPTQVLISAKEKGNVGRFMNHSCSPNVFWQPIEYENRGDVYLLIGLFAMKHIPPMTELTYDYGVSCVERSEEDEGFLVCPYLSSSLWPSSSEIHFLINSKGRAWYDKIYRKLASQGNVSSGLDSVKDEPEKLREEQMEGDGFKEKLSDSVLIDEKLEEYSDCDRTATTSRSHTDPVSSQSTHQTPESFRTPITCDDDTFVSVSGISRDVSNLIPFATETPASPVQEKMANTRSFSNNSVKGNQDEFFIEDFDVGPMDTIDLYDMTFREDPSDFDDNLLYAMRDRTKQLRSFKRKIMDAIKSKRRREKEYEQLAIWFGDADMGCDLVNDKEQSTTSIDSKSSQTNVPVVSEDSEWEIL

SEQ ID NO: 15063 - protein, 429 aa, Arabidopsis thaliana
MCLVGLHRNTAGGIDSLLAKESGVDGPAATSVVTSGKYDNETEDLETLIYSGHGGKPCDQVLQRGNRALEASVRRRNEVRVIRGELYNNEKVYIYDGLYLVSDCWQVTGKSGFKEYRFKLLRKPGQPPGYAIWKLVENLRNHELIDPRQGFILGDLSFGEEGLRVPLVNEVDEEDKTIPDDFDYIRSQCYSGMTNDVNVDSQSLVQSYIHQNCTCILKNCGQLPYHDNILVCRKPLIYECGGSCPTRMVETGLKLHLEVFKTSNCGWGLRSWDPIRAGTFICEFTGVSKTKEEVEEDDDYLFDTSRIYHSFRWNYEPELLCEDACEQVSEDANLPTQVLISAKEKGNVGRFMNHNCWPNVFWQPIEYDDNNGHIYVRIGLFAMKHIPPMTELTYDYGISCVEKTGEDEVIYKGKKICLCGSVKCRGSFG

SEQ ID NO: 15064 - protein, 708 aa, Glycine max
  unsure (1)..(708): unsure at all Xaa locations
MEHHXXGQGTTPASVDKARVLNVKPLRTLVPVFPSPSNPASSSTPQGGAPFVCVSPSGPFPSGVAPFYPFFISSESQRLSEQNAQTPSGQRVPAAPVSTAVPINSFRTPTGAANGDVGSSRKNARSRGRVTEEDGHSNVEXXEEIDADEGTGTGRSKRKSNKKTKARQSGGSVSGDVDPDAVAADILKSLNALVFDVLKSTXEGSRDSVAYTLMIYEVMRRKLGQIEDSNRAANSGAKRPDLKAGAIMMNKGIRTNSKKRIGVVPGVEIGDIFFFRFELCLVGLHAPSMAGIDYIGKTSQEEEPLAVSIVSSGGYEDNVEDGDVLIYSGQGGVNRDKGASDQKLERGNLALEKSAHRGNEVRVIRGLRDPQHPTGKIYVYDGLYKIQNSWVEKAKSGFNVFKYNLVRLPEQPQAYMIWKSIQQWTEKSASRAGVILPDLTSGAENVPVCLVNDVDNEKGPAYFTYIPTLKNLRPTAPVESSTGCPCVGGCQSKNFNCPCIQKNGGYLPYSSALLLADLKSVIYECGPSCQCPSNCRNRVSQSGLKFRLEVFRTKNKGWGLRSWDSIRAGTFICEYAGEVIDCSRGEELGGVKEYXYIFDSTRIYQQLEVFPGDTDSXRKIPSPLYISAKNEGNVSRFMNHSCSPNVLWRPVIRENKNESDLHIAFYAIRHIPPMMELTYDYGAVLPLKVGQRKKKCLCGSVKCKGYFC

SEQ ID NO: 15065 - protein, 736 aa, Oryza sativa (japonica cultivar-group)
MNRESNFMPTPDQDVLEVKPLRTLAPMFPAPLGIDVLNRLTAPPLVFVAPAGQFPGGFGSLNIPAVRSFAAFGGQDASGGKTAGGGDQDASGGKTAAGGDQDAGRGETAAFGGQETVRGEFVANGTPNVGASATGPIDATPISACKSTQPSVISLDDDDNDDDEPYGGNQTSASGRKIKRPSHLKGYNVSDGLGTDSSNGTKKRPKTSNRKAATDNEISLMPPSSDPREVVEVLLMTFEALRRRHLQLDETQETSKRADLKAGAIMLASNLRANIGKRIGAVPGVEVGDIFYFRMELCIIGLHAPSMGGIDYMNKFGDEDDSVAICIVAAGVYENDDDDTDTLVYSGSGGISRNSEEKQDQKLERGNLALERSLSRKNVIRVVRGYKDPACLTGKVYIYDGLYKIHESWKERTKTGINCFKYKLQREPGQPDAVAIWKMCQRWVENPAARGKVLHPDLSSGAENLPVCLINDVNSEKGPGHFNYITQVKYLKPLRSMKPFQGCRCTSVCLPGDTSCDCAQHNGGDLPYSSSGLLVCRKLMVYECGESCRCSINCRNRVAQKGVRIHLEVFRTTNRGWGLRSWDPIRAGSFICEYVGEVVDDTKVNLDGEDDYLFRTVCPGEKTLKWNYGPELIGEHSINISADTFEPLPIKISAMKMGNVARFMNHSCNPNTFWQPVQFDHGEDGYPHIMFFALKHIPPMTELTYDYGDIGCESRGVGSRAKNCLCGSSNCRGFFS

SEQ ID NO: 15066 - protein, 704 aa, Nicotiana tabacum
MEQGLRSDGNNPPSIDKTRVLDVKPLRCLAPVFPSPNGMSSVSTPQPSPFVCVPPTGPFPPGVAPFYPFVAPNDSGRPGESSQQTPSGVPNQGGPFGFAQPISPVPLNSFRTPTTANGNSGRSRRAVDDDDYSNSQDQNDQFASGFSVHVNNVEDSGTGKKRGRPKKPRRAQQAEGLTPVEVDVEPLLTQLLTSFKLVDLDQVKKADGDKELAGRVLLVFDLFRRRMTQIDESRDGPGSGRRPDLKASNMLMTKGVRTNQTKRIGNAPGIEVGDIFFFRMELCLVGLHAPTMAGIDYMSVKLTMDEEPLAVSIVSSGGYDDDGGDGDVLIYTGQGGVQRKDGQVFDQKLERGNLALEKSVHRANEVRVIRGVKDVAYPTGKIYIYDGLYKIQESWAEKNKVGCNVFKYKLLRVPGQPEAFKVWKSIQQWKDGVASRVGVILPDLTSGAESQPVCLVNDVDDEKGPAYFTYIPSLKYSKPFVMPRPSPSCHCVGGCQPGDSNCACIQSNGGFLPYSSLGVLLSYKTLIHECGSACSCPPNCRNRMSQGGPKARLEVFKTKNRGWGLRSWDPIRGGGFICEYAGEVIDAGNYSDDNYIFDATRIYAPLEAERDYNDESRKVPFPLVISAKNGGNISRFMNHSCSPNVYWQLVVRQSNNEATYHIAFFAIRHIPPMQELTFDYGMDKADHRRKKCLCGSLNCRGYFY

SEQ ID NO: 15067 - protein, 812 aa, Oryza sativa
MAGTRQTTSVPMDNAAVVDAKPLRTLTPMFPAALGLHTFTAKENSSSIVCITPFGPYAGGTEQAMPASIPPMFASPAAPADPNQRQPYAVHLNGAAPANGTANNTGVIPDLQIAVAGTVESAKRKRGRPKRVQDSSVPSAHLVPSAPGGNITAVQTPPSATTDESGKKKRGRPKRVQDVPVLSTPSAPQVDSTVFQTPASAVNESVTRKRGRPRRVQDGADTSAPPIQSKYNEPVLQTPSAVTLPEDGKRKRGRPKRVPDGALIPLSHSGVSIDDDSGEIITGKRGRPRKIDVNLLNLPSLFSDDPRESVDNVLMMFDALRRRLMQLDEVKQGAKQQHNLKAGSIMMSAELRANKNKRIGEVPGVEVGDMFYFRIEMCLVGLNSQSMSGIDYMSAKFGNEEDPVAISIVSAGVYENTEDDPDVLVYTGQGMSGKDDQKLERGNLALERSLHRGNQIRVVRSVRDLTCPTGKIYIYDGLYKIREAWVEKGKTGFNVFKHKLLREPGQPDGIAVWKKTEKWRENPSSRDHVILRDISYGAESKPVCLVNEVDDEKGPSHFNYTTKLNYRNSLSSMRKMQGCNCASVCLPGDNNCSCTHRNAGDLPYSASGILVSRMPMLYECNDSCTCSHNCRNRVVQKGSQIHFEVFKTGDRGWGLRSWDPIRAGTFICEYAGEVIDRNSIIGEDDYIFETPSEQNLRWNYAPELLGEPSLSDSSETPKQLPIIISAKRTGNIARFMNHSCSPNVFWQPVLYDHGDEGYPHIAFFAIKHIPPMTELTYDYGQSQGNVQLGINSGCRKSKNCLCWSRKCRGSFG

SEQ ID NO: 15068 - protein, 812 aa, Oryza sativa; identical to SEQ ID NO: 15067

SEQ ID NO: 15069 - protein, 977 aa, Oryza sativa
  unsure (1)..(977): unsure at all Xaa locations
MAGTRQTTSVPMDNAAVVDAKPLRTLTPMFPAALGLHTFTAKENSSSIVCITPFGPYAGGTEQAMPASIPPMFASPAAPADPNQRQPYAVHLNGAAPANGTANNTGVIPDLQIAVAAHLVPSAPGGNITAVQTPPSATTDESGKKKRGRPKRVQDVXVLSTPSAPQXKRGRPRRVQDGADTSAPPIQSKYNEPVLQTPSAVTLPEDGKRKRGRPKRVPDGALIPLSHSGVSIDDDSGEIITGKRGRPRKIDVNLLNLPSLFSDDPRESVDNVLMMFDALRRRLMQLDEVKQGAKQQHNLKAGSIMMSAELRANKNKRIGEVPGVEVGDMFYFRIEMCLVGLNSQSMSGIDYMSAKFGNEEDPVAISIVSAGVYENTEDDPDVLVYTGQGMSGKDDQKLERGNLALERSLHRGNQIRVVRSVRDLTCPTGKIYIYDGLYKIREAWVEKGKTGFNVFKHKLLREPGQPDGIAVWKKTEKWRENPSSRDHVILRDISYGAESKPVCLVNEVDDEKGPSHFNYTTKLNYRNSLSSMRKMQGCNCASVCLPGDNNCSCTHRNAGDLPYSASGILVSRMPMLYECNDSCTCSHNCRNRVVQKGSQIHFEVFKTGDRGWGLRSWDPIRAGTFICEYAGEVIDRNSIIGEDDYIFETPSSEQNLRWNYAPELLGEPSLSDSSETPKQLPIIISAKRTGNIARFMNHSCSPNVFWQPVLYDHGDEGYPHIAFFAIKHIPPMTELTYDYGQSXGSRRLLXNYEAAGCIQCLCHVIRCPGHGNSSCTEQFAKSDEMIRAIAFRESSGRYDSSEKCMFCRLINNLDNAHEQIDTAIATALSESKPVYISVGCNLAGLSHPTFSREPVPLFISPRLSNKANLEYAVEAAADFLNKAVKPMMVGGPKFRVAKAKKAFAGIAESSGLTVRPPSHLLSDRPCLGQTDPIRLDRPPNLGLRFFDGIVAKRNEEIEPGNPERSFLDGWLGLASTA

SEQ ID NO: 15070 - protein, 657 aa, Oryza sativa
  unsure (1)..(657): unsure at all Xaa locations
TRQTTSVPMDNAAVVDAKPLRTLTPMFPAAXXNSSSIVCITPFGPYAGGTEQAMPASIPPMFASPAAPADPNQRQPYAVHLNGAAPANGTANNTGRGRPKRVPDGALIPLSHSGVSIDDDSGEIITGKRGRPRKIDVNLLNLPSLFSDDPRESVDNVLMMFDALRRRLMQLDEVKQGAKQQHNLKAGSIMMSAELRANKNKRIGEVPGVEVGDMFYFRIEMCLVGLNSQSMSGIDYMSAKFGNEEDPVAISIVSAGVYENTEDDPDVLVYTGQGMSGKDDQKLERGNLALERSLHRGNQIRVVRSVRDLTCPTGKIYIYDGLYKIREAWVEKGKTGFNVFKHKLLREPGQPDGIAVWKKTEKWRENPSSRDHVILRDISYGAESKPVCLVNEVDDEKGPSHFNYTTKLNYRNSLSSMRKMQGCNCASVCLPGDNNCSCTHRNAGDLPYSASGILVSRMPMLYECNDSCTCSHNCRNRVVQKGSQIHFEVFKTGDRGWGLRSWDPIRAGTFICEYAGEVIDRNSIIGEDDYIFETPSSEQNLRWNYAPELLGEPSLSDSSETPKQLPIIISAKRTGNIARFMNHSCSPNVFWQPVLYDHGDEGYPHIAFFAIKHIPPMTELTYDYGQSQGNVQLGINSGCRKSKNCLCWSRKCRGSFG

SEQ ID NO: 15071 - protein, 663 aa, Oryza sativa
  unsure (1)..(663): unsure at all Xaa locations
MAGTRQTTSVPMDNAAVVDAKPLRTLTPMFPAALXXGPYAGGTEQAMPASIPPMFASPAAPADPNQRQPYAVHLNGAAPANGTANNTGVIPDLQIAVAGTVESAKRKRGRPKRVQDSSVPSAHLVPSAPGGNITAVQTPPSATTDESGKKKRSDDPRESVDNVLMMFDALRRRLMQLDEVKQGAKQQHNLKAGSIMMSAELRANKNKRIGEVPGVEVGDMFYFRIEMCLVGLNSQSMSGIDYMSAKFGNEEDPVAISIVSAGVYENTEDDPDVLVYTGQGMSGKDDQKLERGNLALERSLHRGNQIRVVRSVRDLTCPTGKIYIYDGLYKIREAWVEKGKTGFNVFKHKLLREPGQPDGIAVWKKTEKWRENPSSRDHVILRDISYGAESKPVCLVNEVDDEKGPSHFNYTTKLNYRNSLSSMRKMQGCNCASVCLPGDNNCSCTHRNAGDLPYSASGILVSRMPMLYECNDSCTCSHNCRNRVVQKGSQIHFEVFKTGDRGWGLRSWDPIRAGTFICEYAGEVIDRNSIIGEDDYIFETPSSEQNLRWNYAPELLGEPSLSDSSETPKQLPIIISAKRTGNIARFMNHSCSPNVFWQPVLYDHGDEGYPHIAFFAIKHIPPMTELTYDYGQSQGNVQLGINSGCRKSKNCLCWSRKCRGSFG

SEQ ID NO: 15072 - protein, 367 aa, Triticum aestivum
  unsure (1)..(367): unsure at all Xaa locations
XRHEALERSLHRGNPIRVVRTVKDLTCSTGKIYIYDGLYQIREAWVEKGKSGFNMFKHKLLREPGQPDGIAVWKKTEKWRENPSSRDRVILHDISYGVESKPICLVNEVDDEKGPSHFTYTTKLNYMNSPSSMRKMQGCKCTSVCLPGDNNCSCTHRNAGDLPYSASGILVSRMPMLYECNDSCTCLHNCRNRVVQKGIQIHFEVFKTGDRGWGLRSWDPIRAGTFICEYAGVIVDKNALDAEDDYIFETPPSEQNLRWNYAPELLGEPSLSDLNESSKQLPIIISAKHTGNIARFMNHSCSPNVFWQPVLYDHGDEGYPHIAFFAIKHIPPMTELTYDYGQSQGNSGCRRTKSCLCWSRKCRGSFG

SEQ ID NO: 15073 - protein, 490 aa, Schizosaccharomyces pombe
MSPKQEEYEVERIVDEKLDRNGAVKLYRIRWLNYSSRSDTWEPPENLSGCSAVLAEWKRRKRRLKGSNSDSDSPHHASNPHPNSRQKHQHQTSKSVPRSQRFSRELNVKKENKKVFSSQTTKRQSRKQSTALTTNDTSIILDDSLHTNSKKLGKTRNEVKEESQKRELVSNSIKEATSPKTSSILTKPRNPSKLDSYTHLSFYEKRELFRKKLREIEGPEVTLVNEVDDEPCPSLDFQFISQYRLTQGVIPPDPNFQSGCNCSSLGGCDLNNPSRCECLDDLDEPTHFAYDAQGRVRADTGAVIYECNSFCSCSMECPNRVVQRGRTLPLEIFKTKEKGWGVRSLRFAPAGTFITCYLGEVITSAEAAKRDKNYDDDGITYLFDLDMFDDASEYTVDAQNYGDVSRFFNHSCSPNIAIYSAVRNHGFRTIYDLAFFAIKDIQPLEELTFDYAGAKDFSPVQSQKSQQNRISKLRRQCKCGSANCRGWLFG

SEQ ID NO: 15074 - protein, 299 aa, Schizosaccharomyces pombe
SKLDSYTHLSFYEKRELFRKKLREIEGPEVTLVNEVDDEPCPSLDFQFISQYRLTQGVIPPDPNFQSGCNCSSLGGCDLNNPSRCECLDDLDEPTHFAYDAQGRVRADTGAVIYECNSFCSCSMECPNRVVQRGRTLPLEIFKTKEKGWGVRSLRFAPAGTFITCYLGEVITSAEAAKRDKNYDDDGITYLFDLDMFDDASEYTVDAQNYGDVSRFFNHSCSPNIAIYSAVRNHGFRTIYDLAFFAIKDIQPLEELTFDYAGAKDFSPVQSQKSQQNRISKLRRQCKCGSANCRGWLFG

SEQ ID NO: 15075 - protein, 490 aa, Schizosaccharomyces pombe
MSPKQEEYEVERIVDEKLGRNGAVKLYRIRWLNYSSRSDTWEPPENLSGCSAVLAEWKRRKRRLKGSNSDSDSPHHASNPHPNSRQKHQHQTSKSVPRSQRFSRELNVKKENKKVFSSQTTKRQSRKQSTALTTNDTSIILDDSLHTNSKKLGKTRNEVKEESQKRELVSNSIKEATSPKTSSILTKPRNPSKLDSYTHLSFYEKRELFRKKLREIEGPEVTLVNEVDDEPCPSLDFQFISQYRLTQGVIPPDPNFQSGCNCSSLGGCDLNNPSRCECLDDLDEPTHFAYDAQGRVRADTGAVIYECNSFCSCSMECPNRVVQRGRTLPLEIFKTKEKGWGVRSLRFAPAGTFITCYLGEVITSAEAAKRDKNYDDDGITYLFDLDMFDDASEYTVDAQNYGDVSRFFNHSCSPNIAIYSAVRNHGFRTIYDLAFFGIKDIQPLEELTFDYAGAKDFSPVQSQKSQQNRISKLRRQCKCGSANCRGWLFG

SEQ ID NO: 15076 - protein, 302 aa, Neurospora crassa
IRSFATHAQLPISIVNREDDAFLNPNFRFIDHSIIGKNVPVADQSFRVGCSCASDEECMYSTCQCLDEMAPDSDEEADPYTRKKRFAYYSQGAKKGLLRDRVLQSQEPIYECHQGCACSKDCPNRVVERGRTVPLQIFRTKDRGWGVKCPVNIKRGQFVDRYLGEIITSEEADRRRAESTIARRKDVYLFALDKFSDPDSLDPLLAGQPLEVDGEYMSGPTRFINHSCDPNMAIFARVGDHADKHIHDLALFAIKDIPKGTELTFDYVNGLTGLESDAHDPSKISEMTKCLCGTAKCRGYLW

SEQ ID NO: 15077 - protein, 318 aa, Neurospora crassa
MEKAFRPHFFNHGKPDIRSFATHAQLPISIVNREDDAFLNPNFRFIDHSIIGKNVPVADQSFRVGCSCASDEECMYSTCQCLDEMAPDSDEEADPYTRKKRFAYYSQGAKKGLLRDRVLQSQEPIYECHQGCACSKDCPNRVVERGRTVPLQIFRTKDRGWGVKCPVNIKRGQFVDRYLGEIITSEEADRRRAESTIARRKDVYLFALDKFSDPDSLDPLLAGQPLEVDGEYMSGPTRFINHSCDPNMAIFARVGDHADKHIHDLALFAIKDIPKGTELTFDYVNGLTGLESDAHDPSKISEMTKCLCGTAKCRGYLW

SEQ ID NO: 15078 - protein, 747 aa, Caenorhabditis elegans
MGFTFKNTRSNSSQAAGGRSFRKRSVTSLANEQPAKRSKTEGSDSKKLNNQMKRLMAKDPKKLSFNEATLLSELLTTCCTVERKKVIPKRKGGGALRKSPVDFQNDENRNTKPIKSGRKKKDNLLEQASKKDKIAAKYRNEIFAHSIIANLEIKKILTKTSKATEKDLKLFLKAECSVRNAIKSDPELDGFYVRTCGKLINKTVLNTMADMMDNHMATTRLLWNMPRHEFPVDFHEKFVDFALNVSYTPPKKRIFVEKKLFEKSISTFTDIPGETHRTISLGNTFVYKYTERNVVDVEKYPELHALTEEAERPNNVIRCECCSSGSIKKCWNNPDCFCFQMNLKLRKEQDPKNNKLLTDFSTFDPVFIRERNHFFDTIGFACSENCACGGKCTNNITLLPEKNINKFEIYRKNEIMGFAIRTLNSIPAGTPVMEFTGELMDFDILDNIDQDYAFEIVNEAHNLHETLPNFNKRWSENFKSSLKKQLARPWFVNPKRIGNVARICCHSCQPNMAMVRVFQKGFSPAHCKLLLVTLEDIFPGVELTFDYGPGYLNELKGGCLCERIGCPNTESFGILSRATKKEVSKIDFPSSFFLNFPNWLKSKIFSSNNTMPYDIILSTRAEPELTTRFFFKGTFTCQSHRAPFIQDIQAWEEDTFKPNDHIDTWHKFEIVNSTAMTYEMHAEAHGDGLWNNFYEISFSMRHTCFSPIDISRGMKFKQSGLILKPEAFPVIDGNLYHTEDINLERYF

SEQ ID NO: 15079 - protein, 635 aa, Drosophila melanogaster
MATAEAQIGVNRNLQKQDLSNLDVSKLTPLSPEVISRQATINIGTIGHVAHGKSTVVKAISGVQTVRFKNELERNITIKLERLSEKKIKNLLTSKQQRQQYEIKQRSMLRHLAELRRHSRFRRLCTKPASSSMPASTSSVDRRTTRRSTSQTSLSPSNSSGYGSVFGCEEHDVDKIPSLNGFAKLKRRRSSCVGAPTPNSKRSKNNMGVIAKRPPKGEYVVERIECVEMDQYQPVFFVKWLGYHDSENTWESLANVADCAEMEKFVERHQQLYEIYIAKITTELEKQLEALPLMENITVAEVDAYEPLNLQIDLILLAQYRAAGSRSQREPQKIGERALKSMQIKRAQFVRRKQLADLALFEKRMNHVEKPSPPIRVENNIDLDTIDSNFMYIHDNIIGKDVPKPEAGIVGCKCTEDTEECTASTKCCARFAGELFAYERSTRRLRLRPGSAIYECNSRCSCDSSCSNRLVQHGRQVPLVLFKTANGSGWGVRAATALRKGEFVCEYIGEIITSDEANERGKAYDDNGRTYLFDLDYNTAQDSEYTIDAANYGNISHFINHSCDPNLAVFPCWIEHLNVALPHLVFFTLRPIKAGEELSFDYIRADNEDVPYENLSTAVRVECRCGADNCRKVLF

SEQ ID NO: 15080 - protein, 635 aa, Drosophila melanogaster
MATAEAQIGVNRNLQKQDLSNLDVSKLTPLSPEVISRQATINIGTIGHVAHGKSTVVKAISGVQTVRFKNELERNITIKLERLSEKKIKNLLTSKQQRQQYEIKQRSMLRHLAELRRHSRFRRLCTKPASSSMPASTSSVDRRTTRRSTSQTSLSPSNSSGYGSVFGCEEHDVDKIPSLNGFAKLKRRRSSCVGAPTPNSKRSKNNMGVIAKRPPKGEYVVERIECVEMDQYQPVFFVKWLGYHDSENTWESLANVADCAEMEKFVERHQQLYETYIAKITTELEKQLEALPLMENITVAEVDAYEPLNLQIDLILLAQYRAAGSRSQREPQKIGERALKSMQIKRAQFVRRKQLADLALFEKRMNHVEKPSPPIRVENNIDLDTIDSNFMYIHDNIIGKDVPKPEAGIVGCKCTEDTEECTASTKCCARFAGELFAYERSTRRLRLRPGSAIYECNSRCSCDSSCSNRLVQHGRQVPLVLFKTANGSGWGVRAATALRKGEFVCEYIEEIITSDEANERGKAYDDNGRTYLFDLDYNTAQDSEYTIDAANYGNISHFINHSCDPNLAVFPCWIEHLNVALPHLVFFTLRPIKAGEELSFDYIRADNEDVPYENLSTAVRVECRCGRDNCRKVLF

SEQ ID NO: 15081 - protein, 1637 aa, Drosophila melanogaster
MTDFVELMNSMSSTFNSDCATSTAEGGTLLNLNLAEDKTLKWRNLANNQFASKEKKHKDKEEEERKEARNQEEIEDIKALLADVVDAAAVKLEEEEAQNAEKVEPHTKCEIEEEGRKEMEYDQDVAKQDSEMEKKQNGKATSITVKMESNERAEKHATEIATTSTERWENESFKTEQQNKKAAEKEEEPILAATQKLEANAEPLTTTRIEVAVASPLVVSSASVKLAADATNQMRAATSAGAATLADKNVQVSPGGTRRSRRTPRPIDTPTSVTDEHVQVENKKFGKSEQYTDCSSHLERFTLDDNTAIVRLQLKSEPDKPSLTALSPEENSAPAPKRGRGRARKIRPDAEVETSEVILPCEDSLGEKKPGRKRKLPDEPIDQQQLSDLVVVKTEQEELGDAPLGDVKRMRRSVRLGNRLHADGSPWEEVKTEALHPQPSAELSFAEVTSEILPLAVLDEKTPPKKRGRKAKTPCVKLESETSCGLPFANGNKKTNSSGGCELQLPKRSKRRIKPTPKILENDELRCEFETKHIERMTQWESAAAVDGDFETPTTGGNGSNSSTSRQKSDKSDGSNFEGGPGHPAGTSAIKKRLFSKSQRDIENYGAAMLAKSKLPPCPDVEQFLNDIKASRINANRSPEERKLNKKQQRKLAKQKEKHLKHLGLQKNHRDEPSDNDSSNTDNEFFPTTRVQVGKPSVTLRVRNSVTKELPTTATLKSRRNPVVQAAKLTRRIGARAAGEVTEAARASVPISTPDAEQLHSLDTSIQADVTPIRDLDMRPSTSRVSKFICLCQKPSQYYARNAPDSSYCCAIDHIDDQKIGCCNELSSEVHNLLRPSQRVSYMILCDEHKKRLQSHNCCAGCGIFCTQGKFVLCKQQHFFHPDCAQRFILSTSYEKELGDEEDQGVKFSSPVLVLKCPHCGLDTPERTSTVTMKCQSLPVFLRTQKYKIKPARLTTSSHLTQFGTVENANTPGATARNKGGLSTAVTLSAASSPASKTNGAQRGRAGTSNSNSRHALNSINFAQLIPESVMNVVLRGHVVSASGRVTAEFTPRDMYYAVQNDDLERVAEILAADFNVLTPIREYLNGTCLHLVAHSGTLQMAYLLLCKGASSPDFVNIVDYELRTALMCAVMNEKCDMLNLFLQCGADVAIKGPDGKTSLHIAAQLGNLEATQLIVDSYRTSRNITSFLSFIDAQDEGGWTAMVWAAELGHTDIVSFLLNQDADPNICDNDNNTVLHWSTLHNDGLDTITVLLQSGADCNVQNVEGDTPLHIACRHSVTRMCIALIANGADLMIKNKAEQLPFDCIPNEESECGRTVGFNMQMRSFRPLGLRTFVVCADASNGREARPIQVVRNELAMSENEDEADSLMWPDFRYVTQCIIQQNSVQIDRRVSQMRICSCLDSCSSDRCQCNGASSQNWYTAESRLNADFNYEDPAVIFECNDVCGCNQLSCKNRVVQNGTRTPLQIVECEDQAKGWGVRALANVPKGTFVGSYTGEILTAMEADRRTDDSYYFDLDNGHCIDANYYGNVTRFFNHSCEPNVLPVRVFYEHQDYRFPKIAFFSCRDIDAGEEICFDYGEKFWRVEHRSCVGCRCLTTTCKYASQSSSTNASPTNATTAPENETGTLSSTNTEKIGHA

SEQ ID NO: 15082 - protein, 1624 aa, Drosophila melanogaster
MTDFVELMNSMSSTFNSDCATSTAEGGTLLNLNLAEDKTLKWRNLANNQFASKEKKHKDKEEEERKEARNQEEIEDIKALLADVVDAAAVKLEEEEAQNAEKVEPHTKCEIEEEGRKEMEYDQDVAKQDSEMEKKQNGKATSITVKMESNERAEKHATEIATTSTERWENESFKTEQQNKKAAEKEEEPILAATQKLEANAEPLTTTRIEVAVASPLVVSSASVKLAADATNQMRAATSAGAATLADKNVQVSPGGTRRSRRTPRPIDTPTSVTDEHVQVENKKFGKSEQYTDCSSHLERFTLDDNTAIVRLQLKSEPDKPSLTALSPEENSAPAPKRGRGRARKIRPDAEVETSEVILPCEDSLGEKKPGRKRKLPDEPIDQQQLSDLVVVKTEQEELGDAPLGDVKRMRRSVRLGNRLHADGSPWEEVKTEALHPQPSAELSFAEVTSEILPLAVLDEKTPPKKRGRKAKTPCVKLESETSCGLPFANGNKKTNSSGGCELQLPKRSKRRIKPTPKILENDELRCEFETKHIERMTQWESAAAVDGDFETPTTGGNGSNSSTSRQKSDKSDGSNFEGGPGHPAGTSAIKKRLFSKSQRDIENYGAAMLAKSKLPPCPDVEQFLNDIKASRINANRSPEERKLNKKQQRKLAKQKEKHLKHLGLQKNHRDEPSDNDSSNTDNEFFPTTRVQVGKPSVTLRVRNSVTKELPTTATLKSRRNPVVQAAKLTRRIGARAAGEVTEAARASVPISTPDAEQLHSLDTSIQADVTPIRDLDMRPSTSRVSKFICLCQKPSQYYARNAPDSSYCCAIDHIDDQKIGCCNELSSEVHNLLRPSQRVSYMILCDEHKKRLQSHNCCAGCGIFCTQGKFVLCKQQHFFHPDCAQRFILSTSYEKELGDEEDQGVKFSSPVLVLKCPHCGLDTPERTSTVTMKCQSLPVFLRTQKYKIKPARLTTSSHLTQFGTVENANTPGATARNKGGLSTAVTLSAASSPASKTNGAQRGRAGTSNSNSRHALNSINFAQLIPESVMNVVLRGHVVSASGRVTAEFTPRDMYYAVQNDDLERVAEILAADFNVLTPIREYLNGTCLHLVAHSGTLQMAYLLLCKGASSPDFVNIVDYELRTALMCAVMNEKCDMLNLFLQCGADVAIKLGNLEATQLIVDSYRTSRNITSFLSFIDAQDEGGWTAMVWAAELGHTDIVSFLLNQDADPNICDNDNNTVLHWSTLHNDGLDTITVLLQSGADCNVQNVEGDTPLHIACRHSVTRMCIALIANGADLMIKNKAEQLPFDCIPNEESECGRTVGFNMQMRSFRPLGLRTFVVCADASNGREARPIQVVRNELAMSENEDEADSLMWPDFRYVTQCIIQQNSVQIDRRVSQMRICSCLDSCSSDRCQCNGASSQNWYTAESRLNADFNYEDPAVIFECNDVCGCNQLSCKNRVVQNGTRTPLQIVECEDQAKGWGVRALANVPKGTFVGSYTGEILTAMEADRRTDDSYYFDLDNGHCIDANYYGNVTRFFNHSCEPNVLPVRVFYEHQDYRFPKIAFFSCRDIDAGEEICFDYGEKFWRVEHRSCVGCRCLTTTCKYASQSSSTNASPTNATTAPENETGTLSSTNTEKIGHA

SEQ ID NO: 15083 - protein, 917 aa, Homo sapiens
MSEADRAQKMDGESEEEQESVDTGEEEEGGDESDLSSESSIKKKFLKRKGKTDSPWIKPARKRRRRSRKKPSGALGSESYKSSAGSAEQTAPGDSTGYMEVSLDSLDLRVKGILSSQAEGLANGPDVLETDGLQEVPLCSCRMETPKSREITTLANNQCMATESVDHELGRCTNSVVKYELMRPSNKAPLLVLCEDHRGRMVKHQCCPGCGYFCTAGNFMECQPESSISHRFHKDCASRVNNASYCPHCGEESSKAKEVTIAKADTTSTVTPVPGQEKGSALEGRADTTTGSAAGPPLSEDDKLQGAASHVPEGFDPTGPAGLGRPTPGLSQGPGKETLESALIALDSEKPKKLRFHPKQLYFSARQGELQKVLLMLVDGIDPNFKMEHQNKRSPLHAAAEAGHVDICHMLVQAGANIDTCSEDQRTPLMEAAENNHLEAVKYLIKAGALVDPKDAEGSTCLHLAAKKGHYEVVQYLLSNGQMDVNCQDDGGWTPMIWATEYKHVDLVKLLLSKGSDINIRDNEENICLHWAAFSGCVDIAEILLAAKCDLHAVNIHGDSPLHIAARENRYDCVVLFLSRDSDVTLKNKEGETPLQCASLNSQVWSALQMSKALQDSAPDRPSPVERIVSRDIARGYERIPIPCVNAVDSEPCPSNYKYVSQNCVTSPMNIDRNITHLQYCVCIDDCSSSNCMCGQLSMRCWYDKDGRLLPEFNMAEPPLIFECNHACSCWRNCRNRVVQNGLRARLQLYRTRDMGWGVRSLQDIPPGTFVCEYVGELISDSEADVREEDSYLFDLDNKDGEVYCIDARFYGNVSRFINHHCEPNLVPVRVFMAHQDLRFPRIAFFSTRLIEAGEQLGFDYGERFWDIKGKLFSCRCGSPKCRHSSAALAQRQASAAQEAQEDGLPDTSSAAAADPL

SEQ ID NO: 15084 - protein, 719 aa, Homo sapiens
GTRVKHQCCPGCGYFCTAGNFMECQPESSISHRFHKDCASRVNNASYCPHCGEESSKAKEVTIAKADTTSTVTPVPGQEKGSALEGRADTTTGSAAGPPLSEDDKLQGAASHVPEGFDPTGPAGLGRPTPGLSQGPGKETLESALIALDSEKPKKLRFHPKQLYFSARQGELQKVLLMLVDGIDPNFKMEHQNKRSPLHAAAEAGHVDICHMLVQAGANIDTCSEDQRTPLMEAAENNHLEAVKYLIKAGALVDPKDAEGSTCLHLAAKKGHYEVVQYLLSNGQMDVNCQDDGGWTPMIWATEYKHVDLVKLLLSKGSDINIRDNEENICLHWAAFSGCVDIAEILLAAKCDLHAVNIHGDSPLHIAARENRYDCVVLFLSRDSDVTLKNKEGETPLQCASLNSQVWSALQMSKALQDSAPDRPSPVERIVSRDIARGYERIPIPCVNAVDSEPCPSNYKYVSQNCVTSPMNIDRNITHLQYCVCIDDCSSSNCMCGQLSMRCWYDKDGRLLPEFNMAEPPLIFECNHACSCWRNCRNRVVQNGLRARLQLYRTRDMGWGVRSLQDIPPGTFVCEYVGELISDSEADVREEDSYLFDLDNKDGEVYCIDARFYGNVSRFINHHCEPNLVPVRVFMAHQDLRFPRIAFFSTRLIEAGEQLGFDYGERFWDIKGKLFSCRCGSPKCRHSSAALAQRQASAAQEAQEDGLPDTSSAAAADPL

SEQ ID NO: 15085 - protein, 1267 aa, Homo sapiens
MAADEGSAEKQAGEAHMAADGETNGSCENSDASSHANAAKHTQDSARVNPQDGTNTLTRIAENGVSERDSEAAKQNHVTADDFVQTSVIGSNGYILNKPALQAQPLRTTSTLASSLPGHAAKTLPGGAGKGRTPSAFPQTPAAPPATLGEGSADTEDRKLPAPGADVKVHRARKTMPKSVVGLHAASKDPREVREARDHKEPKEEINKNISDFGRQQLLPPFPSLHQSLPQNQCYMATTKSQTACLPFVLAAAVSRKKKRRMGTYSLVPKKKTKVLKQRTVIEMFKSITHSTVGSKGEKDLGASSLHVNGESLEMDSDEDDSEELEEDDGHGAEQAAAFPTEDSRTSKESMSEADRAQKMDGESEEEQESVDTGEEEEGGDESDLSSESSIKKKFLKRKGKTDSPWIKPARKRRRRSRKKPSGALGSESYKSSAGSAEQTAPGDSTGYMEVSLDSLDLRVKGILSSQAEGLANGPDVLETDGLQEVPLCSCRMETPKSREITTLANNQCMATESVDHELGRCTNSVVKYGLMRPSNKAPLLVLCEDHRGRMVKHQCCPGCGYFCTAGNFMECQPESSISHRFHKDCASRVNNASYCPHCGEESSKAKEVTIAKADTTSTVTPVPGQEKGSALEGRADTTTGSAAGPPLSEDDKLQGAASHVPEGFDPTGPAGLGRPTPGLSQGPGKETLESALIALDSEKPKKLRFHPKQLYFSARQGELQKVLLMLVDGIDPNFKMEHQNKRSPLHAAAEAGHVDICHMLVQAGANIDTCSEDQRTPLMEAAENNHLEAVKYLIKAGALVDPKDAEGSTCLHLAAKKGHYEVVQYLLSNGQMDVNCQDDGGWTPMIWATEYKHVDLVKLLLSKGSDINIRDNEENICLHWAAFSGCVDIAEILLAAKCDLHAVNIHGDSPLHIAARENRYDCVVLFLSRDSDVTLKNKEGETPLQCASLNSQVWSALQMSKALQDSAPDRPSPVERIVSRDIARGYERIPIPCVNAVDSEPCPSNYKYVSQNCVTSPMNIDRNITHLQYCVCIDDCSSSNCMCGQLSMRCWYDKDGRLLPEFNMAEPPLIFECNHACSCWRNCRNRVVQNGLRARLQLYRTRDMGWGVRSLQDIPPGTFVCEYVGELISDSEADVREEDSYLFDLDNKDGEVYCIDARFYGNVSRFINHHCEPNLVPVRVFMAHQDLRFPRIAFFSTRLIEAGEQLGFDYGERFWDIKGKLFSCRCGSPKCRHSSAALAQRQASAAQEAQEDGLPDTSSAAAADPL

SEQ ID NO: 15086 - protein, 1176 aa, Homo sapiens
MAAAAGAAAAAAAEGEAPAEMGALLLEKETRGATERVHGSLGDTPRSEETLPKANPDSLEPAGPSSPASVTVTVGDEGADTPVGATPLIGDESENLEGDGDLRGGRILLGHATKSFPSSPSKGGSCPSRAKMSMTGAGKSPPSVQSLAMRLLSMPGAQGAAAAGSEPPPATTSPEGQPKVHRARKTMSKPGNGQPPVPEKRPPEIQHFRMSDDVHSLGKVTSDLAKRRKLNSGGGLSEELGSARRSGEVTLTKGDPGSLEEWETVVGDDFSLYYDSYSVDERVDSDSKSEVEALTEQLSEEEEEEEEEEEEEEEEEEEEEEEEDEESGNQSDRSGSSGRRKAKKKWRKDSPWVKPSRKRRKREPPRAKEPRGVSNDTSSLETERGFEELPLCSCRMEAPKIDRISERAGHKCMATESVDGELSGCNAAILKRETMRPSSRVALMVLCETHRARMVKHHCCPGCGYFCTAGTFLECHPDFRVAHRFHKACVSQLNGMVFCPHCGEDASEAQEVTIPRGDGVTPPAGTAAPAPPPLSQDVPGRADTSQPSARMRGHGEPRRPPCDPLADTIDSSGPSLTLPNGGCLSAVGLPLGPGREALEKALVIQESERRKKLRFHPRQLYLSVKQGELQKVILMLLDNLDPNFQSDQQSKRTPLHAAAQKGSVEICHVLLQAGANINAVDKQQRTPLMEAVVNNHLEVARYMVQRGGCVYSKEEDGSTCLHHAAKIGNLEMVSLLLSTGQVDVNAQDSGGWTPIIWAAEHKHIEVIRMLLTRGADVTLTDNEENICLHWASFTGSAAIAEVLLNARCDLHAVNYHGDTPLHIAARESYHDCVLLFLSRGANPELRNKEGDTAWDLTPERSDVWFALQLNRKLRLGVGNRAIRTEKIICRDVARGYENVPIPCVNGVDGEPCPEDYKYISENCETSTMNIDRNITHLQHCTCVDDCSSSNCLCGQLSIRCWYDKDGRLLQEFNKIEPPLIFECNQACSCWRNCKNRVVQSGIKVRLQLYRTAKMGWGVRALQTIPQGTFICEYVGELISDAEADVREDDSYLFDLDNKDGEVYCIDARYYGNISRFINHLCDPNIIPVRVFMLHQDLRFPRIAFFSSRDIRTGEELGFDYGDRFWDIKSKYFTCQCGSEKCKHSAEAIALEQSRLARLDPHPELLPELGSLPPVNT

SEQ ID NO: 15087 - protein, 1210 aa, Homo sapiens
MAAAAGAAAAAAAEGEAPAEMGALLLEKETRGATERVHGSLGDTPRSEETLPKANPDSLEPAGPSSPASVTVTVGDEGADTPVGATPLIGDESENLEGDGDLRGGRILLGHATKSFPSSPSKGGSCPSRAKMSMTGAGKSPPSVQSLAMRLLSMPGAQGAAAAGSEPPPATTSPEGQPKVHRARKTMSKPGNGQPPVPEKRPPEIQHFRMSDDVHSLGKVTSDLAKRRKLNSGGGLSEELGSARRSGEVTLTKGDPGSLEEWETVVGDDFSLYYDSYSVDERVDSDSKSEVEALTEQLSEEEEEEEEEEEEEEEEEEEEEEEEDEESGNQSDRSGSSGRRKAKKKWRKDSPWVKPSRKRRKREPPRAKEPRGVNGVGSSGPSEYMEVPLGSLELPSEGTLSPNHAGVSNDTSSLETERGFEELPLCSCRMEAPKIDRISERAGHKCMATESVDGELSGCNAAILKRETMRPSSRVALMVLCETHRARMVKHHCCPGCGYFCTAGTFLECHPDFRVAHRFHKACVSQLNGMVFCPHCGEDASEAQEVTIPRGDGVTPPAGTAAPAPPPLSQDVPGRADTSQPSARMRGHGEPRRPPCDPLADTIDSSGPSLTLPNGGCLSAVGLPLGPGREALEKALVIQESERRKKLRFHPRQLYLSVKQGELQKVILMLLDNLDPNFQSDQQSKRTPLHAAAQKGSVEICHVLLQAGANINAVDKQQRTPLMEAVVNNHLEVARYMVQRGGCVYSKEEDGSTCLHHAAKIGNLEMVSLLLSTGQVDVNAQDSGGWTPIIWAAEHKHIEVIRMLLTRGADVTLTDNEENICLHWASFTGSAAIAEVLLNARCDLHAVNYHGDTPLHIAARESYHDCVLLFLSRGANPELRNKEGDTAWDLTPERSDVWFALQLNRKLRLGVGNRAIRTEKIICRDVARGYENVPIPCVNGVDGEPCPEDYKYISENCETSTMNIDRNITHLQHCTCVDDCSSSNCLCGQLSIRCWYDKDGRLLQEFNKIEPPLIFECNQACSCWRNCKNRVVQSGIKVRLQLYRTAKMGWGVRALQTIPQGTFICEYVGELISDAEADVREDDSYLFDLDNKDGEVYCIDARYYGNISRFINHLCDPNIIPVRVFMLHQDLRFPRIAFFSSRDIRTGEELGFDYGDRFWDIKSKYFTCQCGSEKCKHSAEAIALEQSRLARLDPHPELLPELGSLPPVNT

SEQ ID NO: 15088 - protein, 1210 aa, Homo sapiens
MAAAAGAAAAAAAEGEAPAEMGALLLEKETRGATERVHGSLGDTPRSEETLPKANPDSLEPAGPSSPASVTVTVGDEGADTPVGATPLIGDESENLEGDGDLRGGRILLGHATKSFPSSPSKGGSCPSRAKMSMTGAGKSPPSVQSLAMRLLSMPGAQGAAAAGSEPPPATTSPEGQSKVHRARKTMSKPGNGQPPVPEKRPPEIQHFRMSDDVHSLGKVTSDLAKRRKLNSGGGLSEELGSARRSGEVTLTKGDPGSLEEWETVVGDDFSLYYDSYSVDERVDSDSKSEVEALTEQLSEEEEEEEEEEEEEEEEEEEEEEEEDEESGNQSDRSGSSGRRKAKKKWRKDSPWVKPSRKRRKREPPRAKEPRGVNGVGSSGPSEYMEVPLGSLELPSEGTLSPNHAGVSNDTSSLETERGFEELPLCSCRMEAPKIDRISERAGHKCMATESVDGELSGCNAAILKRETMRPSSRVALMVLCETHRARMVKHHCCPGCGYFCTAGTFLECHPDFRVAHRFHKACVSQLNGMVFCPHCGEDASEAQEVTIPRGDGVTPPAGTAAPAPPPLSQDVPGRADTSQPSARMRGHGEPRRPPCDPLADTIDSSGPSLTLPNGGCLSAVGLPLGPGREALEKALVIQESERRKKLRFHPRQLYLSVKQGELQKVILMLLDNLDPNFQSDQQSKRTPLHAAAQKGSVEICHVLLQAGANINAVDKQQRTPLMEAVVNNHLEVARYMVQRGGCVYSKEEDGSTCLHHAAKIGNLEMVSLLLSTGQVDVNAQDSGGWTPIIWAAEHKHIEVIRMLLTRGADVTLTDNEENICLHWASFTGSAAIAEVLLNARCDLHAVNYHGDTPLHIAARESYHDCVLLFLSRGANPELRNKEGDTAWDLTPERSDVWFALQLNRKLRLGVGNRAIRTEKIICRDVARGYENVPIPCVNGVDGEPCPEDYKYISENCETSTMNIDRNITHLQHCTCVDDCSSSNRLCGQLSIRCWYDKDGRLLQEFNKIEPPLIFECNQACSCWRNCKNRVVQSGIKVRLQLYRTAKMGWGVRALQTIPQGTFICEYVGELISDAEADVREDDSYLFDLDNKDGEVYCIDARYYGNISRFINHLCDPNIIPVRVFMLHQDLRFPRIAFFSSRDIRTGEELGFDYGDRFWDIKSKYFTCQCGSEKCKHSAEAIALEQSRLARLDPHPELLPELGSLPPVNT

SEQ ID NO: 15089 - protein, 1001 aa, Homo sapiens
MSDDVHSLGKVTSDLAKRRKLNSGGGLSEELGSARRSGEVTLTKGDPGSLEEWETVVGDDFSLYYDSYSVDERVDSDSKSEVEALTEQLSEEEEEEEEEEEEEEEEEEEEEEEEDEESGNQSDRSGSSGRRKAKKKWRKDSPWVKPSRKRRKREPPRAKEPRGVNGVGSSGPSEYMEVPLGSLELPSEGTLSPNHAGVSNDTSSLETERGFEELPLCSCRMEAPKIDRISERAGHKCMATESVDGELSGCNAAILKRETMRPSSRVALMVLCETHRARMVKHHCCPGCGYFCTAGTFLECHPDFRVAHRFHKACVSQLNGMVFCPHCGEDASEAQEVTIPRGDGVTPPAGTAAPAPPPLSQDVPGRADTSQPSARMRGHGEPRRPPCDPLADTIDSSGPSLTLPNGGCLSAVGLPLGPGREALEKALVIQESERRKKLRFHPRQLYLSVKQGELQKVILMLLDNLDPNFQSDQQSKRTPLHAAAQKGSVEICHVLLQAGANINAVDKQQRTPLMEAVVNNHLEVARYMVQRGGCVYSKEEDGSTCLHHAAKIGNLEMVSLLLSTGQVDVNAQDSGGWTPIIWAAEHKHIEVIRMLLTRGADVTLTDNEENICLHWASFTGSAAIAEVLLNARCDLHAVNYHGDTPLHIAARESYHDCVLLFLSRGANPELRNKEGDTAWDLTPERSDVWFALQLNRKLRLGVGNRAIRTEKIICRDVARGYENVPIPCVNGVDGEPCPEDYKYISENCETSTMNIDRNITHLQHCTCVDDCSSSNCLCGQLSIRCWYDKDGRLLQEFNKIEPPLIFECNQACSCWRNCKNRVVQSGIKVRLQLYRTAKMGWGVRALQTIPQGTFICEYVGELISDAEADVREDDSYLFDLDNKDGEVYCIDARYYGNISRFINHLCDPNIIPVRVFMLHQDLRFPRIAFFSSRDIRTGEELGFDYGDRFWDIKSKYFTCQCGSEKCKHSAEAIALEQSRLARLDPHPELLPELGSLPPVNT

SEQ ID NO: 15090 - protein, 1001 aa, Homo sapiens
MSDDVHSLGKVTSDLAKRRKLNSGGGLSEELGSARRSGEVTLTKGDPGSLEEWETVVGDDFSLYYDSYSVDERVDSDSKSEVEALTEQLSEEEEEEEEEEEEEEEEEEEEEEEEDEESGNQSDRSGSSGRRKAKKKWRKDSPWVKPSRKRRKREPPRAKEPRGVNGVGSSGPSEYMEVPLGSLELPSEGTLSPNHAGVSNDTSSLETERGFEELPLCSCRMEAPKIDRISERAGHKCMATESVDGELSGCNAAILKRETMRPSSRVALMVLCETHRARMVKHHCCPGCGYFCTAGTFLECHPDFRVAHRFHKACVSQLNGMVFCPHCGEDASEAQEVTIPRGDGVTPPAGTAAPAPPPLSQDVPGRADTSQPSARMRGHGEPRRPPCDPLADTIDSSGPSLTLPNGGCLSAVGLPLGPGREALEKALVIQESERRKKLRFHPRQLYLSVKQGELQKVILMLLDNLDPNFQSDQQSKRTPLHAAAQKGSVEICHVLLQAGANINAVDKQQRTPLMEAVVNNHLEVARYMVQRGGCVYSKEEDGSTCLHHAAKIGNLEMVSLLLSTGQVDVNAQDSGGWTPIIWAAEHKHIEVIRMLLTRGADVTLTDNEENICLHWASFTGSAAIAEVLLNARCDLHAVNYHGDTPLHIAARESYHDCVLLFLSRGANPELRNKEGDTAWDLTPERSDVWFALQLNRKLRLGVGNRAIRTEKIICRDVARGYENVPIPCVNGVDGEPCPEDYKYISENCETSTMNIDRNITHLQHCTCVDDCSSSNCLCGQLSIRRWYDKDGRLLQEFNKIEPPLIFECNQACSCWRNCKNRVVQSGIKVRLQLYRTAKMGWGVRALQTIPQGTFICEYVGELISDAEADVREDDSYLFDLDNKDGEVYCIDARYYGNISRFINHLCDPNIIPVRVFMLHQDLRFPRIAFFSSRDIRTGEELGFDYGDRFWDIKSKYFTCQCGSEKCKHSAEAIALEQSRLARLDPHPELLPELGSLPPVNT

SEQ ID NO: 15091 - protein, 671 aa, Homo sapiens
MAEFKEKPEAPTEQLDVACGQENLPVGAWPPGAAPAPFQYTPDHVVGPGADIDPTQITFPGCICVKTPCLPGTCSCLRHGENYDDNSCLRDIGSGGKYAEPVFECNVLCRCSDHCRNRVVQKGLQFHFQVFKTHKKGWGLRTLEFIPKGRFVCEYAGEVLGFSEVQRRIHLQTKSDSNYIIAIREHVYNGQVMETFVDPTYIGNIGRFLNHSCEPNLLMIPVRIDSMVPKLALFAAKDIVPEEELSYDYSGRYLNLTVSASKERLDHGKLRKPCYCGAKSCTAFLPFDSSLYCPVEKSNISCGNEKEPSMCGSAPSVFPSCKRLTLETMKMMLDKKQIRAIFLFEFKMGRKAAETTRNINNAFGPGTANERTVQWWFKKFCKGDESLEDEERSGRPSEVDNDQLRAIIEADPLTTTREVAEELNVNHSTVVRHLKQIEKVKKLDKWVPHELTENQKNRRFEVSSSLILRNHNEPFLDRIVTCDEKWILYDNRRRSAQWLDQEEAPKHFPKPILHPKKVMVTIWWSAAGLIHYSFLNPGETITSEKYAQEIDEMNQKLQRLQLALVNRKGPILLHDNARPHVAQPTLQKLNELGYEVLPHPPYSPDLLPTNYHVFKHLNNFLQGKRFHNQQDAENAFQEFVESQSTDFYATGINQLISRWQKCVDCNGSYFD

SEQ ID NO: 15092 - protein, 352 aa, Homo sapiens
MAEFKEKPEAPTEQLDVACGQENLPVGAWPPGAAPAPFQYTPDHVVGPGADIDPTQITFPGCICVKTPCLPGTCSCLRHGENYDDNSCLRDIGSGGKYAEPVFECNVLCRCSDHCRNRVVQKGLQFHFQVFKTHKKGWGLRTLEFIPKGRFVCEYAGEVLGFSEVQRRIHLQTKSDSNYIIAIREHVYNGQVMETFVDPTYIGNIGRFLNHSCEPNLLMIPVRIDSMVPKLALFAAKDIVPEEELSYDYSGRYLNLTVSEDKERLDHGKLRKPCYCGAKSCTAFLPFDSSLYCPVEKSNISCGNEKEPSMCGSAPSVFPSCKRLTLEVSLFSDKQLAPPYSGRQWLASFTSA

SEQ ID NO: 15093 - protein, 671 aa, Homo sapiens [sequence omitted]

SEQ ID NO: 15094 - protein, 203 aa, Homo sapiens
MAEPPLIFECNHACSCWRNCRNRVVQNGLRARLQLYRTRDMGWGVRSLQDIPPGTFVCEYVGELISDSEADVREEDSYLFDLDNKDGEVYCIDARFYGNVSRFINHHCEPNLVPVRVFMAHQDLRFPRIAFFSTRLIEAGEQLGFDYGERFWDIKGKLFSCRCGSPKCRHSSAALAQRQASAAQEAQEDGLPDTSSAAAADPL

SEQ ID NO: 15095 - protein, 412 aa, Homo sapiens
MAENLKGCSVCCKSSWNQLQDLCRLAKLSCPALGISKRNLYDFEVEYLCDYKKIREQEYYLVKWRGYPDSESTWEPRQNLKCVRILKQFHKDLERELLRRHHRSKTPRHLDPSLANYLVQKAKQRRALRRWEQELNAKRSHLGRITVENEVDLDGPPRAFVYINEYRVGEGITLNQVAVGCECQDCLWAPTGGCCPGASLHKFAYNDQGQVRLRAGLPIYECNSRCRCGYDCPNRVVQKGIRYDLCIFRTDDGRGWGVRTLEKIRKNSFVMEYVGEIITSEEAERRGQIYDRQGATYLFDLDYVEDVYTVDAAYYGNISHFVNHSCDPNLQVYNVFIDNLDERLPRIAFFATRTIRAGEELTFDYNMQVDPVDMESTRMDSNFGLAGLPGSPKKRVRIECKCGTESCRKYLF

SEQ ID NO: 15096 - protein, 803 aa, Homo sapiens
MSEADRAQKMDGESEEEQESVDTGEEEEGGDESDLSSESSIKKKFLKRKGKTDSPWIKPARKRRRRSRKKPSGALGSESYKSSAGSAEQTAPGDSTGYMEVSLDSLDLRVKGILSSQAEGLANGPDVLETDGLQEVPLCSCRMETPKSREITTLANNQCMATESVDHELGRCTNSVVKYELMRPSNKAPLLVLCEDHRGRMVKHQCCPGCGYFCTAGNFMECQPESSISHRFHKDCASRVNNASYCPHCGEESSKAKEVTIAKADTTSTVTPVPGQEKGSALEGRADTTTGSAAGPPLSEDDKLQGAASHVPEGFDPTGPAGLGRPTPGLSQGPGKETLESALIALDSEKPKKLRFHPKQLYFSARQGELQKVLLMLVDGIDPNFKMEHQNKRSPLHAAAEAGHVDICHMLVQAGANIDTCSEDQRTPLMEAAENNHLEAVKYLIKAGALVDPKDAEGSTCLHLAAKKGHYEVVQYLLSNGQMDVNCQDDGGWTPMIWATEYKHVDLVKLLLSKGSDINIRDNEENICLHWAAFSGCVDIAEILLAAKCDLHAVNIHGDSPLHIAARENRYDCVVLFLSRDSDVTLKNKEGETPLQCASLNSQVWSALQMSKALQDSAPDRPSPVERIVSRDIARGYERIPIPCVNAVDSEPCPSNYKYVSQNCVTSPMNIDRNITHLQYCVCIDDCSSSNCMCGQLSMRCWYDKDGRLLPEFNMAEPPLIFECNHACSCWRNCRNRVVQNGLRARLQLYRTRDMGWGVRSLQDIPPGTFVCEYVGELISDSEADVREEDSYLFDLDNKISSA

SEQ ID NO: 15097 - protein, 315 aa, Homo sapiens
DKHNYLSQVKKGKAITPKDNNKTLKPAIAEYIVKKAKQRIALQRWQDELNRRKNHKGMIFVENTVDLEGPPSDFYYINEYKPAPGISLVNEATFGCSCTDCFFQKCCPAEAGVLLAYNKNQQIKIPPGTPIYECNSRCQCGPDCPNRIVQKGTQYSLCIFRTSNGRGWGVKTLVKIKRMSFVMEYVGEVITSEEAERRGQFYDNKGITYLFDLDYESDEFTVDAARYGNVSHFVNHSCDPNLQVFNVFIDNLDTRLPRIALFSTRTINAGEELTFDYQMKGSGDISSDSIDHSPAKKRVRTVCKCGAVTCRGYLN

SEQ ID NO: 15098 - protein, 410 aa, Homo sapiens
MAAVGAEARGAWCVPCLVSLDTLQELCRKEKLTCKSIGITKRNLNNYEVEYLCDYKVVKDMEYYLVKWKGWPDSTNTWEPLQNLKCPLLLQQFSNDKHNYLSQVKKGKAITPKDNNKTLKPAIAEYIVKKAKQRIALQRWQDELNRRKNHKGMIFVENTVDLEGPPSDFYYINEYKPAPGISLVNEATFGCSCTDCFFQKCCPAEAGVLLAYNKNQQIKIPPGTPIYECNSRCQCGPDCPNRIVQKGTQYSLCIFRTSNGRGWGVKTLVKIKRMSFVMEYVGEVITSEEAERRGQFYDNKGITYLFDLDYESDEFTVDAARYGNVSHFVNHSCDPNLQVFNVFIDNLDTRLPRIALFSTRTINAGEELTFDYQMKGSGDISSDSIDHSPAKKRVRTVCKCGAVTCRGYLN

SEQ ID NO: 15099 - protein, 350 aa, Homo sapiens
MEYYLVKWKGWPDSTNTWEPLQNLKCPLLLQQFSNDKHNYLSQVKKGKAITPKDNNKTLKPAIAEYIVKKAKQRIALQRWQDELNRRKNHKGMIFVENTVDLEGPPSDFYYINEYKPAPGISLVNEATFGCSCTDCFFQKCCPAEAGVLLAYNKNQQIKIPPGTPIYECNSRCQCGPDCPNRIVQKGTQYSLCIFRTSNGRGWGVKTLVKIKRMSFVMEYVGEVITSEEAERRGQFYDNKGITYLFDLDYESDEFTVDAARYGNVSHFVNHSCDPNLQVFNVFIDNLDTRLPRIALFSTRTINAGEELTFDYQMKGSGDISSDSIDHSPAKKRVRTVCKCGAVTCRGYLN

SEQ ID NO: 15100 - protein, 707 aa, Homo sapiens [sequence omitted]

SEQ ID NO: 15101 - protein, 719 aa, Homo sapiens
MGEKNGDAKTFWMELEDDGKVDFIFEQVQNVLQSLKQKIKDGSATNKEYIQAMILVNEATIINSSTSIKGASQKEVNAQSSDPMPVTQKEQENKSNAFPSTSCENSFPEDCTFLTTGNKEILSLEDKVVDFREKDSSSNLSYQSHDCSGACLMKMPLNLKGENPLQLPIKCHFQRRHAKTNSHSSALHVSYKTPCGRSLRNVEEVFRYLLETECNFLFTDNFSFNTYVQLARNYPKQKEVVSDVDISNGVESVPISFCNEIDSRKLPQFKYRKTVWPRAYNLTNFSSMFTDSCDCSEGCIDITKCACLQLTARNAKTSPLSSDKITTGYKYKRLQRQIPTGIYECSLLCKCNRQLCQNRVVQHGPQVRLQVFKTEQKGWGVRCLDDIDRGTFVCIYSGRLLSRANTEKSYGIDENGRDENTMKNIFSKKRKLEVACSDCEVEVLPLGLETHPRTAKTEKCPPKFSNNPKELTMETKYDNISRIQYHSVIRDPESKTAIFQHNGKKMEFVSSESVTPEDNDGFKPPREHLNSKTKGAQKDSSSNHVDEFEDNLLIESDVIDITKYREETPPRSRCNQATTLDNQNIKKAIEVQIQKPQEGRSTACQRQQVFCDEELLSETKNTSSDSLTKFNKGNVFLLDATKEGNVGRFLNHSCCPNLLVQNVFVETHNRNFPLVAFFTNRYVKARTELTWDYGYEAGTVPEKEIFCQCGVNKCRKKIL

SEQ ID NO: 15102 - protein, 921 aa, Mus musculus
MPPKAPRRAAAAEPPPPPPPPPREDDPAQDSGPEELPLARLEFEEIEEPEFIALCQKLKVPDHVRERAWLTWEKVSSVDGILEGYIQKKKELWGICIFIAAVDLDEMPFTFTELQKSIETSVYKFFDLLKEIDTSTKVDNAMSRLLKKYNVLCALYSKLERTCELIYLTQPSSALSTEINSMLVLKISWITFLLAKGEVLQMEDDLVISFQLMLCVVDYFIKFSPPALLREPYKTAAIPINGSPRTPRRGQNRSARIAKQLENDTRIIEVLCKEHECNIDEVKNVYFKNFIPFINSLGIVSSNGLPEVESLSKRYEEVYLKNKDLDARLFLDHDKTLQTDPIDSFETERTPRKNNPDEEANVVTPHTPVRTVMNTIQQLMVILNSASDQPSENLISYFNNCTVNPKENILKRVKDVGHIFKEKFANAVGQGCVDIGVQRYKLGVRLYYRVMESMLKSEEERLSIQNFSKLLNDNIFHMSLLACALEVVMATYSRSTLQHLDSGTDLSFPWILNVLNLKAFDFYKVIESFIKVEANLTREMIKHLERCEHRIMESLAWLSDSPLFDLIKQSKDGEGPDNLEPACPLSLPLQGNHTAADMYLSPLRSPKKRTSTTRVNSAANTETQAASAFHTQKPLKSTSLALFYKKVYRLAYLRLNTLCARLLSDHPELEHIIWTLFQHTLQNEYELMRDRHLDQIMMCSMYGICKVKNIDLKFKIIVTAYKDLPHAAQETFKRVLIREEEFDSIIVFYNSVFMQRLKTNILQYASTRPPTLSPIPHIPRSPYKFSSSPLRIPGGNIYISPLKSPYKISEGLPTPTKMTPRSRILVSIGESFGTSEKFQKINQMVCNSDRVLKRSAEGGNPPKPLKNVRFDIEGADEADGSKHLPAESKFQQKLAEMTSTRTRMQKQRMNESKDVSNKEEK

SEQ ID NO: 15103 - protein, 815 aa, Rattus norvegicus
MPFTFTELQKSIETSVYKFFDLLKEIDTSTKVDNAVSRLLKKYNVLCALYSKLERTCGLIYLTQPSSGLSTEINSMLVLKVSWITFLLAKGEVVQMEDDLVISFQLMLCVLDYFIKLSPPALLREPYKTAATPINGSPRTPRRGQNRSARIAKQLESDTRTIEVLCKEHECNVDEVKNVYFKNFIPFISSLGIVSSNGLPELESLSKRYEEVYLKSKDLDARLFLDHDKTLQTDTIDSFETERTPRKSNPDEEANMVTPHTPVRTVMNTIQQLMVILNSASDQPSENLISYFSNCTVNPKENILKRVKDVGHIFKEKFASAVGQGCIDIGAQRYKLGVRLYYRVMESMLKSEEERLSIQNFSKLLNDNIFHMSLLACALEVVMATYSRSMLQNLDSGTDLSFPWILNVLNLKAFDFYKVIESFIKVEANLTREMIKHLERCEHRIMESLAWLSDSPLFDLIKQSKDGEGPDHLESACSLSLPLQSNHTAADMYLSPIRSPKKRTSTTRVNSAANTETQAASAFHTQKPLKSTSLSLFYKKVYRLAYLRLNTLCARLLSDHPELEHIIWTLFQHTLENEYELMKDRHLDQIMMCSMYGICKVKNIDLKFKIIVTAYKDLPHAAQETFKRVLIREEEFDSIIVFYNSVFMQRLKTNILQYASTRPPTLSPIPHIPRSPYKFSSSPLRIPGGNIYISPLKSPYKISEGLPTPTKMTPRSRILVSIGESFGTSEKFQKINQMVCNSDRVLKRSAEGGNPPKPLKKLRFDIEGSDEADGSKHLPAESKFQQKLAEMTSTRTRMQKQKLNDSMEISNKEEK

SEQ ID NO: 15104 - protein, 899 aa, Rattus norvegicus
PEDDPAQDSDPEELPLIRLEFEKIEEPEFIALCQKLKVPDHVRERAWLTWEKVSSVDGILEGYIQKKKELWGICIFIAAVDLDEMPFTFTELQKSIETSVYKFFDLLKEIDTSTKVDNAVSRLLKKYNVLCALYSKLERTCGLIYLTQPSSGLSTEINSMLVLKVSWITFLLAKGEVVQMEDDLVISFQLMLCVLDYFIKLSPPALLREPYKTAATPINGSPRTPRRGQNRSARIAKQLESDTRTIEVLCKEHECNVDEVKNVYFKNFIPFISSLGIVSSNGLPELESLSKRYEEVYLKSKDLDARLFLDHDKTLQTDTIDSFETERTPRKSNPDEEANMVTPHTPVRTVMNTIQQLMVILNSASDQPSENLISYFSNCTVNPKENILKRVKDVGHIFKEKFASAVGQGCIDIGAQRYKLGVRLYYRVMESMLKSEEERLSIQNFSKLLNDNIFHMSLLACALEVVMATYSRSMLQNLDSGTDLSFPWILNVLNLKAFDFYKVIESFIKVEANLTREMIKHLERCEHRIMESLAWLSDSPLFDLIKQSKDGEGPDHLESACSLSLPLQSNHTAADMYLSPIRSPKKRTSTTRVNSAANTETQAASAFHTQKPLKSTSLSLFYKKVYRLAYLRLNTLCARLLSDHPEPEHIIWTLFQHTLENEYELMKDRHLDQIMMCSMYGICKVKNIDLKFKIIVTAYKDLPHAAQETFKRVLIREEEFDSIIVFYNSVFMQRLKTNILQYASTRPPTLSPIPHIPRSPYKFSSSPLRIPGGNIYMSPLKSPYKISEGLPTPTKMTPRSRILVSIGESFGTSEKFQKINQMVCNSDRVLKRSAEGGNPPKPLKKLRFDIEGSDEADGSKHLPAESKFQQKLAEMTSTRTRMQKQKLNDSMEISNKEEK

SEQ ID NO: 15105 - protein, 1209 aa, Chlamydomonas reinhardtii
MSTTHPPERGLVALIKGLTIGNVPALQPDVLELYAELKGAYEAQERAAPREYAGDQDEDVKQACKQASLLFVARVLSAAQKKEKDGSETQPSNLGLSISRIVAVAGINLLDFFREVHVVVSELSAYFESRGSSSKQFSQQALLKENSETVVVMGLLAKKYKDNFNTFLHQLDFYKQVVLRLGWSAFLVLRVKLLSAFPDVVSCVELLPCIFAILASHAPRLPDCLTHITREDRGKFLLKSMADTCKADYGRVQARMPSVEALLTQVFTSAVPEWRTAVAEAKAKALSDASGPAAVGGVDLVASPVLEGLVTDTDRMNRVVAALEREYEQHYSRGATELDEREFLSTDFTKFASPRFSPGHMHSTMAKLRSGSMPLRSGGPLGPGLHTATPAHPGPQQLHLVPLGLHSPLPMMHLNAGPGVPGTPISEAMGASAWLRGVTSNMVAEPSPTLQRFLAALPINSNSSGPTPVQQLMKRVRDLVASVIPDEAAPSLLGPFPLLNTSLGVERRIEATKLYCHSLDTILQNEQRTNGLPAALALLGSAKFQRGLIACCIEVVAACYRMVSCAFPNVLDALRIKAFDMANIIGTFVKSIATLPRELKRHLFLIEEKILECLAWEPGSSLYHLIVNVHTENEAAAAAAAAAMQEAAATAACSAASGDDSQHDGAGSRAGLSSSSGGAGAAAAAEGGAGGGTEQPGASSSHNTEQSGGAPPMETAEGGAPGAATSAPPSTTSAAPAEPAPPAAASPAAPAASHAPPPSPKRSQGVAFSGMMSPAKKARGTDGGAHSTQSYIESLPNAVGFPPAAGAAQGQAGLLFEFLRKVLKLTSFRLALLCENFDFSPLEGPEVNSKVYEAIEHALYKQTHLFYNRHIDQIMLSTLYGYCKVHKLSQVSFREIIAQYRKQPQAQQSIFRSVVIDQVLPTLQIQSRADIIGFYNAVFVPAMRNFLLKSESNGSGASGPGLGGDSKHAAAGNSGNAVGAAAGAAPAQGVGATSAMPPGLPPLPPRASQSPRGPKLPLLGAIAAAPRMLGRSATGNARGGGERELGMPLLHPLLPTGSSTGGGALSPTKGSEGSGHPTPTGPVPVSRSSNGGRGGSGGRGGGRGSAEHKIPEGLAALLQALDSQKAAEENTAEEEEEEEEVDADEEQPQARVTRSGRTARDRSTGRERRGRHTEARDDMDEASMDAEFSQQTVVTGRRQRTPNRRYGAD

SEQ ID NO: 15106 - protein, 597 aa, Physcomitrella patens
MNPDGVTYFEGLMEVEQISSNLVILEEDYDGWYRSRGELDERMFINGEDSLIGAVSSSSTTSVCGVKRKRDAVTSAGQGRAVSSGASPSSPCGSPESSPAVMGGVAGGSTCKPPPTPVSITMTTAKWLRTVIAPLSAEPSPELERYLRVFERNIASEMKVRANVILGGIFEARKWRGAGEAGTSDSMWGDQRRLEALKLYYKVLGAMCTAESHRLRSEHLPFLPNERFHRCMLACSAELVLASHKTVTMTFPAVLEPAGITAFDLSKVIEGFVRHEETLPRELKRHLNSIEERLLESMAWEKGSSMFNCLAIAKANLAPEINRLKLMAEPMPALDTSKAQQRSPVDTADGRIGGSKVDDPAGESKGGAASPPRQGSMTAVKGNAGATGGSAEQGESASFMSPARGPSAFTAFSSPQKSRAMPPLLLAFASPQRPNPQAGGETCAETCINVFFQKVLKLAAVRIRNLCERLQQSQQVVERVNRALHHALNHETGLFFNRHIDQIILCCVYGICKVSKVNVTFRDIIYHYRKQPQCKPYVFRNVLLDGSVVWRSGKAGQETGDIIRFYNEVFVPSTKSFLLQVGSSAGVAVPKQRWCSL

SEQ ID NO: 15107 - protein, 926 aa, Oryza sativa
  unsure (1)..(926): unsure at all Xaa locations
DAEKLCFAFVLYCVSKLKETKAGSSGVRLWEILKGCKLKYDDFFKESQRLASRIDQVLGSRYGSDWEARLEVGSRQANLPTISQYPRFYCKAFNELFLSPSTDQEPGSTTNIPDYIRFGWLLFLILRSKSPELFKDLVSCIHGLVAILAILLIHVPAKFRSFTIEGSSHLIKQTEKGVDLLPSLCHNYHTSEDRLKEMMGKSYKVIEVFFSRKAINASEFKTVNLDKIDTDGLMYFKDLVDDEIFQSNLEKLEKLSSTTGCQGELDLEMFLTSNDYVLNAENSSGSSANFGCSKRVFETLASPTKTIKNMLAAPSSPSSPANGGSIKIVQMTPVTSAMTTAKWLRDVISSLPDKRSSKLEEFLSSCDMDLTSDVVKRVSIILEAIFPTKSXXDRGTSIGLNCANAFDIPWAEARKMEASKLYYRVLEAICRAESQNNNVNHLTPLLSNERFHRCLIACSAELVLATHKTVIMMFPAVLESTGLTAFDLSKIIENFVRHEETLPRELKRHLNSLEEQLLESMSWEKGSSLYNSLVVARPSLSTEINSLGLLAEPMPSLDGIVARQSIHPDGLPPTPSKRRPSAGPDGNCYPQSPKRLCTESRNSLVEHNSQTPPPKQSQTGLSILKAKYHPLQATFASPTVSNPVSGNEKCAVVGVQIFFSKILKLAAIRIRNLCERLRHEELTVSVYNIFKQILDQQTALFFNRHVDQIILCCLYGVAKVSQLSLTFKEIVNNYKREPQCKPEVFRSIFVGSTNRNGGCGSRLVDIIVFYNQVFVPTVKPLLVALMPSSTRPEDKRNTNSQIPGSTKSSPFSNLPDMSPKKVSSSHNVYVSPLRQTKMDALLSPSSRSFYACIGESTQAFQSPSKDLAAINSRLNYPTRRINTRINFDMVSDSVVAGSLGQPNGGSASSDPAAAFSPLSKKSKTDS

SEQ ID NO: 15108 - protein, 473 aa, Oryza sativa
  unsure (1)..(473): unsure at all Xaa locations
MEASKLYYRVLEAICRAESQNNNVNNLTPLLSNERFHRCLIACSAELVLATHKTVIMMFPAVLESTGLTAFDLSKIIENFVRHEETLPRELKRHLNSLEEQLLESMSWEKGSSLYNSLVVARPSLSTEINSLGLLAEPMPSLDGIVARQSIHPDGLPPTPSKRSSAGPDGNCYPQSPKRLCTESRNSLVERNSQTPPPKQSQTGLSILKAKYHPLQATFASPTVSNPVSGNEKCAVVGVQIFFSKILKLAAIRIRNLCERLRHEELTVSVYNIFKQILDQQTALFFNRHVDQIILCCLYGVAKGXXGSRHVDIIVFYNQVFVPTVKPLLVALMPSSTRPEDKRNTNSQIPGSPKSSPFSNLPDMSPKKVSSSHNVYVSPLRQTKMDALLSPSSRSFYACIGESTQAFQSPSKDLAAINSRLNYPTRRINTRINFDMVSDSVVAGSLGQPNGGSASSDPAAAFSPLSKKSKTDS

SEQ ID NO: 15109 - protein, 619 aa, Triticum aestivum
  unsure (1)..(619): unsure at all Xaa locations
FCPKRVFETLASPTKTIKNMLTVPSSPSSPANGGSVKVVHMTPVTSAMTTAKWLREVISLLPEKPSSKLEKFLSSCDTDLTSDVTKRVSIILEAIFPTKPSGHWGGSMGLNCTNAFDIPWAEARKMEASKLYYRVLEAICRAESLNTNVNNLTPLLSNERFHRCLIACSAELVLATHKTVIMMFPAVLESTGLTAFDLSKIIENFVRHEESLPRELKRHLNSLEEQLLESMAWEKGSSLYNSLVVARPSLASEINRLGLLAESMPSLDDIVARQNFHAEDLPATPSKKRAAYSDENGDSRSPKRLCIEPRSTLVDQISQTPPAKQSYXXLKAKWRPLQSTFASPTVSNPVGGNEKCAEVGVHIFFSKILKLAAIRIRNLCERLRHVEQTERVYNIFKQILDQQTTLFFNRHIDQLILCSLYGVAKVSQLTLTFKEIVNNYRREQQCIPEVFRSVFVVNTNHNGGLGSRHVDIIVFYNEVFVPAVKPFLVALIPSGGAHPDNKKNPNSQIPGSPKPPPFSNLPDMSPKKVSSSHNVYISPLRQTKKDALLSPSSRSFYACIGESTHAYQSPSEDLAAINNCLNYTSRRINTRINFDMVSDSVVAGSLGQPNGVPASSDPX

SEQ ID NO: 15110 - protein, 764 aa, Eufolliculina uhligi
PSSPCSSLISEISRNLTLSVEVLSKAQRFLDSAQSSKIPNKVLVRCCLFLAAKLTENPQLSLSELLAGPSPVTFKEFWEGLNEAAKKLLLPTEAQHVVEGFIKAQGVTMALFSKFKKIWDDLFIDGREENTLQVFHFCWLLFAYARKELVDTPSILFDCGNLLTSVLHTVLTRLPSTVRFEQGTALQTILDAMKTTEDKIRPWSTQLDSFLAQLSSNSGFILDDWIGANYEHNSQLLLRLYKEKLGADDPDETTLAERTDQPQTPTKERVYSPLVGRSNIRRETVGRILNWDKLPTDLGISSRLKEFRLPPDSPFIGCSTPMTMVMENHRWLSDIIDDENTSNLYAESLRTLHEADVQTLTAETEQITSRVDTLFKEKSIGGNPAEGAAFILSHFEADDDGGHDDYLHGSSDENYRVAEVKTLLHHTIRVLVDNGSLKQQKPGSSLWRSLYACCIETSLYTHEVTNISLGELLKACDIGMFDFWKTIRVFLTFDARIPMGLKWHLKEVELQIVSCLAWADQTLIQPEIQAKLHSNNERCNHSRFFKRVYSQAACRLSELATSLGLSDALKENSWVVVKYLLTDKLELLVGRHLDQMVICSIYGTCKGRSEVSFTKIVESYKKLFNEDQSIYMQVLIEGSHFDTVIQFYNKVFMPTLKEFLIDMHQGKTITQGLHQQNPLRACAPAVPVQRAIINTMKSPNRSPFMTPRTMKLMASNSPMFPSNRQAPTSLIGSLRFDSAGMTRKIIKPTEPADQPPVIRKCLTF

SEQ ID NO: 15111 - protein, 722 aa, Drosophila melanogaster
MANLPQEFVNEIEDLDRKFSITFMLHKRFRIIMDMIFSCPPNEKKHSKYISLHGNHAHGKCSYIKLDDICWRLFLCAKNQKPSNTVDLVTSYNLMICCIDLIYNNVLAEKRTDLINPKFEGLPSNWTELDFRHNPHCILSNFCDMTEEAKAMKATTFRQIMSSFFQASTIYGNKDTMLGLLANENFERNLKSLNISYEQYVLSVGEFDERILSAYDAGEHTALNDQSLRPPVTPLTRKQDLPAQPAMAGDKFEPVRNATNNVKQLSAFGRITEPTDFVKQAGEEVIAKLLSIIEEIEQKFLAKYPSTEAKSRFQLAKSFFFYLLDQILQAEIRNKPDIDLKRLLVQKVSLVIFNITLMACCVELVLEAYKTELKFPWVLDCFSISAFEFQKIIEIVVRHGSHEGCLNRSLIKHLNSIEETCLERLAWARNSTVWEMIASAQLPLPTWLMVNLDRAAGPLQIFLRKVYLLGWLRIQKLCSELSLCEKTPESIWHIFEHSITHETELMKDRHLDQNIMCAIYIYIRVKRMEDPKFSDIMRAYRNQPQAVNSVYREVFIDINEDGEPKVKDIIHFYNHTYVPLMRQFVIDYLNVTPDVSGRASDLQLSPHPKERAAQPKKVTQSHSLFVSQMSKNEIQQSPNQMVYSFCRSPAKDLQAMNEKVRGGKRMLSFGDEPGLGTMAETKRSKISQVKAVMDDPELQSAEQQTAVTTEGCVGGEGGEHET

SEQ ID NO: 15112 - protein, 845 aa, Drosophila melanogaster
MSEPDPQELGAEVVSGLVATSDDRLEMINAEYTNLCRDLNMDRQTELQGYETYLEVSQRCSMEGTASHWMCCAIYTACRRTSTPTVTGQNAVVKGNCVSLNNLLRCCKMSIYEFKTKIKQWCDMANLPQEFVNEIEDLDRKFSITFMLHKRFRIIMDMIFSCPPNEKKHSKYISLHGNHAHGKCSYIKLDDICWRLFLCAKNQKPSNTVDLVTSYNLMICCIDLIYNNVLAEKRTDLINPKFEGLPSNWTELDFRHNPHCILSNFCDMTEEAKAMKATTFRQIMSSFFQASTIYGNKDTMLGLLANENFERNLKSLNISYEQYVLSVGEFDERILSAYDAGEHTALNDQSLRPPVTPLTRKQDLPAQPAMAGDKFEPVRNATNNVKQLSAFGRITEPTDFVKQAGEEVIAKLLSIIEEIEQKFLAKYPSTEAKSRFQLAKSFFFYLLDQILQAEIRNKPDIDLKRLLVQKVSLVIFNITLMACCVELVLEAYKTELKFPWVLDCFSISAFEFQKIIEIVVRHGSHEGCLNRSLIKHLNSIEETCLERLAWARNSTVWEMIASAQLPLPTWLMVNLDRAAGPLQIFLRKVYLLGWLRIQKLCSELSLCEKTPESIWHIFEHSITHETELMKDRHLDQNIMCAIYIYIRVKRMEDPKFSDIMRAYRNQPQAVNSVYREVFIDINEDGEPKVKDIIHFYNHTYVPLMRQFVIDYLNVTPDVSGRASDLQLSPHPKERAAQPKKVTQSHSLFVSQMSKNEIQQSPNQMVYSFCRSPAKDLQAMNEKVRGGKRMLSFGDEPGLGTMAETKRSKISQVKAVMDDPELQSAEQQTAVTTEGCVGGEGGEHET

SEQ ID NO: 15113 - protein, 797 aa, Drosophila melanogaster
MSEPDPQELGAEVVSGLVATSDDRLEMINAEYTNLCRDLNMDRQTELQGYETYLEVSQRCSMEGTASHWMCCAIYTACRRTSTPTVTGQNAVVKGNCVSLNNLLRCCKMSIYEFKTKIKQWCDMANLPQEFVNEIEDLDRKFSITFMLHKRFRIIMDMIFSCPPNEKKHSKYISLHGNHAHGKCSYIKLDDICWRLFLCAKNQKPSNTVDLVTSYNLMICCIDLIYNNVLAEKRTDLINPKFEGLPSNWTELDFRHNPHCILSNFCDMTEEAKAMKATTFRQIMSSFFQASTIYGNKDTMLGLLANENFERNLKSLNISYEQYVLSVGEFDERILSAYDAGEHTALNDQSLRPPVTPLTRKQDLPAQPAMAGDKFEPVRNATNNVKQLSAFGRITEPTDFVKQAGEEVIAKLLSIIEEIEQKFLAKYPSTEAKSRFQLAKSFFFYLLDQILQAEIRNKPDIDLKRLLVQKVSLVIFNITLMACCVELVLEAYKTELKFPWVLDCFSISAFEFQKIIEIVVRHGSHEGCLNRSLIKHLNSIEETCLERLAWARNSTVWEMIASAQLPLPTWLMVNLDRAAGPLQIFLRKVYLLGWLRIQKLCSELSLCEKTPESIWHIFEHSITHETELMKDRHLDQNIMCAIYIYIRVKRMEDPKFSDIMRAYRNQPQAVNSVYREVFIDINEDGEPKVKDIIHFYNHTYVPLMRQFVIDYLNVTPDVSGRASDLQLSPHPKERAAQPKKVTQSHSLFVSQMSKNEIQQSPNQMVYSFFRSPAKDLQAMNEKVRGGKRMLSFGDEPD

SEQ ID NO: 15114 - protein, 782 aa, Drosophila melanogaster
METCEVEGEAETLVRRFSVSCEQLELEARIQQSALSTYHRLDAVNGLSTSEADAQEWLCCAVYSELQRSKMRDIRESINEANDSVAKNCCWNVSLTRLLRSFKMNVSQFLRRMEHWNWLTQNENTFQLEVEELRCRLGITSTLLRHYKHIFRSLFVHPGKGADPGAANHYQALYEFGWLLFLVIRNELPGFAITNLINGCQVLVCTMDLLFVNALEVPRSVVIRREFSGVPKNWDTEDFNPILLNKYSVLEALGELIPELPAKGVVQMKNAFFHKALIMLYMDHSLVGDDTHMREIIKEGMLDINLENLNRKYTNQVADISEMDERVLLSVQGAIETKGDSPKSPQFAFQTSSSPSHRKLSTHDLPASLPLSIIKAFPKKEDADKIVNYLDQTLEEMNQTFTMAVKDFLDAELSGKRFRQARGLYYKYLQKILGPELVQKPQLKIGQLMKQRKLTAALLACCLELALHVHHKLVEGLRFPFVLHCFSLDAYDFQKILELVVRYDHGFLGRELIKHLDVVEEMCLESLIFRKSSQLWWELNQRLPRYKEVDAETEDKENFSTGSSICLRKFYGLANRRLLLLCKSLCLVDSFPQIWHLAEHSFTLESSRLLRNRHLDQLLLCAIHLHVRLEKLHLTFSMIIQHYRRQPHFRRSAYREVSLGNGQTADIITFYNSVYVQSMGNYGRHLECAQTRKSLEESQSNVGILTETTSNELSMRANISISSPPPPRVCQSGSCSSHPPSSPAASPLSLQSSPNVKRAASSNDLREIKRPNILRRRQLSVI

SEQ ID NO: 15115 - protein, 783 aa, Drosophila melanogaster
METCEVEGEAETLVRRFSVSCEQLELEARIQQSALSTYHRLDAVNGLSTSEADAQEWLCCAVYSELQRSKMRDIRESINEANDSVAKNCCWNVSLTRLLRSFKMNVSQFLRRMEHWNWLTQNENTFQLEVEELRCRLGITSTLLRHYKHIFRSLFVHPGKGADPGAANHYQALYEFGWLLFLVIRNELPGFAITNLINGCQVLVCTMDLLFVNALEVPRSVVIRREFSGVPKNWDTEDFNPILLNKYSVLEALGELIPELPAKGVVQMKNAFFHKALIMLYMDHSLVGDDTHMREIIKEGMLDINLENLNRKYTNQVADISEMDERVLLSVQGAIETKGDSPKSPQLAFQTSSSPSHRKLSTHDLPASLPLSIIKAFPKKEDADKIVNYLDQTLEEMNRTFTMAVKDFLDAELSGKRFRQARGLYYKYLQKILGPELVQKPQLKIGQLMKQRKLTAALLACCLELALHVHHKLVEGLRFPFVLHCFSLDAYDFQKILELVVRYDHGFLGRELIKHLDVVEEMCLDSLIFRKSSQLWWELNQRLPRYKEVDAETEDKENFSTGSSICLRKFYGLANRRLLLLCKSLCLVDSFPQIWHLAEHSFTLESSRLLRNRHLDQLLLCAIHLHVRLEKLHLTFSMIIQHYRRQPHFRRSAYREVSLGNGQTADIITFYNSVYVQSMGNYGRHLECAQTRKSLEESQSNVGILTETTSNELSMRANISISSPPPPRVCQSGSCSSHPPSSPAASPLSLQSSPNVKRAASSNDLMREIKRPNILRRRQLSVI

SEQ ID NO: 15116 - protein, 314 aa, Danio rerio
ESMLKSEEKRLSVQNFSKLLNNAAFHTSLLACALEVVIATYVGSSLKNGGFGRSSGASDSVESNLCFPWILSVFQLPAFDFYKVIESFIKAEPTLKHDMVKHLEQCEHVIMESLAWRADSPLFDLLKQSREEGPGEQAEPPATLNQPLHHNHTAADLYLSPVRPCRQPPVMEAEPPTPGTRAPRSNSLSLFYKKLYRMAYLRLKMLFSNLLTSHPEMEPIIWTLLQHTLQNEYELMRDRHLDQLIMSAMYAICKVKNVDLRFKTIVTAYKELPNTNQETFKRVLIREGQYDSINVFYNLVFMQKLKTNSLQYSS

SEQ ID NO: 15117 - protein, 910 aa, Oncorhynchus mykiss
MPPKKRNSGAAQNKEMKPSIKNASPDKENPDLSIEKHQEKDADFMTLCQSLQVIDAVCDRAWTIWKAVQASVDKVLDTQKKLWAACLFVAVIDLEIASFTFTQILKAVDLNVKQFLGLLKKMDVNLDTISTKVNSAVTRLEKKYDVSRALYQRFEKTCSKIYAEDSEAKGKEILRSCWTMFLLAKGRALQMEDELVISLHLMVCVLEFFIRRCPPSLLQPLYQSVISTAQSPPTRTSRRNQSKAKPRQAPPEVDVQLLETLCKENDCSVEEVKSVYQTSFSAFLDSMSLSGTRDLPQATDLSKQYEELYFKSRDFDSRLFLDNDETLLTPKVEPMPVERTPRKNMPEDVVLIPPQTPVRAAMNSIAQLRVDLITSGDQPSSNLAVYFKNCTVDPTEEVLQRVESLGLLFSQRFGQAVGPRCVGLGKQRFTLGIRLYYRVMESMLKSEEKRLSVQNFSKLLNDSTFHTSLLACALEVAMATYGGSTFKNGGYSNGGVPVETDLCFPWILDVFQLTAFDFYKVIESFIKAEPSLSKDIVKHLERCEHLIMETIAWREDSPLFELLKRTREEGPVEQAEPPATLNQPLQHNHTAADLYLSPVRPSSRTLPAPESTAPPSSQPSAPAPHQTPRHPKSNSLSLFYKKLYRLAYMRLKMLYTQLLTSHPELEPIMWTLFQHTLQNEYELMRDRHLDQLMMSAMYAICKVKNVDLRFKTIVTAYKNMPNTNQETFKHVLIREGQYDSIIVFYNLVFMQKLKTNILQYASPRPPTLSPIPHIPRSPYKFPNSPLRVPGSNNVYISPMKSPTRMSPVMTPRTRILVSIGESFGTSDKFQKINAMVNSSDRSLKRSLDMSSAPKPLKRLRFDVEGQDESDESKPGEESRLIQKLAEIGSTRTRMQEQKMKDDAESEKDKP

SEQ ID NO: 15118 - protein, 910 aa, Oryzias latipes
MPPKKRNSGTAQSKEPKPSSDKSFADKKGSPEFSLNKHTEKDVEFVTLCKSLHATDSVCERAWSLWKTVQDVMEDVDANQKRLWGSCLFVTATDMDATCFTLTEVLKAVNINVKQFVDLVRQLDVNLDTISTKVNSALMRVEKKYDVMLALYQRFEKTCKKIFASTPDKKERATMRTCWTMFLLAKGRALQMEDDLVISFQLLLCTLELFIKRSSPELLLPLYKSVVSKAQSPTRTSRRNQSKAKSRVVESEVNVELLETLCKDNECNAEEVKNVYQTSLSAFLDLMDLPIPDFLGTDVSKQYQEHYLKSGDIDGRLFFDGDETVLAPKVDISQVGRTPKKTSPDDDGPLIPPQTPIRAAMNSIKMLRGDLPSSGDQPSSNLEIYFKNCTVDPTQGIQSLEMLGLFSQKFGEAVGPHCIVYGRERFTLGVRLYYKVMEAMLESKKKRLFVQNFSKLLNDSTFHMSLLACALEVVMVTYEESSFKNRGCSHGEGDQAVRDLCFPWILDVFDLSAFDFYKVIESFIKAEPTLSKDIIKHLETCENLIMEKIAWRTGSPLFELLKREHEAGATEQAEPPASFSLPLQHNHTAVDLYLSPIRPGLRVLPPESPATPSSQASSQPTPQAAGQAPRQPKSNSLSLFYKKLYRLAYTRLKTLCSCLLSNHPDLEHVIWTLFQHTLQYEYDLMRDRHLDQLMMSAMYAICKVKSVDLRFKLIVSAYKNMPNTSQETFKHVLITEGQYDSIIVFYNQVFMQKLKTNILQYASTRPPTLSPIPQIPCSPYKFPNSPLRVPGSNNVYISPLKNSRLSAGMMAPRSRMLVSIGESFGFANRFQKINQMVNSGDRAHKRTLDGGSALKPLKRLRFDVDGQDEADGSKSGGESALIQKLAEMSSTRSRMQEQKMKEDAESRKKT

SEQ ID NO: 15119 - protein, 899 aa, Notophthalmus viridescens
MPPKYPPQVRKGDSSSSAVQSQEEHRQWLDDADFTLLCDSLKVSDAVREGSWKIWQKVSADGCERIIRNEKVLGICIFLAAVELNDLTFTITELLKSTHLNVNMFTGYIKEMDISMDTITTKVNNAVTRLKTKYNTLCTLYQKFQRLFELIFIKEPSNVQISSDISPAALFKILWITFLLVKGSVLQMEDDLVISFQLLLCVFTHYIKILPLPLLREPYKSAISGKSDKAQTRSSRRGRNRNPHLSKQVESDEVFEILCKENGCNMDEVKNINITTFVPFLDSVGISTTNGIPEEPVLSKQYEDLYFNSKDLDARLFLDDDETLQPNMGGCVELEKTPQKNDPEEMNLIPPQTPVRTAMNTIQNLLNSLASASDQPSPTLKAYFNNCTSNPTRAIQERENNLGQIFKQKFAEAVGQACEEIGYQRFKVGVRLAYRVMEAMLKSEEKRLSVQNFSNLLNNSAFHESLLACSIEVVMATYGSISRETDLSFPWILEVFKIEPYDFYKVIESFIKDEPSLTREMIKHLESCEHRIMESLAWRSESPIYELIRQPREREGHVDQPEPTSSLNQPLEHNHTAADLYLSPLRSPRRNVPTSRAIPTLSVPESNNVPAPLPQPTQRSTSLSLFYKKVYRLAYLRMNTLCSKLLPDHPELEHVIWTLFQHTLQNEYELMKDRHLDQIMMCSMYAICKVKAIDLRFKTIVTAYKELPNTNQETFKHVLIRDGQHDSIIVFYNLVFMQKLKTNILQYATLRNPTLSPIPHIPRSPYKISNSPLRLPGGNNIYISPLKSPYKHPEGLLSPTKMTPRSRILVSIGEQFGTAEKFQKINQMLSSSERLRKRAAESSNAPKPLKRLHFDTDGPDETDGSKHLAQKLAEMTSTRSRMQKQKQDEEMDTTLKEEK

SEQ ID NO: 15120 - protein, 899 aa, Xenopus sp.
MPPKSPRKQQIRSQGEPRSPDRPDFQDPDFNFLCENLKISDNVRGKAWNTYEKMFPSGYMMRETAKKKESLGLCLYIASVDCEEMTFTFTELLKILRLSVNRCFRLLREMDINMDVLSNKVDNAISKLKKKYENMCLLFQKFQRTFELIFEEQHNTRAAVDTAPILKGTWITFLLARGKILQMDDELVISSQLLLCVLDYFIKLSPPSILKEPYKSALNGLPVNTPPRSSRRSQNRNTRVSPQSETDSKVLEFLCSQNYCPMDEVRNVYSTSFVDFLASAGISSNEGIPKVESISRQYEELYHKHKDLDARLFLENDETLKVDVQDSLDLERTPRKDESEVFPVPPQTPVRGAMNTVQQLMVTLSSANDKPPDTLDSYFSNCTVNPKTKITDRIEHFGHVFKEKFASSVGQACAEIGYQRYKLGVCLYYRVMEAILKTEEERLSVHNFSKLLNNDIFHICLLACAVEVVVASYARNASQAYCSSGTNLSFPWILRAFEIKAFDFYKVIECFIKAEPSLTSNMIKYLERCEHQIMECLAWQSDSPLFDLIKQTREREGLVDHPELVSNLQQPVQHNHTAADLYLSPSRSSHQHPVTSVPTSSVTNGQVSSSQPVQQKSTSLSLFYKKVYLLAYKRLSSLCSSLLSDHPELEQVIWTLLQHTLQQEYELMRDRHLDQIMMCSMYGICKAKNIDLRFKTIVTAYKGLTNTNQETFKHVLIRDGQHDSIIVFYNLVFMQKLKSHILQYGSARHPTLSPIPHIPRSPYRFGNSPKVPGNIYVSPLKTPYKTADGLLSPSKMTPKTSFLISLGETFRSPDRFQKINQMLNSCERPIKRSADTGTTPKPLKKLRFDSDGQDEADGSKHIQGESKFQQKLAEMTSTRTRMQKQKLEESLESSQQEEK

SEQ ID NO: 15121 - protein, 921 aa, Gallus gallus
MPPKPLRRAGAARSQRTSPEGGAGTASPPGGTRLEVGEAEFVALCDALKAPDSVREKAWMTYQSLAAADGASAYNKKKKETWGVCIFIVAIDLDEMTFTFTELLKSLSISVCTFFQFLKEVDVNMDTVSTKVDSTVSRLKKKYDVLLALYHKFERTCGLIYLEQPSSEISAELSSVLVLKNYWITFLLAKGKVLQMEDDLVISFQLLLCVLDYFIKLSPPAMLKEPYKSAVTALTVNGSTRTPRRGQNRNARASKQIDTDTKVIEILCKEHDCNLDEVKNVYFTSFIPFLNSLGVVASNGLPEVDVLSKQYDELYLKNKDIDARLFLDHDETLQPDVIACSQLERTPRKNNPDEEVNHVLPQTPVRAAMNTIQQLMMILNSATDKPSDTLIAYFNNCTVNPEDSILKRVESLGHIFKKKFAEAVGQGCAEIGSQRYQLGVRLYYRVMESMLKSEEERLSVHNFSKLLNDNIFHTSLLACALEIVMATYGRTASQSDGTSAETDLSFPWILNVFDLKAFDFYKVIESFIKVEPSLTRDMIKHLERCEHRIMESLAWQSDSPLFDLIKQSKEREGQTDQPEPTSTLNLPLQHNHTAADLYLSPVRSPKKKASGHPQSGTSNPDAQPSATSQTQKPQKSTSLSLFYKKVFRLAYLRLHTLFFRLLSEHPDLEPLIWTLFQHTLQNESELMRDRHLDQIMMCSMYGICKVKNVDLRFKTIVSAYKELPNTNQETFKRVLIREEQYDSIIVFYNLVFMQKLKTNILQYASNRPPTLSPIPHIPRSPYQFSNSPRRVPAGNNIYISPLKSPYKFSDGFHSPTKMTPRSRILVSIGETFGTSEKFQKINQMVCNSESHVKRSAEPSDAPKPLKRLRFDIEGQDEADGGKHLPQESKFQQKLAEMTSTRTRMQKQKLNDGNDTSANEEK

SEQ ID NO: 15122 - protein, 919 aa, Gallus gallus
MPPKPLRRAGAAGVSAPAPRRRRHRLTARRTRLEVGEAEFVALCDALKAPDSVREKAWMTYESLAAADGASAYNKKKKETWGVCIFIVAIDLDEMTFTFTELLKSLSISVCTFFQFLKEVDVNMDTVSTKVDSTVSRLKKKYDVLLALYHKFERTCGLIYLSQPSSEISAELSSVLVLKNYWITFLLAKGKVLQMEDDLVISFQLLLCVLDYFIKLSPPAMLKEPYKSAVTALTVNGSTRTPRRGQNRNARASKQIDTDTKVIEILCKEHDCNLDEVKNVYFTSFIPFLNSLGVVASNGLPEVDVLSKQYDELYLKNKDIDARLFLDHDETLQPDVIACSQLERTPRKNNPDEEVNHVLPQTPVRAAMNTIQQLMMILNSATDKPSDTLIAYFNNCTVNPEDSILKRVECLGHIFKKKFAEAVGQGCAEIGSQRYQLGVRLYYRVMESMLKSEEERLSVHNFSKLLNDNIFHTSLLACALEIVMATYGRTASQSDGTSAETDLSFPWILNVFDLKAFDFYKVIESFIKVEPSLTRDMIKHLERCEHRIMESLAWQSDSPLFDLIKQSKEREGQTDQPEPTSTLNLPLQHNHTAADLYLSPVRSPKKKASGHPQSGTSGPDAQPSATSQTQKPQKSTSLSLFYKKVFRLAYLRLHTLFFRLLSEHPDLEPLIWTLFQHTLQNESELMRDRHLDQIMMCSMYGICKVKNVDLRFKTIVSAYKELPNTNQETFKRVLIREEQYDSIIVFYNLVFMQKLKTNILQYASNRPPTLSPIPHIPRSPYQFSNSPRRAAGNNIYISPLKSPYKFSDGFHSPTKMTPRSRILVSIGETFGTSEKFQKINQMVCNSESHVKRSAEPSDAPKPLKRLRFDIEGQDEADGGKHLPQESKFQQKLAEMTSTRTRMQKQKLNDGNDTSANEEK

SEQ ID NO: 15123 - protein, 882 aa, Pan troglodytes
LEFEETEEPDFTALCQKLKIPDHVRERAWLTWEKVSSVDGVLGGYIQKKKELWGICIFIAAVDLDEMSFTFTELQKNIEISVHKFFNLLKEIDTSTKVDNAMSRLLKKYDVLFALFSKLERTCELIYLTQPSSLISTEINSALVLKVSWITFLLAKGEVLQMEDDLVISFQLMLCVLDYFIKLSPPVLLKEPYKTAVIPINGSPRTPRRGQNRSARIAKQLENDTRIIEVLCKEHECNIDEVKNVYFKNFIPFMNSLGLVTSNGLPEVENLSKRYEEIYLKNKDLDARLFLDHDKTLQTDSIDSFETQRTPRKSNLDEEVNVIPPHTPVRTVMNTIQQLMMILNSASDQPSENLISYFNNCTVNPKESILKRVKDIGYIFKEKFAKAVGQGCVEIGSQRYKLGVRLYYRVMESMLKSEEERLSIQNFSKLLNDNIFHMSLLACALEVVMATYSRSTSQNLDSGTDLSFPWILNVLNLKAFDFYKVIESFIKAEGNLTREMIKHLERCEHRIMESLAWLSDSPLFDLIKQSKDREGPTDHLESACPLNLPLQNNHTAADMYLSPVRSPKKKGSTTRVNSTANAETQATSAFQTQKPLKSTSLSLFYKKVYRLAYLRLNTLCERLLSEHPELEHIIWTLFQHTLQNEYELMRDRHLDQIMMCSMYGICKVKNIDLKFKIIVTAYKDLPHAVQETFKRVLIKEEEYDSIIVFYNSVFMQRLKTNILQYASTRPPTLSPIPHIPRSPYKFPSSPLRIPGGNIYISPLKSPYKISEGLPTPTKMTPRSRILVSIGESFGTSEKFQKINQMVCNSDRVLKRSAEGSNPPKPLKKLRFDIEGSDEADGSKHLPGESKFQQKLAEMTSTRTRMQKQKMNDSMDTSNKEEK

SEQ ID NO: 15124 - protein, 928 aa, Homo sapiens [sequence omitted]

SEQ ID NO: 15125 - protein, 928 aa, Homo sapiens
MPPKTPRKTAATAAAAAAEPPAPPPPPPPEEDPEQDSGPEDLPLVRLEFEETEEPDFTALCQKLKIPDHVRERAWLTWEKVSSVDGVLGGYIQKKKELWGICIFIAAVDLDEMSFTFTELQKNIEISVHKFFNLLKEIDTSTKVDNAMSRLLKKYDVLFALFSKLERTCELIYLTQPSSSISTEINSALVLKVSWITFLLAKGEVLQMEDDLVISFQLMLCVLDYFIKLSPPMLLKEPYKTAVIPINGSPRTPRRGQNRSARIAKQLENDTRIIEVLCKEHECNIDEVKNVYFKNFIPFMNSLGLVTSNGLPEVENLSKRYEEIYLKNKDLDARLFLDHDKTLQTDSIDSFETQRTPRKSNLDEEVNVIPPHTPVRTVMNTIQQLMMILNSASDQPSENLISYFNNCTVNPKESILKRVKDIGYIFKEKFAKAVGQGCVEIGSQRYKLGVRLYYRVMESMLKSEEERLSIQNFSKLLNDNIFHMSLLACALEVVMATYSRSTSQNLDSGTDLSFPWILNVLNLKAFDFYKVIESFIKAEGNLTREMIKHLERCEHRIMESLAWLSDSPLFDLIKQSKDREGPTDHLESACPLNLPLQNNHTAADMYLSPVRSPKKKGSTTRVNSTANAETQATSAFQTQKPLKSTSLSLFYKKVYRLAYLRLNTLCERLLSEHPELEHIIWTLFQHTLQNEYELMRDRHLDQIMMCSMYGICKVKNIDLKFKIIVTAYKDLPHAVQETFKRVLIKEEEYDSIIVFYNSVFMQRLKTNILQYASTRPPTLSPIPHIPRSPYKFPSSPLRIPGGNIYISPLKSPYKISEGLPTPTKMTPRSRILVSIGESFGTSEKFQKINQMVCNSDRVLKRSAEGSNPPKPLKKLRFDIEGSDEADGSKHLPGESKFQQKLAEMTSTRTRMQKQKMNDSMDTSNKEEK

SEQ ID NO: 15126 - protein, 928 aa, Homo sapiens
MPPKTPRKTAATAAAAAAEPPAPPPPPPPEEDPEQDSGPEDLPLVRLEFEETEEPDFTALCQKLKIPDHVRERAWLTWEKVSSVDGVLGGYIQKKKELWGICIFIARVDLDEMSFTLLSYRKTYEISVHKFFNLLKEIDTSTKVDNAMSRLLKKYDVLFALFSKLERTCELIYLTQPSSSISTEINSALVLKVSWITFLLAKGEVLQMEDDLVISFQLMLCVLDYFIKLSPPMLLKEPYKTAVIPINGSPRTPRRGQNRSARIAKQLENDTRIIEVLCKEHECNIDEVKNVYFKNFIPFMNSLGLVTSNGLPEVENLSKRYEEIYLKNKDLDRRLFLDHDKTLQTDSIDSFETQRTPRKSNLDEEVNIIPPHTPVRTVMNTIQQLMMILNSASDQPSENLISYFNNCTVNPKESILKRVKDIGYIFKEKFAKAVGQGCVEIGSQRYKLGVRLYYRVMESMLKSEEERLSIQNFSKLLNDNIFHMSLLACALEVVMATYSRSTSQNLDSGTDLSFPWILNVLNLKAFDFYKVIESFIKAEGNLTREMIKHLERCEHRIMESLAWLSDSPLFDLIKQSKDREGPTDHLESACPLNLPLQNNHTAADMYLSPVRSPKKKGSTTRVNSTANAETQATSAFQTQKPLKSTSLSLFYKKVYRLAYLRLNTLCERLLSEHPELEHIIWTLFQHTLQNEYELMRDRHLDQIMMCSMYGICKVKNIDLKFKIIVTAYKDLPHAVQETFKRVLIKEEEYDSIIVFYNSVFMQRLKTNILQYASTRPPTLSPIPHIPRSPYKFPSSPLRIPGGNIYISPLKSPYKISEGLPTPTKMTPRSRILVSIGESFGTSEKFQKINQMVCNSDRVLKRSAEGSNPPKPLKKLRFDIEGSDEADGSKHLPGESKFQQKLAEMTSTRTRMQKQKMNDSMDTSNKEEK

SEQ ID NO: 15127 - protein, 928 aa, Homo sapiens [sequence omitted]

SEQ ID NO: 15128 - protein, 518 aa, Canis familiaris
QLMVILNSASDQPSENLISYFNNCTVNPKESILKRVKDVGYIFKEKFAKAVGQGCMEIGSQRYKLGVRLYYRVMESMLKSEEERLSIQNFSKLLNDDIFHMSLLACALEVVMATYSRSTSQNLDTGTDLSFPWILNVLNLKAFDFYKVIESFIKAEANLTREMIKHLERCEHRIMESLAWLSDSPLFDLIKQAKDREGPADHLESACTLNLPLQSNHTAADMYLSPVRSPKKKGSTIRVNSTVNTEAQATSAFQTQKPLKSTSLSLFYKKEYRLAYLRLNTLCARLLSDHPELEHIIWTLFQHTLQNEYELMRDRHLDQIMMCSMYGICKVKNIDLKFKIIVTAYKDLPHAVQETFKRVLIREEEYDSIIVFYNSVFMQRLKTNILQYASTRPPTLSPIPHIPRSPYKFSSSPLRIPGGNIYISPLKNPYKISEGVPTPTKMTPRSRILVSIGESFGTSEKFQKINQMVCNSDRVLKRSAEGSNPPKPLKKLRFDIEGTDEADGSKHLPGESKFQQKL

SEQ ID NO: 15129 - protein, 364 aa, sweet potato leaf curl virus
MAPPKRFKIQAKNYFITYPRCSLSKEDCLAQLLNIQTPSNKKYIHVARELHEDGEPHLHVLVQFEGKFVCTNSRFFDLVSPNRSNHFHPNIQGAKSSSDVKSYVDKDGDTITWGEFQVDGRSARGGQQTANDAAAEALNAGSKEAALQIIREKLPEKYLFQFHNLVSNLDRIFSPPPSVYSSPFSSSSFNAVPDIISDWAAENVMDSAARPDRPISIVIEGPSRIGKTVWARSLGPHNYLCGHLDLSPKVYSNSAWYNVIDDVNPQYLKHFKEFMGAQKDWQSNCKYGKPVRIKGGIPTIFLCNPGEGSSFKLWLDKPEQGALKNWATANAIFCDVQSPFWVQEEVSHSGATAHRGEEGQEESS

SEQ ID NO: 15130 - protein, 314 aa, sweet potato leaf curl virus
MAPPKRFKIQAKNYFITYPRCSLSKEDCLAQLLNIQTPSNKKYIHVARELHEDGEPHLHVLVQFEGKFVCTNSRFFDLVSPNRSNHFHPNIQGAKSSSDVKSYVDKDGDTITWGEFQVDGRSARGGQQTANDAAAEALNAGSKEAALQIIREKLPEKYLFQFHNLVSNLDRIFSPPPSVYSSPFSSSSFNAVPDIISDWAAENVMDSAARPDRPISIVIEGPSRIGKTVWARSLGPHNYLCGHLDLSPKVYSNSAWYNVIDDVNPQYLKHFKEFMGAQKDWQSNCKYGKPVRIKGAVRPTEGLAIVVMKPCHTA

SEQ ID NO: 15131 - protein, 234 aa, Geminiviridae
MPRKGSFSIKAKNYFLTYPQCSLSKEDALSQIQNLTIPVNKKFIKICRELHENGEPHLHVLIQFEGKFNCTNNRLFDLVSPTRSTHFHPNIQGAKSSSDVKSYVEKDGDTIEWGLFQIDGRSARGGQQTANDAAAEALNSGTKEEAMKIIKEKLPEKFLFQYHNLSSDLDRIFMKAPNPWAPPFPLSSFTNVPHEMQEWSHDYFGRSAAARGETISIIIEGDSRTGKTMWACRC

SEQ ID NO: 15132 - protein, 235 aa, Geminiviridae
MPPPKHFRINAKNYFLTYPKCSIGKEEALSQLQNLTIPVNKKSIKICRELHENGEPHLHVLIQFEGKYNCTNNRQFDLVSPTRSAHFHPNIQGAKSSSDVKSYLDKDGDTLDWGEFQIDGRSARGGQQSANDSYAKALNAGSVQAAMVVLKEEQPKDFVLQNHNIRSNLERIFAKAPERWVPPFPLSSFTNVPDEMQEWADDYFGTPAAARRRDLLVLSLNLTLERGRRCGPADA

SEQ ID NO: 15133 - protein, 355 aa, Abutilon mosaic virus (isolate West India)
MPPPKKFRVQAKNYFLTYPQCSLTKDEALSQLQNLETPVNKKFIKICRELHENGEPHLHVLIQFEGKYQCTNNRFFDLVSPTRSAHFHPNIQGAKSSSDVKSYIDKDGDTAEWGEFQIDGRSARGGQQTANDSYAKALNAGDVQSALNILKEEQPKDYVLQNHNIRSNLERIFAKAPEPWVAGFPSPLSRPFPRRCRSGRMIILGVVPLRPDRPLSLIVEGDSRTGKTMWARALGPHNYLSGHLDFNGRVYSNEVEYNVIDDVAPHYLKLKHWKELLGAQKDWQSNCKLAKPVQIKGGIRAIVLCNPGEGSSYKEYLDKEENRGLRNWTLKNAIFITLTAPLYQGRHTGRPRGGH

SEQ ID NO: 15134 - protein, 358 aa, African cassava mosaic virus
MRTPRFRIQAKNVFLTYPKCSIPKEHLLSFIQTLSLQSNPKFIKICRELHQNGEPHLHALIQFEGKITITNNRLFDCVHPSCSTSFHPNIQGAKSSSDVKSYLDKDGDTVEWGQFQIDGRSARGGQQSANDAYAKALNSGSKSEALNVIRELVPKDFVLQFHNLNSNLDRIFQEPPAPYVSPFPCSSFDQVPVEIEEWVADNVRDSAARPWRPNSIVIEGDSRTGKTIWARSLGPHNYLCGHLDLSPKVFNNAAWYNVIDDVDPHYLKHFKEFMGSQRDWQSNTKYGKPVQIKGGIPTIFLCNPGPTSSYKEFLAEEKQEALKAWALKNAIFITLTEPLYSGSNQSHSQTSQEASHPA

SEQ ID NO: 15135 - protein, 359 aa, African cassava mosaic virus
MPRAGRFQINAKNYFITYPRCSLTKEETLSQLKAFSYPTNIKFIRVCRELHQDGVPHLHVLIQFEGKFQCTNPRFFDLFSPSRSTHFHPNIQGAKSSSDVKAYIEKGGEFLDDGIFQVDARSARGEGQHLAQVYADALNASSKSEALQIIKEKDPKSFFLQFHNISANADRIFQAPPQTYVSPFLSSSFTQVPEEIEVWVSENICSPAARPWRPISIVLEGDSRTGKTLWARSLGPHNYLCGHLDLSPKIYSNDAWYNVIDDVDPHYLKHFKEFMGAQRDWQSNTKYGKPIQIKGGIPTIFLCNPGPTSSYKEFLDEEKNHSLKAWALKNATFITLHEPLFSSSHQSPTPHSEDQGRQT

SEQ ID NO: 15136 - protein, 358 aa, Cassava latent virus (strain Nigerian)
MRTPRFRVQAKNVFLTYPNCSIPKEHLLSFIQTLSLPSNPKFIKICRELHQNGEPHLHALIQFEGKITITNNRLFDCVHPSCSTNFHPNIQGAKSSSDVKSYLDKDGDTVEWGQFQIDGRSARGGQQSANDAYAKALNSGSKSEALNVIRELVPKDFVLQFHNLNSNLDRIFQEPPAPYVSPFPCSSFDQVPDELEEWVADNVRDSAARPWRPNSIVIEGDSRTGKTIWARSLGPHNYLCGHLDLSPKVFNNDAWYNVIDDVDPHYLKHFKEFMGSQRDWQSNTKYGKPVQIKGGIPTIFLCNPGPTSSYKEFLDEEKQEALKAWALKNAIFITLTEPLYSGSNQSQSQTIQEASHPA

SEQ ID NO: 15137 - protein, 295 aa, Chloris striate mosaic virus
MSSLPVSESEGEGSGTSVQVPSRGGQVTPGEKAFSLRTKHVFLTYPRCPISPEEAGQKIADRLKNKKCNYIYISREFHADGEPHLHAFVQLEANFRTTSPKYFDLDEFHPNIQAARQPASTLKYCMKHPESSWEFGKFLKPKVNRSPTQSASRDKTMKQIMANATSRDEYLSMVRKSFPFEWAVRLQQFQYSANALFPDPPQTYSAPYASRDMSDHPVIGEWLQQELYTVSPQALSLHAGISEEQARIDLQWMSDLTRSGALESGDEACTSVGQQELERLLGPEVLELITTGSTQ

SEQ ID NO: 15138 - protein, 170 aa, Chloris striate mosaic virus
MKHPESSWEFGKFLKPKVNRSPTQSASRDKTMKQIMANATSRDEYLSMVRKSFPFEWAVRLQQFQYSANALFPDPPQTYSAPYASRDMSDHPVIGEWLQQELYTVSPQALSLHAGISEEQARIDLQWMSDLTRSGALESGDEACTSVGQQELERLLGPEVLELITTGSTQ

SEQ ID NO: 15139 - protein, 272 aa, Maize streak virus
MASSSSNRQFSHRNANTFLTYPKCPENPEIACQMIWELVVRWIPKYIICAREAHKDGSLHLHALLQTEKPVRISDSRFFDINGFHPNIQSAKSVNRVRDYILKEPLAMFERGTFIPRKSPFLGKSDSEVKEKKPSKDEIMRDIISHSTSKEEYLSMIQKEFPYDWSTKLQYFEYSANKLFPEIQEEFTNPHPPSSPDLLCNESINDWLQPNIFQVSPEAYMLLQPTCYTLEDAISDLQWMDSVSRHQMKDQESRASTSSGQQEQESLLGPEA

SEQ ID NO: 15140 - protein, 272 aa, Maize streak virus
MASSSSNRQFSHRNANTFLTYPKCPENPEIACQMIWELVVRWIPKYILCAREAHKDGSLHLHALLQTEKPVRITDSRFFDINGFHPNIQSAKSVNRVRDYILKEPLAMFERGTFIPRKSPFLGKSDSEVKEKKPSKDEIMRDIISHSTSKEEYLSMIQKEFPYDWSTKLQYFEYSANKLFPEIQEEFTNPHPPSAPDLLCNESINDWLQPNIFQVSPEAYMLLQPTCYTLEDAISDLQWMDSVSSHQMKDQESRASTSSGQQEQESLLGPEA

SEQ ID NO: 15141 - protein, 272 aa, Maize streak virus
MASSSSNRQFSHRNANTFLTYPKCPENPEIACQMIWELVVRWIPKYILCAREAHKDGSLHLHALLQTEKPVRISDSRFFDINGFHPNIQSAKSVNRVRDYILKEPLAMFERGTFIPRKSPFLGKSDSEVKEKKPSKDEIMRDIISHSTSKEEYLSMIQKEFPYDWSTKLQYFEYSANKLFPEIQEEFTNPHPPSSPDLLCNESINDWLQPNIFQVSPEAYMLLQPTCYTLEDAISDLQWMDSVSSHQMKDQESRASTSSGQQEQESLLGPEA

SEQ ID NO: 15142 - protein, 272 aa, Maize streak virus
MASSSSNRQFSHRNANTFLTYPKCPENPEIACQMIWELVVRWIPKYILCAREEHKDGSLHLHALLQTEKPVRISDSRFFDINGFHPNIQSAKSVNRVRDYILKEPLAMFERGTFIPRKSPFLGKSDSEVKEKKPSKDEIMRDIISHSTSKEEYLSMIQKEFPYDWSTKLQYFEYSANKLFPEIQEEFTNPHPPSSPDLLCNESINDWLQPNIFQVSPEAYMLLQPTCYTLEDAISDLQWMDSVSSHQMKDQESRASTSSGQQEQESLLGPEA

SEQ ID NO: 15143 - protein, 272 aa, Maize streak virus
MASSSSNRQFSHRNANTFLTYPKCPENPEIACQMIWELVVRWIPKYILCAREAHKDGSLHLHALLQTEKPVRISDSRFFDINGFHPNIQSAKSVNRVRDYILKEPLAMFERGTFIPRKSPFLGKSDSEVKEKKPSKDEIMRDIISHSTSKEEYLSMIQKELPYDWSTKLQYFEYSANKLFPEIQEQFTNPHPQSSPDLLCNESINDWLQPNIFQVSPEAYMLLQPTCYTLEDAISDLQWMDNVSSHQMKDQESRASTSSAQQEQENLLGPEA

SEQ ID NO: 15144 - protein, 272 aa, Maize streak virus
MASSSSNRQFSHRNANTFLTYPKCPENPEIACQMIWELVVRWIPKYILCAREAHKDGSLHLHALLQTEKPVRISDSRFFDINGFHPNIQSAKSVNRVRDYILKEPLAMFERGTFIPRKSPFLGKSDSEVKEKKPSKDEIMRDIISHSTSKEEYLSMIQKELPYDWSTKLQYFEYSANKLFPEIQEEFTNPHPQSSPDLLCNESINDWLQPNIFQVSPEAYMLLQPTCYTLEDAISDLQWMDNVSSHQMKDQESRASTSSAQQEQENLLGPEA

SEQ ID NO: 15145 - protein, 272 aa, Maize streak virus
MASSSSNRQFSHRNANTFLTYPKCPENPEIACQMIWELVVRWIPKYILCAREAHKDGSLHLHALLQTEKPVRISDSRFFDINGFHPNIQSAKSVNRVRDYILKEPLAVFERGTFIPRKSPFLGKSDSEVKEKKPSKDEIMRDIISHATSKEEYLSMIQKELPFDWSTKLQYFEYSANKLFPEIQEEFTNPHPPSSPDLLCNESINDWLQPNIFQVSPEAYMLLQPTCYTLEDAISDLQWMDSVSSHQMKDQESRASTSSGQQEPENLLGPEA

SEQ ID NO: 15146 - protein, 272 aa, Maize streak virus
MASSSSNRQFSHRNVNTFLTYPKCPENPEIACQMIWELVVRWIPKYIVCAREAHKDGSLHLHALLQTEKPVRISDSRFFDINGFHPNIQSAKSVNRVRDYILKEPLAMFERGTFIPRKSPFLGKSDSEVKEKKPSKDEIMRDIISHSTSKEEYLSMIQKEFPYDWVTKLQYFEYSANKLFPEIQEEFTNPHPQSTPDLLCSESINDWLQPNIFQVSPEAYMLLQPTCYTLEDAISDLQWMDSVSSHQMKDQESRASTSSAQQEQENLLGPEA

SEQ ID NO: 15147 - protein, 272 aa, Maize streak virus
MASSSSNRQFSHRNANTFLTYPKCPENPEIACQMIWELVVRWIPKYILCAREAHKDGSLHLHALLQTEKPVRISDSRFFDINGFHPNIQSAKSVNRVRDYILKEPLAMFERGTFIPRKSPFLGKSDSEVKEKKPSKDEIMRDIISHSTSKEEYLSMIQKELPYDWSTKLQYFEYSANKLFPEIQEEFTNPHPPSSPDLLCNESINDWLQPNIFQVSPEAYMLLQPTCYTLEDAISDLQWMDNVSSHPMKDQESRASTSSAQQEQENLLGPEA

SEQ ID NO: 15148 - protein, 272 aa, Maize streak virus
MASSSSNRQFSHRNANTFLTYPKCPENPEIACQMIWELVVRWIPKYILCAREAHKDGSLHLHALLQTEKPVRISDSRFFDINGFHPNIQSAKSVNRVRDYILKEPLAVFERGTFIPRKSPFLGKSDSEVKEKKPSKDEIMRDIISHCTSKEEYLSMIQKELPFDWSTKLQYFEYSANKLFPEIQEEFTNPHPPSSPDLLCNESINDWLQPNIFQVSAEAYMLLQPTCYTLEDAISDLQWMDSVSSHQMKDQESRASTSSAQQEPENLLGPEA

SEQ ID NO: 15149 - protein, 272 aa, Maize streak virus
MASSSSNRQFSHRNANTFLTYPKCPENPEIACQMIWELVVRWIPKYILCAREAHKDGSLHLHALLQPEKPIRISDSRFFDINGFHPNIQSAKSVNRVRDYILKEPLAVFERGTFIPRKSPFLGKSDSEVKEKKPSKDEIMRDIISHATSKEEYLSMIQKELPFDWSTKLQYFEYSANKLFPEIQEEFTNPHPPSSPDLLCNESINDWLQPNIFQVSPEAYMLLQPTCYTLEDAISDLQWMDSVSSHQMKDQESRASTSSAQQEPENLLGPEA

SEQ ID NO: 15150 - protein, 258 aa, Maize streak virus
MASSSSNRQFSHRNANTFLTYPKCPENPEIACQMIWELVVRWIPKYIICAREAHKDGSWHLHALLQTEKPVRISDSRFFDINGFHPNIQSAKSVNRVRDYILKEPLAMFERGTFIPRKSPFLGKSDSEVKEKKPSKDEIMRDIISHSTSKEEYLSMIQKEFPYDWSTKLQYFEYSANKLFPEIQEEFTNPHPPSSPDLLCNESINDWLQPNIFQVSPEAYMLLQPTCYTLEDAISDLQWMDSVSRHQMKDQESRASTS

SEQ ID NO: 15151 - protein, 272 aa, Maize streak virus
MASSSSNRQFSHRNANTFLTYPKCPENPEIACQMIWELVVRWIPKYILCAREAHKDGSLHLHALLQTEKPVRISDSRFFDINGFHPNIQSAKSVNRVRDYILKEPLAMFERGTFIPRKSPFLGKSDSEVKEKKPSKDEIMRDIISHATSKVEYLSMIQKELPYDWSTKLQYFEYSANKLFPEIQEEFTNPHPQSSPDLLCNESINDWLQPNIFQVSPEAYMLLQPTCYTLEDAISDLQWMDNVSSHQMKDQESRASTSSAQQEQENLLGPEA

SEQ ID NO: 15152 - protein, 272 aa, Maize streak virus
MASSSSNRQFSHRNVNTFLTYPHCPENPEILCQMIWELVGRWTPKYIICAREAHRDGDMHLHALIQTEKPVRITDSRFFDIKGFHPNIQSAKSVNKVRDYILKEPLALFERGTFIPRKSSFLGNPSKGNSEKKPSKDEIMREIISHSTSKLEYLSMVRKEFPYDWATKLQYFEYSANKLFPEIQEEFISPHPPSSPDLLCNESIKDWLQPNIFQVSPESYMLLQPTCYTLEEAISDLEWMDQLSSQQMKEQESRASTSSVQHEQENLLGPEA

SEQ ID NO: 15153 - protein, 272 aa, Maize streak virus
MASSSSNRQFSHRNVNTFLTYPKCPENPEIACQMIWELVVRWIPKYIVCAREAHKDGSLHLHALLQTEKPVRISDSRFFDINGFHPNIQSAKSVNRVRDYILKEPLAVFERGTFIPRKSPFLGKSDSEVKEKKPSKDEIMRDIISHCTSKEEYLSMIQKEFPYDWATKLQYFEYSANKLFPEIQEEFTNPHPPSSPDLLCNETINDWLQPNIFQVSPQAYMLLQPNCYTLEDAISDLQWMDSVSSHQMRDQESRASTSSAQQEPENLLGPEA

SEQ ID NO: 15154 - protein, 272 aa, Maize streak virus
MASSSSNRQFSHRNANTFLTYPKCPENPEIACQMIWELVVRWIPKYILCAREAHKDGSLHLHALLQTEKPVRISDSRFFDINGFHPNIQSAKSVNRVRDYILKEPLAVFERGTFIPRKSPFLGKSDSEVKEKKPSKDEIMRDIISHATSKAEYLSMIQKELPFDWSTKLQYFEYSANKLFPEIQEEFTNPHPPSSPDLLCNESINDWLQPNIFQVSPEAYMLLQPTCYTLEDAISDLQWMDSVSSHQMKDQESRASTSSAQQEPENLLGPEA

SEQ ID NO: 15155 - protein, 272 aa, Maize streak virus
MASSSSNRQFSHRNANTFLTYPKCPENPEIACQMIWELVVRWIPKYILCAREAHKDGSLHLHALLQTEKPVRISDSRFFDINGFHPNIQSAKSVNRVRDYILKEPLAVFERGTFIPRKSPFLGKSDSEVKEKKPSKDEIMRDIISHSTSKEEYLSMIQKELPFDWSTKLQYFEYSANKLFPEIQEEFTNPHPPSQPDLLCNESINDWLQPNIFQVSPEAYMLLQPNCYTLEDAISDLQWMDSVSSHQMKDQESRASTSSAQQEPENLLGPEA

SEQ ID NO: 15156 - protein, 258 aa, Maize streak virus
MASSSSNRQFSHRNANTFLTYPKCPENPEIACQMIWELVVRWIPKYILCAREAHKDGSLHLHALLQTEKPVRISDSRFFDINGFHPNIQSAKSVNRVRDYILKEPLAMFERGTFIPRKSPFLGKSDSEVKEKKPSKDEIMRDIISHSTSKEEYLSMIQKEFPYDWSTKLQYFEYSANKLFPEIQEEFTNPHPPSSPDLLCNESINDWLQPNIFQVSPEAYMLLQPTCYTLEDAISDLQWMDSVSSHQMKDQESRASTS

SEQ ID NO: 15157 - protein, 261 aa, Maize streak virus
MASSSSNRQFSHRNANTFLTYPKCPENPEIACQMIWELVVRWIPKYILCAREAHKDGSLHLHALLQTEKPVRISDSRFFDINGFHPNIQSAKSVNRVRDYILKEPLAVFERGTFIPRKSPFLGKSDSEVKEKKPSKDEIMRDIISHATSKEEYLSMIQKELPFDWSTKLQYFEYSANKLFPEIQEEFTNPHPPSSPDLLCNESINDWLQPNIFQVSPEAYMLLQPTCYTLEDAISDLQWMDSVSSHQMKDQESRASTSSAQ

SEQ ID NO: 15158 - protein, 261 aa, Maize streak virus
MASSSSNRQFSHRNANTFLTYPKCPENPEIACQMIWELVVRWIPKYILCAREAHKDGSLHLHALLQTEKPVRISDSRFFDINGFHPNIQSAKSVNRVRDYILKEPLAVFERGTFIPRKSPFLGKSDSEVKEKKPSKDEIMRDIISHCTSKEEYLSMIQKELPFDWSTKLQYFEYSANKLFPEIQEEFTNPHPPSSPDLLCNESINDWLQPNIFQVSAEAYMLLQPTCYTLEDAISDLQWMDSVSSHQMKDQESRASTSSAQ

SEQ ID NO: 15159 - protein, 272 aa, Maize streak virus
MASSSSNRQFSHRNVNTFLTYPHCPENPEIVCQMIWELVGRWTPKYIICAREAHKDGDMHLHALVQTDKPVRITDSRFFDINGFHPNIQSAKSVNKVRDYILKEPLALFERGTFIPRESSFLGNPSKGNSEKKPSKDEIMREIISHSTSKLEYLSLVRKEFPYDWATKLQYFEYSANKLFPEIQEEFISPHPPSSPDLLCNESIKDWLQPNIYQVSPESYMLLQPTCYTLEDAISDLEWMDKLSSQQMKEQESRASTSSVQQELENLLGPEA

SEQ ID NO: 15160 - protein, 272 aa, Maize streak virus
MTSSSSNRPFSHRSPNTFLTYPQCPEQPEIISQRIWDLCSHWTPLYIICAREAHRDGNQCLHALIQTEKPVRTTDSRFFDIDGFHPNIQSAISPNKVRDYITKEPLALFERGTFIPRKKSFLGNSSKGNSDKKPSKDEIMRDIISHATSKQEYLSMVQKSLPYDWSTKLQYFEYSANKLFPDIQEEFINPHPTSEPDLLCNESIKDWLQPNIYQVSPQAYLLLQPNCYSIDDAISDLEWLDDLTSKQIMEQGSAASTSSVQQGQENLHGPEA

SEQ ID NO: 15161 - protein, 261 aa, Maize streak virus
MASSSSNRQFSHRNANTFLTYPKCPENPEIACQMIWELVVRWIPKYILCAREAHKDGSLHLHALLQTEKPVRISDSRFFDINGFHPNIQSAKSVNRVRDYILKEPLAMFERGTFIPRKSPFLGKSDSEVKEKKPSKDEIMRDIISHATSKEEYLSMIQKELPYDWSTKLQYFEYSANKLFPEIQEEFTNPHPQSSPDLLCNESINDWLQPNIFQVSPEAYMLLQPTCYTLEDAISDLQWMDSVSSHQMKDQESRASTSSAQ

SEQ ID NO: 15162 - protein, 258 aa, Maize streak virus
MASSSSNRQFSHRNANTFLTCPKCPENPEIACQMIWELVVRWIPKYILCAREAHKDGSLHLHALLQTEKPVRISDSRFFDINGFHPNIQSAKSVNRVRDYILKEPLAMFERGTFIPRKSPFLGKSDSEVKEKKPSKDEIMRDIISHSTSKEEYLSMIQKEFPYDWSTKLQYFEYSANKLFPEIQEEFTNPHPPSSPDLLCNESINDWLQPNIFQVSPEAYMLLQPTCYTLEDAISDLQWMDSVSSHQMKDQESRASTS

SEQ ID NO: 15163 - protein, 261 aa, Maize streak virus
MASSSSNRQFSHRNANTFLTYPKCPENPEIACQMIWELVVRWIPKYILCAREAHKDGSLHLHALLQTEKPVRISDSRFFDINGFHPNIQSAKSVNRVRDYILKEPLAVFERGTFIPRKSPFLGKSDSEVKEKKPSKDEIMRDIISHSTSKEEYLSMIQKELPFDWSTKLQYFEYSANKLFPEIQEEFTNPHPPSQPDLLCNESINDWLQPNIFQVSPEAYMLLQPNCYTLEDAISDLQWMDSVSSHQMKDQESRASTSSAQ

SEQ ID NO: 15164 - protein, 261 aa, Maize streak virus
MASSSSNRQFSHRNVNTFLTYPKCPENPEIACQMIWELVVRWIPKYIVCAREAHKDGSLHLHALLQTEKPVRISDSRFFDINGFHPNIQSAKSVNRVRDYILKEPLAVFERGTFIPRKSPFLGKSDSEVKEKKPSKDEIMRDIISHCTSKEEYLSMIQKEFPYDWATKLQYFEYSANKLFPEIQEEFTNPHPPSSPDLLCNETINDWLQPNIFQVSPQAYMLLQPNCYTLEDAISDLQWMDSVSSHQMRDQESRASTSSAQ

SEQ ID NO: 15165 - protein, 261 aa, Maize streak virus
MASSSSNRQFSHRNVNTFLTYPHCPENPEILCQMIWELVGRWTPKYIICAREAHRDGDMHLHALIQTEKPVRITDSRFFDIKGFHPNIQSAKSVNKVRDYILKEPLALFERGTFIPRKSSFLGNPSKGNSEKKPSKDEIMREIISHSTSKLEYLSMVRKEFPYDWATKLQYFEYSANKLFPEIQEEFISPHPPSSPDLLCNESIKDWLQPNIFQVSPESYMLLQPTCYTLEEAISDLEWMDQLSSQQMKEQESRASTSSVQ

SEQ ID NO: 15166 - protein, 271 aa, Maize streak virus
MASSSSNRSFLHRNANTFLTYPHCPENPEIISQKLWDLVARWNPLYIVCAREAHRDGNMHLHALLQTDKPVRTTDARIFDIEGFHPNIQSAKSVNKVRDYILKEPLAVFERGTFIPRKSCFQGNTPPFPKKNPNKDEIMAHIISHATSKQEYLCLVRKEFPYDWATKLQYFEYSANKLFPDIQEEFISPHPPSSPDLLCNESIKDWLQPNIYQVSPEAYMLLQPTCYTVDEAISDLTWMDNLSSQQMKDQESRASTSSVQQGQGNLLGPEV

SEQ ID NO: 15167 - protein, 272 aa, Maize streak virus
MTSSSSNRQFLHRTANTFLTYPQCPEHPEIISQRIWDLVGRWNPLYIICAQEAHEDGNMHLHALIQTDKQVRTTDSRFFDIDGFHPNIQSAMSPNKVRDYILKEPLALFERGTFVPRKKTFLGNSSKGNSEKKPSKDEIMQDIISHATSKPEYLSMVRKSFPYDWATKLQYFEYSANKLFPDIQEEFINPHPTSEPDLLCNESIKDWLQPNIYQVSPQAYMLLQPNCYTVDDAISDLQWLDDLTSKQIMDQESRASTSSVQQGQENLLGPEA

SEQ ID NO: 15168 - protein, 272 aa, Maize streak virus
MASSSSNRQFSHRNVNTFLTYPHCPENPEIVCQMIWELVGRWTPKYIICAQEAHRDGDMHLHALLQTEKPVRITDSRFFDIEGFHPNIQSAKSVNKVRDYILKEPLAVFERGTFIPRKSSFQGNPSKGNSEKKPSKDEIMREIISHSTSKLEYLSMIRKEFPYDWATKLQYFEYSANKLFPEIQEEFISPHPPSSPDLLCNESIKDWLQPNIFQVSPESYMLLQPTCYTLEDAISDLEWMDKLSSQQMKDQESRASTSSVQQELGNLLGPEA

SEQ ID NO: 15169 - protein, 272 aa, Maize streak virus
MASSSSNRQFSHRNVNTFLTYPHCPENPEIVCQMIWELVGRWTPKYIICAQEAHKDGDMHLHALLQTEKPVRITDSRFFDIEGFHPNIQSAKSVNKVRDYILKEPLAVFERGTFIPRKSSFQGNPSKGNSEKKPSKDEIMREIISHSTSKLEYLSMIRKEFPYDWATKLQYFEYSANKLFPEIQEEFISPHPPSSPDLLCNESIKDWLQPNIFQVSPESYMLLQPTCYTLEDAISDLEWMDKLSSQQMKEQESRASTSSVQQELGNLLGPEA

SEQ ID NO: 15170 - protein, 261 aa, Maize streak virus
MASSSSNRQFSHRNVNTFLTYPHCPENPEIVCQMIWELVGRWTPKYIICAQEAHKDGDMHLHALLQTEKPVRITDSRFFDIEGFHPNIQSAKSVNKVRDYILKEPLAVFERGTFIPRKSSFQGNPSKGNSEKKPSKDEIMREIISHSTSKLEYLSMIRKEFPYDWATKLQYFEYSANKLFPEIQEEFISPHPPSSPDLLCNESIKDWLQPNIFQVSPESYMLLQPTCYTLEDAISDLEWMDKLSSQQMKEQESRASTSSVQ

SEQ ID NO: 15171 - protein, 261 aa, Maize streak virus
MASSSSNRQFSHRNVNTFLTYPKCPENPEIACQMIWELVVRWIPKYIVCAREAHKDGSLHLHALLQTEKPVRISDSRFFDINGVHPNIQSAKSVNRVRDYILKEPLAMFERGTFIPRKSPFLGKSDSEVKEKKPSKDEIMRDIISHSTSKEEYLSMIQKEFPYDWVTKLQYFEYSANKPYPEIQEEFTNPHPQSTPDLLCSESINDWLQPNIFQVSPEAYMLLQPTCYTLEDAISDLQWMDSVSSHQMKDQESRASTSSAQ

SEQ ID NO: 15172 - protein, 261 aa, Maize streak virus
MTSSSSNRQFLHRTANTFLTYPQCPEHPEIISQRIWDLVGRWNPLYIICAQEAHEDGNMHLHALIQTDKQVRTTDSRFFDIDGFHPNIQSAMSPNKVRDYILKEPLALFERGTFVPRKKTFLGNSSKGNSEKKPSKDEIMQDIISHATSKPEYLSMVRKSFPYDWATKLQYFEYSANKLFPDIQEEFINPHPTSEPDLLCNESIKDWLQPNIYQVSPQAYMLLQPNCYTVDDAISDLQWLDDLTSKQIMDQESRASTSSVQ

SEQ ID NO: 15173 - protein, 411 aa, Maize streak virus
MASSSSNRGFSHRNANTFLTYPKCPENPEIACQMIWELVVRWIPKYILCAREAHKDGSLHLHALLGTEKPVRISDSRFFDINGFHPNIGSAKSVNRVRDYILKEPLAVFERGTFTIPRKSPFLGKSDSEVKEKKPSKDEIMRDIISHSTSKEEYLSMIQKELPFDWSTKLQYFEYSANKLFPEIQEEFTNPHPPSSPDLLCNESINDWLQPNIFQVSPDLLCNESINDWLQPNIFQVSPEAYMLLQPACYTLDDAISDLQWMDSVSSHQMKDQESRASTSSAQQEQENLGPEAGFIITGKIMLIGLHTTKHAIYNIVDDIPFKFCPCWKQLVGCQRDFIVNPKYGKKKKVQKKSKPTIILANSDEDWMKEMTPGQLEYFQANCIIYIMSPGEKWYSPPELPPTEAVHSDRS

SEQ ID NO: 15174 - protein, 360 aa, Maize streak virus
MASSSSNRQFSHRNVNTFLTYPKCPENPEIACQMIWELVVRWIPKYIVCAREAHKDGSLHLHALLQTEKPVRISDSRFFDINGFHPNIQSAKSVNRVRDYILKEPLAVFERGTFIPRKSPFLGKSDSEVKEKKPSKDEIMRDIISHCTSKEEYLSMIQKEFPYDWATKLQYFEYSANKLFPEIQEEFTNPHPPSSPDLLCNETINDWLQPNIFQSSDERSRKQSLYIVGPTRTGKSTWARGLGVHNYWQNNVDWSSYNEDAIYNIVDDIPFKFCPCWKQLVGCQRDFIVNPKYGKKKKVQKKSKPTIILANSDEDWMKEMTPGQLEYFEANCTIYIMSPGEKWYSPPELPPTEAVHSDRS

SEQ ID NO: 15175 - protein, 360 aa, Maize streak virus
MASSSSNRQFSHRNANTFLTYPKCPENPEIACQMIWELVVRWIPKYILCAREAHKDGSLHLHALLQTEKPVRISDSRFFDINGFHPNIQSAKSVNRVRDYILKEPLAVFERGTFIPRKSPFLGKSDSEVKEKKPSKDEIMRDIISHATSKEEYLSMIQKELPFDWSTKLQYFEYSANKLFPEIQEEFTNPHPPSSPDLLCNESINDWLQPNIFQSSDERSRKQSLYIVGPTRTGKSTWARSLGVHNYWQNNVDWSSYNEDAIYNIVDDIPFKFCPCWKQLVGCQRDFIVNPKYGKKKKVQKKSKPTIILANSDEDWMKEMTPGQLEYFEANCVIYIMSPGEKWYSPPELPPTEAVHSDRS

SEQ ID NO: 15176 - protein, 360 aa, Maize streak virus
MASSSSNRQFSHRNANTFLTYPKCPENPEIACQMIWELVVRWIPKYILCAREAHKDGSLHLHALLQTEKPVRISDSRFFDINGFHPNIQSAKSVNRVRDYILKEPLAVFERGTFIPRKSPFLGKSDSEVKEKKPSKDEIMRDIISHSTSKEEYLSMIQKELPFDWSTKLQYFEYSANKLFPEIQEEFTNPHPPSQPDLLCNESINDWLQPNIFQSSDERSRKQSLYIVGPTRTGKSTWARSLGVHNYWQNNVDWSSYNEDAIYNIVDDIPFKFCPCWKQLVGCQRDFIVNPKYGKKKKVQKKSKPTIILANSDEDWMKEMNPGQLDYFEANCIIYIMSPGEKWYSPPELPPTEAVHSDRS

SEQ ID NO: 15177 - protein, 360 aa, Maize streak virus
MASSSSNRQFSHRNANTFLTYPKCPENPEIACQMIWELVVRWIPKYILCAREAHKDGSLHLHALLQTEKPVRISDSRFFDINGFHPNIQSAKSVNRVRDYILKEPLAMFERGTFIPRKSPFLGKSDSEVKEKKPSKDEIMRDIISHSTSKEEYLSMIQKELPYDWSTKLQYFEYSANKLFPEIQEEFTNPHPPSSPDLLCNESINDWLQPNIFQSSDERSRKQSLYIVGPTRTGKSTWARSLGVHNYWQNNVDWSSYNEDAIYNIVDDIPFKFCPCWKQLVGCQRDFIVNPKYGKKKKVQKKSKPTIILANSDEDWMKEMTPGQLEYFEANCVIYIMSPGEKWYSPPELPPTEAVHSDRS

SEQ ID NO: 15178 - protein, 360 aa, Maize streak virus
MASSSSNRQFSHRNANTFLTYPKCPENPEIACQMIWELVVRWIPKYILCAREAHKDGSLHLHALLQTEKPVRISDSRFFDINGFHPNIQSAKSVNRVRDYILKEPLAMFERGTFIPRKSPFLGKSDSEVKEKKPSKDEIMRDIISHSTSKEEYLSMIQKELPYDWSTKLQYFEYSANKLFPEIQEEFTNPHPQSSPDLLCNESINDWLQPNIFQSSDERSRKQSLYIVGPTRTGKSTWARSLGVHNYWQNNVDWSSYNEDAIYNIVDDIPFKFCPCWKQLVGCQRDFIVNPKYGKKKKVQKKSKPTIILANSDEDWMKEMTPGQLEYFEANCVIYIMSPGEKWYSPPELPPTEAVHSDRS

SEQ ID NO: 15179 - protein, 360 aa, Maize streak virus
MASSSSNRQFSHRNVNTFLTYPKCPENPEIACQMIWELVVRWIPKYIVCAREAHKDGSLHLHALLQTEKPVRISDSRFFDINGFHPNIQSAKSVNRVRDYILKEPLAMFERGTFIPRKSPFLGKSDSEVKEKKPSKDEIMRDIISHSTSKEEYLSMIQKEFPYDWVTKLQYFEYSANKLFPEIQEEFTNPHPQSTPDLLCSESINDWLQPNIFQSSDERSRKQSLYIVGPTRTGKSTWARSLGVHNYWQNNVDWSSYNEDAIYNIVDDIPFKFCPCWKQLVGCQRDFIVNPKYGKKKKVQKKSKPTIILANSDEDWMKEMTPGQLEYFEANCVIWIMSPGEKWYSPPELPPTEAVHSDRS

SEQ ID NO: 15180 - protein, 355 aa, Maize streak virus
MASSSSNRQFSHRNANTFLTYPKCPENPEIACQMIWELVVRWIPKYILCAREAHKDGSLHLHALLQTEKPVRISDSRFFDINGFHPNIQSAKSVNRVRDYILKEPLAVFERGTFIPRKSPFLGKSDSEVKEKKPSKDEIMRDIISHCTSKEEYLSMIQKELPFDWSTKLQYFEYSANKLFPEIQEEFTNPHPPSSPDLLCNESINDWLQPNIFQSSDERSRKQSLYIVGPTRTGKSTWARSLGVHNYWQNNVDWSSYNEDAIYNIVDDIPFKFCPCWKQLVGCQRDFIVNPKYGKKKKVQKKSKPTIILANSDEDWMKEMTPGQLEYFEANCIIYIMSPGEKWYSPPVLPPTEEV

SEQ ID NO: 15181 - protein, 360 aa, Maize streak virus
MASSSSNRQFSHRNANTFLTYPKCPENPEIACQMIWELVVRWIPKYILCAREAHKDGSLHLHALLQTEKPVRISDSRFFDINGFHPNIQSAKSVNRVRDYILKEPLAMFERGTFIPRKSPFLGKSDSEVKEKKPSKDEIMRDIISHATSKVEYLSMIQKELPYDWSTKLQYFEYSANKLFPEIQEEFTNPHPQSSPDLLCNESINDWLQPNIFQSSDERSRKQSLYIVGPTRTGKSTWARSLGVHNYWQNNVDWSSYNEDAIYNIVDDIPFKFCPCWKQLVGCQRDFIVNPKYGKKKKVQKKSKPTIILANSDEDWMKEMTPGQLEYFEANCVIYIMSPGEKWYSPPELPPTEAVHSDRS

SEQ ID NO: 15182 - protein, 355 aa, Maize streak virus
MASSSSNRQFSHRNVNTFLTYPHCPENPEIVCQMIWELVGRWTPKYIICAREAHKDGDMHLHALVQTDKPVRITDSRFFDINGFHPNIQSAKSVNKVRDYILKEPLALFERGTFIPRESSFLGNPSKGNSEKKPSKDEIMREIISHSTSKLEYLSLVRKEFPYDWATKLQYFEYSANKLFPEIQEEFISPHPPSSPDLLCNESIKDWLQPNIYQPTDERTRKQSLYIVGPTRTGKSTWARSLGVHNYWQNNVDWSSYNEDAIYNIVDDIPFKYCPCWKQLVGCQKEFVVNPKYGKKKKVQMKSKPTIILANSDEDWMKEMTPGQLEYFEANCMIYIMSPGEKWYSPPVLPPTEAV

SEQ ID NO: 15183 - protein, 355 aa, Maize streak virus
MASSSSNRQFSHRNVNTFLTYPHCPENPEILCQMIWELVGRWTPKYIICAREAHRDGDMHLHALIQTEKPVRITDSRFFDIKGFHPNIQSAKSVNKVRDYILKEPLALFERGTFIPRKSSFLGNPSKGNSEKKPSKDEIMREIISHSTSKLEYLSMVRKEFPYDWATKLQYFEYSANKLFPEIQEEFISPHPPSSPDLLCNESIKDWLQPNIFQPTDEGTRKQSLYIVGPTRTGKSTWARSLGLHNYWQNNVDWSSYNEDAIYNIVDDIPFKFCPCWKQLVGCQKEFVVNPKYGKKKKVQMKSKPTIILTNWDEDWMKEMTPGQMEYFEANCMIYKMSPGEKWYSPPVLPPTEEV

SEQ ID NO: 15184 - protein, 355 aa, Maize streak virus
MTSSSSNRQFLHRTANTFLTYPQCPEHPEIISQRIWDLVGRWNPLYIICAQEAHEDGNMHLHALIQTDKQVRTTDSRFFDIDGFHPNIQSAMSPNKVRDYILKEPLALFERGTFVPRKKTFLGNSSKGNSEKKPSKDEIMQDIISHATSKPEYLSMVRKSFPYDWATKLQYFEYSANKLFPDIQEEFINPHPTSEPDLLCNESIKDWLQPNIYQQADNGSRKQSLYIVGPTRTGKSTWARSLGRHNYWQNNVDWSSYNEDAIYNIVDDIPFKYCPCWKQLVGCQKEFVVNPKYGKKKKVQMKSKPTIILANSDEDWMKEMTPGQLEYFEANCMIYIMSPGEKWYSPPQLPPTEEV

SEQ ID NO: 15185 - protein, 354 aa, Maize streak virus
MASSSSNRSFLHRNANTFLTYPHCPENPEIISQKLWDLVARWNPLYIVCAREAHRDGNMHLHALLQTDKPVRTTDARIFDIEGFHPNIQSAKSVNKVRDYILKEPLAVFERGTFIPRKSCFQGNTPPFPKKNPNKDEIMAHIISHATSKQEYLCLVRKEFPYDWATKLQYFEYSANKLFPDIQEEFISPHPPSSPDLLCNESIKDWLQPNIYQPADEGSRKQSLYIVGPTRTGKSTWARSLGLHNYWQNNVDWSSYNEDAIYNIVDDIPFKYCPCWKQLVGCQKEFVVNPKYGKKKKVQMKSKPTIILANSDEDWMKEMTPGQLEYFEANCMIYVMSPGEKWYSPPQLPPTEEV

SEQ ID NO: 15186 - protein, 355 aa, Maize streak virus
MASSSSNRQFSHRNVNTFLTYPHCPENPEIVCQMIWELVGRWTPKYIICAQEAHKDGDMHLHALLQTEKPVRITDSRFFDIEGFHPNIQSAKSVNKVRDYILKEPLAVFERGTFIPRKSSFQGNPSKGNSEKKPSKDEIMREIISHSTSKLEYLSMIRKEFPYDWATKLQYFEYSANKLFPEIQEEFISPHPPSSPDLLCNESIKDWLQPNIFQPTDEGTRKQSLYIVGPTRTGKSTWARSLGLHNYWQNNVDWSSYNEDAIYNIVDDIPFKFCPCWKQLVGCQKEFVVNPKYGKKKKVQMKSKPTIILANWDEDWMNEMTPGQLEYFEANCMIYKMSPGEKWYSPPVLPPTEEV

SEQ ID NO: 15187 - protein, 355 aa, Maize streak virus
MASSSSNRQFSHRNVNTFLTYPHCPENPEIVCQMIWELVGRWTPKYIICAQEAHRDGDMHLHALLQTEKPVRITDSRFFDIEGFHPNIQSAKSVNKVRDYILKEPLAVFERGTFIPRKSSFQGNPSKGNSEKKPSKDEIMREIISHSTSKLEYLSMIRKEFPYDWATKLQYFEYSANKLFPEIQEEFISPHPPSSPDLLCNESIKDWLQPNIFQPTDEGSRKQSLYIVGPTRTGKSTWARSLGLHNYWQNNVDWSSYNEDAIYNIVDDIPFKYCPCWKQLVGCQKEFVVNPKYGKKKKVQMKSKPTIILANWDEDWMNEMTPGQLEYFEANCMIYKMSPGEKWYSPPMLPPTEEV

SEQ ID NO: 15188 - protein, 272 aa, Maize streak virus (Kenyan isolate)
MASSSSNRQFSHRNANTFLTYPKCPENPEIACQMIWELVVRWIPKYILCAREAHKDGSLHLHALLQTEKPVRISDSRFFDINGFHPNIQSAKSVNRVRDYILKEPLAVFERGTFIPRKSPFLGKSDSEVKEKKPSKDEIMRDIISHSTSKEEYLSMIQKELPFDWSTKLQYFEYSANKLFPEIQEEFTNPHPPSSPDLLCNESINDWLQPNIFQVSPEAYMLLQPACYTLDDAISDLQWMDSVSSHQMKDQESRASTSSAQQEQENLLGPEA

SEQ ID NO: 15189 - protein, 272 aa, Maize streak virus (Nigerian isolate)
MASSSSNRQFSHRNANTFLTYPKCPENPEIACQMIWELVVRWIPKYILCAREAHKDGSLHLHALLQTEKPVRISDSRFFDINGFHPNIQSAKSVNRVRDYILKEPLAVFERGTFIPRKSPFLGKSDSEVKEKKPSKDEIMRDIISHATSKEEYLSMIQKELPFDWSTKLQYFEYSANKLFPEIQEEFTNPHPPSSPDLLCNESINDWLQPNIFQVSPEAYMLLQPTCYTLEDAISDLQWMDSVSSHQMKDQESRASTSSAQQEPENLLGPEA

SEQ ID NO: 15190 - protein, 217 aa, Miscanthus streak virus
MRAPASSAASNRPGPSNHPTPRWNSKQFFLTYPHCNLTPSELMKELFSRLTEKIPGYIKVSQEFHKDGDPHLHVLIQLNTKLCTRNPKFFDVQGFHPNIQPVRDAEKVFGYISKTNGDSDEMGELQLRIKKPEKPTRDQRMAMIIASSTNRNEYLSMVRKEFPFDWAIRLQQFEYSAAALFTEPPPVYQSPFPNEQIVCPPELVDIIDQEWNQVTTD

SEQ ID NO: 15191 - protein, 217 aa, Miscanthus streak virus
MRAPASSAASNRPGPSNHPTPRWNSKQFFLTYPHCNLTPSELMKELFSRLTEKIPGYIKVSQEFHKDGDPHLHVLIQLNTKLCTRNPKFFDVQGFHPNIQPVRDAEKVFGYISKTNGDSDEMGELQLRNKKPEKPTRDQRMAMIIASSTNRNEYLSMVRKEFPFDWAIRLQQFEYSAAALFTEPPPVYQSPYPNEQIVCPPELVDIIDQEWNQVTTD

SEQ ID NO: 15192 - protein, 324 aa, Panicum streak virus
MSTSLSITSDGRHSVRSFRHRNANTFLTYSKCPLEPEFIGEHLFRLTKDFEPAYILVVRETHQDGTWHCHALLQCIKPVTTRDERYFDIDRYHPNIQSAKSTDKVREYILKDPKDKWEKGTYIPRKKSFVPPGKENSEKKPSKDEVMKEIMTHATSRAEYLSLVQTSLPYDWATKLSYFEYSASRLFPDIAEPYSNPHPATDPDLLCNETLQDWLEPNIYQVSPKAYMLLEPSCLSLEQAKADLEWLSETTRLFQEQESEASTSSAQHGQVKHPGPEASDGTTTGRITSTGLHTMKKLRTMSWTTFPSSSVRAGSSSSAVKKTT

SEQ ID NO: 15193 - protein, 208 aa, potato yellow mosaic virus
MPRKGSFSIKAKNYFLTYPHCSLSKEDALSQIQNLNIPVNKKFIKICRELHENGEPHLHVLIQFEGKFNCTNNRLFDLVSPTWSTHFHPNIQGAKSSSDVKSYVEKDGDTIEWGLFQIDGRSARGGQQTSNDAAAEALNSGAKEEAMKIIKEKLPEKFLFQYHNLSSNLDRIFMKAPKPWAPPFPLSSFTNIPDEMQEWADEYFGRGA

SEQ ID NO: 15194 - protein, 289 aa, potato yellow mosaic virus
MPRKGSFSIKAKNYFLTYPHCSLSKEDALSQIQNLNIPVNKKFIKICRELHENGEPHLHVLIQFEGKFNCTNNRLFDLVSPTWSTHFHPNIQGAKSSSDVKSYVEKDGDTIEWGLFQIDGRSARGGQQTSNDAAAEALNSGTKEEAMKIIKEKLPEKFLFQYHNLSSNLDRIFMKAPKPWAPPFPLSSFTNVPDEMQEWADEYFGRGAAARPDRPISIIIEGDSRTGKTMWARVLGPHNYLSGHLDFNSRVYSNEVEYNVIDDVAPQYLKLKHWEDNVGLQMHREDNVG

SEQ ID NO: 15195 - protein, 361 aa, potato yellow mosaic virus
MPRKGSFSIKAKNYFLTYPQCSISKEEALSQLQNLTIPVNKKFIKICRELHENGEPHLHVLIQFEGKYNCTNNRLFDLVSPTRSTHFHPNIQGAKSSSDVKSYVEKDGDTIEWGLFQIDGRSARGGQQTVNDAAAEALNSGTKEAAMKIIKEKLPEKFLFQYHNLSCNLDRIFMKAPETWAPPFPLSSFTNVPDEMQEWADGYFGKSSAARPERPISIIIEGDSRRGKTMWARVLGPHNYLSGHLDFNPRVYSNEVEYNVIDDVAPQYLKLKHWKELLGAQRDWQSNCKYGKPVQIKGGIPSIVLCNPGEGSSYKAFLDKDENASLKNWTLKNAVFITITAPLYQEGTQASKEEGNQEETH

SEQ ID NO: 15196 - protein, 359 aa, squash leaf curl virus
MAPPKRFRIQAKNYFLTYPKCSLTKEEALSQLQTLETPTSKKFIKICRELHEDGSPHIHVLIQFEGKFVCTNNRFFDLVSPSRSAHFHPNIQGAKSSSDVKSYIDKDGDTLEWGKFQVDGRSARGGQQSANDTAAKALNSGSAEAALAIIREELPKDFIFQYHNIKNNLDRIFAPPVEVYVSPFSISSFDKVPQELVDWVSGNVVCSARPIRPIGIVLEGDSRTGKTAWARSLGTQLLVRPLDLSPKVYSNDAWYNVIDDVDPHYLKHFKEFMGAQRDWQSNTKYGKPVMIKGGIPTIFLCNPGPNSSYKEYLDEDKNAALKQWALKNAIFITLEEPLYSGRERIATAEEEEEHQAQTN

SEQ ID NO: 15197 - protein, 347 aa, squash leaf curl virus
MPRNPNSFRLTARNIFLTYPRCDVPKEEVLEMLLHLSWSVVKPNYVRVAREEHSDGSPHLHCLIQLSGKSNIKDAGFFDLTHPRRSARFHPNIQAAKDTNAVKNYITKEGDYCESGQYKVSGGSKSNKDDVYHNAVNAGSAGEALDIIKAGDPKTFIVNYHNLLANVERLFQKPPEPWVPPFELSSFTSVPEELQDWADDYFNECSAAARPTSIIIEGGSRTGKTMWARSLGPHNYLSGHLDFNSRVFSNDVKYNVIDDVAPHYLKLKHWKELIGAQRDWQSNCKYGKPVQIKGGIPSIVLCNPGEGSSYKDFLDKAENSALREWTEKNAKFIFLEGPLYQSTAQDC

SEQ ID NO: 15198 - protein, 348 aa, squash leaf curl virus
NMPRNPNSFRLTARNIFLTYPRCDVPKEEVLEMLLHLSWSVVKPNYVRVAREEHSDGSPHLHCLIQLSGKSNIKDAGFFDLTHPRRSARFHPNIQAAKDTNAVKNYITKEGDYCESGQYKVSGGSKSNKDDVYHNAVNAGSAGEALDIIKAGDPKTFIVNYHNLLANVERLFQKPPEPWVPPFELSSFTSVPEELQDWADDYFNECSAAARPTSIIIEGGSRTGKTMWARSLGPHNYLSGHLDFNSRVFSNDVKYNVIDDVAPHYLKLKHWKELIGAQRDWQSNCKYGKPVQIKGGIPSIVLCNPGEGSSYKDFLDKAENSALREWTEKNAKFIFLEGPLYQSTAQDC

SEQ ID NO: 15199 - protein, 295 aa, tobacco yellow dwarf virus
MPSAPQKTKSFRLQTKYVFLTYPRCSSSAENLRDFLWDKLSRFAIFFIAIATELHQDGTPHLHCLIQLDKRSNIRDPSFFDLEGNHPNIQPAKNSEQVLEYISKDGNVITKGEFKKHRVSPSKSDERWRTIIQTATSKEEYLDMIKDEFPHEWATKLQWLEYSANKLFPPQPEIYQATFTEEDLQCHEDLQLWRDQHLYHVSVDAYRLVHNVTLVEAHSDLVWMDDISRNLEGLEPGSPPSTSADQVVPERQHGPEASEGTITGMGPSTSLSMMTTRPTTSSTTSPSNSSHSGSN

SEQ ID NO: 15200 - protein, 337 aa, tobacco yellow dwarf virus
MPSAPQKTKSFRLQTKYVFLTYPRCSSSAENLRDFLWDKLSRFAIFFIAIATELHQDGTPHLHCLIQLDKRSNIRDPSFFDLEGNHPNIQPAKNSEQVLEYISKDGNVITKGEFKKHRVSPSKSDERWRTIIQTATSKEEYLDMIKDEFPHEWATKLQWLEYSANKLFPPQPEIYQATFTEEDLQCHEDLQLWRDQHLYHEPRRAGTRIPSLYICGPSRTGKTTWARSLGRHNYWNGTIDFTVYDDHATYNVIDDIPFKFVPLWKQLIGCQSDFTVNPKYGKKKKIKGGVPCIILCNDDEDWLKNMSPAQIEYFEANCITHFMYAAETFFAPESSSH

SEQ ID NO: 15201 - protein, 352 aa, tomato golden mosaic virus
MPSHPKRFQINAKNYFLTYPQCSLSKEESLSQLQALNTPINKKFIKICRELHEDGQPHLHVLIQFEGKYCCQNQRFFDLVSPTRSAHFHPNIQRAKSSSDVKTYIDKDGDTLVWGEFQVDGRSARGGCQTSNDAAAEALNASSKEEALQIIREKIPEKYLFQFHNLNSNLDRIFDKTPEPWLPPFHVSSFTNVPDEMRQWAENYFGKSSAARPERPISIIIEGDSRTGKTMWARSLGPHNYLSGHLDLNSRVYSNKVEYNVIDDVTPQYLKLKHWKELIGAQRDWQTNCKYGKPVQIKGGIPSIVLCNPGEGASYKVFLDKEENTPLKNWTFHNAKFVFLNSPLYQSSTQSS

SEQ ID NO: 15202 - protein, 359 aa, tomato yellow leaf curl virus
MAQPKRFQINAKHYFLTFPKCCLTKEEALEQLLKLQTPTNKKYIKICRELHEDGQPHLHILMQFEGKFNCKNNRFFDLVSPTRSAHFHPNIQGAKSSSDVKSYIDKDGDVLEWGTFQIDGRSARGGQQTANDAYAKAINARSKSEALDVIKQLAPRDYVLHFHNISSNLDKVFQVPPAPYVSPFLSSSFDQVPEELEHWVSENVMDVAARPWRPVSIVIEGDSRTGKTMWARSLGPHNYLCGHLDLSQKVYSNNAWYNVIDDVDPHYLKHFKEFMGAQRDWQSNTKYGKPIQIKGGIPTIFLCNPGPQSSFKEYLDEEKNQALKNWAVKNAIFVTIDQPLFTDTHQNTTPHRQEEAGEE

SEQ ID NO: 15203 - protein, 359 aa, tomato yellow leaf curl virus
MAPPKRFQINCKNYFLTYPKCSLTKEEALSQLKDLETPTNKKYIKVCRELHENGEPHLHVLIQFEGKFKCQNQRFFDLVSPSRAAHFHPNIQGAKSSSDVKSYVDKDGDTVDWGEFQIDGRSARGGQQSANNAYAAALNSGSKSEALRIIKELMPKDYILQFHNLNSNLDRIFQEPPAPYISPLLSSSFNQVPDELEVWVSENVVSSAARPWRPNSIVIEGDSRTGKTMWARSLGPHNYLCGHLDLSPKVYSNDAWYNVIDDVDPHYLKHFKEFMGAQRDWQSNTKYGKPIQIKGGIPTIFLCNPGPTSSYREYLDEEKNISLKNWALKNATFVTLYEPLFACINQGPTQDSQEETNKA

SEQ ID NO: 15204 - protein, 357 aa, tomato yellow leaf curl virus
MPRLFKIYAKNYFLTYPNCSLSKEEALSQLKNLETPTNKKYIKVCRELHENGEPHLHVLIQFEGKYQCKNQRFFDLVSPNRSAHFHPNIQAAKSSTDVKTYVEKDGDFIDFGVFQIDGRSARGGQQSANDAYAEALNSGNKSEALNILKEKAPKDYILQFHNLSSNLDRIFSPPLEVYVSPFLSSSFNQVPDELEEWVAENVVSSAARPWRPNSIVIEGDSRTGKTMWARSLGPHNYLCGHLDLSPKVYSNDAWYNVIDDVDPHYLKHFKEFMGAQRDWQSNTKYGKPIQIKGGIPTIFLCNPGPTSSYREYLDEEKNISLKNWALKNATFVTLYEPLFASINQGPTQDSQEETNKA

SEQ ID NO: 15205 - protein, 242 aa, tomato yellow leaf curl virus
MAPPNKFRINAKNYFLTYPHCSLTKEEALSQIKTLETPVNKLFIRICRELHEDGSPHLHVLIQFEGKFQCKNQRFFDLTSPHRSAHFHPNIQGAKSSTDVKSYMEKDGDVLDHGVFQIDGRSARGGCQSANDAYAEAINSGSKASALNILREKAPKDFVLQFHNLNSNLDRIFTPPIVEYISPFSSSSFDQVPEELDEWAVDNVVSAAARPLRPVSIVIEGDSRTGKTMWARSLGPHEEYVD

SEQ ID NO: 15206 - protein, 357 aa, tomato yellow leaf curl virus
MPRLFKIYAKNYFLTYPNCSLSKEEALSQLKNIETPTNKKYIKVCREFHENGEPHLHVLIQFEGKYQCKNQRFFDLVSPNRSAHFHPNIQAAKSSTDVKTYVEKDGDFIDFGVFQIDGRSARGGQQSANDAYAEALNSGSKSEALNILKEKAPKDYILQFHNLSSNLDRIFSPPLEVYVSPFLSSSFNQVPDELEEWVAENVVSSAARPWRPISIVIEGNSRTGKTMWARSLGPHNYLCGHLDLSPKVYSNDAWYNVIDDVDPHYLKHFKEFMGAQRDWQSNTKYGKPIQIKGGIPTIFLCNPGPTSSYREYLDEEKNISLKNWALKNATFVTLYEPLFASINQGPTQDSQEETNKA

SEQ ID NO: 15207 - protein, 229 aa, tomato yellow leaf curl virus
MPRLFKIYAKNYFLTYPNCSLSKEEALSQLKNIETPTNKKYIKVCREFHENGEPHLHVLIQFEGKYQCKNQRFFDLVSPNRSAHFHPNIQAAKSSTDVKTYVEKDGDFIDFGVFQIDGRSARGGQQSANDAYAEALNSGSKSEALNILKEKAPKDYILQFHNLSSNLDRIFSPPLEVYVSPFLSSSFNQVPDELEEWVAENVVSSAARPWRPISIVIEGDSRTGKTMWA

SEQ ID NO: 15208 - protein, 357 aa, tomato yellow leaf curl virus
MPRLFKIYAKNYFLTYPNCSLSKEEALSQLKKLETPTNKKYIKVCKELHENGEPHLHVLIQFEGKYQCKNQRFFDLVSPNRSAHFHPNIQAAKSSTDVKTYVEKDGNFIDFGVSQIDGRSARGGQQSANDAYAEALNSGSKSEALNILKEKAPKDYILQFHNLSSNLDRIFSPPLEVYVSPFLSSSFNQVPDELEEWVAENVVYSAARPWRPISIVIEGDSRTGKTMWARSLGPHNYLCGHLDLSPKVYSNDAWYNVIDDVDPHYLKHFKEFMGAQRDWQSNTKYGKPIQIKGGIPTIFLCNPGPTSSYREYLDEEKNISLKNWALKNATFVTLYEPLFASINQGPTQDSQEETNKA

SEQ ID NO: 15209 - protein, 349 aa, tomato yellow leaf curl virus
MPSLNKFRINAKNYFLTYPQCSLSKEETLSQLKELQTPTSKKYIKICRELHEDGSPHLHVLIQFEGKFQCKNNRFFDLVSPTRSAHFHPNVQGAKSSSDVKSYLEKDGDTIEWGEFQVDGRSARGGQQSANDAYAKAINCGSKSEALAVLKELAPKDYVLQYHNLNANLDRIFAPIQELFVNPYELSSFNQVPKELASWAEKNVCDAAARPWRPIGMVIEGESRTGKTMWARSLGPHNYLCGHLDLSPKVYSNDAWYNVIDDVDPHYLKHLKEFMGAQRDWQSNTKYGKPIQIKGGIPTIFLCNPGPSSSFKEFLDEPKNEALKNWALKNAEFVTLQQPLYNCTSQSTT

SEQ ID NO: 15210 - protein, 349 aa, tomato yellow leaf curl virus
MPSLNKFRINAKNYFLTYPQCSLSKEETLSQLKELQTPTSKKYIKICRELHEDRSPHLHVLIQFEGKFQCKNNRFFDLVSPTRSAHFHPNVQGAKSSSDVKSYLEKDGDTIEWGEFQIDGRSARGGQQSANDAYAKAINCGSKSEALAVLKELAPKDYVLQYHNLNANLDRIFAPIQELFVNPYELSSFNQVPEELASWAEKNVCDAAARPWRPIGIVIEGESRTGKTMWARSLGPHNYLCGHLDLSPKVYSNDAWYNVIDDVDPHYLKHLKEFMGAQRDWQSNTKYGKPIQIKGGIPTIFLCNPGPSSSFKEFLDEPKNEALKNWALKNAEFVTLQQPLYNCTSQSTT

SEQ ID NO: 15211 - protein, 80 aa, tomato yellow leaf curl virus
MPRLFKIYAKNYFLTYPNCSLSKEEALSQLKNIETPTNKKYIKVCREFHENGEPHLHVLIQFEGKYQCKNQRFFDLVSPN

SEQ ID NO: 15212 - protein, 361 aa, tomato mottle virus
MPPPKKFRVQSKNYFLTYPQCSLSKEEALSQLQNLNTPVNKKFIKICRELHENGEPHLHVLVQFEGKYQCTNNRFFDLVSPTRSAHFHPNIQGAKSSSDVKSYIDKDGDTIEWGDFQIDGRSARGGQQSANDSYAKALNASSVQSALAVLREEQPKDFVLQNHNIRSNLERIFAKAPEPWVPPFQVSSFTNVPDEMQEWADNYFGTGAAARPERPVSIIVEGDSRTGKTMWARALGPHNYLSGHLDFNGRVFSNDVQYNVIDDIAPHYLKLKHWKELLGAQKDWQSNCKYGKPVQIKGGIPAIVLCNPGEGASYKEFLDKAENTGLKNWTVKNAIFITLTAPLYQDSTQASQETGNQKAQG

SEQ ID NO: 15213 - protein, 361 aa, tomato mottle virus
MPPPKKFRVQSKNYFLTYPQCSLSKEEALSQLQNLNTPVNKKFIKICRELHENGEPHLHVLVQFEGKYQCTNNRFFDLVSPTRSAHFHPNIQGAKSSSDVKSYIDKDGDTIEWGDFQIDGRSARGGQQSANDSYAKALNAGSVQSALAVLREEQPKDFVLQNHNIRSNLERIFAKAPEPWVPPFQVSSFTNVPDEMQEWADNYFGTGDAAPPDRPVSIIVEGDSRTGKTMWARALGPHNYLSGHLDFNGRVFSNDVQYNVIDDIAPHYLKLKHWKELLGAQKDWQSNCKYGKPVQIKGGIPAIVLCNPGEGASYKEFLDKAENTGLKNWTIKNAIFITLTAPLYQESTQASQETGNQKAQG

SEQ ID NO: 15214 - protein, 358 aa, tomato mottle virus
PKKFRVQSKNYFLTYPQCSLSKEEALSQLQNLNTPVNKKFIKICRELHENGEPHLHVLVQFEGKYQCTNNRFFDLVSPTRSAHFHPNIQGAKSSSDVKSYIDKDGDTIEWGDFQIDGRSARGGQQSANDSYAKALNAGSVQSALAVLREEQPKDFVLQNHNIRSNLERIFAKAPEPWVPPFQVSSFTNVPDEMQEWADNYFGTGDAAPPDRPVSIIVEGDSRTGKTMWARALGPHNYLSGHLDFNGRVFSNDVQYNVIDDIAPHYLKLKHWKELLGAQKDWQSNCKYGKPVQIKGGIPAIVLCNPGEGASYKEFLDKAENTGLKNWTIKNAIFITLTAPLYQESTQASQETGNQKAQG

SEQ ID NO: 15215 - protein, 314 aa, sugarcane streak virus
MSTVGSTVSSTPSRRFKHRNVNTFLTYSRCPLEPEAVGLHIWSLIAHWTPVYVLSVRETHEDGGYHIHVLAQSAKPVYTTDSGFFDIDGFHPNIQSAKSANKVRAYAMKNPVTYWERGTFIPRKTSFLGDSTEPNSKKQSKDDIVRDIIEHSTNKQEYLSMIQKALPYEWATKLQYFEYSANKLFPDIQEIYTSPFPQSTPALLDPTAINTWLENNLYQVSPSAYMLANPSCLTLEEATSDLIWMHETSRTLIPTGSSACTSSGQQEQASPPGPGAWEDIITGRTTSTGPPTTRTQNTTSSTTYPSSTVHAGSN

SEQ ID NO: 15216 - protein, 266 aa, Digitaria streak virus
MAANRSFRHRNANTFLTYSKCDHSPQLIADHLWDLLKSWNPIYILVASEHHADGSLHSHALVQTEKQVNTTNQRFFDILEFHPNIQSAKSVNKVRTYILKNPVEKFERGTFVPRKSPFLGESSSSEKKHNKDDVMRDIIDHATSKEEYLSMVQKALPYDWATKLSYFEYSADRLFPVEAAPFINPHPPSEPDLLCQETITDWLQNDLFQVSAEAYCLLNPTCYTREEAISDLQWMSDYTRSRMGSENAASTSSVQQELESLLGPEA

SEQ ID NO: 15217 - protein, 361 aa, bean dwarf mosaic virus
MPPPKKFRVQSRNYFLTYPQCSLTKEEALSQIQNLKTPVNKKFIKICRELHEDGEPHLHVLIQFEGKYQCTNNRFFDLVSPTRSAHFHPNIQGAKSSSDVKSYIDKDGDTVEWGVFQIDGRSARGGQQSANDTYAKALNAGSAEQALRIIKEEQPQHFFLQHHNLVANATSIFKKAPEPWVPPFPLSSSTNVPDEMQEWADDYFGRGSAARPERPVSLIVEGDSRTGKTMWARALGPHNYLSGHLDFNSKVFTDEVEYNVIDDVAPHYLKLKHWKELIGAQKNWQSNCKYGKPVQIKGGIPSIVLCNPGEGASYKDFLNKEENTALRNWTLKNAIFITLDSTLYQEGTQASQAAGDQETPH

SEQ ID NO: 15218 - protein, 361 aa, bean golden mosaic virus
MPPPKRFKINAKNYFLTYPQCSITKESAIEQLQNLQTPVNKKYIRICREIHENGEPHLHALIQFEGKFQCTNCRVFDLKHPTTSSVSHANIQSAKSSSDVKSYIEKDGDYIEWGHFQVDGRSARGGQQTANDAASEALNASSKEEAMQIIKEKLPEKFLFQYHNLSSNLDRIFTKAPDPWSPPYHLSSFTNVPREMQEWADDYFGRGAAARPERPISIIIEGDSRTGKTMWARALGTHNYLSGHLDFNSKVFSNHAEYNVIDDIAPHYLKLKHWKELMGAQKDWQSNCKYGKPVQIKGGIPSIVLCNPGEGASYKCFLDKEENAALKNWTIHNAKFIFLNSPLYQSSTQSCEETSNQTTSR

SEQ ID NO: 15219 - protein, 353 aa, bean golden mosaic virus
MPPPQRFRVQSKNYFLTYPRCTIPKEEALSQLQKIHTTTNKKFIKVCEERHDNGEPHLHALIQFEGKFICTNKRLFDLVSTTRSAHFHPNIQGAKSSSDVKEYIDKDGVTIEWGQFQVDGRSARGGQQSANDSYAKALNADSIESALTILKEEQPKDYVLQNHNIRSNLERIFFKVPEPWVPPFPLSSFVNIPVVMQDWVDDYFGRGSAARPERPISIIVEGDSRTGKTMWARALGPHNYLSGHLDFNSLVYSNSVEYNVIDDITPNYLKLKDWKELIGEQKDWQSNCKYGKPVQIKGGIPSIVLCNPGEGSSYKDFLNKEEKPALHNWTIHNAIFVTLTAPLYQSTAQDCQT

SEQ ID NO: 15220 - protein, 162 aa, bean golden mosaic virus
MPPPKRFKVSAKNYFLTYPQCSITKECALEQLQLIETPVNKKYIRICRELHDNGEPHLHALIQFEGKFQCTNCRFFDLKHPLTSSVSHANIQSAKSSSDVKSYIEKDGDYIEWGTFQVDGRSARGGQKTANDAASEALNASSKEEAMQIIKEKLPEKFLFQY

SEQ ID NO: 15221 - protein, 358 aa, Beet curly top virus
MPPTKRFRIQAKNIFLTYPQCSLSKEEALEQIQRIQLSSNKKYIKIARELHEDGQPHLHVLLQLEGKVQITNIRLFDLVSPTRSAHFHPNIQRAKSSSDVKSYVDKDGDTIEWGEFQIDGRSARGGQQTANDSYAKALNATSLDQALQILKEEQPKDYFLQHHNLLNNAQKIFQRPPDPWTPLFPLSSFTNVPEEMQEWADAYFGVDAAARPLRYNSIIVEGDSRTGKTMWARSLGAHNYITGHLDFSPRTYYDEVEYNVIDDVDPTYLKMKHWKHLIGAQKEWQTNLKYGKPRVIKGGIPCIILCNPGPESSYQQFLEKPENEALKSWTLHNSTFCKLQGPLFNNQAAASSQGDSTL

SEQ ID NO: 15222 - protein, 385 aa, Beet curly top virus
  unsure (1)..(385): unsure at all Xaa locations
MKVVLIYIILQYSNRYVNMLSHVIGVXMPPTKRFRIQAKNIFLTYPQCSLSKEEALEQIQRIQLSSNKKYIKIARELHEDGQPHLHVLLQLEGKVQITNIRLFDLVSPTRSAHFHPNIQRAKSSSDVKSYVDKDGDTIEWGEFQIDGRSARGGQQTANDSYAKALNATSLDQALQILKEEQPKDYFLQHHNLLNNAQKIFQRPPDPWTPLFPLSSFTNVPEEMQEWADAYFGVDAAARPLRYNSIIVEGDSRTGKTMWARSLGAHNYITGHLDFSPRTYYDEVEYNVIDDVDPTYLKMKHWKHLIGAQKEWQTNLKYGKPRVIKGGIPCIILCNPGPESSYQQFLEKPENEALKSWTLHNSTFCKLQGPLFNNQAAASSQGDSTL

SEQ ID NO: 15223 - protein, 358 aa, Beet curly top virus
MPPTKRFRIQAKNIFLTYPQCSLSKEEALEQIQGIQLSSNKKYIKIARELHEDGQPHLHVLLQLEGKVQITNIRLFDLVSPTRSAHFHPNIQGAKSSSDVKSYVDKDGDTIEWGEFQIDGRSARGGQQTANDSYAKALNATSLEQALQILKEEQPKDYFLQHHNLLNNAQKIFQRAPDPWTPLFPLSSFTNVPEEMQEWADAYFGVDAAARPLRYNSIIVEGDSRTGKTMWARSLGAHNYITGHLDFSLRTYYDEVEYNVIDDVDPTYLKMKHWKHLIGAQKEWQTNLKYGKPRVIKGGIPCIILCNPGPESSYQQFLEKPENEALKSWTLHNSTFCKLQGPLFNNQAAASSQGDSTL

SEQ ID NO: 15224 - protein, 358 aa, Beet curly top virus
MPRSPSFQIKAKNIFLTYPRCSVIKEDALEILKNIPCPSDKLFIRVSQEKHQDGSLHLHALIQFKGKAQFRNPRHFDITHPSSSSTFHPNFQGAKSASDVKQYIEKDGDYVDWGTFQVDGRSARGGQQTANDAAAEALNAGNAAEALQIIREKLPEKYIFQYHNLKPNLEAIFLPPPDIYQPPFPQSSFTQVPEIVQEWADSYFGVDAAARPFRYNSIIIEGDSRTGKTLWARSLGPHNYISGHLDFSLKTYHDDVLYNVIDDVDPAYLKMKHWKHLIGAQREWQTNLKYGKPRVIKGGIPSIILCNPGDGSSYQDFLDKSENEALKSWTIQNSTFVKLSGPLFDKDTEASSQGQSPL

SEQ ID NO: 15225 - protein, 353 aa, Beet curly top virus
MPFYKKAKNFFLTYPQCSVTKEDALEQLLAINTPSNKKYIRICRELHDNGEPHLHALIQFEGKVQIRNARYFDLQHRSTSKQFHCNIQGAKSSSDVKSYVSKDGDHIDWGEFQVDGRSARGGQQTANDAAAEALNAGNALEALQIIREKLPEKYIFQYHNLKPNLEAIFLPPPDLFQPPFPLSSFTRVPDIIQEWADSYFGLDPAAPFRYNSIIIEGDSRTGKTMWARCLGPHNYITGHLDFSLKTYSDNVLYNVIDDVDPNYLKMKHWKHLIGAQREWQTNLKYGKPRVIKGGIPSIILCNPGEGSSYQDFLNKSENEALRSWTLQNSVFAKLTSPLFDNNQEASSQDQTSL

SEQ ID NO: 15226 - protein, 230 aa, barbados tomato geminivirus
  unsure (1)..(230): unsure at all Xaa locations
MPRTPKSFRLAARNIFLTYPQCDIQKDEALQLLQNLPWSVIKPIYIRVAGEEHSDGFPHLHCLIQLSGXSNIKDVRFFDITHPRRSATFHPNIQAAKDTNAVKNYITKRVIIGESGQYKVPGGTKANKDDVYYNAVNAHGVAEALDIIRAGDPKTFIVSYHNIKANMERLFAKAPEPWTPPFTLSSFTNVPDEMQDWADDYFKQGAAARPERPISIIIEGDSRTRKDNVL

SEQ ID NO: 15227 - protein, 358 aa, Rhynchosia Golden Mosaic Virus
MPQPRRFRINAKNFFLTYPQCSIPKEDALEQLQCLSTPVNKKYIKICRERHEDGQPHLHVLIQFEGKYQCTNNRFFDLVSSTRSAHFHPNIQGAKSSSDVKSYIDKDGDTIEWGDFQIDGRSARGGQQSANDTYAKALNASSAEEALQIIKEEQPQHFFLQYHNLITNATRIFQKQPEPWVPPFNQSSFNNAPALITQWVNQNVCDSAARPLRPISIVIEGPSRTGKTQWARSLGPHNYLCGHLDLKPKIYSNDAWYNVIDDVTPHYLKHFKEFMGAQRDWQSNCKYGKPIQIKGGIPAIFLCNPGPHSSYKEYLSEEKNKGLNDWAQKNAIFVTIEEPFYTTLNQASSQIREETDEA

SEQ ID NO: 15228 - protein, 362 aa, Bhendi yellow vein mosaic virus
MPPRRFVINSKNYFLTYPQCSLNKEEALSQLQNIQTPTNKKYIKICSELHENGEPHLHVLIQFEGKYKCQNQRFFDLVATNRSAHFHPNIQGAKSSSDVKSYIDKDGDTLEWGEFQIDGRSARGGQQSANDAYAAALNTGSKAEALRVLKELAPKDYVLQYHNLNSNLDRIFTPPQEVYVCPFLSSSFDQVPEELEEWASENVMDAAARPQRPLSLVLEGESRTGKTQWARSLGPHNYLCGHLDLSPKVYSNDAWFNIIDDVDPHYLKHFKEFMGAQRDWQSNTKYGKPVQIKGGIPTIFLCNPGPNASYKEFLDEEKNSALKAWALKNAAFVFLTQPLYSGTNQSSTQGSEASAQEETSGP

SEQ ID NO: 15229 - protein, 359 aa, tomato yellow leaf curl Sardinia virus
MPRSGRFSIKAKNYFLTYPKCDLTKENALSQITNLQTPTNKLFIKICRELHENGEPHLHILIQFEGKYNCTNQRFFDLVSPTRSAHFHPNIQGAKSSSDVKSYIDKDGDVLEWGTFQIDGRSARGGQQTANDAYAKAINAGSKSQALDVIKELAPRDYVLHFHNINSNLDKVFQVPPAPYVSPFLSSSFDQVPDELEHWVSENVMDAAARPWRPVSIVIEGDSRTGKTTWARSLGPHNYLCGHLDLSQKVYSNNAWYNVIDDVDPHYLKHFKEFMGAQRDWQSNTKYGKPIQIKGGIPTIFLCNPGPQSSFKEYLDEEKNQALKNWATKNAIFVTIHQPLFADTNQNTTSHRQEEASEA

SEQ ID NO: 15230 - protein, 359 aa, tomato yellow leaf curl Sardinia virus
MAQPKRSQINAKHYFLTFPKCSLSKEEALEQLLQLQTPTNKKYIKICRELHEDGQPHLHMLIQFEGKFNCKNNRFFDLVSPTRSAHFHPNIQGAKSSSDVKSYIDKDGDVLEWGTFQIDGRSARGGQQTANDAYAKAINAGSKSEALDVIKELAPRDYILHFHNINSNLNMVFQVPPAPYVSPFLSSSFDQVPDELEHWVSENVMDAAARPWRPVSIVIEGDSRTGKTMWARSLGPHNYLCGHLDLSQKVYSNNAWYNVIDDVDPHYLKHFKEFMGSQRDWQSNTKYGKPIQIKGGIPTIFLCNPGPQSSFKEYLDEEKNQTLKNWAIKNAIFVTIHQPLFTNTNQDPTPHRQEETSEA

SEQ ID NO: 15231 - protein, 118 aa, tomato yellow leaf curl Sardinia virus
SGRFSIKAKNYFLTYPKCDLTKENALSQITNLQTPTNKLFIKICRELHENGEPHLHILIQFEGKYNCTNQRFFDLVSPTRSAHFHPNIQGAKSSSDVKSYIDKDGDVLEWGTFQIDGR

SEQ ID NO: 15232 - protein, 359 aa, tomato curly stunt virus
MAPPKRFQINSKNYFVTYPKCSLTKEESLSQLLNLETPTNKKYIKICRELHENGEPHLHVLIQFERKFNCKNHRFFDLVSPNRSAHFHPNIQGAKSSSDVKSYIDKDGDTLEWGEFQVDGRSARGGCQNANDACADALNAGSAEAAMAIIREKLPKDFIFQYHNLKTNLDRIFQAPPEPYISPFSSSSFDQVPEELEEWVSENVCGAAARPWRPNSIVIEGDSRSGKTIWARSLGQHNYLCGHLDLSPKVYSNDAWYNVIDDVDPHYLKHWKEFFGAQRDWQSNTKYGKPIQIKGGIPTIFLCNPGPTSSYKEYLDEDKNTSLKAWTIKNAVFITLNQPLYSSPNQGPASNSQEESSQA

SEQ ID NO: 15233 - protein, 352 aa, Tomato rugose mosaic virus
MPSATRRFQIKAKNYFLTYPKCSISKEEALSQLKNLNTPTNKKFIKVCRELHENGEPHLHVLLQFEGNYCCQNQRFFDLVSPTRSTHFHPNIQRAKSSSDVKSYVDKDGDTIEWGEFQIDGRSARGGCQTANDAAAEALNAPSKDIALQIIREKMPEKFLFQFHNLNSNLDRIFARAPEPWAPTFPLSSFTNVPREMQDWADDYFGRGAAARPERPISIIIEGDSRTGKTMWARALGAHNYLSGHLDFNPRVYSNHVEYNVIDDIAPHYLKLKHWKELIGAQRDWQSNCKYGKPVQIKGGIPCIVLCNPGEGASYKCFLDKEENSALSSWTKHNAQFIFLNSPLYQSSTSGC

SEQ ID NO: 15234 - protein, 351 aa, Cucurbit leaf curl virus
MPRNPNSFRISAKNIFLTYPQCDIPKDEAIQMLQHLNWSIVKPTYIRVAREEHSDGFPHLHCLIQLSGKSNIKDARFFDLAHPRRSTSFHPNVQAAKDANAVKNYITKEGDYCESGKYKVSGGTKSSKDDVYHNAINAGSAGEALDIIKAGDPKTFIVNYHNIKANIERLFHQPPETWACPFPLSSFTLVPEELQEWADDYFGRDAAARPMRARSIIIEGDSRTGKTMWSRSLGKHNYLSGHLDFNSRVYSNEAEYNVIDDVAPQYLKLKHWKELIGAQRDWQSNCKYGKPVQIKGGIPSIVLCNPGEGASYKDFLDKEENESLREWTIKNAQFIFLEGPLYQSTAQSSED

SEQ ID NO: 15235 - protein, 351 aa, Tomato severe rugose virus
MPSATKRFQIKAKNYFLTYPKCSLSKEEALSQLKKLNTPTNKKFIKVCRELHENGEPHLHVLLQFEGNYCRQNQRFFDLVSPTRSTHFHPNIQRAKSSSDVKSYVDKDGDTIEWGEFQIDGRSARGGCQTANDAAAEALNAPSKDVALQIIREKLPEKFLFQFHNLNSNLDRIFARAPEPWAPTFPLSSFTNVPREMQDWADDYFGRGAARPERPISIIIEGDSRTGKTMWARAFGAHNYLSGHLDFNPRVYSNHVEYNVIDDIAPHYLKLKHWKELLGAQKDWQSNCKYGKPVQIKGGIPCIELCNPGEGASYKVFPRHKENASLNNWTKHNAKFVFLNTPLYQGTTQSC

SEQ ID NO: 15236 - protein, 351 aa, Sri Lankan cassava mosaic virus
MRNPRFRIQSKNIFLTYPKCSLTKEHLLDFFRSLSLPTNIKFIKICRELHHNGEPHLHALLQFEGKLTITNNRQFDCVHPSSSTSFHPNIQSAKSSSDVKSYIDKDGDTIDWGEFQIDGRSARGGQQTANDAYAAALNTGSKPEALRVIKELAPKDYVLQFHNLNANLDRIFTPPPEVYVSPFSASSFDQVPDELEEWVSENVMGASARPLRPNSIVIEGDSRTGKTMWARSLGPHNYLCGHLDLSPRVYSNDAWYNVIDDVDPHYLKHFKEFMGAQRDWQSNTKYGKPVQIKGGIPTIFLCNPGPNSSYKEFLDEAKNIALKAWALKNATFISLSEPLYSGSNQGPTQSS

SEQ ID NO: 15237 - protein, 320 aa, Soybean yellow mosaic virus
FIRVCRELHEDGQPHLHVLLQFEGKQQTKNQRFFDLHSRCRSAYYHPNIQAAKSCSDVKTYMEKDGDILDHGTFQIDGRSARGGKQSANDAYAEALNSGSKLEALLILKEKAPKDFILQFHNLNCNLSRIFTEPVQAYVSPFTLESFDKVPSYISSWAERNVRDPAARPDRPISIVIEGDSRTGKTMWARAIGPHNYLCGHLDLNDKTYSNEAWYNVIDDVDPHYLKHFKEFMGAQRDWQSNVKYGKPTKIKGGIPTIFLCNPGPKSSYKEYLDEENNAALKQWASKNAEFYTLKEPLFSSVNQGSTQGRQEESNSTISN

SEQ ID NO: 15238 - protein, 359 aa, melon chlorotic leaf curl virus
MPQNPKSFRLSARNIFLTYPKCDVPKDEVLEILQGLSWSVVKPTYIRVAREEHADGFPHLHCLVQLSGKSNIKDAGFFDITHPRRSARFHPNIQAAKDTNAVKNYITKEGDYCEFGQYKVSGGSKSNKDDVYHNAVNAASAGEALDIIKAGDPKTFIVSYHNITANVDRLFHKPPMPWVPPYELSSFTNVPEELKDWADHYFNECSAARPFLIKESNNVCNRPISVIIEGDSRTGKTMWARSLGPHNYLSGHLDFNSRVFSNDVKYNVIDDVAPHYLKLKHWKELIGAQRDWQSNCKYGKPVQIKGGIPSIVLCNPGEGASYKEFLDKAENAALREWTLKNAQFIFLDCPLYQSTTQDR

SEQ ID NO: 15239 - protein, 348 aa, Macroptilium yellow mosaic virus
MPPPKRFRVSARNYFLTYPHCSLSKEEALSQLQNISTPTNKKFIRICEELHEDGQPHLHVLIQFEGKFVCTNNRLFDLVSPSRSAHFHPNVQGAKSSSDVKSYLDKDGVTVEWGEFQVDGRSARGGCQSANDSYAKALNASSVEQALQILKEEQPKDFLLQNHNIRSNLERIFAKAPEPWVPPFHLSSLNNVPAEMQAWVDDYFGRGAAARPERPISIIVEGDSRTGKTMWARSLGPHNYLSGHLDFNSRIYSNEVLYNVIDDISPNYLKLKHWKELIGAQKDWQSNCKYGKPVQIKGGIPSIVLCNPGEGASYKDFLDKEENRALHNWTIHNALFITLTSPLYQSTP

SEQ ID NO: 15240 - protein, 349 aa, Chilli leaf curl virus
MPRAGRFNINAKNYFLTYPNCSLTKEEALSQLQNLETPVNKLFIRVCRELHENGEPHLHVLIQFEGKYQCTNNRFFDLISPTRSANFHPNIQRAKSSSDVKAYVEKDGDFIDFGVFQIDGRSARGGCQSANDAYAEAINSGSKSSALNILREKAPKDYVLQFHNLNANLDRIFTPPLEVYVSPFCSSSFDQVPEELEEWAAENVLGAAARPLRPISIVIEGESRTGKTIWARSLGPHNYLCGHLDLSPKVYSNDAWYNVIDDVDPHYLKHFKEFMGAQRDWQSNTKYGKPVQIKGGIPAIFLCNPGPNSSYKEFLDEEKNSALKNWALKNATFVTLTGPLYSGSNQSTA

SEQ ID NO: 15241 - protein, 232 aa, Tomato chlorotic vein virus
MPLAKRFQIKAKNYFLTYPICSLTKEEALSQILALSTSTNKKYIKVCRELHEDGQPHLHVLLQFEGNFCCQNQRFFDLVSTTRSAHFHPNIQRAKSSSDVKSYVDKDGDTLEWGEFQIDGRSARGGQQTGNDAAAEALNASSKEAAMQIIKEKLPEKFLFQYHNLSSNLDRIFSKAPEPWVPPFPLSSFTHVPDEMQEWTDDYFGRGAAARPERPISIIVEGDSRTGKTMWA

SEQ ID NO: 15242 - protein, 224 aa, Tomato chlorotic mottle virus
MPLPKRFRLNAKNYFLTYPKCSLSKEEALSQLLALTIPVNKLFVRVARELHEDGQPHLHVLIQFEGKYQCTNERLFDLVSPTRSAHFHPNIQAAKSSSDVKAYVEKDGDFVDHGVFQIDGRSARGGQQSANDTYAKVLNAGSVMEALNILKEEQPKDYVLQHHNIRSNLERIFAKAPEPWVPPFPLSSFTNVPVEMQSWADDYFGRDAAARPERPISIIIEGDS

SEQ ID NO: 15243 - protein, 232 aa, Tomato chlorotic mottle virus
MPPPKRFRLSAKNYFLTYPQCSLPKEEALSQLLAIQTPVNKLFLRVARELHEDGQPHLHILIQFEGKFVCTNSRLFDLTSPTRSTHFHPNIQAAKSSSDVKSYVEKDGDFVDHGVFQVDGRSARGGQQSANDTYAKVLNAGSVMEALNILREEQPKDFVLQHHNIRSNLERIFAKAPEPWVPPFPLSSFTNVPVEMQAWADDYFGRHAAARPERPVSIIIEGDSRTGKTMWA

SEQ ID NO: 15244 - protein, 293 aa, Tomato chlorotic mottle virus
MPPPKHFRVNSKNYFLTYPHCSLSKEEALSQLLAIQIPVNKLFIRVARELHEDGQPHLHVLIQFEGKFVCTNNRLFDLVSPTRSAHFHPNIQGAKSSSDVKAYVEKDGDFSDHGVFQIDGRSARGGQQSANDTYAKVLNAGSVMEALNILREEQPKDFVLQHHNIRSNLERIFAKAPEPWVPPFPLSSFTNVPVEMQDWVDDYFGRDAAARPERPISIIIEGDSRSGKTMWARALGSHNYLSGHLDFNSKVYSNDVQYNVIDDVAPHYLKLKHRKDDVGLQMQAEFQHTGGRY

SEQ ID NO: 15245 - protein, 235 aa, Tomato chlorotic mottle virus
MPPPKRFRLSAKNYFLTYPQCSLTKHETLSQLLAIQIPVNKLFIRVARELHEDGQPHLHVLIQFEGKFVCTNNRLFDLVSPTRSAHFHPNIQGAKSSSDVKAYVEKDGDFIDHGVFQIDGRSARGGQQSANDTYAKVLNAGSVMEALNILKEEQPKDYVLQHHNIRSNLERIFAKAPEPWVPPFPLSSFTNVPDEMKAWADDYFGRDAAARPERHISMIMEVIQVRERSMWACRC

SEQ ID NO: 15246 - protein, 351 aa, Tomato chlorotic mottle virus
MPLPRHFRVNSKNYFLTYPHCSLSKEEALSQLLALNTPTNKLFIRVSRELHENGEPHLHVLIQFEGKYNCKNNKFFDLVSPTRSAHFHPNIQGAKSSSDVKSYVEKDGDFVDHGVFQIDGRSARGGQQSANDTYAKVLNAGSVMEALNILREEQPKDFVLQHHNIKSNLERIFVKAPEPWVPPFPLSSFTNVPVEMQDWVNDYFGRDAAARPERPISIIIEGDSRTGKAMWARTLGSHNYLSGHLDFNSKVYSNDVQYNVIDDVAPHYLKLKHWKELIGAQRDWQSNCKYGKPVQIKGGIPCIVLCNPGEGASYKCFLNKQENSALDSWTKHNAQFIFLNSPLYQSSTSGC

SEQ ID NO: 15247 - protein, 234 aa, Tomato chlorotic mottle virus
MPLPRHFRVNSKNYFLTYPHCSLSKEEALSQLLALNTPTNKLFIRVSRELHENGEPHLHVLIQFEGKYNCKNNKFFDLVSPTRSAHFHPNIQGAKSSSDVKSYVEKDGDFVDHGVFQIDGRSARGGQQSANDTYAKVLNAGSVMEALNILREEQPKDFVLQHHNIKSNLERIFVKAPEPWVPPFPLSSFTNVPVEMQDWVNDYFGRDAAARPERPISIIIEGDSRTGKTMWACR

SEQ ID NO: 15248 - protein, 225 aa, Tomato chlorotic mottle virus
MPPAKTFSFKCEELFSHISSVLLTKEEALSQLLAIQTPVNKLFLRVARELHEDGQPHLHILIQFEGKFVCTNSRLFDLTSPTRSTHFHPNIQAAKSSSDVKSYVEKDGDFVDHGVFQVDGRSARGGQQSANDTYAKVLNAGSVMEALNILREEQPKDFVLQHHNIRSNLERIFAKAPEPWVPPFPLSSFTNVPVEMQAWADDYFGRHAAARPERPVSIIIEGDSR

SEQ ID NO: 15249 - protein, 223 aa, Tomato severe mosaic virus
MPLARRFNIQSKKYSPTCLKCSLSKEEALSQLLALNTPTNKLFIRVSRELHEDGQPHLYVLLQFEGKYICKNKRFFDLVCPTRSAHFHPNIQGAKSSSDVKTYVEKDGDFIHHGLFQIDGRSARGGQQSANDAAAEALNAPSKDIALQIIREKMPEKFLFQFHNLNSNLDRIFARAPEPWAPTFPLSSFTNVPREMQDWADDYFGRGAAARPERPISIIIEGD

SEQ ID NO: 15250 - protein, 235 aa, Tomato infectious yellows virus
MPPPKHFRVNSKNYFLTYPHCSLSKEEALSQLLAIQIPVNKLFIRVARELHEDGQPHLHVLIQFEGKFVCTNNRLFDLVSPTRTSSSPIHIQSAKSSSDVKSYIEKDGDYIEWGIFQIDGRSARGGQQTANDAASEALNASSKEEAMQIIKEKLPEKFLFQYHNLSCNLDRIFTKAPDPWSPPFHLSSFTNVPREMQEWADDYFGRGAAARSERPISIIIEGDSRTGKSMWACRC

SEQ ID NO: 15251 - protein, 232 aa, Tomato mottle leaf curl virus
MPLPRRFRIHSKNYFLTYPKCSLTKEEALSQLLGLQTPVNKLFVRVARELHEDGEPHLHVLIQFEGKLQCTNERLFDLISPTRSAHFHPNVQGAKSSSDVKSYVEKDGDFIDHGVFQIDGRSARGGQQSANDTYAKVLNAGSVMEALNILREEQPKDFVLQHHNIRSNLERIFQNAPEPWVPPFPLSSFTEVPEEMQEWADDYFGGDPAARPERPISIIIEGDSRTGKTMWA

SEQ ID NO: 15252 - protein, 233 aa, Tomato mottle leaf curl virus
MPLPRRFRIHSKNYFLTYPKCSLTKEEALSQLLGLQTPVNKLFVRVARELHEDGEPHLHVLIQFEGKLQCTNERLFDLISPTRSAHFHPNVQGAKSSSDVKSYVEKDGDFIDHGVFQIDGRSARGGQQSANDTYAKVLNAGSVMEALNILREEQPKDFVLQHHNIRSNLERIFQKAPEQWVPPFPLSSFTEVPEEMQEWADDYFGGDPAARPERPISIIIEGDSRTGKTMWAC

SEQ ID NO: 15253 - protein, 232 aa, Tomato mottle leaf curl virus
MPLPRRFKIHSKNYFLTYPKCSLPKEEALSQLLGLQTPVNKLFVRVARELHEDGEPHLHVLIQFEGKLQCTNERLFDLVSPTRSAHFHPNVQGAKSSSDVKSYVEKDGDFIDHGVFQIDGRSARGGQQSANDTYAKVLNAGSVMEALNILREEQPKDFVLQHHNIRSNLERIFQKAPEPWVPPFPLSSFTEVPEEMQEWADDYFGRDPAARPERPISIVIEGDSRTGKTMWA

SEQ ID NO: 15254 - protein, 232 aa, Tomato mottle leaf curl virus
MPLPRRFRIHSKNYFLTYSKCSLQKEEALSQLLGLQTPVNKLFVRVARELHEDGEPHLHVLIQFEGKLQCTNERLFDLISPTRSAHFHPNVQGAKSSSDVKSYVEKDGDFIDHGVFQIDGRSARGGQQSANDTYAKVLNAGSVMEALNILREEQPKDFVLQHHNIRSNLERIFQKAPEQWVPPFPLSSFTEVPEEMQEWADDYFGGDPAARPERPISIIIEGDSRTGKTMWA

SEQ ID NO: 15255 - protein, 232 aa, Tomato mottle leaf curl virus
MPLPRRFRIHSKNYFLTYPKCSLPKEEALSQLLGLQTPVNKLFVRVARELHEDGDLHLHVLIQFEGKLQCTNERLFDLVSPTRSAHFHPNVQGAKSSSDVKSYVEKDGDFIDHGIFQIDGRSARGGQQSANDTYAKVLNAGSVMEALNILREEQPKDFVLQHHNIRSNLERIFQTAPEPWVPPFPLSSFTEVPEEMQEWADDYFGRDPAARPERPISIIIEGDSRTGKTMWA

SEQ ID NO: 15256 - protein, 232 aa, Tomato mottle leaf curl virus
MPPPKPFRVNARNYFLTYPQCSLSKEEALSQLLALNTPTNKLFIRVSRELHEDGQPHLHVLIQFEGKYNCKNNRFFDLVSPTRSAHFHPNIQGAKSSSDVKTYVEKDGDFIDHGVFQIDGRSARGGQQSANDTYAKVLNSGSVMEALDILREEQPKDFVLQHHNIRSNLERIFQNAPEPWVPPFPLSSFTEVPEEMQEWANDYFGGDPAARPERPISIIIEGDSRTGKTMWA

SEQ ID NO: 15257 - protein, 232 aa, Tomato mottle leaf curl virus
MPPAKRFQLNGKNYFLTYPRCSLTKEEALSQLQNLETPTNKKFIRVSRELHEDGEPHLHALIQFEGNFRCTNQRFFDLVSPTRSAHFHPNIQKAKSASDVKTYVEKDGDFVDFGVFQIDGRSARGGQQSANDSYAKVLNAGSIHEALNILREEQPKDFVLQHHNIRSNLERIFQNAPEPWAPPFPLSSFTEVPEEMQEWADDYFGGDPAARPERPISIIIEGDSRTGKTMWA

SEQ ID NO: 15258 - protein, 232 aa, Tomato mottle leaf curl virus
MPLPKQFRINAKNYFLTYPKCSLSKEEALSQLLAIQTPTNKLFIRVSRELHEDGEPHLHVLIQFEGKFQCKNNRFFDLVSPTRSTHFHPNIQGAKSSSDVKSYVEKDGDFIDHGVFQIDGRSARGGQQSANDTYAKVLNAGSVMEALNILREEQPKDFVLQQHNIRSNLERIFQKAPEPWVPPFPLSSFTEVPEEMQEWADDYFGRDPAARPERPISIIIEGDSRTGKTMLA

SEQ ID NO: 15259 - protein, 232 aa, Tomato mottle leaf curl virus
MPPAKRFQLNGKNYFLTYPRCSLTKEEPLSQLQNLETPTNKKFIRVSRELHEDGEPHLHALIQFEGNFRCTNQRFFDLVSPTRSAHFHPNIQKAKSASDVKTYVEKDGDFVDFGVFQIDGRSARGGQQSANDSYAKVLNAGSIHEALNILKEEQPKDFVLQHHNIRSNLERIFAKAPEPWVPPFPLSSFTMVPEEMQEWADAYFGTSAAARPVRPISLIIEGDSRTGKTMWA

SEQ ID NO: 15260 - protein, 222 aa, Tomato mottle leaf curl virus
MPLPKKFLINSKNYFITYPHCSLSKEEALSQLLALKTPTNKKFIRFTRELHEDGEPHLHVLIQFEGKYRCTNCRFFDLVSPTRSTHFHPNVQGAKSSSDVKTYMEKDGDFIDHGVFQIDGRSARGGQQSANDTYAKVLNAGSVVEALNILREDQPKDFVLQQHNIRSNLERIFQKAPEPWVPPFPLSSFTEIPEEIQEWADDYFGRDPAARPERPISIIIEG

SEQ ID NO: 15261 - protein, 232 aa, Tomato mottle leaf curl virus
MPLPKQFRINAKNYFLTYPKCSLNKEEALSQLLAIQTPTTKLFIRVSRELHEDGNLHLHVLIQFEGKFQCKNNRFFDLISPTRSAHFHPNIQGAKSSSDVKSYVEKDGDFIDHGVFQIDGRSARGGQQSANDTYAKVLNAGSVMEALNILREEQPKDFVLQQHNIRSNLERIFQRAPEPWVPPFPLSSFTEVPEEMQEWADDYFGRDPAARPERPISIIIEGDSRTGKTMWA

SEQ ID NO: 15262 - protein, 231 aa, Tomato crinkle virus
MPLPKRFRLNAKNYFLTYPKCSLSKEEALSQLLALTIPVNKLFVRVARELHEDGQPHLHVLIQFEGKFQCTNERLFDLTSPTRSAHFHPNIQAAKSSSDVKTYVEKDGDFVDHGVFQIDGRSARGGQQSANDTYAKVLNAGSVMEALNILREEQPKDFVVQHHNIRSNLERIFAKAPEPWVPPFPLSSFTNVPVEMQAWADDYFGRGSAARPERPVSIIIEGDSRTGKTMW

SEQ ID NO: 15263 - protein, 223 aa, Calopogonium golden mosaic virus
MPRNPNSFRLTAKNIFLTYPQCDISKDEALQMLQHLHWSVVKPTYIRVAREEHSDGLPRLHCLVQLSGKSNIKDARFFDLTHPRRSACFHPTIQAAKDANAVKNYITKEGDYCESGQYKVSGSSKANKDDVYHNAVNAGSAGEALDIIKVGDPRTFLVSYHHVKANIERLFHKAPEPWTPPFQLSTFTNVPVEMQRWADDYFGRDAAARPERPISIIIESDSR

SEQ ID NO: 15264 - protein, 361 aa, Tobacco curly shoot virus
MAPPNKFRINAKNYFLTYPHCSLTKEEALSQIKALETPINKLFIRICRELHEDGTPHLHVLIQFEGKFQCKNQRFFDLTSPTRSAHFHPNIQGAKSSTDVKTYMEKDGDVLDHGIFQIDGRSARGGCQSANDAYAEAINSGSKASALNILREKAPKDFVLQFHNLNSNLDRIFTPPIEEYISPFLSSSFDQVPEELDEWAAENVVSAAARPLRPMSIVIEGDSRTGKTMWARSLGPHNYLCGHLDLSPKVYNNDAWYNVIDDVDPHYLKHFKEFMGAQRDWQSNTKYGKPVQIKGGIPTIFLCNPGPNSSYKEFLDEEKNTALKNWALKNAIFVTLESPLYSGSNQSEAQASQEGEQTSSC

SEQ ID NO: 15265 - protein, 363 aa, Honeysuckle yellow vein mosaic virus
MAPPKRFQINSKNYFLTYPHCSLTKEEALSQLKALDTPTNKLFIRICRELHEDGSPHLHVLLQFEGKYRCTNQRFFDLVSPTRSAHFHPNIQGAKSSSDVKAYMEKDGDVVDFGIFQVDGRSARGGCQSANDAYAEAINSGSKSSALSILREKAPKDFVLQFHNLNSNLDRIFAPPLEEFVSPFLSSSFDQVPEQLEEWAAENVRDSAARPWRPMSIVIEGDSRTGKTMWARSLHPRHNYLCGHLDLSPKVYSNEAWYNVIDDVDPHYLKHFKEFMGAQRDWQSNTKYGKPIQIKGGIPTIFLCNPGPTSSYTEYLDEEKNAALKAWAIRNATFITLYSPLYSSTHQGATQIREEESTSQAED

SEQ ID NO: 15266 - protein, 392 aa, Honeysuckle yellow vein mosaic virus
MPCPPEYKLPPNAPPFSRSLKCPPIDQVNMPRAGRFSLKAKNYFLTYPQCSIDKEEALTQLQKLNTPTNIKFIRICRELHQNGSPHLHVLIQFEGKYNCTNQRFFDLVSPSRSAHFHPNIQAAKSSSDVKTYMEKDGDIVDFGVFQVDGRSARGGCQSATDAYAEAINSGSKSSALCILREKAPKDFVLQFHNLNSNLDRIFAPPLEEFVSPFLSSSFDQVPEQLEGWAAENVRDSAARPWRPISIVIEGDSRTGKTMWARSLSPRHNYLCGHLDLSPKVYSNEAWYNVIDDVDPHYLKHFKEFMGAQRDWQSNTKYGKPIQIKGGIPTIFLCNPGPTSSYTEYLDEDKNAALKAWAIKNAAFVTLYGPLYSGTHQGATQIREEESTSPEED

SEQ ID NO: 15267 - protein, 361 aa, Tomato yellow leaf curl China virus
MAPPNKFRINAKNYFLTYPHCSLTKEEALSQIKTLETPVNKLFIRICRELHEDGSPHLHVLIQFEGKFQCKNQRFFDLTSPHRSAHFHPNIQGAKSSTDVKSYMEKDGDVLDHGVFQIDGRSARGGCQSANDAYAEAINSGSKASALNILREKAPKDFVLQFHNLNSNLDRIFTPPIVEYISPFSSSSFDQVPEELDEWAVDNVVSAAARPLRPVSIVIEGDSRTGKTMWARSLGPHNYLCGHLDLSPKVYSNDAWFNVIDDVDPHYLKHFKEFMGAQRDWQSNTKYGKPVQIKGGIPTIFLCNPGPNSSYKEYLEEEKNSALRNWAVKNAIFVSLNGPLYSGSYQGATPNRQEDNQTTTG

SEQ ID NO: 15268 - protein, 362 aa, Eupatorium yellow vein virus
MPTPNRFKINAKNFFLTYPHCSLTKEEALSQIKQLQTPTNKLFIRICRELHEDGSPHLHVLIQFEGKYTCRNQRFFDLVSPNRSAHFHPNIQAAKSSSDVKTYMEKDGDILDSGVFQVDGRSARGGCQNANDAYAEAINSGSKSSALNILREKAPKDYVLQFHNLNSNLDRIFAPPLEVFVCPFSSSSFDQVPEEIEEWAAENVKSSAARPWRPMSIVIEGDSRTGKTMWARSLGPHNYLCGHLDLSPKIYSNGAWYNVVDDVDPHYLKHFKEFMGAQRDWQSNTKYGRPIQIKGGIPTIFLCNPGPTSSYTEFLDEEKNSALKAWAIKNATFVTLYSPLYSGAHQSPAQDSQEEEPSQAED

SEQ ID NO: 15269 - protein, 362 aa, Eupatorium yellow vein virus
MPAPNRFKINAKNYFLTYPHCSLTKGEALSQIKQLQTPISKKFIRICRELHEDGSPHLHILIQFEGKYQCKNQRFFDLVSPSRSAHFHPNIQAAKSSSDVKSYMEKDGDILDFGVFQVDGRSARGGCQSANDAYAEAINSGSKSSALNILREKAPKDFVLQFHNLNSNLDRIFAPPLEVFVCPFSSSSFDQVPEELEEWAAENVKSSARPWRPISIVIEGDSRTGKTMWARSLGPHNYLCGHLDLSPKIYSNDAWYNVVDDVDPHYLKHFKEFMGAQRDWQSNTKYGKPIQIKGGIPTIFLCNPGPTSSYTEFLDEEKNSALKAWAVKNATFVTLYSPLYSGSHQSPAQDSQIEEEEPQEED

SEQ ID NO: 15270 - protein, 361 aa, Ageratum enation virus
MAAPNRLKINAKNYFLTYPKCSLTKEEALSQLLNLQPPTNKKYIKICRELHEDGSPHLHVLIQFEGKYQCKNQRFFDLVSPNRSAHFHPNIQGAKSSTDVKSYIDKDGDTLEWGEFQIDGRSARGGQQTANDAAAEALNAGSKEAAMAIIKEKLPEKFIFQYHNLNSNLDRIFTPPLEVYVSPFLSSSFDQVPEELEEWVSENVMNAAARPLRPQSIVIEGDSRTGKTMWARSLGPHNYLCGHLDLSPKVYSNDAWYNIIDDVDPHYLKHFKEFMGAQRDWQSNTKYGKPVQIKGGIPTIFLCNPGPNSSYKEFLDEEKNNALKNWALKNAIFVTLEGPLYSGSNQSAAQASQEGDEASTC

SEQ ID NO: 15271 - protein, 360 aa, Sida mottle virus
MPSKPRRFRVQAKNIFLTYPQCPLTKEEALSQLQAIQLPSNKKFIKICRELHEDGQPHLHILLQLEGKIQVTNNRLFDLVSPTRSAHFHPNIQELMELRRQVIHLQGREIQWEWGQFQVDGRSSRGGQQTANDAAAEPFNDPDKHTALQIIREKLPEKYLFQFHNLNSNLDRIFLKAPEPWTPPFSLSSFTNVPVEMQEWADDYFGRGSAARPLRPMSLIVEGDSRTGKTMWARSLGPHNYLSGHLDFNSKVYSNEVEYNVIDDVTPQYLKLKHWKGADWCSKRLAVKLLSYGKPVQIKGGIPSIVLCNPGEGVSYKEFLDKEENAGLKSWTLHNAKFIFLDSPLYQTTTQGGEEERNSP

SEQ ID NO: 15272 - protein, 358 aa, Sida yellow mosaic virus
MPSPRAFRINSKNYFLTYPKCSLTKEEALSQLKELNTPTSKKFIRVSRELHEDGSPHLHVLIQFEGKYNCKNNRFFDLVSPSRSTHFHPNIQGAKSSSDVKKYVEKDGDFIDFGVFQIDPRSARGGCQTANDTYAKVLNAQSAEQALQILKEEQPRDYVLHLDKVQTHVQKLFKKAPEPWVPPFPLSSFTNVPDEMQEWADDYFGRGSAARPLRPMSLIVEGDSRTGKDDVGSCISPHNYLSGHLDFNNRVYSNEVDYNVIDDVTPQYLKLKHWKELIGAQKDWQSNCKYGKPVQIKGGIPSIVLCNPGEGVSYKEFLDKEENAGLKSWTLHNAKFIFLDSPLYQTTTQSGEEERNSP

SEQ ID NO: 15273 - protein, 362 aa, Tomato leaf curl Taiwan virus
MHPLNKFRINAKNYFLTYPHCSLTKEEALSQIQALQTPTNKLFIRVCRELHEDGAPHLHILIQFEGKFQCKNNRFFDLTSPTRSAHFHPNIQGAKSSTDVKTYMEKDGDVLDHGIFQVDGRSARGGCQSANDAYAEAINSGSKAEALNILREKAPKDFVLQFHNLNSNLDRIFTPPLEVYISPFNSSSFDQVPVELVEWVAENVRDSAARPWRPMSIVVEGESRTGKTLWARSLGPHNYLCGHLDLSPRVYNNEAWYNVIDDVDPHYLKHFKEFMGAQRDWQSDTKYGKPIQIKGGIPTIFLCNPGPTSSYKEYLDEEKNFALKDWALKNAEFITLTEPLYSRANQGPTQNSEEETNSQAEG

SEQ ID NO: 15274 - protein, 361 aa, Tobacco leaf rugose virus
MPSVKRFKSQPKTNFITYPQCSLPKEEALSQLQNLETPVNKKFIKICRELHENGEPHLHVLIQFEGKYQCKNNRFFDLVSPTRSAHFHPNIQGAKSSSDVKSYIDKDGDTLEWGEFQIDGRSARGGKQSANDSYAKALNADSVQSAMAVLREEQPKDFVLQNHNIRSNLERIFAKAPEQWVPPFQLSSFTNVPEDMQEWADDYFGRGSARPERPLSIIVEGDSRTGKTMWARSLGPHNYLSGHLDFNARVYSNEVDYNVIDDVAPHYLKLKHWKELLGAQKDWQSNCKYGKPVQIKGGIPSIVLCNPGEGASYKDFLDKEENASLRNWTIKNAVFITLTAPLYQEGAQTIQEKEGNQETQD

SEQ ID NO: 15275 - protein, 362 aa, Hollyhock leaf crumple virus
MAPPKRFKINAKNYFLTYPHCSLSLSETLSQLKTLQTPVNKLYIKICRELHENGEPHLHALIQFEGKYQCTNNRFFDLVSPSRSTHFHPNIQGAKSSSDVKSYLEKDGDTLEWGEFQIDARSARGGQQTANDAYAAALNSGSKSEALRVIRELAPKDFVLQFHNLNSNLDRIFQEPPAPYVSPFLSSSFDQVPEELEEWAAENVVEAAARPSRPISIVIEGESRTGKTVWARSLGPHNYLCGHLDLSPKVFSNDAWYNVIDDVDPHYLKHFKEFMGAQKDWQSNTKYGKPVQIKGGIPTIFLCNPGPNSSYKEYLDEDKNAHLKSWALKNATFITLSNQLYSGTNQSQASGGQEESNQETQD

SEQ ID NO: 15276 - protein, 362 aa, Hollyhock leaf crumple virus
MAPPHRFQIYAKNYFLTFPKCSLTKEEALEQIQQISTASNKKYIKICRELHEDGQPHLHVLLQFEGKFKCQNQRLFDLVSPNRSAHFHPNIQGAKSSSDVKSYIDKDGDTLEWGEFQIDGRSARGGQQTANDAYAAALNAGSKAEALRVIRELAPKDFVLQFHNLNSNLERIFQEPPAPYVSPFLSSSFDQVPEELEEWAAENVVEAAARPSRPISIVIEGESRTGKTVWARSLGPHNYLCGHLDLSPKVFSNDAWYNVIDDVDPHYLKHFKEFMGAQKDWQSNTKYGKPVQIKGGIPTIFLCNPGPNSSYKEYLEEDKNAHLKSWALKNATFITLSNPLYSGTNQSPASGGQEESNQETQD

SEQ ID NO: 15277 - protein, 362 aa, Ageratum yellow vein China virus
MPPPTKFRINAKNYFLTYPHCSLTKEEALSQLKALETPTNKLFIRICRELHEDGTPHLHVLIQFEGKFQCKNQRFFDLTSPSRSAHFHPNIQGAKSSTDVKAYMEKDGDVLDHGVFQIDGRSARGGCQTANDAYAEAINSGSKAEALNILKEKAPKDFVLQFHNLNSNLDRIFAPPLEVFVCPFLSSSFDQVPEELEEWVSENVSGAAARPWGPKSIVIEGDSRTGKTMWARSLGPHNYLCGHLDLSPKVYSNDAWYNVIDDVDPHYLKHFKEFMGAQRDWQSNTKYGKPVQIKGGIPTIFLCNPGPTSSYKEYLNEDKNSALKDWALKNAEFITLNSPLYSGTNQSATQNSQEEAYSETES

SEQ ID NO: 15278 - protein, 361 aa, Stachytarpheta leaf curl virus
MPPPRRFKIQAKNYFLTYPQCSLTKEEALSQLQNLETPTNKKYIKICRELHEDGSPHIHVLIQFEGKYVCTNNRFFDLVSPTRSAHFHPNIQGAKSSSDVKSYIDKDGDTLEWGEFQIDGRSARGGQQSANDAYAAALNTGSKSEALNVIKELAPKDYVLQFHNLNANLDRIFAPPLEVFVCPFSSSSFDQVPEELHEWSANNVVNAAARPLRPISIVIEGDSRTGKTMWARSLGPHNYLCGHLDLSPKVYSNDAWYNVIDDVDPHYLKHFKEFMGAQRDWQSNTKYGKPVQIKGGIPTIFLCNPGPNSSYKEFLDEEKNSALKNWAIHNAIFVTIQRPLYSGSNQGATQNSQANNEETTS

SEQ ID NO: 15279 - protein, 211 aa, Stachytarpheta leaf curl virus
MPPPRRFKIQAKNYFLTYPQCSLTKEEALSQLQNLETPTNKKYIKICRELHEDGSPHLHVLIQFEGKYVCTNNRFFDLVPPTRSAHFHPNIQGAKSSSDVKSYIDKNGDTLEWGEFQIDGRSARGGQQSANDAYAAALNTGSKSEALNVIKELAPKDYVLQFHNLNANLDRIFAPPLEVFVCPFSSSSFDQVPEELHEWSANNVVSAVGGI

SEQ ID NO: 15280 - protein, 361 aa, Croton yellow vein mosaic virus
MPRINSFCVNAKNIFLTYPKCPIPKEQMLEILKNISCPSNRLFIRVAQEKHQDGSMHIHALIQFKGKSKFRNPRHFDVTHPNSSTQFHPNFQGAKSSSDVKSYIEKDSDYIDWGEFQIDGRSARGGQQTANDAAAEALNAGSTEAALAIIREKLPKDFIFQYHNLKCNLDRIFTPPMEVYVSPFSSSSFDQVPEELEEWAAENVVSAAARPIRPISIVIEGDSRTGKTMWARSLGPHNYLCGHLDLSPKVYSNDAWYNVIDDVDPHYLKHFKEFMGAQKDWQSNTKYGKPVQIKGGIPTIFLCNPGPDSSYKEFLDEEKNAALKNWALKNATFITLEGPLYSGSNQSAAQDSQEGDQASTS

SEQ ID NO: 15281 - protein, 362 aa, Tomato leaf curl Vietnam virus
MAPPNKFRINAKNYFLTYPHCSLTKEEALSQLKNLETPVNKLFIRICREFHEDGTPHLHVLIQFEGKFQCKNQRFFDLTSPSRSAHFHPNIQAAKSSTDVKAYMDKDGDVLDHGVFQIDGRSARGGCQSANDAYAEAINSGSKASALNILREKAPKDFVLQFHNLNSNLDRIFTPPMEVYVSPFSSSSFDRVPEELEEWAAENVVSSAARPLRPISIVIEGDSRTGKTMWARSLGPHNYLCGHLDLSPKVYSNDAWFNVIDDVDPHYLKHFKEFMGAQRDWQSNTKYGKPVQIKGGIPAIFLCNPGPNSSYKEYLDEEKNTALKSWAIKNAVFVSITEPLYSSTYQSPAQDSEEENNQETED

SEQ ID NO: 15282 - protein, 362 aa, Legume yellow mosaic virus
MPREGRFAINAKNYFLTYPKCPLTKEDALEQLLALSTPVNKKFIRICRELHEDGQPHLHVLLQFEGKQQTKNQGFFDLHSRCRSAYYHPNIQAAKSCSDVKSYMEKDGDILDHGTFQIDGRSARGGKQSANDAYAEALNSGSKLEALLILKEKAPKDFILQFHNLNCNLSRIFTEPVQAYQSPFTLESFNKVPSYISSWAERNVRDPAARPDRPISIVIEGDSRTGKTMWARAIGPHNYLCGHLDLNDKTYSNEAWYNVIDDVDPHYLKHFKEFMGAQRDWQSNVKYGKPTKIKGGIPTIFLCNPGPKSSYKEYLDEENNAALKQWASKNAEFYTLKEPLFSSVNQGSTQGRQEESNSTISN

SEQ ID NO: 15283 - protein, 362 aa, Legume yellow mosaic virus
MPREGRFAINAKNYFLTYPKCPLTKEDALEQLLALSTPVNKKFIRICRELHEDGQPHLHVLLQFEGKQQTKNQRFFDLHSRCRSAYYHPNIQAAKSCSDVKSYMEKDGDILDHGTFQIDGRSARGGKQSANDAYAEALNSGSKLEALLILKEKAPKDFILQFHNLNCNLSRIFTEPVQAYQSPFTLESFNKVPSYISSWAERNVRDPAARPDRPISIVIEGDSRTGKTMWARAIGPHNYLCGHLDLNDKTYSNEAWYNVIDDVDPHYLKHFKEFMGAQRDWQSNVKYGKPTKIKGGIPTIFLCNPGPKSSYKEYLDEENNAALKQWASKNAEFYTLKEPLFSSVNQGSTQGRQEESNSTISN

SEQ ID NO: 15284 - protein, 362 aa, Legume yellow mosaic virus
MPREGRFAINAKNYFLTYPKCPLTKEDALEQLLALSTPVNKKFIRICRELHEDGQPHLHVLLQFEGKQQTKNQRFFDLHSRCRSAYYHPNIQAAKSCSDVKTYMEKDGDILDHGTFQIDGRSARGGKQSANDAYAEALNSGSKLEGLLILKEKAPKDFILQFHNLNCNLSRIFTEPVQAYMSPFTPESFNKVPRYISPWAERNVRDPAARPDRPISIVIEGDSRTGKTMWARAIGPHNYLCGHLDLNGQTYSTEAWYNVIDDVDPHYLKHFKEFMGAQRDWQSNVKYGKPTKIKGGIPTIFLCNPGPKSSYKEYLDEENNAALKQWASKNAEFYTLKEPLFSTVNQGSSQGRQEESNSTISN

SEQ ID NO: 15285 - protein, 362 aa, Legume yellow mosaic virus
MPREGRFAINARNYFLTYPKCPLTKEDALEQLLALSTPVNKKFIRICRELHEDGQPHLHVLLQFEGKHQTRNQRFFDLHSRCRSAYYHPNIQAAKSCSDVKTYMEKDGDVLDHGTFQIDGRSARGGKQSANDACAEALNSGSKLEALIILKEKAPKDFILQFHNLNCNLSRIFTEPVQAYVSPFTLESFNKVPSYISSWAERNVRDPAARPDRPISIVIEGDSRTGKTMWARAIGPHNYLCGHLDLNDKTYSNEAWYNVIDDVDPHYLKHFKEFMGAQRDWQSNVKYGKPTKIKGGIPTIFLCNPGPKSSYKEYLDEENNAALKQWASKNAEFYTLKEPLFSSVNQGSTQGRQEESNSTISN

SEQ ID NO: 15286 - protein, 363 aa, Tobacco leaf curl Yunnan virus
MAPPKRFKIQAKNYFLTYPQCSLTKEEALSQLQALETPTNKKYIKICRELHEDGSPHLHVLIQFEGKYVCTNNRFFDLVSPTRSAHFHPNIQGAKSSSDVKSYIDKDGDTLEWGEFQIDGRSARGGQQTANDAYAQALNSGSKSEALNVIKELAPKDFVLQFHNLNANLDRIFAPPLEVFVSSFFIFIIWIKFPKNLKSGLLDNVRHAAARPWRPISIVIEGESRTGKTMWARSLGPHNYLCGHLDLSPKVYSNDAWYNVIDDVDPHYLKHFKEFMGAQRDWQSNTKYGKPIQIKGGIPTIFLCNPGPTSSYKEFLEEEKNSALKEWALKNAEFITLNSPLYSGTNQSATQNSQEEASSQAES

SEQ ID NO: 15287 - protein, 363 aa, Tobacco leaf curl Yunnan virus
MAPPKRFKIQAKNYFLTYPQCSLNKEEALSQLQALETPTNKKYIKICRELHEDGSPHLHVLIQFEGKYVCTNNRFFDLVSPTRSAHFHPNIQGAKSSSDVKSYIDKDGDTLEWGEFQIDGRSARGGQQTANDAYAQALNSGSKSEALNVIKELAPKDFVLQFHNLNANLDRIFAPPLEVFGSPFLSFIIWIKFPKNLKNGAADNVRHAGARPWRPISIVIEGESRTGKTMWARSLGPHNYLCGHLDLSPKVYSNDAWYNVIDDVDPHYLKHFKEFMGAQRDWQSNTKYGKPIQIKGGIPTIFLCNPGPTSSYKEFLEEEKNSALKEWALKNAEFITLNSPLYSGTNQSATQNSQEEASSQAES

SEQ ID NO: 15288 - protein, 361 aa, Tomato leaf curl Gujarat virus
MAAPNRFKINAKNYFLTYPKCSLTKEEALSQLLNLQTPTFKKFIRICRELHDDGTPHLHVLIQFEGKFQCKNNRFFDLTSPTRSAHFHPNIQGAKSSSDVKSYMEKDGDVIDHGVFQVDGRSARGGCQSANDAYAEAINSGSKAQALNILREKAPKDFVLQFHNLNSNLDRIFTPPMDVYVSPFISSSFDQVPEELEAWAAENVCSPAARPLRPISIVIEGDSRTGKTMWARSLGPHNYLCGHLDLSPKVYSNDAWYNVIDDVDPHYLKHFKEFMGAQRDWQSNTKYGKPVQIKGGIPTTFLCNPGPNSSYKEYLDEEKNSALKNWALKNATFVTLEGPLYSSTNQSTAQASQEGDQTSTS

SEQ ID NO: 15289 - protein, 359 aa, Tomato yellow leaf curl Malaga virus
MAPPKRFQINCKNYFLTYPKCSLTKEEALSQLKNLETPTNKKYIKVCRELHENGEPHLHVLIQFEGKFKCQNQRFFDLVSPSRAAHFHPNIQGAKSSSDVKSYVDKDGDTVDWGEFQIDGRSARGGQQSANDAYAAALNSGSKSEALRIIKELIPKDYILQFHNLNSNLDRIFQEPPAPYISPFLSSSFNQVPDELEVWVSENVVSSAARPWRPNSIVIEGDSRTGKTMWARSLGPHNYLCGHLDLSPKVYSNDAWYNVIDDVDPHYLKHFKEFMGAQRDWQSNTKYGKPIQIKGGIPTIFLCNPGPTSSYREYLDEEKNISLKNWALKNATFVTLYEPLFASINQGPTQDSQEETNKA

SEQ ID NO: 15290 - protein, 353 aa, Bean golden yellow mosaic virus
MPPPQRFRVQSKNYFLTYPRCTIPKEEALSQLQKIHTTTNKKFIKVCEERHDNGEPHLHALIQFEGKFICTNKRLFDLVSTTRSAHFHPNIQGAKSSSDVKEYIDKDGVTIEWGQFQVDGRSARGGQQSANDSYAKALNADSIESALTILKEEQPKDYVLQNHNIRSNLERIFFKVPEPWVPPFPLSSFVNIPVVMQDWVDDYFGRGSAARPERPISIIVEGDSRTGKTMWARALGPHNYLSGHLDFNSRVYSNSVEYNVIDDISPNYLKLKHWKELIGAQKDWQSNCKYGKPVQIKGGIPSIVLCNPGEGSSYKDFLNKEENRALHNWTIHNAIFVTLTAPLYQSTAQDCQT

SEQ ID NO: 15291 - protein, 353 aa, Bean golden yellow mosaic virus
MPPPQRFRVQSKNYFLTYPRCSIPKEEALSQLQKIHTATNKKFIKVCEERHENGEPHLHALIQFEGKFVCTNKRLFDLVSSTRSTHFHPNIQGAKSSSDVKKYIDKDGVTIEWGQFQVDGRSARGGQQSANDSYAKALNADSIESALTILKEEQPKDYVLHNHNIRSNLERIFVKAPEPWVPPFPLSSFINVPVVMQEWVDDYFGRGSAARPERPISIIVEGDSRTGKTMWARALGPHNYLSGHLDFNSRVYSNAVKYNVIDDISPNYLKLKHWKELIGAQKDWQSNCKYGKPVQIKGGIPPIVLCNPGEGSSYKDFLDKEENRALHNWTIHNAIFVTLTAPLYQSTAQDCQT

SEQ ID NO: 15292 - protein, 360 aa, Tomato leaf curl Bangalore virus
MPRPGRFNINAKNYFLTYPKCSLSKERHLSQLQTVKTPTSKLFIRVCRELHVDGEPHLHVLIQFEGKFQCTNNRFFDLVSPTRSTHFHPNIQKAKSSSDVKAYVEKDGDFIDFGVFQIDGRSARGGQQSANDAYAEAINSGSKAAALDILREKAPKDFVLQFHNLNANLDRIFTPSAEVYVSPFLCSSFDTVPEELHHWAAENVVDAAAAIRPISIVIEGDSRTGKTMWARSLGPHNYLCGHLDLSPRVYSNDAWYNVIDDVDPHYLKHFKEFMGAQRDWQSNTKYGKPVQIKGGIPTIFLCNPGPNSSYKEFLDEDKNNALKQWALKNATFITLEGPLYSGSNQSATQPSQEGDQASTS

SEQ ID NO: 15293 - protein, 361 aa, Tomato leaf curl Gujarat virus-[Vadodara]
MAAPNRFKINAKNYFLTYPKCSLTKEEALSQLLNLQTPTSKKFIRICRELHEDGTPHLHVLIQFEGKFQCKNNRFFDLTSPTRSAHFHPNIQGAKSSSDVKSYMEKDGDVVDHGVFQVDGRSARGGCQSANDAYAEAINSGSKAQALNILREKAPKDFVLQFHNLNSNLDRIFTPPMDVYVSPFLSSSFDQVPEELEEWAAENVVSSAARPLRPISIVIEGDSRTGKTMWARSLGPHNYLCGHLDLSPKVYSNYAWYNVIDDVDPHYLKHFKEFMGAQRDWQSNTKYGKPVQIKGGIPTIFLCNPGPNSSYKEYLDEEKNSALKNWALKNATFVTLEGPLYSGTNQSTAQASQEGDQTSTS

SEQ ID NO: 15294 - protein, 361 aa, Tomato leaf curl Gujarat virus-[Kelloo]
MAAPNRFKINAKNYFLTYPKCSLTKEEALSQLLNLQTPTFKKFIRICRELHEDGTPHLHVLIQFEGKFQCKNNRFFDLTSPTRSAHFHPNIQGAKSSSDVKSYMEKDGDVIDHGVFQVDGRSARGGCQSANDAYAEAINSGSKAQALNILREKAPKDFVLQFHNLNSNLDRIFTPPMDVYVSPFLSSSFDQVPEELEEWAAENVCSPAARPLRPISIVIEGDSRTGKTMWARSLGPHNYLCGHLDLSPKVYSNDAWYNVIDDVDPHYLKHFKEFMGAQRDWQSNTKYGKPVQIKGGIPTTFLCNPGPNSSYKEYLDEEKNSALKNWALKNATFVTLEGPLYSGTNQSTAQASQEGNQTSTS

SEQ ID NO: 15295 - protein, 361 aa, Tomato leaf curl Karnataka virus
MAAPNRFKLNAKNYFLTYPKCSLTKEEALSQFLNLQTPTSKKFIRICRELHEDGTPHLHVLIQFEGKFQCKNNRFFDLTSPTRSAHFHPNIQGAKSSSDVKTYMEKDGDILDHGVFQVDGRSARGGCQSANDAYAEAINAGSKIEALNILREKAPKDYVLQFHNLNSNLDRIFTPPMEVYVSPFSSSSFDQVPEELEEWAAENVVNAAARPLRPVSIVIEGDSRTGKTMWARSLGPHNYLCGHLDLSPKVYSNDAWYNVIDDVDPNYLKHFKEFMGAQRDWQSNRKYNKPVQIKGGIPTIFLCNPGPNSSYKEFLDEEKNSKLKNWAIKNATFVTPEGPLYSGTNQSAAQASQEGDQTSTS

SEQ ID NO: 15296 - protein, 361 aa, Tomato leaf curl Bangalore virus-[Ban5]
MPQIKRFQIYAKNYFLTYPKCSISKEEALSQLQNLETPTNKLFIRVSRELHDDGEPHLHVLIQFEGKFKCQNNRFFDLVSPTRSTHFHPNIQGAKSSSDVKAYVEKDGGFIDFGVFQIDGRSARGGQQSANDAYAEAINSGSKAAALNILREKAPKDFVLQFHNLNANLDRIFTPPLEVYISPFSSSSFDTVPEELYQWAADNVVDAAARPIRPISIVIEGDSRTGKTMWARSLGPHNYLCGHLDLSPRVYSNDAWYNVIDDVDPHYLKHFKEFMGAQKDWQSNTKYGKPVQIKGGIPTIFLCNPGPNSSYKEFLDEDKNNALKQWALKNARFITLEEPLYSGSNQSAAQVSQEGDQASTS

SEQ ID NO: 15297 - protein, 361 aa, Tomato leaf curl Bangalore virus-[Kolar]
MPRAGRFNINAKNYFLTYPKCSLSKETHLSQLQNLETPTSKLFIRVCRELPDDGEPHLHVLIQFEGKFQCNNNRFFDLVSPTRSTHFHPNIQGAKSSSDVKAYVEKDGDFIDFGVFQIDGRSARGGQQSANDAYAEAINSGSKAAALNILREKAPKDFVLQFHNLNANLDRIFTPPVEVYISPFSSSSFDTVPEELYQWAAENVVNAAARPIRPISIVIEGDSRTGKTMWARSLGPHNYLCGHLDLSPRVYSNGAWYNVIDDVDPHYLKHFKEFMGAQKDWQSNTKYGKPVQIKGGIPTIFLCNPGPNSSYKEFLEEDKNNALKQWALKNATFITLEGPLYSGSNQSATQPSQEGDQASTS

SEQ ID NO: 15298 - protein, 361 aa, Tomato leaf curl Bangalore virus-[Ban4]
MAAPNRFKINAKNYFLTYPKCSLNKRRALSQLLNLQTPTSKKFIRICGELHEDGTPHLHVLIQFEGKFQCKNNRFFDLTSPTRSAHFHPNIQGAKSASDVKSYMEKDGDVIDHGVFQVDGRSARGGCQSANDAYAEAINSGSKAEALNILKEKAPRDFLLQFHNLNSNLDRYFQEPPAPYVSPFHSSSFDTVPEELYQWAAENVVDAAARPIRPISIVIEGDSRTGKTMWARSLGPHNYLCGHLDLSPRVYSNDAWYNVIDDVDPHYLKHFKEFMGAQRDWQSNTKYGKPVQIKGGIPIIFLCNPGPNSSYKEFLDEDKNNALKQWTLKNARFITLEEPFYSGSNQSATQVSQEGDQASTS

SEQ ID NO: 15299 - protein, 359 aa, Tomato yellow leaf curl virus-[Portugal]
MAPPKRFQINCKNYFLTYPKCSLTKEEALSHLKDLETPTNKKYIKVCRELHENGEPHLHVLIQFEGKFKCQNQRFFDLVSPSRAAHFHPNIQGAKSSSDVKSYVDKDGDTVDWGEFQIDGRSARGGQQSANDAYAAALNSGSKSEALRIIKELIPKDYILQFHNLNSNLDRIFQEPPAPYISPFLSSSFNQVPDELEVWVSENVVSSAARPWRPNSIVIEGDSRTGKTMWARSLGPHNYLCGHLDLSPKVYSNDAWYNVIDDVDPHYLKHFKEFMGAQRDWQSNTKYGKPIQIKGGIPTIFLCNPGPTSSYREYLDEEKNISLKNWALKNATFVTLYEPLFASINQGPTQDSQEETNKA

SEQ ID NO: 15300 - protein, 359 aa, Tomato yellow leaf curl virus-[Aichi]
MAPPKRFQINCKNYFLTYPKCSLTKEEALSQLKDLETPTNKKYIKVCRELHENGEPHLHVLIQFEGKFKCQNQRFFDLVSPSRAAHFHPNIQGAKSSSDVKSYVDKDGDTVDWGEFQIDGRSARGGQQSANDAYAAALNSGSKSEALRIIKELIPKDYILQFHNLNSNLDRIFQEPPAPYISPFLSSSFNQVPDELEVWVSENVVSSAARPWRPNSIVIEGDSRTGKTMWARSLGPHNYLCGHLDLSPKVYSNDAWYNVIDDVDPHYLKHFKEFMGAQRDWQSNTKYGKPIQIKGGIPTIFLCNPGPTSSYREYLDEEKNISLKNWALKNATFVTLYEPLFASINQGPTQDSQEETNKA

SEQ ID NO: 15301 - protein, 357 aa, Tomato yellow leaf curl virus-[Cuba]
MPRLFKIYAKNYFLTYPNCSLSKEEALSQLKNIETPTNKKYIKVCREFHENGEPHLHVLIQFEGKYQCKNQRFFDLVSPNRSAHFHPNIQAAKSSTDVKTYVEKDGDFIDFGVFQIDGRSARGGQQSANDAYAEALNSSSKSEALNILKEKAPKDYILQFHNLSSNLDRIFSPPLEVYVSPFLSSSFNQVPDELEEWVAENVVYSAARPWRPISIVIEGDSRTGKTMWARSLGQHNYLCGHLDLSPKVYSNDAWYNVIDDVDPHYLKHFKEFMGAQRDWQSNTKYGKPIQIKGGIPTIFLCNPGPTSSYREYLDEEKNISLKNWALKNATFVTLYEPLFASINQGPTQDSQEETNKA

SEQ ID NO: 15302 - protein, 357 aa, Tomato yellow leaf curl virus-[Dominican Republic]
MPRLFKIYAKNYFLTYPNCSLSKEEALSQLKNIETPTNKKYIKVCREFHENGEPHLHVLIQFEGKYQCKNQRFFDLVSPNRSAHFHPNIQAAKSSTDVKTYVEKDGDFIDFGVFQIDGRSARGGQQSANDAYAEALNSGSKSEALNILKEKAPKDYILQFHNLSSNLDRIFNPPLEVYVSPFLSSSFNQVPDELEEWVAENVVYSAARPWRPISIVIEGDSRTGKTMWARSLGPHNYLCGHLDLSPKVYSNDAWYNVIDDVDPHYLKHFKEFMGAQMDWQSNTKYGKPIQIKGGIPTIFLCNPGPTSSYREYLDEEKNISLKNWALKNATFVTLYEPLFASINQGPTQDSQEETNKA

SEQ ID NO: 15303 - protein, 359 aa, Tomato yellow leaf curl virus-[Shizuokua]
MAPPKRFQINCKNYFLTYPKCSLTKEEALSQLKNLETPTNKKYIKVCRELHENGEPHLHVLIQFEGKFKCQNQRFFDLVSPSRAAHFHPNIQGAKSSSDVKSYVDKDGNTVDWGEFQIDGRSARGGQQSANDAYAAALNSGSKSEALRIIKELIPKDYILQFHNLNSNLDRIFQEPPAPYISPFLSSSFNQVPDELEVWVSENVVSSAARPWRPNSIVIEGDSRTGKTMWARSLGPHNYLCGHLDLSPKVYSNDAWYNVIDDVDPHYLKHFKEFMGAQRDWQSNTKYGKPIQIKGGIPTIFLCNPGPTSSYREYLDEEKNISLKNWALKNATFVTLYEPLFASINQGPTQDSQEETNKA

SEQ ID NO: 15304 - protein, 359 aa, Tomato yellow leaf curl virus-Iran
MAAPNRFKINAKNYFLTYPKCSLTKEEALSQLLNIQTPTSKKFIRICRELHEDGTPHLHVLIQFEGKFQCKNNRFFDLTSPTRSAHFHPNIQGAKSSSDVKTYMEKDGDILDHGVFQVDGRSARGGCQSANDAYAEAINSGSKAQALNILKEKAPRDFILQFHNLNNNLDRIFQEPPAPYVSPFLSSSFNQVPEELEVWAAENVVSSAARPWRPNSIIIEGDSRTGKTMWARSLGPHNYLCGHLDLSPKVYSNDAWYNVIDDVDPHYLKHFKEFMGAQRDWQSNTKYGKPIQIKGGIPTIFLCNPGPTSSYREYLDEEKNISLKNWALKNATFVTLYKPLFASINQGPTQDSQEETNKA

SEQ ID NO: 15305 - protein, 359 aa, Tomato yellow leaf curl virus-Mild
MAPPKRFQINCKNYFLTYPHCSLTNEEALSQLKNLETPTNKKYIKVCRELHENGEPHLHVLIQFEGKFKCQNQRFFDLVSPGRAAHFHPNIQGAKSSSDVKSYVDKDGDTVDWGEFQIDGRSARGGQQSANDAYAAALNSGSKSEALRIIKELVPKDYILQFHNLNSNLDRIFQEPPAPYISPFLSSSFNQVPDELEVWVSENVMSSAARPWRPNSIIIEGDSRTGKTMWARSLGPHNYLCGHLDLSPKVYSNDAWYNVIDDVDPHYLKHFKEFMGAQRDWQSNTKYGKPIQIKGGIPTIFLCNPGPTSSYREYLDEEKNISLKNWALKNATFVTLYEPLFASINQGPTQDSQEETNKA

SEQ ID NO: 15306 - protein, 362 aa, Bhendi yellow vein mosaic virus-[301]
MPPKRFLINSKNYFLTYPKCSLTKEEALSQIQNLQTPVNKKYIKICREFHEDGEPHLHVLIQFEGKYKCQNQRFFDLVSPTRSAHFHPNIQGAKSSSDVKSYLEKDGDTIDWGGFQIDGRSARGGQQSANDAYAAALNAGSKSEALRVIKELAPKDYVLQFHNLNANLDRIFTPPMEVYVSPFSSSSFDQVPEELEEWAAENVVSAAARPLRPLSLVLEGESRTGKTQWARSLGPHNYLCGHLDLSPKVYSNDAWFNIIDDVDPHYLKHFKEFMGAQRDWQSNTKYGKPVQIKGGIPTIFLCNPGPNASYKEFLDEEKNSALKAWTLKNATFVFLTQPLYSGTNQSSTQGSEESAQEETSGP

SEQ ID NO: 15307 - protein, 361 aa, Tomato yellow leaf curl China virus-[Y64]
MAPPNKFRINAKNYFLTYPHCSLTKEEALSQIQTLETPVNKLFIRICRELHEDGTPHLHVLIQFEGKFQCKNQRFFDLTSPHRSAHFHPNIQGAKSSTDVKSYMEKDGDVLDHGVFQIDGRSARGGCQSANDAYAEAINSGSKASALNILREKAPKDFVLQFHNLNSNLDRIFTPPMEEYISPFSSSSFDQVPEELDEWAVDNVVSAAARPLRPVSIVIEGDSRTGKTMWARSLGPHNYLCGHLDLSPKVYSNDAWFNVIDDVDPHYLKHFKEFMGAQRDWQSNTKYGKPVQIKGGIPTIFLCNPGPNSSYKEYLEEEKNSALRNWAVKNAIFVTLNGPLYSGSYQGATPNRQEDNQTTTS

SEQ ID NO: 15308 - protein, 360 aa, Tomato yellow leaf curl China virus-Tb[Y5]
MAPPNKFRINAKNYFLTYPHCSLTKEEALSQIKALETPVNKLFIRICRELHEDGTPHLHVLIQFEGKFQCKNQRFFDLISPNRSAHFHPNIQGAKSSTDVKTYMEKDGDVLDHGVFQIDGRSARGGCQSANDAYAEAINSGSKASALNILREKAPKDFVLQFHNLNSNLDRIFTPPIENIFLLFLLLLLIKFQKNLMNGAIENVVSACAPLRPVSIVIEGDSRTGKTMWARSLGPHNYLCGHLDLSPKVYNNDAWFNVIDDVDPHYLKHFKEFMGAQRDWQSNTKYGKPVQIKGGIPTIFLCNPGPNSSYKEYLEEEKNSALKKWAVKNAIFVTLQSPLYSGSYQGATPNRQENNQTPES

SEQ ID NO: 15309 - protein, 361 aa, Tomato yellow leaf curl China virus-Tb[Y10]
MPPPNKFRINAKNYFLTYPHCSLTKEEALSQIKALETPITKLFIRICRELHEDGTPHLHILIQFEGKFQCKNQRFFDLISPNRSAHFHPNIQGAKSSTDVKSYMEKDGDVLDHGIFQIDGRSARGGCQSANDAYAEAINSGSKASALNILREKAPKDFVLQFHNLNSNLDRIFTPPIDEYISPFSYSSFDQVPHELDEWAVNNVVSAAARPLRPISIVIEGDSRTGKTMWARSLGQHNYLCGHLDLSPKVYNNNAWYNIIDDVDPHYLKHFKEFMGAQRDWQSNTKYGKPVQIKGGIPTIFLCNPGPNSSYKEYLDEEKNSALKNWAVKNAIFVTLQQPLYSGTYQGETPNRQENNQTTSG

SEQ ID NO: 15310 - protein, 361 aa, Tomato yellow leaf curl China virus-Tb[Y11]
MAPPNKFRINAKNYFLTYPHCSLTKEEALSQIQALEAPINKLFIRICRELHEDGTPHLHVLIQFEGKFQCKNQRFFDLTSPNRSAHFHPNIQGAKSSTDVKSYMEKGGDVLDHGIFQIDGRSARGGCQSANDAYAEAINSGSKASALNILREKAPKDFVLQFHNLNSNLDRIFTPPIEEYISPFSSSSFDQVPEELDEWAVDNIFSAAARPLRPISIVIEGDSRTGKTMWARSLGPHNYLCGHLDLSPKVYNNDAWFNVIDDVDPHYLKHFKEFMGAQRDWQSNTKYGKPVQIKGGIPTIFLCNPGPNSSYKEYLEEEKNSALRNWAIKNAIFVTLKGPLYSGSYQGATPNRQENNQTAEG

SEQ ID NO: 15311 - protein, 360 aa, Tomato yellow leaf curl China virus-Tb[Y8]
MAPPNKFRINAKNYFLTYPHCSLTKEEALSQIQTLETPVNKLFIRICRELHEDGTPHLHVLIQFEGKFQCKNQRFFDLTSPHRSAHFHPNIQGAKSSTDVKSYMEKDGDVLDHGVFQIDGRSARGGCQSANDAYAEAINSGSKASALNILREKAPKDFVLQFHNLNSNLDRIFTPPMENIFLLFLPLLLTKFPKNLMSGAVDNVVSACAPLRPVSIIIEGDSRTGKTMWARSLGPHNYLCGHLDLSPKVYSNDAWFNVIDDVDPHYLKHFKELMGAQRDWQSNTKYGKPVQIKGGIPTIFLCNPGPNSSYKEYLEEEKNSALRNWAVKNAIFVTLNGPLYSGSYQGATPNRQEDNQTTTS

SEQ ID NO: 15312 - protein, 361 aa, Tomato yellow leaf curl China virus-Tb[Y36]
MAPPNKFRINAKNYFLTYPHCSLTKEEALSQIQTLETPVNKLFIRICRELHEDGTPHLHVLIQFEGKFQCKNQRFFDLTSPHRSTHFHPNIQGAKSSTDVKSYMEKDGDVLDHGVFQIDGRSARGGCQSANDAYAEAINSGSKASALNILREKAPKDFVLQFHNLNSNLDRIFTPPMEEYISPFSSSSFDQVPEELDEWAVDNVVSAAARPLRPVSIVIEGDSRTGKTMWARSLGPHNYLCGHLDLSPKVYSNDAWFNVIDDVDPHYLKHFKEFMGAQRDWQSNTKYGKPVQIKGGIPTIFLCNPGPNSSYKEYLEEEKNSALRNWAVKNAIFVTLNGPLYSGSYQGATPNRQEDNQTTTS

SEQ ID NO: 15313 - protein, 361 aa, Tomato yellow leaf curl China virus-Tb[Y38]
MAPPNKFRINAKNYFLTYPHCSLTKEEALSQIQTLETPVNKLFIRICRELHEDGTPHLHVLIQFEGKFQCKNQRFFDLTSPHRSAHFHPNIQGAKSSTDVKSYMEKDGDVLDHGVFQIDGRSARGGCQSANDAYAEAINSGFKASALNILREKAPKDFVLQFHNLNNNLDRIFTPPMEEYISPFSSSSFDQVPEELDEWAVDNVVSAAARPLRPISIVIEGDSRTGKTMWARSLGPHNYLCGHLDLSPKVYSNDAWFNVIDDVDPHYLKHFKEFMGAQRDWQSNTKYGKPVQIKGGIPTIFLCNPGPNSSYKEYLEEEKNSALRNWAVKNAIFVTLNGPLYSGSYQGATPNRQEDNQTTTS

SEQ ID NO: 15314 - protein, 361 aa, Tomato yellow leaf curl China virus-To[Y25]
MAPPHKFRINAKNYFLTYPHCSLTKEDTLSQIQALETPVNKLFIRICRELHEDGSPHLHVLIQFEGKFQCKNQRFFDLTSPSRSAHFHPNIQGAKSSTDVKTYMEKDGDVLDHGVFQIDGRSARGGCQSANDAYAEAINSGSKASALNILREKAPKDFVLQFHNLNSNLDRIFTPPMEIYISPFSSSSFDQVPEELEDWAADNVVSAAARPLRPVSIVIEGDSRTGKTMWARSLGPHNYLCGHLDLSPKVYSNDAWFNVIDDVDPHYLKHFKEFMGAQRDWQSNTKYGKPVQIKGGIPTIFLCNPGPNSSYKEYLDEEKNSALRNWAVKNAIFVTLQGPLYSGSYQGATPNRQEDDQTTES

SEQ ID NO: 15315 - protein, 359 aa, Tomato yellow leaf curl Gezira virus
MAPPKRFQINCKNYFLTYPQCSLTREEALSQLQNLETPTNKKYIKVCRELHENGEPHLHVLIQFEGKFKCQNQRFFDLVSPSRAAHFHPNIQGAKSSSDVKSYIEKEGDTLDWGQFQIDGRSARGGQQSANDAYAAAINSGSKAEALRVLRELAPRDYILQFHNLNSNLDRIFQEPPAPYSSPFLSSSFNQVPEELEVWVSENVMSSAARPWRPNSIIIEGDSRTGKTMWARSLGPHNYLCGHLDLSPKVYSNDAWYNVIDDVDPHYLKHFKEFMGAQRDWQSNTKYGKPIQIKGGIPTIFLCNPGPTSSYREYLDEEKNISLKNWALKNATFVTLYEPLFSSTNQGPTQDSQEETNKA

SEQ ID NO: 15316 - protein, 359 aa, Tomato yellow leaf curl Gezira virus-[1]
MAPPKRFKINAKNYFLTYPQCSLSLSEALSQLQTLETPVNKLYIKICRELHENGEPHLHALVQFEGKYQCTNNRFFDLASPSRSTHFHPNIQGAKSSSDVKSYIDKDGDTIDWGEFQIDGRSARGGQQSANDAYAAALNAGSKSEALRIIKELAPKDYILQFHNLNSNLDRIFQEPPAPYISPFLSSSFNQVPEELEVWVSENVMSSAARPWRPNSIIIEGDSRTGKTMWARSLGPHNYLCGHLDLSPKVYSNDAWYNVIDDVDPHYLKHFKEFMGAQRDWQSNTKYGKPIQIKGGIPTIFLCNPGPTSSYKEYLDEEKNISLKNWALKNATFVTLYEPLFSSTNQGPTQNSQETTNQA

SEQ ID NO: 15317 - protein, 359 aa, Tomato yellow leaf curl Gezira virus-[Shambat]
MAPPKRFQINCKNYFLTYPQCSLTKEETLSQIKNLDTPTNKKYIKICRELHENGEPHIHVLIQFEGKFKCQNQRFFDLVSPSRAAHFHPNIQGAKSSSDVKSYIDKDGDTIDWGEFQIDGRSARGGQQSANDAYAAALNSGSKSEALRIIKELAPKDYILQFHNLTNNLDRIFQEPPAPYISPFLSSSFNQVPEELEVWVSENVMSSAARPWRPNSIVIEGDSRTGKTMWARSLGPHNYLCGHLDLSPKVYSNDAWYNVIDDVDPHYLKHFKEFMGAQRDWQSNTKYGKPIQIKGGIPTIFLCNPGPTSSYKEYLDEEKNISLKNWALKNATFVTLYEPLFSSTNQGPTQASQEETNQA

SEQ ID NO: 15318 - protein, 359 aa, Tomato yellow leaf curl Sardinia virus-[Spain2]
MAQPKRFQINAKHYFLTFPKCSLSKEEALEQLLQLQTPTNKKYIKICRELHEDGQPHLHMLIQFEGKFNCKNNRFFDLVSPTRSAHFHPNIQGAKSSSDVKSYIDKDGDVLEWGTFQIDGRSARGGQQTANDAYAKAINAGRKSEALDVIKELAPRDYILHFHNINSNLNMVFQVPPAPYVSPFLSSSFDQVPDELEHWVSENVMDVAARPWRPVSIVIEGDSRTGKTMWARSLGPHNYLCGHLDLSQKVYSNNAWYNVIDDVDPHYLKHFKEFMGSQRDWQSNTKYGKPIQIKGGIPTIFLCNPGPQSSFKEYLDEEKNQTLKNWAIKNAIFVTIHQPLFTNTNQDPTPHRQEETSEA

SEQ ID NO: 15319 - protein, 359 aa, Tomato yellow leaf curl Sardinia virus-[Sicily]
MAQPKRFQINAKHYFLTFPKCCLTKEEALEQLLKLQTPTNKKYIKICRELHEDGQPHLHILMQFEGKFNCKNNRFFDLVSPTRSAHFHPNIQGAKSSSDVKSYIDKDGDVLEWGTFQIDGRSARGGQQTANDAYAKAINARSKSEALDVIKQLAPRDYVLHFHNISSNLDKVFQVPPAPYVSPFLSSSFDQVPEELEHWVSENVMDVAARPWRPVSIVIEGDSRTGKTMWARSLGPHNYLCGHLDLSQKVYSNNAWYNVIDDVDPHYLKHFKEFMGAQRDWQSNTKYGKPIQIKGGIPTIFLCNPGPQSSFKEYLDEEKNQALKNWAVKNAIFVTIDQPLFTDTHQNTTPHRQEEAGEA

SEQ ID NO: 15320 - protein, 360 aa, Tomato yellow leaf curl Thailand virus-[1]
MPPSKKFLINAKNYFLTYPHCSLTKEEALSQILNLSTPTNKLFIRICRELHEDGTPHLHLLIQFEGKFKCQNNRFFDLTSPTRSAHFHPNIQGAKSSTDVKAYMEKDGDVLDHGIFQIDGRSARGGCQSANDAYAEAINSGSKASALNILREKAPKDFVLQFHNLNSNLDRIFTPPIEEYISPFSSSSFNQVPEELEEWACNNVLSRARPLRPISIVIEGDSRTGKTMWARSLGPHNYLCGHLDLSPKVYNNDAWFNVIDDVDPHYLKHFKEFMGAQRDWQSNTKYGKPVQIKGGIPTIFLCNPGPNSSYKEYLEEEKNSALRNWAIKNAIFVTLEGPLYSGTYQGATPNSQEDNQTTES

SEQ ID NO: 15321 - protein, 361 aa, Tomato yellow leaf curl Thailand virus-[Myanmar]
MAPPNKFRINAKNYFLTYPHCSLTKEEALSQIRALETPTNKLFIRICRELHEDGTPHLHVLIQFEGKFQCKNQRFFDLTSPTRSAHFHPNIQGAKSSTDVKSYMEKDGDVLDHGIFQIDGRSARGGCQSANDAYAEAINSGSKASALNILREKAPKDFVLQFHNLNSNLDRIFTPPIEEYISPFSSSSFNQVPEELEDWACNNVLNAAARPLRPISVVIEGDSRTGKTMWARSLGPHNYLCGHLDLSPKVYNNDAWFNVIDDVDPHYLKHFKEFMGAQRDWQSNTKYGKPVQIKGGIPTIFLCNPGPNSSYKEYLEEEKNSALKNWAIKNAIFVTLQGPLYSGTYQGATPNSQEGNQTEEG

SEQ ID NO: 15322 - protein, 361 aa, Tomato yellow leaf curl Thailand virus-[Y72]
MPPSKKFLINAKNYFLTYPHCSLTKEEALSQILNLSTPTNKLFIRICRELHEDGTPHLHVLIQFEGKFKCQNNRFFDLTSPTRSAHFHPNIQGAKSSTDVKTYMDKDGDVLDHGIFQIDGRSARGGCQTANDAYAEAINSGSKASALNILREKAPKDFVLQFHNLNSNLDRIFSTPKEEYISPFCSSSFDQVPDELEEWASENVVTAAARPLRPVSIVIEGDSRTGKTMWARSLGPHNYLCGHLDLSPKVYNNDAWFNVIDDVDPHYLKHFKEFMGAQRDWQSNTKYGKPVQIKGGIPTIFLCNPGPNSSYKEYLEEEKNSALRNWALKNAIFVTLQGPLYSGTHQGTTPNSQEGNQTKES

SEQ ID NO: 15323 - protein, 361 aa, Abutilon mosaic virus-HW
MPPPEKFRVQAKNYFLTYPQYSLAKEVALSQLQNLETPVNKKFIEICRELHENGEPHLHVLIQFEGKFQCTNYRFFDLVSPTRAAHFHPNIQGAKSSSDVKSYIDKDGDTAEWGEFQIDGRSTRGGQQTANDSYAKALNAIDVQSALNILKEEQPKDYVLQNHNIRSNLERIFAKAPEPWVPPFPLSSFTAVPEEMQEWADDYFGSGAAARPHRPLSLIVEGDSRTGKTMWARALGPHNYLSGHLDFNGRVYSNEVLYNVIDDVAPQYLKLKHWKELLGSQKDWQSNCKYGKPVQIKGGIPAIVLCNPGEGSSYKEYLDKEENTGLKNWTRKNAIFITLTSPLYQESTQAGQEEGNQTAED

SEQ ID NO: 15324 - protein, 358 aa, African cassava mosaic virus-[Cameroon-DO2]
  unsure (1)..(358): unsure at all Xaa locations
MRTPRFRVQAKNVFLTYPKGSIPKEHLLSFIQTLSLPSNPKFIKICRELHQNGEPHLHALIQFEGKITITNNRLFDCVHPSCSTSFHPNIQGAKSSSDVKSYLDKDGDTVEWGXFQIDGRSARGGQQSANDAYAKALNSGSKSEALNVIRELVPKDFVLQFHNLNSNLERIFQEPPAPYISPFPCSSFDQVPVELEEWVADNVRASAARPWRPNSIVIEGDSRTGKTIWARSLGPHNYLCGHLDLSPKVFNNAAWYNVIDDVDPHYLKHFKEFMGSQRDWQSNTKYGKPVQIKGGIPTIFLCNPGPTSSYKEFLDEEKQEALKAWALKNAIFITLTEPLYSGSNQSQSQTIQEASHPA

SEQ ID NO: 15325 - protein, 358 aa, African cassava mosaic virus-[Cameroon]
MRTPRFRVQAKNVFLTYPKCSIPKEHLLSFIQTLSLPSNPKFIKICRELHQNGEPHLHALIQFEGKITITNNRLFDCVHPSCSTRFHPNIQGAKSSSDVKSYLDKDGDTVEWGRFQIDGRSARGGQQSANDAYAKALNSGSKSEALNVIRELVPKDFVLQFHNLNSNLERIFQEPPAPYVSPFTCSSFCQVPVELDEWVADNVRDSAARPWRPNSIVIEGDSRTGKTIWARSLGPHNYLCGHLDLSPKVFNNDAWYNVIDDVDPHYLKHFKEFMGSQRDWQSNTKYGKPVQIKGGIPTIFLCNPGPTSSYKEFLDEEKQEALKAWALKNAIFITLTEPLYSGSNQSQSQTIQEASHPA

SEQ ID NO: 15326 - protein, 358 aa, African cassava mosaic virus-[Ivory Coast]
MRTPRFRVQAKNVFLTYPKCSIPKEHLLSFLQTLSLPSNPKFIKICRELHQNGEPHLHALIQFEGKLTITNNRLFDCVHPSCSTNFHPNIQGAKSSSDVKSYLDKDGDTVEWGQFQIDGRSARGGQQSANDAYAKALNSGSKSEALNVIRELVPKDFVLQFHNLNSNLDRIFQEPPAPYVSPFPCSSFDQVPDEIEEWVADNVRDSAARPWRPNSIVIEGDSRTGKTIWARSLGPHNYLCGHLDLSPKVFNNAAWYNVIDDVDPHYLKHFKEFMGSQRDWQSNTKYGKPVQIKGGIPTIFLCNPGPTSSYKEFLDEEKQEALKAWALKNAIFITLTEPLYSGSNQSQSQTIQEASHPA

SEQ ID NO: 15327 - protein, 358 aa, African cassava mosaic virus-[Nigeria-Ogo]
MRTPRFRVQAKNVFLTYPKCSIPKEHQLSFIQTLSLPSNPKFIKICRELHQNGEPHLHALIQFEGKITITNNRLFDCVHPTCSTNFHPNIQGAKSSSDVKSYLDKDGDTVEWGQFQIDGRSARGGQQSANDAYAKGLNSGSKSEALNVIRELVPKDFVLQFHNLNSNLDRIFQEPPAPYVSPFPCSSFDQVPVEIEEWVADNVRDSAARPWRPNSIVIEGASRTGKTIWARSLGPHNYLCGHLDLSPKVFNNAAWYNVIDDVDPHYLKHFKEFMGSQRDWQSNTKYGKPVQIKGGIPTIFLCNPGPTSSYKEFLDEEKQEALKAWALKNAIFITLTEPLYSGSNQSQSQTIQEASHPA

SEQ ID NO: 15328 - protein, 358 aa, African cassava mosaic virus-Uganda Mild
MRTPRFRIQAKNVFLTYPKCSIPKEHLLSFIQTLSLPSNPKFIKICRELHQNGEPHLHALIQFEGKITITNNRLFDCVHPSCSTCFHPNIQGAKSSSDVKSYLDKDGDTVEWGQFQIDGRSARSGQQSANDAYAKALNSGSKSEALNVIRELVPKDFVLQFHNLNSNLDRIFQEPPAPYVSPFPCSSFDQVPVEIEEWVADNVRDSAARPWRPNSIVIEGDSRTGKTIWARSLGPHNYLCGHLDLSPKVFNNAAWYNVIDDVDPHYLKHFKEFMGSQRDWQSNTKYGKPVQIKGGIPTIFLCNPGPTSSYKEFLDEEKQDALKAWALKNAIFITLTEPLYSGSNPSQSQTIQEASHPA

SEQ ID NO: 15329 - protein, 358 aa, African cassava mosaic virus-Uganda Severe
MRTPRFRIQAKNVFLTYPKCSIPKEHLLSFIQTLSLPSNPKFIKICRELHQTGEPHLHALIQFEGKITITNNRLFDCVHPSCSTNFHPNIQGAKSSSDVKSYLDKDGDTVEWGQFQIDGRSARGGQQSANDAYAKALNSGSKSEALNVIRELVPKDFVLQFHNLNSNLDRIFQEPPAPYVSPFPCSSFDQVPDDIEEWVADNVRDSAARPWRPNSIVIEGDSRTGKTIWARSLGPHNYLCGHLDLSPKVFNNAAWYNVIDDVDPHYLKHFKEFMGSQRDWQSNTKYGKPVQIKGGIPTIFLCNPGPTSSYKEFLDEDKQEALKAWALKNAIFITLTEPLYSGSNQSQSQTIQEARHSA

SEQ ID NO: 15330 - protein, 361 aa, Ageratum yellow vein Sri Lanka virus
MAATNRFKINAKNYFLTYPKCSLTKEEALSQLLNLETPTSKKFIRICRELHEDGTPHLHVLIQFEGKFQCRNNRFFDLTSPTRSAHFHPNIQGAKSSSDVKTYMEKDGDILDHGVFQVDGRSARGGCQSANDAYAEAINSGSKAQALNILKEKAPKDFVLQFHNLNSNLDRIFTPPMEVYVSPFLSSSFDQVPEELEEWACENVVSAAARPIRPISIVIEGDSRTGKTMWARSLGPHNYLCGHLDLSPKVYSNDAWYNVIDDVDPHYLKHFKEFMGAQRDWQSNTKYGKPVQIKGGIPTIFLCNPGPNSSYKEYLDEEKNSALKNWALKNATFVTLEEPLYSGTHQSPTQVSEEEQQTSEG

SEQ ID NO: 15331 - protein, 360 aa, Ageratum yellow vein Taiwan virus
MPRSSSFQVKAKNIFLTYPKCPIPKEEALELIKNIQCPSDKLFIRVAQEKHSDGTLHLHALIQFKGKAQFRNSRHFDITHPNTSTQFHPNFQGAKSSSDVKSYIEKDGDYVDWGVFQIDGRSARGGQQTANDAAAEALNAGSKEAAMAIIREKLPKEYIFQFHNLNTNLDRIFAPPLEVFVCPFLSSSFDQVPEELEEWVSENVSGAAARPWRPKSIVIEGESRTGKTMWARSLGPHNYLCGHLDLSPKVYSNDAWYNVIDDVDPHYLKHFKEFMGAQRDWQSNTKYGKPIQIKGGIPTIFLCNPGPTSSYKEYLDEEKNSALKEWAIKNAEFVTLNNPLYSGTNQSAAQNSEEEASSQA

SEQ ID NO: 15332 - protein, 359 aa, Ageratum yellow vein Taiwan virus-[TaiwanPD]
MPRSSSFQVKAENIFLTYPKCPIPKEEALELIKNIQCPSDKLFIRVAQKKHSDGTLHLHALIQFKGKAQFRNSRHFDLTHPNTSTQFHPNFQGAKSSSDVKSYIEKDGDYVDWGVFQIDGRSARGGQQTANDAAAEALNAGSKEAAMAIIREKLPKEYIFQFHNLNTNLDRIFAPPLEVFVCPFLSSSFDQVPEELEEWVSENVSGAARPWRPKSIVIEGESRTGKTMWARSLGPHNYLCGHLDLSPKVYSNDAWYNVIDDVDPHYLKHFKEFMGAQRDWQSNTRYGKPIQIKGGIPTIFLCNPGPTSSYKECLDEEKNSALKEWAIKNAEFVTLNNPLYSGTNQSAAQDSEEEASSQA

SEQ ID NO: 15333 - protein, 353 aa, Bean golden yellow mosaic virus-[Guatemala]
MPPPQRFRVQSKNYFLTYPRCPIPKEEVLSQLQKIHTATNKKFIKVCEERHENGEPHLHALIQFEGKFVCTNKRLFDLVSSTRSAPFHPNIQGAKSSSDVKAYIDKDGVTIEWGQFQVDGRSARGGQQSANDSYAKALNADSIESALTILKEEQPKDYVLQHHNIRSNLERIFVKVPEPWVPPFPLSSFINVPVVMQEWVDDYFGRGSAARPERPISIIVEGDSRTGKTMWARALGPHNYLSGHLDFNSRVYSNAVEYNVIDDISPNYLKLKHWKELIGAQKDWQSNCKYGKPVQIKGGIPSIVLCNPGEGSSYKDFLDKEENRALHNWTIHNAIFVTLTAPLYQSTTQDCQT

SEQ ID NO: 15334 - protein, 353 aa, Bean golden yellow mosaic virus-[Mexico]
MPPPQRFRVQSKNYFLTYPRCSIPKEEALSQLQKIHTATNKKFIKVCEERHENGEPHLHALIQFEGKFVCTNKRLFDLVSSTRSAHFHPNIQGAKSSSDVKAYIDKGGVTIEWGQFQVDGRSARGGQQSANDSYAKALNADSIESALSVLKEEQPKDYVLQHHNIRSNLERIFVKAPEPWVPPFPLSSFINVPVVMQEWVDDYFGRGSAARPERPISIIVEGDSRTGKTMWARALGPHNYLSGHLDFNSRVYSNAVEYNVIDDISPNYLKLKHWKELIGAQKDWQSNCKYGKPVQIKGGIPSIVLCNPGEGSSYKDFLDKEENRALHNWTIHNAIFVTLTAPLYQSTAQDCQT

SEQ ID NO: 15335 - protein, 362 aa, Chayote yellow mosaic virus
MAPPKRFQINAKNYFLTYPQCSLTKEEALSQLRSLRTPTNQKYIKVCRELHEDGQPHLHALIQFEGKYKCQNQRFFDLVSPTRSTHFHPNVQGAKSCSDVKSYIEKDGDSIEWGEFQVDGRSARGGCHKANDAAAEALNAGSAEAALAIIKEKLPKDYIFQYHNIKANLDKIFQAPPEVYVSPFCASSFTQVPDELQRWASANVMDAAARPWRPSSIIVEGDSRTGKTMWARSLGPHNYLCGHLDLSPKVYSNSAWYNVIDDVDPHYLKHFKEFMGAQRDWQSNTKYGKPIQIKGGIPTIFLCNPGPTSSYKEYLDEDKNISLKAWALKNAAFCTLTQPLYSSADQSSTPNREEESHSAQKD

SEQ ID NO: 15336 - protein, 361 aa, Chino del tomate virus-[H6]
MPSVKRFKVSAKNYFLTYPQCSLSKEEALSQLQTLKTPVNKKYIKICRELHENGEPHLHALIQFEGKYQCTNNRFFDLVSPTRSAHFHPNIQGAKSSSDVKSYIDKDGDTVEWGEFQIDGRSARGGQQSANDSYAKALNAGSVQAAMTVLKEEQPKDFVLHNHNIRSNLERIFAKAPERWVPPFQLSSFTNVPDEMQEWADDYFRRSSAARPERPISIIVEGDSRTGKTMWARALGPHNYLSGHLDFNPKVYSNEVEYNVVDDVAPHYLKLKHWKELLGAQKDWQSNCKYGKPVQIKGGIPAIVLCNPGEGASYKDFLNKEENASLRNWTIKNAIFITLTSALYQDSAQASQEEGHQEEAD

SEQ ID NO: 15337 - protein, 361 aa, Chino del tomate virus-[H8]
MPSVKRFKVSAKNYFLTYPQCSLSKEEALSQLQTLKTPVNKKYIKICRELHENGEPHLHVLIQFEGKYQCTNNRFFDLVSPTRSAHFHPNIQGAKSSSDVKSYIDKDGDTVEWGEFQIDGRSARGGQQSANDSYAKALNAGSVQAAMTVLKEEQPKDFVLHNHNIRSNLERIFAKAPERWVPPFQLSSFTNVPDEMQEWADDYFRRSSAARPERPISIIVEGDSRTGKTMWARALGPHNYLSGHLDFNPKVYSNEVEYNVIDDVAPHYLKLKHWKELLGAQKDWQSNCKYGKPVQIKGGIPAIVLCNPGEGASYKDFLNKEENASLRNWTIKNAIFITLTSALYQDSAQASQEEGHQEEAD

SEQ ID NO: 15338 - protein, 363 aa, Cotton leaf curl Alabad virus
MPRNNSFCINAKNIFLTFPKCPIPKEQMLDILSNISCPSDKLFIRVAQEKHQDGSLHIHALIQFKGKAKFRNPRHFDVTHPHTSTQFHPNFQGAKSSSDVKSYIEKDGDYIDWGTFQIDGRSARGGQQTANDAAAEALNAGSKEAAMAIIREKLPEKFIFQYHNLNSNLDRIFTPPLEVYVSPFLSSSFNQVPEELEEWVSENVMDAAARPLRPQSIVIEGDSRTGKTMWARSLGPHNYLCGHLDLSPKVYSNDAWYNVIDDVDPHFLKHFKEFMGAQRDWQSNTKYGKPVQIKGGIPTIFLCNPGPNSSYKEYLDEEKNQALKNWAVKNAVFITLEEPLYSIAHQSPAQGGQEEDQEEESGS

SEQ ID NO: 15339 - protein, 362 aa, Cotton leaf curl Gezira virus
MAPPHRFQIYAKNYFLTFPKCSLTKEEALEQIQKISTASNKKYIKICRELHEDGQPHLHVLLQFEGKFKCQNQRLFDLVSPNRSAHFHPNIQGAKSSSDVKSYIDKDGDTLEWGEFQIDGRSARGGQQTANDAYAAALNAGSKAEALRVIRELAPKDFVLQFHNLNSNLERIFQEPPAPYVSPFLSSSFDQVPEELEEWAAENVVEAAARPSRPISIVIEGESRTGKTVWARSLGPHNYLCGHLDLSPKVFSNDAWYNVIDDVDPHYLKHFKEFMGAQKDWQSNTKYGKPVQIKGGIPTIFLCNPGPNSSYKEYLDEDKNAHLKSWALKNATFITLSNPLYSGTNQSPASGGQEESNQETQD

SEQ ID NO: 15340 - protein, 362 aa, Cotton leaf curl Gezira virus-[Cotton]
MAPPHRFQIYAKNYFLTFPKCSLTKEEALEQLQQISTASNKKYIKICRELHEDGQPHLHVLLQFEGKFKCQNQRLFDLVSPNRSTHFHPNIQGAKSSSDVKSYIDKDGDTLEWGEFQIDGRSARGGQQTANDAYAAALNAGSKAEALRVIRELAPKDFVLQFHNLNSNLERIFQEPPAPYVSPFLSSSFDQVPEELEEWAAENVVDAAARPSRPISIVIEGESRTGKTVWARSLGPHNYLCGHLDLSPKVFSNDAWYNVIDDVDPHYLKHFKEFMGAQKDWQSNTKYGKPVQIKGGIPTIFLCNPGPNSSYKEYLDEEKNAHLKSWALKNATFITLSNPLYSGTNQSSASGGEEESNQETQD

SEQ ID NO: 15341 - protein, 362 aa, Cotton leaf curl Gezira virus-[Okra/Egypt]
MAPPHRFQIYAKNYFLTFPKCSQTKEEALEQIQQISTASNKKYIKICRELHEDGQPHLHVLLQFEGKFKCQNQRLFDLVSPNRSAHFHPNIQGAKSSSDVKSYIDKDGDTLEWGEFQIDGRSARGGQQTANDAYAAALNAGSKAEALRVIRELAPKDFVLQFHNLNSNLERIFQEPPAPYVSPFLSSSFDQVPEELEEWAAENVVEAAARPSRPISIVIEGESRTGKTVWARSLGPHNYLCGHLDLSPKVFSNDAWYNVIDDVDPHYLKHFKEFMGAQKDWQSNTKYGKPVQIKGGIPTIFLCNPGPNSSYKEYLDEDKNAHLKSWSLKNATFITLSNPLYSGTNQSPASGGQEESNQETQD

SEQ ID NO: 15342 - protein, 362 aa, Cotton leaf curl Gezira virus-[Okra/Gezira]
MAPPHRFQIYAKNYFLTFPKCSLTKEEALEQLQQISTASNKKYIKICRELHEDGQPHLHVLLQFEGKFKCQNQRLFDLVSPNRSTHFHPNIQGAKSSSDVKSYIDKDGDTLEWGEFRIDGRSARGGQQTANDAYAAALNAGSKAEALRVIRELAPKDFVLQFHNLNSNLERIFEEPPAPYVSPFLSSSFDQVPEELEEWAAENVVEAAARPSRPISIVIEGESRTGKTVWARSLGPHNYLCGHLDLSPKVFSNDAWYNVIDDVDPHYLKHFKEFMGAQKDWQSNTKYGKPVQIKGGIPTIFLCNPGPNSSYKEYLDEEKNAHLKSWALKNATFITLSNPLYSGTNQSSASGGEEESNQETED

SEQ ID NO: 15343 - protein, 362 aa, Cotton leaf curl Gezira virus-[Sida]
MAPPHRFQIYAKNYFLTFPKCSLTKEEALEQLQQISTASNKKYIKICRELHEDGQPHLHALLQFEGKFKCQNQRLFDLVSPNRSTHFHPNIQGAKSSSDVKSYIDKDGDTLEWGEFQIDGRSARGGQQTANDAYAAALNAGSKAEALRVIRELAPKDFVLQFHNLNSNLERIFQEPPAPYVSPFLSSSFDQVPEELEEWAAENVVDAAARPSRPISIVIEGESRTGKTVWARSLGPHNYLCGHLDLSPKVFSNDAWYNVIDDVDPHYLKHFKEFMGAQKDWQSNTKYGKPVQIKGGIPTIFLCNPGPNSSYKEYLDEEKNAHLKSWALKNATFITLSNPLYSGTNQNSASGGQEESNQETQD

SEQ ID NO: 15344 - protein, 360 aa, Cotton leaf curl Kokhran virus
MPPKRNGIYSKNYFITYPKCSLTKEEALSQLLNIQTPTSKKYIRICRELHEDGTPHLHVLIQFEGKFKCQNMRFFDLVSPSRSAHFHPNIQGAKSSSDVKSYIEKDGDILDWGQFQIDGRSARGGQQTANDAYAAALNAGSKSEALRVIKELAPKDFVLQFHNLNANLDRIFQEPPAPYVSPFSSSSFDQVPEELEVWAAENVVSAAARANRPISVVIEGDSRTGKTMWARSLGPHNYLCGHLDLSPRVYSNDAWFNVIDDVDPHYLKHFKEFMGAQKDWQSNTKYGKPVQIKGGIPTIFLCNPGPNSSYKEFLDEEKNSALKNWALKNAIFITLESPLYSGSNQSAAQASQEGDQTSES

SEQ ID NO: 15345 - protein, 361 aa, Tobacco curly shoot virus-[Y35]
MPQPRKLLINAKNYFLTYPQCSLTKEEALSQISALSTPTNKLFIRICRELHEDGSPHLHVLIQFEGKFKCQNNRFFDLTSPSRSAHFHPNIQGAKSSTDVKAYMEKDGDVLDHGIFQIDGRSARGGCQSANDAYAEAINSGSKAAALNILKEKAPKDFVLQFHNLNSNLDRIFTPPVEVYVSPFLSSSFDQVPEELEEWAAENVVSAAARPLRPISIVIEGDSRTGKTMWARSLGPHNYLCGHLDLSPKVYNNDAWYNVIDDVDPHYLKHFKEFMGAQRDWQSNTKYGKPVQIKGGIPTIFLCNPGPNSSYKEFLDEEKNTALKNWALKNAIFVTLESPLYSGSNQSEAQASQEGEQTSSC

SEQ ID NO: 15346 - protein, 361 aa, Squash leaf curl Yunnan virus
MPRTNQFQVKAKNIFLTFPKCPIPKEQMLELLQNISCPSDKLFIRVSQEKHQDGSMHIHALIQFKGKCQFRNPRHFDVTHPNTSTQYHPNFQGAKSSSDVKSYIEKDGDYIDWGQFQIDGRSARGGQQTANDAAAEALNAGSAEAALAIMREKLPKDYIFQYHNIKCNLDRIFTPPIEEYISPFSSSSFNQVPGELEEWACNNVLSEAARPFRPISIVIEGDSRTGKTMWARSLGPHNYLCGHLDLSPKVYNNDAWYNVIDDVDPHYLKHFKEFMGAQRDWQSNTKYGKPVQIKGGIPTIFLCNPGPNSSYKEYLEEEKNSALRNWAIKNAIFVTLEGPLYSDTYQGATPNSEEDNQTTES

SEQ ID NO: 15347 - protein, 362 aa, Malvastrum yellow vein virus
MPQPKKFLINAKNYFLTYPKCSLTKEEALSQFLNLQTPTSIKFIRICRELHENGTPHLHVLIQFEGKFKCQNNRFFDLTSPSRSAHFHPNIQGAKSSSDVKTYIKKDGDILDHGIFQVDGRSARGGCQSANDAYAEAINSGSKAAALNILKEKAPKDFVLQFHNLNSNLDRIFTPPLEEYISPFLSSSFDQVPEELEAWACENVVDAAARPLRPQSIVIEGDSRTGKTMWARSLGPHNYLCGHLDLSPKVYSNDAWYNVIDDVDPHFLKHFKEFMGAQRDWQSNTKYGKPVQIKGGIPTIFLCNPGPNSSYKEFLDEKDTALKNWALKNAIFVTLQGPLYSGSNQSTAQGSEETQQEEESRS

SEQ ID NO: 15348 - protein, 360 aa, Cotton leaf curl Kokhran virus-[72b]
MPPKRNGIYSKNYFITYPKCSLTKEEALSQLLNIQTPTSKKYIRICRELHEDGTPHLHVLIQFEGKLKCQNMRFFDLVSPSRSAHFHPNIQGAKSSSDVKSYIEKDGDILDWGQFQIDGRSARGGQQTANDAYAAALNAGSKSEALRVIKELAPKDFVLQFHNLNANLDRIFQEPPAPYVSPFSSSSFDQVPDELEVWAAENVVSAAARANRPISVVIEGDSRTGKTMWARSLGPHNYLCGHLNLSPRVYSNDAWFNVIDDVDPHYLKHFKEFMGAQKDWQSNTKYGKPVQIKGGIPTIFLCNPGPNSSYKEFLDEEKNSALKNWALKNAIFITLESPLYSGSNQSAAQASQEGDQTSES

SEQ ID NO: 15349 - protein, 363 aa, Cotton leaf curl Multan virus
MAPPKRFKVQAKNYFITYPQCSLTKEEALSQIQAINTPSNKKYIKICRELHEDGSPHLHVLIQFEGKFVCTNNRFFDLVSPTRSAHFHPNIQGAKSSSDVKAYIDKDGDTLEWGEFQIDGRSARGGQQTANDAYAEALNAGSKSEALRVIKELAPKDFVLQFHNLNANLDRIFQEPPAPYISPFSPSSFDQVPEELEVWAIDNVVDPAARPLRPRSIVIEGDSRTGKTMWARSLGPHNYLCGHLDLSPKVYSNDAWYNVIDDVDPHFLKHFKEFMGAQRDWQSNTKYGKPVQIKGGIPTIFLCNPGPNSSYKEFLDEEKNTALKNWAVKNAIFITLEGPLYSGTNQSTAQGSEETQQEEESRS

SEQ ID NO: 15350 - protein, 363 aa, Cotton leaf curl Multan virus-[26]
MAPPKRFKVQAKNYFITYPQCSLTKEEALSQIQAINTPSNKKYIKICRELHEDGSPHLHVLIQFEGKFVCTNNRFFDLVSPTRSAHFHPNIQGAKSSSDVKAYIDKDGDTLEWGEFQIDGRSARGGQQTANDAYAEALNAGSKSEALRVIKELAPKDFVLQFHNLNANLDRIFQEPPAPYISPFSPSSFDQVPEELEVWAIDNVVDPAARPLRPRSIVIEGDSRTGKTMWARSLGPHDYLCGHLDLSPKVYSNDAWYNVIDDVDPHFLKHFKEFMGAQRDWQSNTKYGKPVQIKGGIPTIFLCNPGPNSSYKEFLDEEKNTALKNWAVKNAIFITLEGPLYSGTNQSTAQGSEETQQEEESRS

SEQ ID NO: 15351 - protein, 363 aa, Cotton leaf curl Multan virus-[Faisalabad2]
MAPPKRFKVQAKNYFITYPQCSLTKEEALSQIQAINTPSNKKYIKICRELHEDGSPHLHVLIQFEGKFVCTNNRFFDLVSPTRSAHFHPNIQGAKSSSDVKAYIDKDGDTLEWGEFQIDGRSARGGQQTANDAYAAALNAGSKSEALRVIKELAPKDFVLQFHNLNANLDRIFQEPPAPYISPFSPSSFDQVPEELEVWAIDNVVDPAARPLRPRSIVIEGDSRTGKTMWARSLGPHNYLCGHLDLSPKVYSNDAWYNVIDDVDPHFLKHFKEFMGAQRDWQSNTKYGKPVQIKGGIPTIFLCNPGPNSSYKEFLDEEKNTALKNWAVKNAIFITLEGPLYSGTNQSTAQGSEETQQEEESRS

SEQ ID NO: 15352 - protein, 361 aa, Cotton leaf curl Multan virus-[Faisalabad3]
MPRALKTNAKNYFLTYPKCSLTKEETLSQLQNLHTPVSKKYIKICRELHQNGEPHLHVLIQFEGKYQCTNNRFFDLVSPTRSAHFHPNIQGAKSRSDVKAYIDKDGDTLEWGEFQIDGRSARGGQQTADDAYAAALNAGRKSEVLRVIKELAPKDFVQQFHNLNANLDRIFREPPAPNISPFSRSSLDQVPEELEVWAIDNVVDPAARPLRPRSIVIEGDSRTGKTMWARSLGPHNYLCGHLDLSPKVYSNDAWYNVIDEVDPHFLKHFKEFMGAQRDWQSNTKYGKPVQIKGGIPTIFLCNPGPNCSYKEFLDEEKNTALKNWAVKNAIFITLDRPLYSGTNQSTAQGSEEAQQEEESRS

SEQ ID NO: 15353 - protein, 363 aa, Cotton leaf curl Multan virus-[Multan]
MAPPKRFKVQAKNYFITYPQCSLTKQEALSQIQAINTPSNKKYIKLCRELHEDGSPHLHVLIQFEGKFVCTNNRFFDLASPTRSAHFHPNIQGAKSSSDVKAYIDKDGDTLEWGEFQIDGRSARGGQQTANDVYAAALNAGSKSEALRVIKELAPKDFVLQFHNLNANLDRIFQEPPAPYISPFSPSSFDQVPEELEVWAIDNVVDSAARALRPRSIVIEGDSRTGKTMWARSLGPHNYLSGHLDLSPKVFSNDAWYNVIDDVDPHFLKHFKEFMGGQRDWQANTKYGKAVQIKGGIPTIFLCNPGPNRRYKEFLNEEKNSALKNWALKNAIFITLEGPLYSASNQSTAQGSEETQQEEESRS

SEQ ID NO: 15354 - protein, 361 aa, Cotton leaf curl Multan virus-[Okra]
MPRALKTNAKNYFLTYPKCSLTKEETLSQLQNLHTPVNKKYIKICRELHQNGEPHLHVLIQFEGKYQCTNNRFFDLVSPTRSAHFHPNIQGAKSSSDVKAYIDKDGDTLEWGEFQIDGRSARGGQQTANDAYAAALNAGSKSEALRVIKELAPKDFVLQFHNLNANLDRIFQEPPAPYISPFSRSSFDQVPEELEVWAIDNVVDPAARPLRPRSIVIEGDSRTGKTMWARSLGPHNYLCGHLDLSPKVYSNDAWYNVINDVDPHFLKHFKEFMGAQRDWQSNTKYGKPVQIKGGIPTIFLCNPGPNSSYKEFLDEEKNTALKNWAVKNAIFITLEGPLYSGTNQSTAQGSEETQQEEESRS

SEQ ID NO: 15355 - protein, 362 aa, Cotton leaf curl Rajasthan virus
MPPKRNGIYSKNYFITYPKCSLTKEEALSQLLNIQTPTSKKYIRICRELHEDGTPHLHVLIQFEGNFKCQNMRFFDLVSPSRSAHFHPNIQGAKSSSDVKSYTEKDGDILDWGQFQIDGRSARGGQQTANDAYAAALNAGSKSEALRVIKELAPKDFVLQFHNLNANLDRIFQEPPAPYVSPFSSSSFDQVPEELEVWAAENVVSAAARANRPISVVIEGDSRTGKTMWARSLGPHNYLCGHLDLSPRVYSNDAWFNVIDDVNPHYLKHFKEFMGAQKDWQSNTKYGKPVQIKGGIPTIFLCNPGPNSSYKEFLDEEKNSALKNWALKNAIFITLDRPMYSGTNQSTAQGSEEAQQEEESRS

SEQ ID NO: 15356 - protein, 352 aa, Cowpea golden mosaic virus-[Nigeria]
MPRSGAFRVNAKNIFATYPRCSLPKEEALELLRQIPTAVNKKFIKVARELHEDGEPHLHVLLQFEGKLQITNPRLFDLVSGNRSAVFHPNIQGAKSSSDVKSYIEKDGDTISWGEFQIDGRSSRGGQQSANDAYAAAINSGSPTKALNIVKELAPKDFVLHYHNIKSNLDRIFSKPLEPYSCPFRLNSFNNVPQIMKDWASINVVDAAARPDRPISIVIEGESRTGKTMWARSLGAHNYLCGHLDLSPKVYSNNAWYNVIDDVDPHYLKHFKEFMGAQHDWQSNTKYGKPIQIKGGIPTIFLCNPGPNSSYKSFLDEDKNKDLKQWALKNAIFVDISFPLYSNSNKSQTQNS

SEQ ID NO: 15357 - protein, 352 aa, East African cassava mosaic Cameroon virus
MPRAGRFQINAKNYFITYPRCSLAKEEALSQLKAISYPTNIKFIRVCRELHQDGVPHLHVLIQFEGKFQCTNPRFFDLISPSRSTHFHPNIQGAKSSSDVKAYIEKGGEFLDDGIFQVDARSARGEGQHLAQVYAEALNASSKSEALQIIKEKDPKSFFLQFHNISANADRIFQAPPQTYVSPFLSSSFTQVPEEIEVWVSENICRPAARPWRPISIVLEGDSRTGKTMWARSLGPHNYLCGHLDLSPKIYSNDAWYNVIDDVDPHYLKHFKEFMGAQRDWQSNTKYGKPIQIKGGIPTIFLCNPGPNSSYKEYLDEDKNSNLKNWAIKNALFISLTEPLFSSTDQSQAQAS

SEQ ID NO: 15358 - protein, 352 aa, East African cassava mosaic Cameroon virus-[Ivory Coast]
MPRAGRFQINAKNYFITYPRCSLTKAEALSQLKALSYPTNIKFIRVCRELHQDGVPHLHVLIQFEGKFQCTNPRFFDLISPSRSTHFHPNIQGAKSSSDVKAYIEKGGEFLDDGIFQVDARSARGEGQHLAQVYAEALNASSKSEALQIIKEKDPKSFFLQFHNISANADRIFQAPPQTYVSPFLSSSFTQVPEDIEVWVSENICRPAARPWRPISIVLEGDSRTGKTMWARSLGPHNYLCGHLDLSPKIYSNDAWYNVIDDVDPHYLKHFKEFMGAQRDWQSNTKYGKPIQIKGGIPTIFLCNPGPNSSYKEYLDEDKNSNLRNWALKNALFISLTEPLFSSTDQSQAQAS

SEQ ID NO: 15359 - protein, 359 aa, East African cassava mosaic Malawi virus-Malawi[K]
MPRAGRFQINAKNYFITYPRCSLTKEEALSQLQALSYPTNIKFIRVCRELHQDGVPHLHVLIQFEGKFQCTNPKFFDLISPSRSTHFHPNIQGAKSSSDVKAYIEKGGEFLDDGVFQVDARSARGEGQHLAQVYAEALNASSKSEALQIIKEKDPKFFFLQFHNISANADRIFQLPPQPYVSPFLSSSFTHVPDEIEIWVSENICSPAARPWRPISIVLEGDSRTGKTMWARSLGPHNYLCGHLDLSPKVYSNDAWYNVIDDVDPHYLKHFKEFMGAQRDWQSNTKYGKPIQITGGIPTIFLCNPGPTSSYKEFLEEEKNQSLKAWALKNATFITLHEPLFSSAYQSPTPHREEQGTQT

SEQ ID NO: 15360 - protein, 359 aa, East African cassava mosaic Malawi virus-Malawi[MH]
MPRAGRFQINAKNYFITYPRCSLTKEEALSQLQALSYPTNIKFIRVCRELHQDGVPHLHVLIQFEGKFQCTNPRFFDLISPSRSTHFHPNIEGAKSSSDVKAYIEKGGEFLDDGVFQVDARSARGEGQHLAQVYAEALNASSKSEALQIIKEKDPKSFFLQFHNISANADRIFQIPPQTYVSPFLSSSFTHVPDEIEIWVSENICSPAARPWRPISIVLEGDSRTGKTMWARSLGPHNYLCGHLDLSPKVYSNDAWYNVIDDVDPHYLKHFKEFMGAQRDWQSNTKYGKPIQIKGGIPTIFLCNPGPTSSYKEFLEEEKNQSLKAWALKNATFITLHEPLFSSAYQSPTPHREEQGTQT

SEQ ID NO: 15361 - protein, 359 aa, East African cassava mosaic Zanzibar virus
MTPPKRFKIQAKNYFLTYPKCSLSKHEALSQILNIPTPTNKKYIKVCRELHDDGQPHLHMLIQFEGKFSCTNKRFFDLVSPTRSTHFHPNIQGAKSSSDVKSYIDKDGDTTEWGEFQIDARSARGGCHNANDACAEALNSGSKAAALLIIKEKLPKEFIFQYHNLSSNLDRIFQEPPAPYVSPFLSSSFTNVPEELEVWVSENVMGSAARPWRPNSIVIEGDSRTGKTMWARSLGPHNYLCGHLDLSPKVYSNDAWYNVIDDVDPHYLKHFKEFMGAQRDWQSNTKYGKPIQIKGGIPTIFLCNPGPTSSYKEFLDEEKNQSLKAWALKNATFITLHEPLFSSAHQSPTPHSEDQGRQT

SEQ ID NO: 15362 - protein, 362 aa, Eupatorium yellow vein virus-[MNS2]
MPTPNRFKINAKNYFLTYPHCSLTKEEALSQIKQLQTPTNKLFIRICRELHEDGSPHLHVLIQFEGKYTCRNQRFFDLVSPNRSAHFHPNIQAAKSSSDVKTYMEKDGDILDSGVFQVDGRSARGGCQNANDAYAEAINSGSKSSALNILREKAPKDYVLQFHNLNSNLDRIFAPPLEVFVCPFTASSFDQVPEELEEWAVENVKSSAARPWRPISIVIEGDSRTGKTMWARSLGPHNYLCGHLDLSPKIYSNDAWYNVVDDVDPHYLKHFKEFMGAQRDWQSNTKYGKPIQIKGGIPTIFLCNPGPTSSYTEFLDEEKNSALKAWAIKNATFVTLYSPLYSGSHQSPAQDSQEEEEPQEED

SEQ ID NO: 15363 - protein, 362 aa, Eupatorium yellow vein virus-[SOJ3]
MAPPKRFRINSKNYFLTYPQCSLTIEEALSQLRNIQTPVNKKFIRVCQEQHEDGSPHLHSLLQFEGKFQCTNPRFFDLVSPNRSTHFHCNIQGAKSSSDVKSYIEKDGQFSDWGEFQIDGRSARGGQQSANDAYAQAINTGSKSEALRVIKELAPMDYVLQFHNLNSNLDRIFAPPLEVFVCPFTASSFDQVPEELEEWAAENVKSSAARPWRPISIVIEGDSRTGKTMWARSLGPHNYLCGHLDLSPKIYSNDAWYNVVDDVDPHYLKHFKEFMGAQRDWQSNTKYGKPIQIKGGIPTIFLCNPGPTSSYTEFLDEEKNSALKAWAVKNATFVTLYSPLYSGTHQSPAQDSQEEEEPQEED

SEQ ID NO: 15364 - protein, 362 aa, Hollyhock leaf crumple virus-[Giza]
MAPPKRFKIYAKNYFLTYPHCSLSLSETLSQLKTLQTPVNKLYIKICRELHENGEPHLHALIQFEGKYQCTNKRFFDLVSPSRSTHFHPNIQGAKSSSDVKSYLEKDGDTLEWGEFQIDARSARGGQQTANDAYAAALNAGSKSEALRVIRELAPKDFVLQFHNLTSNLDRIFQEPPAPYVSPFLSSSFDQLPEELEEWAAENVVEAAARPSRPISIVIEGESRTGKTVWARSLGPHNYLCGHLDLSPKVFSNDAWYNVIDDVDPHYLKHFKEFMGAQKDWQSNTKYGKPVQIKGGIPTIFLCNPGPNSSYKEYLDEEKNAHLKSWALKNATFITLSNQLYSGTNQSQASGGQEESNQETQD

SEQ ID NO: 15365 - protein, 352 aa, Indian cassava mosaic virus-[Maharashtra]
MSPPKRFQINAKNYFLTYPRCSLTKEEALSQIRNFQTPTNPKFIKICRELHENGEPHLHVLIQFEGKYKCQNQRFFDLVSPTRSAHFHPNIQGAKSSSDVKSYIDKDGDTLEWGTFQIDGRSARGGQQSANDAYAAALNSGSKSEALKILRELAPRDYLRDFHHISSNLDRIFTKPPPPYENPFPLSSFDRVPEELDEWFHENVMGAAARPLRPKSIVIEGDSRTGKTMWSRALGPHNYLCGHLDLSPKVYNNDAWYNVIDDVDPHYLKHFKEFMGAQRDWQSNTKYGKPVQIKGGIPTIFLCNPGPNSSYKEFLDEEKNSALKAWALKNATFISLEGPLYSGTNQGPTQSC

SEQ ID NO: 15366 - protein, 358 aa, Macroptilium mosaic Puerto Rico virus
MPPPKRFRVSSKNYFLTYPRCSISKEETLSQLLNIQTPTDKKYIKICEELHEDGQPHLHVLIQFEGKFVCTNQRLFDLVSPTRSTHFHPNIQGVKSSSDVKAYIDKDGVTIEWGQFQIDGRSARGGQQSANDSYAKALNADCIEAAMTVLKEEQPKDFVVQYHNIRSNLEKIFTPPTEPWVPPFQLSTFNNVPLIMSDWVNENISDSAARPLRPISIIVEGPSRTGKTIWARSLGPHNYLCGHIDLNPRIYSNHAWYNVIDDVDPHYLKHFKEFMGAQRDWQSNCKYGKPIQIKGGIPTIFLCNPGPHSSYKEYLSEEKNKSLNDWAQKNAIYVSIEEPLYSTFNQTASSSRQETDST

SEQ ID NO: 15367 - protein, 349 aa, Macroptilium yellow mosaic Florida virus
MPSRPKRFKINAKNFFLTYPQCSLSKEETLSQIKALNTPTSKKYIKIARELHENGQPHIHVLIQFEGKYQCTNYRFFDLVSPSQSAYFHPNVQGAKSSSDVKSYIDKDGDTLEWGEFQVDGRSARGGCQTVNDSYAKALNASSAEEALKIIREEQPAHFFLQHHNLVVNASKIFQKPPEPWVPTFQLSSFTNVPAEMQDWADQYFGRSAAARSERYMSIIVEGDSRTGKTMWARALGPHNYLSGHLDFNSQVYSNEVEYNVIDDINPNYLKLKHWKELIGAQKDWQSNCKYGKPVQIKGGIPSIVLCNPGEGSSYKEFLDKEENRALHNWTIKNALFVTLTAPLYQSTP

SEQ ID NO: 15368 - protein, 361 aa, Mungbean yellow mosaic India virus
MPREGRFAINAKNYFLTYPKCPLTKEDALEQLLALSTPVNKKFIRICRELHEDGQPHLHVLLQFEGKQQTKNQRFFDLHSRCRSAYYHPNIQRAKSCSDVKTYMEKDGDILDHGTFQIDGRSARGGKQSANDAYAEALNSGSKLEALLILKEKAPKDFILQFHNLNCNLSRIFTEPTQAYESPFTLESFDKVPSYISSWAERNVRDAARPDRPISIVIEGDSRTGKTMWARAIGPHNYLCGHLDLNDKTYSNEAWYNVIDDVDPHYLKHFKEFMGAQRDWQSNVKYGKPTKIKGGIPTIFLCNPGPKSSYKEYLDEENNAALKQWASKNAEFYTLKEPLFSTVNQGSTQGRQEESNSTISN

SEQ ID NO: 15369 - protein, 362 aa, Mungbean yellow mosaic India virus-[Bangladesh]
MPRDGRFSINAKNYFLTYPKCPLTKEEALEQLLALSTPINKKFIRICRELHEDGQPHLHVLIQFEGRQQTENKRFFDLYSRCRSAHYHPNIQAAKSCSDVKTYMEKDGDVLDHGTFQIDGLSARGGKQSANDAYAEALNCGSKLEALLILKEKAPKDFILQFHNLNCNLSRIFTEPVQAYESPFTLESFNKVPSYISSWAERNVREPAARPERTISIVIEGDSRTGKTMWARAIGPHNYLCGHLDLNNKTYSNEAWYNVIDDVDPHYLKHFKEFMGAQRDWQSNVKYGKPTKIKGGIPTIFLCNPGPKSSYKEYLSEENNAALKQWASKNAEFYTLKEPLFSSVNQGSTQGRQEESNSTISN

SEQ ID NO: 15370 - protein, 362 aa, Mungbean yellow mosaic India virus-[Cowpea]
MPREGRFAINARNYFLTYPRCPLTKEDALEQLLALSTPVNKKFIRICRELHEDGQPHLHVLLQFEGKQQTRNQRFFDLYSRCRSTHYHPNIQAAKSCSDVKTYMEKDGDILDHGTFQIDGRSARGGKQSANDAYAEALNSGSKLEALLILKEKAPKDFILQFHNLNCNLSRIFTEPIQTYKSPFTLESFNKVPSYISSWAERNVRDPAARPDRPISIVIEGDSRTGKTMWARAIGPHNYLCGHLDLNDKTYSNEAWYNVIDDVDPHYLKHFKEFMGAQRDWQSNVKYGKPTKIKGGIPTIFLCNPGPKSSYKEYLDEENNAALKQWASKNAEFYTLKEPLFSTVNQGSTQGRQEESNSTISN

SEQ ID NO: 15371 - protein, 362 aa, Mungbean yellow mosaic India virus-[Mungbean]
MPREGRFAINARNYFLTYPKCPLTKEDALEQLLALSTPVNKKFIRICRELHEDGHPHLHVLLQFEGKHQTRNQRFFDLHSRCRSAYYHPNIQAAKSCSDVKTYMEKDGDVLDHGTFQIDGRSARGGKQSANDAYAEALNSGSKLEALLILKEKAPKDFILQFHNLNCNLSRIFTEPVQAYMSPFTLESFDKVPSYISSWAERNVKDPAARPDRPISIVIEGDSRTGKTMWARAIGPHNYLCGHLDLNDKTYSNEAWYNVIDDVDPHYLKHFKEFMGAQRDWQSNVKYGKPTKIKGGIPTIFLCNPGPKSSYKEYLDEENNAALKQWASKNAEFYTLKEPLFSSVNQGSTQGRQEESNSTISN

SEQ ID NO: 15372 - protein, 362 aa, Mungbean yellow mosaic India virus-[Soybean]
MPRDGRFAINAKNYFLTYPKCPLTKEDALEQLLALSTPVNKKFIRICRELHEDGQPYLHVLLQFEGKHQTRNQRFFDLYSRCRSAHYHPNIQAAKSCSDVKTYMEKDGDILDHGTFQIDGRSARGGKQSANDAYAEALNSGSKLEALLILKEKAPKDFILQFHNLNCNLSRIFTEPTQAYESPFTLESFDKVPSYISSWAERNVRDPAVRPDRPISIVIEGDSRTGKTMWARAIGPHNYLCGHLDLNDKTYSNEAWYNVIDDVDPHYLKHFKEFMGAQRDWQSNVKYGKPTKIKGGIPTIFLCNAGPKSSYKEYLDEENNAALKQWASKNAEFYTLKEPLVSSVNQGSTQGRQEESNSTLSN

SEQ ID NO: 15373 - protein, 362 aa, Mungbean yellow mosaic India virus-[SoybeanTN]
MPRDGRFAINAKNYFLTYPKCPLTKEDALEQLLALSTPVNKKFIRICRELHEDGQPHLHVLLQFEGKQQTKNQRFFDLHSRCRSAYYHPNIQAAKSCSDVKTYMEKDGDILDHGTFQIDGRSARGGKQSANDAYAEALNSGSKLEALLILKEKAPKDFILQFHNLNCNLSRIFTEPVQAYVSPFTLESFDKVPSYISSWAERNVRDPAARPDRPISIVIEGDSRTGKTMWARAIGPHNYLCGHLDLNDKTYSNEAWYNVIDDVDPHYLKHFKEFMGAQRDWQSNVKYGKPTKIKGGIPTIFLCNPGPKSSYKEYLDEENNAALKQWASKNAEFYTLKEPLFSSVNQGSTQGRQEESNSTISN

SEQ ID NO: 15374 - protein, 362 aa, Mungbean yellow mosaic virus-Soybean[Madurai]
MPRLGRFAINAKNYFLTYPRCPLTKEDVLEQLLALSTPVNKKFIRVCRELHEDGEPHLHVLLQFEGKLQTKNERFFDLVSPTRSTHYHPNVQAAKSASDVKSYMDKDGDVLDHGSFQVDGRSARGGKQSANDAYAEALNSGSKLQALNILREKAPKDYILQFHNLNCNLSRIFADDVPPYVSPYSLSAFDKVPSYISSWASENVRDAAARTERPISIVIEGDSRTGKTMWARALGPHNYLCGHLDLNNKIYSNDAWYNVIDDVDPHYLKHFKEFMGAQRDWQSNVKYGKPTHIKGGIPTIFLCNPGPKSSYKEYLDEADNTALKLWASKNAEFYTLKEPLFSSVDQGATQGCQEASNSTLSN

SEQ ID NO: 15375 - protein, 361 aa, Mungbean yellow mosaic virus-Vigna
MPRLGRFAINAKNYFLTYPRCPLTKEDVLEQLLALSTPVNKKFIRVCRELHEDGEPHLHVLLQFEGKLQTKNERFFDLVSPTRSTHYHPNIQAAKSASDVKSYMDKDGDVLDHGSFQVDGRSARGGKQSANDAYAEALNSGSKLQALNILREKAPKDYILQFHNLNCNLSRIFADDVPPYVSPYSLSAFDKVPSYISSWASENVRDSCAPERPISIVIEGDSRTGKTMWARALGPHNYLCGHLDLNSKIYSNDAWYNVIDDVDPHYLKHFKEFMGAQRDWQSNVKYGKPTHIKGGIPTIFLCNPGPKSSYKEYLDEPDNTALKLWASKNAEFYTLKEPLFSSVDQGATQGCQEASNSTLSN

SEQ ID NO: 15376 - protein, 362 aa, Mungbean yellow mosaic virus-Vigna[Maharashtra]
MPRLGRFAINAKNYFLTYPRCPLTKEDVLEQLLALSTPVNKKFIRVCRELHEDGEPHLHVLLQFEGKLQTKNERFFDLVSPTRSTHYHPNVQAAKSASDVKSYMDKDGDVLDHGSFQVDGRSARGGKQSANDAYAEALNSGSKLQALNILREKAPKDYILQFHNLNCNLSRIFADDVPPYVSPYSLSAFDKVPSYISSWASENVRDHAARPERPISIVIEGDSRTGKTMWARALGPHNYLCGHLDLNNKIYSNDAWYNVIDDVDPHYLKHFKEFMGAQRDWQSNVKYGKPTHIKGGIPTIFLCNPGPRSSYKEYLDEADNTALKLWASKNAEFYTLKEPLFSSVDQGATQGCQEASNSTLSN

SEQ ID NO: 15377 - protein, 348 aa, Pepper golden mosaic virus
MPLPPKSFRLQCKNIFLTYPQCDIPKDEALEMLRNLKWAVVKPIYLRVSREEHSDGFPHLHCLIQLTGKCNIKDARFFDITHPRRSAQFHPNVQASKDANAVKNYITKDGDYCESGQYKVSGGSKANKDDVYHNAVNAASAGEALDIIKAGDPKTFIVSYHNIKANIERLFTTPPMPWTPPYPLSSFNNVPEDMQHWVAEYFGRSCARPDRPISIVIEGDSRCGKTMWARALGPHNYLSGHLDFNAKVYSNYVEYNVIDDITPQYLKMKHWKELIGAQKDWQSNCKYGKPVQIKGGIPSIVLCNPGEGSSYIAFLNKEENAELRAWTLKNAQFVILHAPLYKSTAQDS

SEQ ID NO: 15378 - protein, 349 aa, Pepper golden mosaic virus-[CR]
MPLPPKSFHLQCKNIFLTYPQCDIPKDEALEMLQSLKWSVVKPIYIRVSREEHSDGFPHLHCLIQLTGKCNIKDARFFDITHPRRSAQFHPNVQAAKDTNAVKNYITKDGDYCETGQYKVSGGSKANKDDVYHNAVNAASAGEALDIIKAGDPRTFIVSYHNVKSNIERLFKPPPKQWTPPYPLSSFNNVPEDMQRCVAEYFGRSSAARPDRPISIIIEGDSRSGKTMWARALGPHNYLSGHLDFNSKVYSNDVEYNVIDDITPHYLKLKHWKELIGAQRDWQSNCKYGKPVQIKGGIPSIVLCNPGEGSSYIAFLNKEENAPLRAWTQKNAQFVILHAPLYKSTAQDS

SEQ ID NO: 15379 - protein, 349 aa, Pepper huasteco yellow vein virus
MPLPKRFRLNAKNYFLTYPQCSISKEERLAQLQNLSTPVNKKYIKICKESHEDGQPHLHVLIQFEGKYQCTNNRFFDLVSSTRSAHFHPNIQGAKSSSDVKTYIDKDGDTVEWGEFQIDGRSARGGQQSANDTYAKALNSASAEEALQIIKEEQPQHFFLQFHNIVSNANRIFQTPPEPWVPPFQQASFNNVPAIMTQWVSDNVCDAAARPMRPLSLVVEGPSRTGKTLWARSLGPHNYICGHMDLSPKIYSNNAWYNVIDDIPPHYVKHFKEFMGAQRDWQSNCKYGKPIQIKGGIPTIFLCNPGPQSSYKDYLSEEKNRSLNDWVQKNAIYVTIEEAIFTTGSQTSP

SEQ ID NO: 15380 - protein, 349 aa, Pepper huasteco yellow vein virus-[Sinaloa]
MPLPKRFRLNAKNYFLTYPQCSISKEEALAQLQNLSTPVNKKYIKICKESHEDGQPHLHVLIQFEGKYQCTNNRFFDLVSSTRSAHFHPNIQGAKSSSDVKTYIDKDGDTVEWGEFQIDGRSARGGQQSANDTYAKALNSASAEEALQIIKEEQPQHFFLQFHNIVSNANRIFQTPPEPWVPPFQQASFNNVPAIMTQWVSDNVCDAAARPLRPLSLVVEGPSRTGKTLWARSLGPHNYICGHMDLSPKIYSNNAWYNVIDDIPPHYVKHFKEFMGAQRDWQSNCKYGKPIQIKGGIPTIFLCNPGPQSSYKEYLSEEKNRSLNDWVQKNAIYVTIEEAIFTTGSEASP

SEQ ID NO: 15381 - protein, 361 aa, Pepper leaf curl Bangladesh virus
MTRTHQFQVKAKNIFLTYPKCPIPKEQMLEILKSINCPSDKLFIRVSQEKHQDGSLHIHALIQFKGKSQFRNPRHFDVTHPNNATQFHPNFQGAKSSSDVKSYIEKDGDYIDWGRFQIDGRSARGGQQTANDAAAEALNAGSAEAALAIIREKLPKDFIFQYHNLKCNLDRIFTPPLEVYVSPFCSSSFDQVPGELEEWASENVVSAAARPLRPMSIVVEGDSRTGKTMWARSLGPHNYLCGHLDLSPKVYSNDAWYNVIDDVDPHYLKHFKEFMGAQRDWQSNTKYGKPVQIKGGIPAIFLCNPGPHSSYKEFLDEEKNSALKNWALKNATFITLEGPLYSGSNQSAAQASQEGDQASSR

SEQ ID NO: 15382 - protein, 356 aa, Pepper leaf curl virus-[Malaysia]
MAPPKKFRINAKNYFLTYPHCSLTKEEALSQIQAIETPTNKLFIRICRELHEDGTPHLHILIQFEGKFQCKNPRFFDLTSPTRSAHFHPNIQGAKSSTDVREYIAKNGDVLDHGVFQIDGRSARGGCQSANDAYAEALNSGSKASALTILKERAPKDYILQFHNLNSNLDKIFSPRIEMYISPFCSSSFDQVPEELNEWVAANVVSAAARPLRPISIVVEGDSRTGKTMWARSLGPHNYLCGHLDLSPKVYNNEAWYNVIDDVDPHYLKHFKEFMGAQRDWQSNTKYGKPVQIKGGIPTIFLCNPGPHSSYKEFLEEEKNTALKNWAVKNAIFVTLRAPLYSGSYQGSTQNRQEDN

SEQ ID NO: 15383 - protein, 351 aa, Potato yellow mosaic Panama virus
MPRAGRFSINARNYFLTYPQCSLTKEEALSQLQNLETPTSKKFIRVSRELHEDGQPHLHVLIQFEGKYQCTNQRFFDLVSPTRSAHFHPNIQRAKSSSDVKTYVEKDGDFIDFGIFQIDGRSARGGCQTANDSYAKALNSGTVSEALNILREEQPKDFVLQNHNIRSNLERIFANAPEPWAPPFPLSSFTNVPDEMLRWADDYFGRSAAARRERPISIIIEGDSRTGKTMWARVLGPHNYLSGHLDFNSRVYSNEVEYNVIDDVAPQYLKLKHWKELIGAQKDWQSNCKYGKPVQIKGGIPSIVLCNPGEGSSYKAFLEKEDNASLKNWTLKNAVFITLTAPLYQESTQAS

SEQ ID NO: 15384 - protein, 350 aa, Potato yellow mosaic Trinidad virus
MPPKRFRINSKNYFLTYPKCSLSKEEALSQLQNLNTPTNKKFIKICRELHENGEPHLHVLVQFEGKYQCTNNRFFDLVSPTRSTHFHPNIQGAKSSSDVKSYIDKDGDSVEWGEFQIDGRSARGGQQSVNDTYAKALNAASAAEALQIIKEEQPQHFFLQHHNLVANAAKIFTKAPEPWVPPFQLSSFTNVPDEMQEWADNYFGRGAAARPERPISIIIEGDSRTGKTMWARVLGPHNYLSGHLDFNSRVYSNGVEYNVIDDVAPQYLKLKHWKELLGAQKDWQSNCKYGKPVQIKGGIPSIVLCNPGEGSSYKAFLEKIENASLKNWTLKNAVFITLTAPLYQESTQTS

SEQ ID NO: 15385 - protein, 361 aa, Potato yellow mosaic virus-[Guadeloupe]
MPRKGSFSIKAKNYFLTYPHCSLSKEDALSQIQNLNIPVNKKFIKICRELHENGEPHLHVLIQFEGKFNCTNNRLFDLVSPTRSTHFHPNIQGAKSSSDVKSYVEKDGDSIEWGLFQIDGRSARGGQQTSNDAAAEALNSGTKEEAMKIIKEKLPEKFLFQYHNLSSNLDRIFMKAPKPWAPPFPLSSFTNVPDEMQEWADEYFGRGAAARPDRPISIIIEGDSRTGKTMWARVLGPHNYLSGHLDFNSRVYSNEVEYNVIDDVAPQYLKLKHWKERLGAQKDWQSNCKYGKPVQIKGGIPSIVLCNPGEGSSYKAFLEKIENASLKTWTLKNALFITLTAPLYQEGAQASKEEGHQEETH

SEQ ID NO: 15386 - protein, 358 aa, Rhynchosia golden mosaic virus-[Chiapas]
MPQPRRFRLNAKNYFLTYPQCSISKEEALEQIQRLSTPVNKKYIKICRETHEDGQPHLHVLIQFEGKYQCTNQRFFDLVSTTRSAHFHPNIQGAKSSSDVKSYIDKDGDTIEWGEFQIDGRSARGGQQSANDTYAKALNASSAEEALQIIKEEQPQHFFLQFHNLITNATRIFQKPPEPWVPPFQQSSFNNVPAIIREWVHENVCDSAARPLRPISIVIEGPSRTGKTQWARSLGPHNYLCGHLDLNPKIYSNDAWYNVIDDVTPHYLKHFKEFMGAQRDWQSNCKYGKPIQIKGGIPAIFLCNPGPHSSYKEYLSEDKNKGLNDWAQKNAIFVTIEEPFYTTFNQASSQIRQETDEA

SEQ ID NO: 15387 - protein, 312 aa, Sida golden mosaic Costa Rica virus
MHEDGQPHLHVLIQFEGKYQCTNQRFFDLVSPTRSVHFHPNIQGAKSSSDVKSYIDKDGDTVEWWEFQIDGRSARGGQQSANDSYAKALNASSAEEALRIIKEEQPQHFFLQHHNLVANATRIFQKAPSPWAPPFPLSSFTNVPEQMQVWADHYFGRGSAARPDRPVSLIVEGDSRTGKTMWARALGPHNYLSGHLDFNSRVFSNEVEYNVIDDVAPHYLKLKHWKELIGSQRDWQSNCKYGKPVQIKGGIPSIVLCNPGEGASYKDFLDKEENTALKNWTLKNAVFITIDSPLYQEDTQASQEEVGQATPH

SEQ ID NO: 15388 - protein, 360 aa, Sida golden mosaic Florida virus
MPSIKRFKVSAKNYFLTYPKCSLSKEEALSQLKNLNTPVKKKYIRVCREFHENGEPHLHMLVQFEGKYQCTNNRFFDLVSPSMSTPFHPNIQGAKSSSDVKSYIEKDGDILEWGQFQIDGRSARGGCQSANDTYAKALNASSAEEALQIIKEEQPQHFFLQHHNLVANAHRIFSKAPEPWAPPFPLSSFTAVPDEMQAWADEYFGRGRARPERPMSIIVEGDSRTGKTMWARALGPHNYLSGHLDFNSRVFSNEVEYNVIDDVAPQYLKLKHWKELLGAQKDWQSNCKYGKPVQIKGGIPSIVLCNPGEGASYKDFLAKEENIGLRNWTIKNAIFITLTAPLYQEGTQACQEEGNQAAQD

SEQ ID NO: 15389 - protein, 361 aa, Sida golden mosaic Honduras virus
MPPPKRFRVNSKNYFLTYPQCSLTKEEALSQFQTLTTPVNKKFIKISRDKHENGEPHQHVLIQFEGKYQCTNNRFFDLVSPTRSVHFHPNIQGAKSSSDVKSYIDKDGDTIEWGQFQIDGRSARGGQQTANDTYAKALNATCAEEALRIIREEQPQHFFLQHHNLVANATKIFQKAPEPWAPPFPLSSFTNVPDDMQEWADEYFGRGSAARPDRPMSLIVEGDSRTGKTMWARALGPHNYLSGHLDFNPRVYSNEVEYNVIDDVAPHYLKLKHWKELLGAQKDWQSNCKYGKPVQIKGGIPSIVLCNPGEGASYKDFLDKEENASLRNWTIKNAIFITLTSALYQDSTQASQEEVHQEEAD

SEQ ID NO: 15390 - protein, 360 aa, Sida golden yellow vein virus
MPSIKRFKINAKNYFITYPDCSITKEEALSQLLNLSTPVNKKFIKICRELHQNGKPHLHVLMQFEGKYACENNRLFDLVSPTRSAHFHPNIQGAKSSSDVKSYIAKDGDTLEWGEFQIDGRSARGGCQSANDSYAKALNADSVESAMAVLKEEQPKDFVLQNHNIRSNLERIFAKAPEPWSPPFPLSSFNAVPDEMQAWADGYFGTDPARPERPVSIIVEGDSRTGKTMWARSLGPHNYLSGHLDFNARVFSNEVEYNVIDDVAPQYLKPKHWKELLGAQKDWQSNCKYGKPLQIKGGIPSIVLCNPGEGASYKDFLDKEENSALRIWTNKNAKFITLTAPLYQEGTQASQEEGHQEAQD

SEQ ID NO: 15391 - protein, 361 aa, Sida yellow vein virus
MPPPKRFRVQSKNYFLTYPQCSLTKEEALSQLENLQTPVNKKFIKICRELHENGEPHLHVLIQFEGKYQCTNNRLFDLVSPTRSVHFHPNIQGAKSSSDVKSYIDKDGDTIEWGEFQVDGRSARGGQQTANDSYAKALNAGSVLGAMTVLKEEQPKDFVLQNHNIRSNLERIFAKAPSPWVPPFQLSSFTNVPERMQEWADDYFGCDSAARPERPVSIIVEGDSRTGKTMWARALGPHNYLSGHLDFNPRVYSNEVEYNVIDDVAPQYLKLKHWKESFWGQKDWQSNCKYGKPVQIKGGIPSIVLCNPGEGASYKDFLNKEENSSLLNWTIKNAVFITLTSALYQDSAQASQEEVDQETAD

SEQ ID NO: 15392 - protein, 359 aa, South African cassava mosaic virus-[M12]
MPRAGRFSIKAKNYFLTYPKCNLSKEAALDQLRQLQTPTNKLFIKICRELHENGEPHLHALIQFEGKYNCTNPRFFDLISPSRSAHFHPNIQGAKSSSDVKSYLDKDGDTIQWGEFQIDGRSARGGQQSANDAYAKALNAASKTEALNVIRELAPKDFVLQFHNLNSNLDRIFQEPPIPYISPFLSSSFTNVPEELEVWVSENVMGSAARPWRPSSIVIEGDSRTGKTMWARSLGPHNYLCGHLDLSPKVYSNDAWYNVIDDVDPHYLKHFKEFMGAQRDWQSNTKYGKPIQIKGGIPTIFLCNPGPTSSYKEFLDEEKNQSLKAWALKNATFVTLHEPLFSSAYQSPTPHSEDQSPQT

SEQ ID NO: 15393 - protein, 349 aa, Squash mild leaf curl virus
MPRNPNSFRFTARNIFLTYPQCDIPKDEAIQMLEHLQWSVVKPTYIRVAREEHSDGFPHLHCLIQLSGKTNIKNARFFDLTHPRRAACFHPNIQAAKDTNAVKNYITKEGDYCESGKYKVSGGTKSSKDDVYHNAVNAGSAGEALDIIKAGDPKTFLVSYHNLKANIERLFHQPPEPWVPPFPLSSFTLVPEELQEWADDYFNKGSAARPYRNISIIVEGDSRTGKTMWARALGRHNYISGHLDFNSRVFSNDAEYNVIDDVAPQYLKLKHWKELIGAQRDWQSNCKYGKPVQIKGGIPSIVLCNPGEGASYKDFLDKAENTALKAWTLKNAKFIFLESPLYQSTAQDC

SEQ ID NO: 15394 - protein, 359 aa, Squash yellow mild mottle virus
MPRNPKSFRLTTRNIFLTYPKCDVPKDEVLQMLQGLSWSVVRPTYIRVAREEHSDGFPHLHCLVQLSGKSNIKDAGFFDLTHPRRSARFHPNIQAAKDTNAVKNYITKEGDYCESGQYKVSGSSKSNKDDVYHNAVNAASAGEALDIIKGGDPKTFIVSYHNITANVERLFQKPPEPWVPPFELSSFTSVPEELKDWAGHYFNECSAARPDLIGKSNSVCNRPISVIVEGDSRTGKTMWARALGPHNYMSGHLDFNSRVFSNDVKYNVIDDVAPHYLKLTHWKELIGAQRDWQSNCKYGKSVQIKGGIPSIVLCNPGEGASYKDFLDKAENAALREWTLKNAKFIFLNCPLYQSTTQDR

SEQ ID NO: 15395 - protein, 361 aa, Tobacco curly shoot virus-[Y1]
MPQLKKFIINAKNYFLTYPQCSLTKEEALSQISALSTPTNKLFIRICRELHEDGSPHLHVLIQFEGKFKCQNNRFFDLTSPSRSAHFHPNIQGAKSSTDVKAYMEKDGDVLDHGVFQIDGRSARGGCQSANDAYAEAINSGSKAAALNILKEKAPKDFVLQFHNLNSNLDRIFTPPIEKTFLLFYLLLSTKFQKNLKNGLLANVVSAVGGPLRPMSIVIEGDSRTGKTMWARSLGPHNYLCGHLDLSPKVYNNDAWYNVIDDVDPHYLKHFKEFMGAQRDWQSNTKYGKPVQIKGGIPTIFLCNPGPNSSYKEFLDEEKNKALKNWSLKNAIFVTLESPLYTGSNQSEAQASQGGEQASTC

SEQ ID NO: 15396 - protein, 363 aa, Tobacco leaf curl Japan virus
MAPPKRFQINAKNYFLTYPHCSLTKEEALSQIQALDTITNKLFIRICRELHEDGSPHLHVLIQFEGKYKCTNQRFFDLVSPTRSAHFHPNIQGAKSSSDVKAYMEKDGDVVDYGVFQVDGRSARGGCQSANDAYAEAINSGSKSAALSILREKAPKDFVLQFHNLNSNLDRIFSPPLEEFVCPFLSSSFDRVPEELEEWAAENARDSAARPWRPISIVIEGDSRTGKTMWARSLSPHHNYLCGHLDLSPKVYSNSAWYNVIDDVDPHYLKHFKEFMGAQRDWQSNTKYGKPIQIKGGIPTIFLCNPGPTSSYTEYLDEDKNAALKAWAIKNASFVTLYGPLYSTSHQGSAQIREEESTSQTED

SEQ ID NO: 15397 - protein, 363 aa, Tobacco leaf curl Japan virus-[JP2]
MAPPKRFKTNSKNYFLTYPHCTLTKEEALSQIQALETPTNKLFIRICRELHEDGSPHLHVLIQFEGKYQCTNQRFFDLVSPTRSAHFHPNIQGAKSSSDVKTYMEKDGDVIDYGVFQVDGRSARGGCQSANDAYAEAINSGSKSSALSILREKAPKDFVLQFHNLNSNLDRIFSPQLEEFVCPFSPSSFDRVPEELEEWAAETVREFAARPWRPISIVIEGDSRTGKTMWARSLSPHHNYLCGHLDLSPKVYSNSAWYNVIDDVDPHYLKHFKEFMGAQRDWQSNTKYGKPIQIKGGIPTIFLCNPGPTSSYTEYLDEDKNAALKAWAIKNASFVTLYGPLYSTSHQGSAQIREEESTSQTED

SEQ ID NO: 15398 - protein, 362 aa, Tobacco leaf curl Kochi virus
MAPPKRFRINSKNYFVTYPHCSLTKEEALTQIKALETPTNKLFIRICRELHEDGSPHLHILIQFEGKYQCTNQRFFDLVSPTRSAHFHPNIQGAKSSSDVKTYMEKDGDIIDFGVFQIDGRSARGGCQSANDAYAEAINSGSKSSALCILREKAPKDFVLQFHNLNSNLDRIFAPPLEEFISPFLSSSFDQVPEQLEEWAAENVRDSARPWRPMSIVIEGDSRTGKTMWARSLSPRHNYLCGHLDLSPKIYSNEAWYNVIDDVDPHYLKHFKEFMGAQRDWQSNTKYGKPIQIKGGIPTIFLCNPGPTSSYTEYLDEDKNAALKAWAIKNATFVTLYGPLYSGTHQGATQIREEETTTQEED

SEQ ID NO: 15399 - protein, 362 aa, Tobacco leaf curl Yunnan virus-[Y3]
MAPPKRFEIQAKNYFLTYPQCSLTKEEALSQLQALETPTNKKYIKICRELHEDGSPHLHVLIQFEGKYVCTNNRFFDLVSPTRSAHFHPNIQGAKSSSGVKSYIDKDGDTLEWGEFQIDGRSARGGQQTANDAYAQALNSGSKSEALNVIKELAPKDFVLQFHNLNANLDRIFAPPLEVLFLLFYLHHLIKFPKNLKSGLLDNVRHAAARPWRPISIVIEGESRTGKTMWARSLGPHNYLCGHLDLSPKVYSNDAWYNVIDDVDPHYLKHFKEFMGAQRDWQSNTKYGKPIQIKGGIPTIFLCNPGPTSSYKEFLEEEKNSALKEWALKNAEFITLNSPLYSGTNQSATQNSQEEASSQAES

SEQ ID NO: 15400 - protein, 359 aa, Tobacco leaf curl Zimbabwe virus
MAPPKRFQINSKNYFVTYPKCSLTKEETLSQLLNLETPTNKKYIKICRELHENGEPHLHVLIQFEGKFNCKNHRFFDLVSPTRSAHFHPNIQGAKSSSDVKSYIDKDGDTLEWGEFQVDGRSARGGCQNANDACADALNAGSAEAAMAIIREKLPKDFIFQYHNLKTNLDRIFQAPPEPYISPFSSSSFDQVPEELEGWVSENVCGAAARPWRPNSIVIEGDSRTGKTIWARSLGPHNYLCGHLDLSPKVYSNDAWYNVIDDVDPHYLKHWKEFFGAQRDWQSNTKYGKPIQVKGGIPTIFLCNPGPTSSYREFLEEAKNYALKSWTLKNATFITLDRPLYSDTNQSPPPQSQDESHSP

SEQ ID NO: 15401 - protein, 352 aa, Tomato chlorotic mottle virus-Crumple
MPPPKHFRVNSKNYFLTYPHCSLSKEEALSQILALNTPTNKLIIRVSRELHEDGQPHLHVLIQFEGKYNCKNNKFFDLVSPSRSAHFHPNIQGAKSSSDVKSYVEKDGDFVDHGVFQIDGRSARGGQQSANDTYAKVLNAGSVMEALNILREEQPKDFVLQHHNIRSNLERIFAKAPEPWVPPFPLSSFTNVPVEMQDWVDDYFGRDAAARPERPISIIIEGDSRSGKTMWARALGSHNSLSGHLDFNSKVYSNDVHYNVIDDVAPHYLKLKHWKELIGAQKDWQSNCKYGKPVQIKGGIPCIGALQSLGEGASYKCFLDKDENSALSSWTKHNAQFIFLNSPLYQSSTSGC

SEQ ID NO: 15402 - protein, 346 aa, Tomato golden mottle virus
MPLPRRFRLQAKNIFLTYPLCSLTKDEALEQLQSIQLTSNKRYIKICRELHENGEPHLHVLVQLEGKVQITNERQFDLVSPTRSAHFHPNIQGAKSSSDVKSYIDKDGDTLEWGQGQIDGRSARGGQQTANDSYAKALNAVGVQEALQILKEEQPRDFVKDFHNLKGNLEKIFAKAPEPWVPPFPLSSFNNMPEELQTWADDYFGNGAAARTLRPISIIIEGDSRTGKTMWARSLGIHNYLSGHLDFNSRVYSNDVMYNVIDDVPPHYLKMKHWKELIGAQTDWQTNCKYRKPFQIKGGIPSIVLCNPGEGPFYKYYLDKQENTHLKAWTLHNAKFVFLDAPLYQT

SEQ ID NO: 15403 - protein, 361 aa, Tomato leaf curl Bangladesh virus
MPQPKRFQIYAKNYFLTYPQCSLTKEEALSQIKNLATPTNKLFIRVSRELHENGEPHLHVLIQFEGKFKCQNNRFFDLVSTTRSANFHPNIQGAKSASDVKAYVEKDGDFIDFGVFQIDGRSARGGCQSANDAYAEAINSGSKAAALNILREKAPKDFVLQFHNLNANLDRIFTPPVEVYVSPFNSSSFDQVPEELEEWAAENVVSAAARPLRPISIVIEGDSRTGKTMWARSLGPHNYLCGHLDLSPKVYNNEAWFNIIDDVDPHYLKHFKEFMGAQRDWQSNTKYGKPVQIKGGIPTIFLCNPGPNSSYKEFLDEEKNAALKNWALKNAIFVTLEGALYSGSNQSAAQDSQEGDQASSC

SEQ ID NO: 15404 - protein, 360 aa, Tomato leaf curl Laos virus
MPRAGRFSIKAKNYFLTYPQCSLTKEEALSQLQTLQTPTNKKYIKICRELHEDGSPHLHVLIQFEGKYNCTNNRFFDLVSPTRSAHFHPNIQGAKSSSDVKSYLEKDGDTLDWGEFQIDGRSARGGQQTANDAYAKALNSGSKSEALNVIKELAPKDYVLQFHNLNSNLDRIFAPPLEVFVCPFLSSSFDQVPEELEEWVSENVRDAAARPWRPKSIVIEGESRTGKTMWARSLGPHNYLCGHLDLSPKVYSNDAWYNVIDDVDPHYLKHFKEFMGAQRDWQSNTKYGKPMQIKGGIPTIFLCNPGPTSSYKEYLDEEKNSALKDWAVKNAEFITLTEPLYSGTHQSQAQNSQEEANSQT

SEQ ID NO: 15405 - protein, 362 aa, Tomato leaf curl Malaysia virus
MAPPRPFKINAKNYFLTYPQCSLTKEDALSQLQNLNTPTNKKYIKICRELHEDGSPHLHVLIQFEGKYQCKNNRFFDLVSPTRSAHFHPNIQGAKSSSDVKSYIDKDGDTLDWGEFQIDGRSARGGQQTANDAYAQALNSGSKSEALNVIKELAPKDFVLQFHNLNSNLDRIFAPPVEVFVCPFLSSSFDQVPEELEEWVSKNVRDAAARPWRPNSIVIEGESRTGKTMWARSLGPHNYLCGHLDLSPKVYSNDAWYNVIDDVDPHYLKHFKEFMGAQRDWQSNTKYGKPIQIKGGIPTIFLCNPGPTSSYKEYLDEEKNSALKEWALKNAEFITLNSPLYSGTNQSATQNSQEEASSQAES

SEQ ID NO: 15406 - protein, 361 aa, Tomato leaf curl New Delhi virus
MASPRRFRVNAKNYFLTYPKCSLTKEEALSQLQTLETPTKKKFIKICRELHEDGSPHIHVLIQFEGKFQCKNNRFFDLVSPSRSAHFHPNIQGAKSASDVKNYIAKDGDVLEWGVFQIDGRSARGGQQTANDAYAQAINTGNKDDALRVLKELAPKDYVLQFHNLNTNLDRIFQPPSEVYVSPFSISSFDRVPADLVDWVSSNVVCAAARPFRPISIVIEGDSRTGKTMWARCLGPHNYLCGHLDLSPKVYSNDAWYNVIDDVDPHYLKHFKEFMGAQRDCQSNTKYGKPVMIKGGIPTIFLCNKGPNSSYKEYLDEEKNAALKQWAIKNAVFITLEEPLYSGRENIALPEEEEEHSQEAS

SEQ ID NO: 15407 - protein, 361 aa, Tomato leaf curl New Delhi virus-[Lucknow]
MPPPSRFRINAKNYFLTYPKCSLTKEEALSQLLTLETPTSKKFIKICRELHEDGTPHIHVLIQFEGKFQCKNNRFFDLVVPSRSAHFHPNIQGAKSASDCKAYIDKDGDVLEWGVFQIDGRSARGGQQTANDAYAQAINTGNKEDAMKVLKELAPKDYVLQFHNLITNLDRIFQPRSEVYVSPFSISSFDRVPPELVDWVTSNVVCAAARPFRPISVVIEGDSRTGKTMWARCLGPHNYLCGHLDLSPKVYSNDAWYNVIDDVDPLYLKHFKVFMGAQRDCQSNTKYGKPVMIKGGIPTIFLCNKGPNSSYKEYLNEEKNAALKQWVIKNAVFITLEEPLYSGRENIAPPEEEEEHSQEAS

SEQ ID NO: 15408 - protein, 361 aa, Tomato leaf curl New Delhi virus-[Luffa]
MAPPRRFRIDAKNYFLTYPKCPLTKEEALSQLQALETPTAKKFIKICRELHEDGSPHIHVLIQFEGKFQCKNNRFFDLVSPSRSAHFHPNIQGAKSASDVKAYIDKDGDVLEWGVFQIDGRSARGGQQTANDAYAKAINTGNKEDALKVLKELAPKDYVLQFHNLISNLDRIFQPPSEVYASPFSISSFDRVPPQLVDWVSSNVVCAAARLFRPISIVIEGDSRTGKTMWARCLGPHNYLCGHLDLSPKVYSNDAWYNVIDDVDPHYLKHFKEFMGAQRVWQSNTKYGKPVQIKGGIPTIFLCNPGPNSSYKEYLDEEKNAALKQWAIKNAVFITLEEPLYSGRENIAPTEEEEEHSQEAS

SEQ ID NO: 15409 - protein, 361 aa, Tomato leaf curl New Delhi virus-Mild
MAPPRRFRIDAKNYFLTYPKCSLTKEEALSQLQTLETPTAKKFIKICRELHDDGSPHIHVLIQFEGKFQCKNNRFFDLVSPSRSAHFHPNIQGAKSASDVKAYIDKDGDVLEWGVFQIDGRSARGGQQTATDAYAKAINTGNKEDALKVLKELAPKDYVLQFHNLISNLDRIFQPRSEVYVSPFSISSFDRVPPELVDWASVNVVCAAARPFRPISIVIEGDSRTGKTMWARCLGPHNYLCGHLDLSPKVYSNDAWYNVIDDVDPHYLKHFKEFMGAQRDWQSNTKYGKPVMIKGGIPTIFLCNKGPPSSYKEYLDEEKNAALKQWAIKNAVFITLEEPLYSGRENIAPTEEEEEHSQEAS

SEQ ID NO: 15410 - protein, 363 aa, Tomato leaf curl Sri Lanka virus
MSPPKRFQIFAKNYFLTYPQCSLTKEEALSQLQNLNTPTNKLFIRICRELHDNGEPHLHVLIQFEGKFKCQNNRFFDLVSPTRSAHFHPNIQGAKSSSDVKSYMEKDGDVLDFGIFQVDGRSARGGCQSANDAYAEAINSGSKSSALNILREKAPKDYVLQFHNLNANLDRIFTPPVEVYISPFSLSSFDQVPDELEEWAAINVVSAAARPIRPIGIIVEGDSRTGKTMWARSIGPHNYLCGHLDLSPRVYSNDAWYNVIDDVDPHYLKHFKEFMGAQRDWQSNTKYGKPVQIKGGIPTIFLCNPGPNSSYKEFLDEEKNSALRNWALKNAIFVTLAGPLYSGTNQGSPQASQEDNQEEENRP

SEQ ID NO: 15411 - protein, 358 aa, Tomato mosaic Havana virus
PKKFRVNSKNYFLTYPQCSITKEEALSQIKNLNTPVNKKFIKICRELHENGEPHLHVLLQFEAKYQCTNSRFFDLVSPSRSAHFHPNIQGAKSSSDVKAYIDKDGDATEWGEFQIDGRSARGGCQSANDTYAKALNASCAEEALQIIKEQQPQHFFLHHHNLVANAQRIFHKPPEPWVPPFHLSSFTDVPEEMQKWADDYFGRGSAARPDRPISIIVEGDSRTGKTMWARALGPHNYLMGHLDFNSRVYSNAVEYNVIDDVAPHYLKLKHWKELLGAQRDWQSNCKYGKPVQIKGGIPAIVLCNPGEGSSYKDFLNKEENTALRNWTIKNALFITLTSALYQDSSQASKEEDNQEKAD

SEQ ID NO: 15412 - protein, 361 aa, Tomato mottle Taino virus
MPRKGSFSVKAKNYFLTYPQCSLSKEEALSQIQNLNTPVDKKFIKICRELHENGEPHLHVLVQFEGKYNCTNNRFFDVVSPTRSAHFHPNIQGAKSSSDVKTYITKDGDTLEWGEFQIDGRSARGGQQSANDSYAKALNAGNVQSAMAVLKEEQPKDFVLHNHNIRSNLERIFAKAPEPWVPPFPLSSFTNVPDEMQEWADVYFGAGSAARPNRPMSIVIEGDSRTGKTMWARALGPHNYLSGHLDFNTRVYSNDVQYNVIDDIAPHYLKLKHWKELLGAQRDWQSNCKYGKPVQIKGGIPAIVLCNPGEGASYKDFLSKDENTSLRDWTIKNAMFITLTTPLYQDSTQARQEEGNQETAC

SEQ ID NO: 15413 - protein, 361 aa, Watermelon chlorotic stunt virus-[IR]
MRPPRFRIQAKNIFLTYPRCSLSKEELLSFLVGLSLPSNLKYVKVCRELHQNGEPHLHVLLQFAGKITITDNRLFDHVHPSRSACFHPNIQSAKSSTDVKSYLDKDGDTVEWGKFQIDGRSARGGQQTANDAYATALNMSNKGEAMSVIKELAPKDFVLHYHNIKSNLDRIFEEPVAPFVCPFPMSSFTLLPPELVEWASTNVCSSAARPWRPKSIVVEGESRTGKTMWARSLGPHNYLCGHLDLSPKIYSNDAWYNVIDDVDPHYLKHFKEFMGAQRDWQSNTKYGKPIQIKGGIPTIFLCNPGPSSSYKEFLEEEKNYALKEWADKNAEFVFLSEPLFSAEHQDQTQTRQKEDDSATTR

SEQ ID NO: 15414 - protein, 361 aa, Watermelon chlorotic stunt virus-[SD]
MRPPRFRIQAKNIFLTYPRCSLSKEELLSFLVGLSLPSNLKYVKVCRELHQNGEPHLHVLLQFAGKITITDNRLFDHVHPSRSACFHPNIQSAKSSTDVKSYLDKDGDTVEWGKFQIDGRSARGGQQTANDAYATALNMSNKGEAMSVIKELAPKDFVLHYHNIKSNLDRIFEEPVAPFVCPFPMSSFTMLPPELVDWASTNVCSSAARPWRPKSIVVEGESRTGKTMWARSLGPHNYLCGHLDLSPKIYSNDAWYNVIDDVDPHYLKHFKEFMGAQRDWQSNTKYGKPIQIKGGIPTIFLCNPGPSSSYKEFLEEEKNYALKEWADKNAEFVFLTEPLFSTEHQDQTQTRQKEDDSATTR

SEQ ID NO: 15415 - protein, 358 aa, Macroptilium mosaic Puerto Rico virus-[Bean]
MPPPKRFRVSSKNYFLTYPRCSISKEETLSQLLNIETPTNKKYIKICEELHEDGQPHLHVLIQFEGKFVCTNQRLFDLVSPTRSTHFHPNIQGVKSSSDVKAYIDKDGVTIEWGQFQIDGRSARGGQQSANDSYAKALNADCIDAAMTVLKEEQPKDFVVQYHNIRSNLEKIFTPPTEPWVPPFQLSTFNNVPLIMSDWVNENISDSAARPLRPISIIVEGPSRTGKTIWARSLGPHNYLCGHIDLNPRIYSNHSWYNVIDDVDPHYLKHFKEFMGAQRDWQSNCKYGKPIQIKGGIPTIFLCNPGPHSSYKEYLSEEKNKSLNDWAQKNAIYVSITEPLYSTVNQTASSSRQETDST

SEQ ID NO: 15416 - protein, 159 aa, Sida rhombifolia Trinidad geminivirus
  unsure (1)..(159): unsure at all Xaa locations
HENGEPHLHVLIQFEGKHQCTNSRQFDLVSTTRSVHFHPNVQGAKSSSDVKSYIDKDGDTIEWGEFQIDGRSARGGQQSANDTYAKALNARSAEXALQIIKEEQPQHFFLQHHNLVANAAKIFAKVPEQWVPPFPLSSFTNVPEQMQEWADDYFGRVPL

SEQ ID NO: 15417 - protein, 364 aa, Sweet potato leaf curl Georgia virus
MPRQPGFRVSAKNVFLTYPKCSLSKETALELLKAINCPSDKLFIRVSQEEHQDGSLHLHALIQFKGKAQFKNPRHFDLQHPNSSNQFHPNFQGAKSSSDVKSYIEKDGDYIDWGTFQVDGRSARGGQQTANDAAAEALNAGSAEAALQIIREKLPRDFIFQYHNLRSNLDRIFSPPPSVYSSPFLSSSFNNVPDIISDWAAENVMDSAARPDRPISIVIEGPSRIGKTVWARSLGPHNYLCGHLDLSPKVYSNSAWYNVIDDVNPQYLKHFKEFMGAQKDWQSNCKYGKPVQIKGGIPTIFLCNPGEGSSFKFWLDKPEQEALKNWAVKNAIFCDVDSPFWIQEEVSHSGTSAHSGEESQEEGS

SEQ ID NO: 15418 - protein, 362 aa, Tobacco leaf curl Japan virus-[JP3]
MAPPKRFKINSKNYFLTYPHCTLTKGEALSQIQALETPTNKLFIRICRELHEDGSPHLHVLIQFEGKYQCTNQRFFDLVSPTRSAHFHPNIQGAKSSSDVKTYMEKDGDVIDYGVFQVDGRSARGGCQSANDAYAEAINSGSKSSALSILREKAPKDFVLQFHNLNSNLDRIFSPQLEEFVCPFSSSSFDRVPEELEEWAAETVRDSARPWRPMSIVIEGDSRTGKTMWARSLSPHHNYLCGHLDLSPKVYSNSAWYNVIDDVDPHYLKHFKEFMGAQRDWQSNTKYGKPIQIKGGIPTIFLCNPGPTSSYTEYLDEDKNAALKAWAIKNASFVTLYGPLYSTSHQGSAQIREEESTSQTAD

SEQ ID NO: 15419 - protein, 363 aa, HYVMV-tobacco [Yamaguchi]
MPPPNRFKINAKNYFLTYPHCSLTKEEALSQIKALQTPTNKLFIRICRELHEDGSPHLHILIQFEGKYTCRNQRFFDLVSPNRSAHFHPNIQGAKSSSDVKTYMEKDGDILDFGVFQVDGRSARGGCQSANDAYAEAINSGSKSSALCILREKAPKDFVLQFHNLNSNLDRIFLPPLEEFVSPFLSSSFDQVPEQLEEWAAENVRDSAARPWRPMSIVIEGDSRTGKTMWARSLSPRHNYLCGHLDLSPKVYSNEAWYNVIDDVDPHYLKHFKEFMGAQRDWQSNTKYGKPIQIKGGIPTIFLCNPGPTSSYTEYLDEDKNAALKAWAIKNAIFVTLYGPLYSGTHQGATQIREEETTTQEED

SEQ ID NO: 15420 - protein, 363 aa, okra yellow vein mosaic virus
MAPPKQFQIYAKNYFITYPTCSLTKKEALSQLQNLQTPVNKKYIRICREFHENGEPHLHVLIQFEGKYKCKNNRFFDLVSPTRSAHFHPNIQGVKSSSDVKSYIAKDGDILDWGEFQIDGRSARGGQQTANDAYAAALNAGSKSEALRVIKELAPKDFVLQFHNLNANLDRIFQEPPAPYVSPFSSSSFDQVPEELEEWVSENVVDAAARPLRPQSIVIEGDSRTGKTMWARSLGPHNYLCGHLDLSPKVYSNDAWYNVIDGVDPHFLKHFKEFMGAQRDWQSNTKYGKPVQIKGGIPTIFLCNPGPNASYKEYLDEEKNSALKAWALKNAAFVFLTQPLYSGTNQSTAQGSEETQQEEESRS

SEQ ID NO: 15421 - protein, 358 aa, Beet mild curly top virus
MPRSPSFQIKAKNIFLTYPRCSIIKEDALEILKNIPCPSDKLFIRVSQEKHQDGSLHLHALIQFKGKAQFRNPRHFDITHPSSSSTFHPNFQGAKSASDVKQYIEKDGDYVDWGTFQVDGRSDRGGQQTANDAAAEALNAGNAAEALQIIREKLPEKFIFQYHNLKPNLEAIFLPPPDIYQPPFPQSSFTQVPEIVQEWADSYFGVDAAARPFRYNSIIIEGDSRTGKTMWARSLGPHNYISGHLDFSLKTYHDDVLYNVIDDVDPAYLKMKHWKHLIGAQREWQTNLKYGKPRVIKGGIPSIILCNPGDGSSYQDFLDKSENEALKSWTIQNSAFVKLSGPLFDKDTEASSQGQSPL

SEQ ID NO: 15422 - protein, 354 aa, Beet severe curly top virus
MPFYKKAKNFFLTYPQCSVTKEDALEQLLAINTPSNKKYIRICRELHENGEPHLHALIQFEGKVQIRNARYFDLQHRSTSKQFHCNIQGAKSSSDVKSYVSKDGDHIDWGEFQVDGRSARGGQQTANDAAAEALNAGNALEALQIIREKLPEKYIFQYHNLKPNLEAIFLPPPDLYQPPFPLSSFTRVPEIIQEWADSYFGLDPAARPFRYNSLIIEGDSRTGKTMWARCLGPHNYITGHLDFSLKTYNDNVLYNVIDDVDPNYLKMKHWKHLIGAQREWQTNLKYGKPRVIKGGIPSIILCNPGEGSSYQDFLNKSENEALRSWTLQNSVFAKLTSPLFDNNQEASSQDQTSL

SEQ ID NO: 15423 - protein, 272 aa, Luffa begomovirus
MASPRRFRVNAKNYFLTYPKCSLTKEEALSQLQTLETPTRKKFIKICRELHEDGSPHIHVLIQFEGKYQCKNNRFFDLVSPSRSAHFHPNIQGAKSASDVKKYIDKDGDVLEWGVFQIDGRSARGGQQTANDAYAQAINTGNKDDALKVLKELAPKDYVLQFHNLNTNLDRIFQPPSEVYVSPFSISSFDRVPAELVDWVSSNVVCAAARPFRPISIVIEGDSRTGKTMWARCLGPHNYLCGHLDLSPKVYSNEAWYNVIDDVDPHYLKHFK

SEQ ID NO: 15424 - protein, 361 aa, Tomato leaf curl virus
MVPPKRFKIQGKNYFLTYPQCSLTKEEALSQIQALDTPTNKKYIKICRESHEDGSPHLHVLIQFEGKYVCTNNRFFDLVSPTRSAHFHPNIQGAKSSSDVKSYIDKDGDTLEWGEFQIDGRSARGGQQTANDAYAQALNSGSKSEALNVIKELAPKDFVLQFHNLNANLDRIFAPPLEVFVCPFLSSSFDQVPEELEEWVSENVSGRRGPWRPISIVIEGDSRSGKTMWARSLGPHNYLCGHLDLSPKVYSNDAWYNVIDDVDPHYLKHFKEFMGAQRDWQSNTKYGKPIQIKGGIPTIFLCNPGPTSSYKEYLDEEKNSALKEWALKNAEFVTLNRPLYSGTNQSATQNSQEEASSQAES

SEQ ID NO: 15425 - protein, 232 aa, Tomato leaf curl virus
MESNRGTPSNNSLTKRFQINAKNYFLTYPHCSLSKSEALSQIRNLNTPTNKKYIKICSELHEDGEPHLHVLIQFEGKFKTKNKRFFDLVSPTRSTHFHPNIQGAKSSSDVKAYIEKDGDTLEWGTFQIDGRSSRGGKQSANDAYAKAMNAGNKAEALNILKELAPKDYILQFHNLNTNLDKIFMTPQPVFTSPFLSSSFDQVPEELEEWVAENIVDPAARPLRPKSLVLQGD

SEQ ID NO: 15426 - protein, 362 aa, Tomato leaf curl virus
MTRPKSFRINAKNYFLTYPKCSLTKEEALSQLNNLETPTSKKYIKVCRELHENGEPHLHVLIQFEGKFQCKNQRFFDLVSPTRSAHFHPNIQGAKSSSDVKSYLEKDGDTLEWGEFQIDGRSARGGQQSANDAYAQALNTGSKSEALNVLRELAPKDYVLQFHNLNSNLDRIFTPPLEVYVSPFLSSSFDRVPEELEEWVAENVKDAAARPLRPISIVIEGESRTGKTVWARSLGPHNYLCGHLDLSPKVYSNDAWYNVIDDVDPHYLKHFKEFMGAQRDWQSNTKYGKPVQIKGGIPTIFLCNPGPNSSYKEYLDEEKNSALKAWALKNAEFITLNEPLYSGTYQGPTQNSEEEVHPEEEN

SEQ ID NO: 15427 - protein, 360 aa, Tomato leaf curl virus
MAPPKRFLINAKNYFLTYPQCSLTKEEALSQLQNLNTPTNKKFIKICRELHEDGSPHLHVLIQFEGKFKCQNNRFFDLTSPTRSAHFHPNIQGAKSSSDVKSYIDKDGDTLEWGEFQVDGRSARGGQQTANDTAAKALNSGSAEAALAIIREELPKDFIFQYHNIKANLDRIFTPRAEVFVCPFLSSSFDQVPEELECWVSENVRDAAARPWRPVSIVIEGESRTGKTMWARSLGPHNYLCGHLDLSPKVYSNDAWYNVIDDVDPHYLKHFKEFMGAQRDWQSNTKYGKPIQIKGGIPTIFLCNPGPTSSYKEYLDEEKNSALKEWAIKNAEFVTLNSPLYSGTNQSATQNSQEEASSQA

SEQ ID NO: 15428 - protein, 362 aa, Tomato leaf curl virus
MAPPRKFQINAKNYFLTYPKCCLTKEETLAQIKTLDTVTNKKFIKICRELHEDGSPHLHVLIQFEGKYRCTNKRFFDLVSPTRSAHYHPNIQGAKSSSDVKSYIDKDGDTLEWGEFQIDGRSARGGQQSANDAYAKAINTGSKSEALNVIRELAPKDFVLQFHNLNANLDRIFAPPLEVFRCPFLSSSFDQVPKELEDWVSENVRDAAARNGRPMSIVIEGDSRTGKTMWARSMGPHNYLCGHLDLSPKVYSNDAWYNVIDDVDPHYLKHFKEFMGAQRDWQSNTKYGKPIQIKGGIPTIFLCNPGPTSSYKEYLDEDKNSPLKDWALKNAEFITLTRPLYSGTHQSPAQNSQEETNTQAEN

SEQ ID NO: 15429 - protein, 361 aa, Tomato leaf curl virus
MAPPRRFRIDAKNYFLTYPKCSLTKEEALSQLQTLETPTAKKFIKICGELHEDGSPHIHVLIQFEGKFQCKNNRFFDLVSPSRSAHFHPNIQGAKSASHVKAYIDKDGDVLEWGVFLIDGRSARGGQQTANDAYAKAINTGNKEDALKVLKELAPKDYVLQFHNLNTNLDRIFQPPSEVYVSPFSISSFDRVPADLVDWVSSNVVCAAARPFRPISIVIEGDSRTGKTMWARCLGPHNYLCGHLDLSPKVYSNDAWYNVIDDVDPHYLKHFKEFMGAQRDWQSNTKYGKPVMIKGGIPTIFLCNKGPNSSYKEYLDEEKNAALKQWAIKNAVFITLEEPLYSGRENIAPQEEEEEHSQEAS

SEQ ID NO: 15430 - protein, 361 aa, Tomato leaf curl virus
MASPRRFRVNAKNYFLTYPKCSLTKEEALSQLQTLETPTKKKFIKICREFHEDGSPHIHVLIQFEGKFQCKNNRFFDLVSPSRSAHFHPNIQGAKSASDVKKYIDKDGDVLEWGVFQIDGRSARGGQQTANDAYAQAINTGNKDDALKVLKELAPKDYVLQFHNLNTNLDRIFQPPSEVYVSLFSISSFDRVPAELVDWVSSNVVCAAARPIRPISIVIEGDSRTGKTMWARCLGPHNYLCGHLDLSPKVYSNDAWYNVIDDVDPHYLKHFKEFMGAQRDWQSNTKYGKPVMIKGGIPTIFLCNKGPNSSYKEYLDEEKNAALKQWAIKNAVFITLEEPLYSGRENIAPTEEEEEHPQEES

SEQ ID NO: 15431 - protein, 361 aa, Tomato leaf curl virus
MAPPRRFRINAKNYFLTYPKCSLTKEEALSQLQTLETPTAKKFIKISRELHEDGSPHIHVLIQFEGKFQCKNNRFFDLVSPSRSAHFHPNIQGAKSASDVKAYIDKDGDVLEWGVFQIDGRSARGGQQTANDAYAQAINTGNKADALKLLKELAPKDYVLQFHNLNSNLDRIFQPPSEVYVSPFLISSFDRVPPELVDWVSSNVVCAAARPFRPISIVIEGDSRTGKTMWARCLGPHNYLCGHLDLSPKVYSNDAWYNVIDDVDPHYLKHFKEFMGAQRDWQSNTKYGKPVMIKGGIPTIFLCNKGPNSSYKEYLDEEKNAALKQWAIKNAVFITLEEPLYSGRENIAPPEEEEEHSQEAS

SEQ ID NO: 15432 - protein, 214 aa, Tomato leaf curl virus
MAPPRRFRIDAKNYFLTYPKCSLTKEETLSQLQTLETPTAKKFIKICRELHEDGSPHIHVLIQFEGKFQCKNNRFFDLVSPSRSAHFHPNIQGAKSASDVKAYIDKDGDVLEWGVFQIDGRSARGGQQTANDAYAKAINTGNKEDALKVLKELAPKDYVLQFHNLISNLDRIFQPPSEVYASPFLISSFDRVPPELVDWVSSNVVLVLRGLLGP

SEQ ID NO: 15433 - protein, 231 aa, Tomato leaf curl virus
MPRINSFCVNAKNIFLTYPKCPIPKEQMLEILKNISCPSDKLFIRVAQEKHQDGSMHIHALIQFKGKSKFRNPRHFDVTHPNNSTQFHPNFQGAKSSSDVKSYIEKDSDYIDWGEFQIDGRSARGGQQTANDAAAEALNAGSAGAALAIIREKLPKDFIFQYHNLKCNLDRIFTPPMEVYVSPFSSSSFDQVPDELEEWAAENVVSAAARPLRPVSIVIEGDSRTGKTMWA

SEQ ID NO: 15434 - protein, 87 aa, Tomato leaf curl virus
MAPPKRFRIQAKNFFLTYPKCSLSKEEALSQLQSLNTPTNKKYLKICRELHENGEPHLHVLIQFEGKYVCTNQRFFDLVSPTRSAHF

SEQ ID NO: 15435 - protein, 351 aa, Indian cassava mosaic virus
MSPPKRFQINAKNYFLTYPRCSLTKEEALSQIRNFQTPTNPKFIKICRELHENGEPHLHVLIQFEGKYKCQNQRFFDLVSPTRSAHFHPNIQGAKSSSDVKSYIDKDGDTWRWGTFQIDGRSARGGQQSANDAYAAALNSGSKSEALKILRELAPRDYLRDFHHISSNLDRIFTKPPPPYENPFPLSSFDRVPEELDEWFHENVMGRARPLRPKSIVIEGDSRTGKTMWSRALGPHNYLCGHLDLSPKVYNNDAWYNVIDDVDPHYLKHFKRIHGGPEDWQSNTKYGKPVQIKGGIPTIFLCNPGPNSSYKEFLDEEKNSALKAWALKNATFISLEGPLYSGTNQGPTQSC

SEQ ID NO: 15436 - protein, 347 aa, Indian cassava mosaic virus
MSPPKRFQINAKNYFLIYPRCSLTKEEALSQLRALQTPTNTKFIKICRELHENGEPHLHVLIQFEGKYKCQNQRFFDLVSPSRSAHFHPNIQGAKSSSDVKSYIDKDGDTLEWGTFQIDGRSARGGQQSANDAYAAALNSGSKSAALTILKELAPRDYLRDFHHINSNLDRIFTTPPPPYQNPFPLSSFDRVPEELDEWFHENVMDAAARPLRPKSIVIEGDSRTGKTMWARALGPHNYLCGRLDLSPKVYNNNAWYNVIDDVDPHYLKHFKEFMGAQRDWQSNTKYGKPVQIKGGIPTIFLCNPGPNSSYKEFLDEDKNSALKAWAIKNATFISLDEPLYSGPNQG

SEQ ID NO: 15437 - protein, 219 aa, bean calico mosaic virus
MPRNPSSFRITARNIFLTYPQCDINKDEALRLLQELPWSVVKPTYIRVAREEHSDGFPHLHCLIQLSGKSNIKDVRFFDLTHPRRSANFHPNVQAAKDTNAVKNYITKEGDYCESGEYKVSGSTKSNKDDVYHNAVNAGSIKEALDIIRAGDPKTFIVNYHNIKANIERLFKKAPEPWVPPFQLSSFTFVPDEMQEWADDYFGRGGARAERPNSIIVEG

SEQ ID NO: 15438 - protein, 220 aa, bean calico mosaic virus
MPRNPSSFRITARNIFLTYPQCDINKDEALRLLQELPWSVVKPTYIRVAREEHSDGFPHLHCLIQLSGKSNIKDVRFFDLTHPRRSANFHPNVQAAKDTNAVKNYITKEGDYCESGEYKVSGSTKSNKDDVYHNAVNAGSIKEALDIIRAGDPKTFIVNYHNIKANIERLFKKAPEPWVPPFQLSSFTFVPDEMQEWADDYFGRGGARAERPNSIIVEGG

SEQ ID NO: 15439 - protein, 349 aa, bean calico mosaic virus
MPRNPSSFRITARNIFLTYPQCDINKDEALRLLQELPWSVVKPTYIRVAREEHSDGFPHLHCLIQLSGKSNIKDVRFFDLTHPRRSANFHPNVQAAKDTNAVKNYITKEGDYCESGEYKVSGSTKSNKDDVYHNAVNAGSIKEALDIIRAGDPKTFIVNYHNIKANIERLFKKAPEPWVPPFQLSSFTFVPDEMQEWADDYFGRGAAARAERPISIIVEGGSRTGKTMWARALGPHNYLSGHLDFNSSVYSNEVEYNVIDDISPQYLKLKHWKELIGAQRDWQSNCKYGKPVQIKGGIPSIVLCNPGEGASYKDFLDKEENASLKNWTIQNAKFIFLNTPLYQSTAQDR

SEQ ID NO: 15440 - protein, 361 aa, mungbean yellow mosaic virus
MPRLGRFAINAKNYFLTYPRCPLRKEDALEELLALSTPVNKKFIRVCRELHEDGEPHLHVLLQFEGKFQTKNERFFDLVSSTRSAHYHPNVQAAKSASDVKSYMDKDGDVVDHGSFQVDGRSARGGKQSANDAYAEALNSGSKLQALNILREKAPKDYILQFHNLNCNLSRIFSDEVPLYVSPYSLSAFDKVPSYISSWASENVRHPAAPERPISIVIEGDSRTGKTMWARALGPHNYLCGHLDLNSKIYSNDAWYNVIDDVDPHYLKHFKEFMGAQRDWQSNVKYGKPTHIKGGIPTIFLCNPGPKSSYKEYLDEADNTALKLWASKNAEFYTLKEPLFSSVDQSATQGCQEASNSTLSN

SEQ ID NO: 15441 - protein, 361 aa, watermelon chlorotic stunt virus
MRPPRFRIQAKNIFLTYPRCSLSKEELLSFLVGLSLPSNLKYVKVCRELHQNGEPHLHVLLQFAGKITITDNRLFDHVHPSRSACFHPNIQSAKSSTDVKSYLDKDGDIVEWGKFQIDGRSARGGQQTANDAYATALNMSNKGEAMSVIKELAPKDYVLHYHNIRSNLDRIFEEPVAPFVCPFPMSSFTLLPPELVDWASTNVCSSAARPWRPKSIVVEGESRTGKTMWARSLGPHNYLCGHLDLSPKIYSNDAWYNVIDDVDPHYLKHFKEFMGAQRDWQSNTKYGKPIQIKGGIPTIFLCNPGPSSSYKEFLEEEKNYALKEWAEKNAEFVFLTEPLFSAEHQDQTQTRQKEDDSATTR

SEQ ID NO: 15442 - protein, 323 aa, Panicum streak virus (Kenyan isolate)
MSTVGSSSEGRHSVRCFRHRNANTFLTYSKCPLEPEFIGEHLFRLTREYEPAYILVVRETHTDGTWHCHALLQCIKPCTTRDERYFDIDRYHGNIQSAKSTDKVREYILKDPKDKWEKGTYIPRKKSFVPPGKEPAEKKPTKDEVMREIMTHATSREEYLSLVQSSLPYDWATKLNYFEYSASRLFPDIAEPYTNPHPTTEYDLHCNETIEDWLKPNIYQVSPQAYKLLEPSCLSLEQAIADLEWLDDTTRMLQEKEREASTSAAQHGQVKHPGLEASDDTTTGKTISTGLHMMKKLSTMSLTTFPSSSVRAGNDSSAAKKTT

SEQ ID NO: 15443 - protein, 359 aa, Tomato yellow leaf curl virus (strain Murcia)
MAQPKRFQINAKHYFLSFPKCSLSKEEALEQLLQLQTPTNKKYIKICRELHEDGQPHLHMLIQFEGKFNCKNNRFFDLVSPTRSAHFHPNIQGAKSSSDVKSYIDKDGDVLEWGTFQIDGRSARGGQQTANDAYAKAINAGSKSEALDVIKELAPRDYILHFHNINSNLDRVFQVPPAPYVSPFLSSSFDQVPDELEHWVSENVMDAAARPWRPVSIVIEGDSRTGKTMWARSLGPHNYLCGHLDLSQKVYSNNAWYNVIDDVDPHYLKHFKEFMGSQRDWQSNTKYGKPIQIKGGIPTIFLCNPGPQSSFKEYLDEEKNQTLKNWAIKNAIFVTIHQPLFTNTNQDPTPHRQEETSEA

SEQ ID NO: 15444 - protein, 356 aa, Nicotiana tabacum
  unsure (1)..(356): unsure at all Xaa locations
MPPSKKFRIRIQAKNYFLTYRHSSLTKDEALTQLQNISTPVNKLLIRVFRELHEDGEPHLHVLIQFEGKYVCTNNRAFDLSSPTRSAHFHPNIQGAKSSSDVKTYVEKDGDFIDFGVFQIDGRSARGGCQSANDSYAKAINSGSTINXLKILXEXQPIDYIRDLDKLRGNLDRHFAPPRQIFVSKWDPQSFVSQMILSSLGEVFEDPSARPVQNNSSDRPLSLILEGPSRTGKTAWARSLGVHNYISGHLDFNIKSYSNNVSYNVIDDVSPTYLKLKHWKELIGAQHDWQTNCKYGKPVQIKGGVPSILLCNPGEGSSYKDYLEGSENSALKDWTIKNAVFVFITQPMYNPQHQSS

SEQ ID NO: 15445 - protein, 360 aa, Ageratum yellow vein virus
MAPPKRFQINAKNYFLTYPQCSLTKEEALSQLQNLNTPTNKKYIKICRELHEDGSPHLHVLMQFEGKYKCQNNRFFDLVSPSRSAHFHPNIQGAKSSSDVKSYIDKDGDTLEWGEFQIDGRSARGGQQTANDAYAQALNSGSKSEALNVIKELAPKDYVLQFHNLNANLDRIFAPPLEVFVCPFLSSSFDQVPEELEEWVSENVSGAAARPWRPISIVIEGDSRTGKTMWARSLGPHNYLCGHLDLSPKVYSNDAWYNVIDDVDPHYLKHFKEFMGAQRDWQSNTKYGKPIQIKGGIPTIFLCNPGPTSSYKEYLDEEKNSALKEWAIKNAEFVTLERPLYSGTNQSAAQNSEEEASSQA

SEQ ID NO: 15446 - protein, 346 aa, Horseradish curly top virus
MPRQPNSFRIQARNIFLTYPQCTIPKDEMLQLLQNLNWTVVKPTYIRVAAERHADGTPHLHCLIQLSGKSNIKDCRFFDITHPQRSTSFHPNVQSAKDTNAVKNYITKEGDYCESGQYKVSGGTKANKDAVYHNAVNAGGVREALDIIKAGDPKTFVTQHHNVKANLEHIFAKPPEPWNPPYPLSSFTNVPEEMQEWADDYFGRPVADSHKAKSIIIEGNSRTGKTCWARALGTHNYLCGHLDFNMRVYSNEVEYNVIDDVAPTYLKMKHWKELIGAQRDWQSNCKYGKPVQIRGGVPTIILCNPGEGSSFRDFLDKPENDGLRQWTLYNAIFIFLDTPLFDNGIH

SEQ ID NO: 15447 - protein, 361 aa, Chino del tomate virus
MPSVKRFKVSAKNYFLTYPQCSLSKEEALSQLQTLKTPVNKKYIKICRELHENGEPHLHVLIQFEGKYQCTNNRFFDLVSPTRSAHFHPNIQGAKSSSDVKSYIDKDGDTVEWGEFQIDGRSARGGQQSANDSYAKALNAGSVQSAMAVLKEEQPKDFVLHNHNIRSNLERIFAKAPERWVPPFQLSSFTNVPDEMQEWADDYFGRGSAARPERPISIIVEGDSRTGKTMWARALGPHNYLSGHLDFNPKVYSNEVEYNVIDDVAPHYLKLKHWKELLGAQKDWQSNCKYGKPVQIKGGIPAIVLCNPGEGASYKDFLNKEENASLRNWTIKNAIFITLTSALYQDSAQASQEKGHQEEAD

SEQ ID NO: 15448 - protein, 349 aa, Tomato pseudo-curly top virus
MPSNPKRFQIAAKNYFLTYPNCSLSKEEALDQLQRLQTPTNKKYIKVARELHENGEPHLHVLIQFEGKFNCKNQRFFDLVSPTRSTHFHPNIQGAKSSSDVNSYVDKDGDTIEWGEFQIDARSARGGQQTANDECAEALNRSSKEEALQIIKEKLPKDFLFCYHNLVSNLDRIFTPAPTPFVPPFQLSSFTNVPEDMQEWADDYFGVSAAARPMRYKSIIIEGESRTGKTMWARSLGPHNYLSGHLDFNSRVYSNSALYNVIDDVTPHYLKLKHWKELIGAQRDWQSNCKYGKPVQIKGGIPSIVLCNPGGDTSFQDFLDKEENEALKDWTLYNAVFIKLTEPLYDGTV

SEQ ID NO: 15449 - protein, 361 aa, sida golden mosaic virus
MPPPKKFRVQSKNYLVTYPQCSLTKEEALSQLQSLNTTVNKKFIKICRELHENGEPHLHVLLQFEGKYQCTNNRFFDLVSPTRSAHFHPNIQGAKSSSDVKSYIDKDGDTVEWGEFQIDGRSARGGQQTANDSYAKALNADSVQSALAVLREEQPKDFVLQNHNIRSNLERIFAKAPEPWVPPFQLSSFTNVPDEMQEWADEFFGSGSAARPDRPLSLIVEGDSRTGKTMWARALGPHNYLSGHLDFNGRVYSNEVEYNVIDDVAPQYLKLKHWKELLGAQKDWQSNCKYGKPVQIKGGIPAIVLCNPGEGASYKEFLDKEENTGLRNWTIKNAIFITLTAPLYQASTQAGQEEGHTEAEN

SEQ ID NO: 15450 - protein, 185 aa, sida golden mosaic virus
SISKEEALSQLQTLKTPVNKKFIKICRELHDNGEPHLHVLIQFEGKYNCTNNRFFDLVSPTRSVHFHPNIQGAKSSSDVKSYVEKDGDTIEWGVFQIDGRSARGGQQTANDAAAEALNSGTKEDALKIIREKLPERYLFQYHNLSSNIDRIFSKPPEPWSHPFPLPSFTAVPGQMQEWADGYFGR

SEQ ID NO: 15451 - protein, 349 aa, cabbage leaf curl virus
MPRNPKSFRLAARNIFLTYPQCDIPKDEALQMLQTLSWSVVKPTYIRVAREEHSDGFPHLHCLIQLSGKSNIKDARFFDITHPRRSANFHPNIQAAKDTNAVKNYITKDGDYCESGQYKVSGGTKANKDDVYHNAVNAGCVEEALAIIRAGDPKTFIVSYHNVRANIERLFTKAPEPWAPPFQLSSFTNVPDEMSSWADDYFGRSAAARAERPISIIVEGDSRTGKTMWARALGPHNYLSGHLDFNSKVFSNNAEYNVIDDIAPHYLKLKHWKELIGAQRDWQSNCKYGKPVQIKGGIPSIVLCNPGEGSSYISFLNKEENASLRAWTTKNAKFITLEAPLYQSTAQDC

SEQ ID NO: 15452 - protein, 233 aa, Macroptilium golden mosaic virus
MPRKGSFSIKAKNYFLTYPQCSLTKEEALSQLTNLNTPVNKKFIKICREFHEDGQPHLHVLIQFQGKFNCTNNRLFDLVSPSRSAHFHPNIQGAKSSSDVKSYVEKDGDTIEWGVFQIDGRSARGGQQTSNDAAAEALNSGTKEAAMRIVKEKLPEKFLFQYHNLSSNLDRIFMKDPEPWAPPFPLSSFTNVPDEMQEWADDYFGRGSAARPERPMSIIVEGDSRTGKTMWAC

SEQ ID NO: 15453 - protein, 148 aa, Macroptilium golden mosaic virus
MPSVKRLKINAKNHFLTYPDCSLTKEEALSQLQNLSTPVSKKYIKICREFHQNGKPHLHVLMQFEGKYACTNNRFFDLVPSTRSTHFHPNIQGAKSSSDVKSYINKDGDTLEWGEFQIDGRSARGGCQSANDTYAKAFNASSAARGIH

SEQ ID NO: 15454 - protein, 362 aa, cotton leaf curl virus
MAPPHRFQIYAKNYFLTFPKCSLTKEEALEQLQQISTASNKKYIKICRELHEDGQPHLHVLLQFEGKFKCQNQRLFDLVSPNRSTHFHPNIQGAKSSSDVKSYIDKDGDTLEWGEFQIDGRSARGGQQTANDAYAAALNAGSKAEALRVIRELAPKDFVLQFHNLNSNLERIFQEPPAPYVSPFLSSSFDQVPEELEEWAVENVVEAAARPSRPISIVIEGESRTGKTVWARSLGPHNYLCGHLDLSPKVFSNDAWYNVIDDVDPHYLKHFKEFMGAQKDWQSNTKYGKPVQIKGGIPTIFLCNPGPNSSYKEYLDEEKNAHLKSWALKNATFITLSNPLYSGTNQSSASGGEEESNQETED

SEQ ID NO: 15455 - protein, 306 aa, cotton leaf curl virus
KCSLTKEEALSQIKNFQTPTSKKYIKICRELHENGEPHLHVLIQFEGKYKCQNQRFFDLVSPSRSAHFHPNIQGAKSSSDVKSYIDKDGDTLEWGEFQIDGRSARGGQQTANDAYAAALNAGSKSEALRVIKELAPKDYVLQFHNLNANLDRIFTPPVEVYVSPFSSSSFDQVPEELEEWAAENVVDAAARPHRPQSIVIEGDSRTGKTMWARSLGPHNYLCGHLDLSPKVYSNEAWYNVIDDVDPHFLKHFKEFMGAQRDWQSNTKYGKPVQIKGGIPTIFLCNPGPNSSYKEFLDEDKNSALKN

SEQ ID NO: 15456 - protein, 307 aa, cotton leaf curl virus
PKCSLTKEETLSQLQNLHTPVNKKYIKICRELHQNGEPHLHVLIQFEGKYQCTNNRFFDLVSPTRSAHFHPNIQGAKSSSDVKAYIDKDGDTLEWGEFQIDGRSARGGQQTANDAYAAALNAGSKSEALRVIKELAPKDFVLQFHNLNANLDRIFQEPPAPYISPFSRSSFDQVPEELEVWAIDNVVDPAARPLRPRSIVIEGDSRTGKTMWARSLGPHNYLCGHLDLSPKVYSNDAWYNVIDDVDPHFLKHFKEFMGAQRDWQSNTKYGKPVQIKGGIPTIFLCNPGPNSSYKEFLDEEKNTALKN

SEQ ID NO: 15457 - protein, 109 aa, cotton leaf curl virus
MPPKRNGIYSKNYFITYPKCSLTKEEALSQLLNIQTPTSKKYIRICRELHEDGTPHLHVLIQFEGKFKCQNMRFFDLVSPSRSAHFHPNIQGAKSSSDVKSYIEKDGDI

SEQ ID NO: 15458 - protein, 116 aa, cotton leaf curl virus
MPRDLKTNAKNYFLTYPKCSLTKEETLSQLLNLHTPVNKKYIKICRELHQNGEPHLHVLIQFEGKYQCTNKRFFDLVSPTRSAHFHPNIQGAKSSSDVKAYIDKDGDTLEWGEFQI

SEQ ID NO: 15459 - protein, 129 aa, cotton leaf curl virus
MPRDLKTNAKNYFLTYPKCSLTKEETLSQLLNLHTPVNKKYIKICRELHQNGEPHLHVLIQFEGKYQCTNKRFFDLVSPTRSAHFHPNIQGAKSSSDVKAYIDKDGDTLEWGQFQIDGRSARGGQQTAN

SEQ ID NO: 15460 - protein, 306 aa, cotton leaf curl virus
KCSLTKEEALSQLQTLETPTAKKFIKICRELHEDGSPHIHVLIQFEGKFQCKNNRFFDLVSPSRSAHFHPNIQGAKSASDVKKYIDKDGDVLEWGVFQIDGRSARGGQQTANDAYAQAINTGSKEDALKVLKELAPKDYVLQFHNLNTNLDRIFQPPSEVYVSPFSISSFDKVPPELVDWVQSNVVCAAARPFRPISIVIEGDSRTGKTMWTRCLGPHNYLCGHLDLSPKVYSNDAWYNVIDDVDPHYLKHFKEFMGAQRDWQSNTKYGKPVMIKGGIPTIFLCNKGPNSSYKEYLDEEKNAALKQ

SEQ ID NO: 15461 - protein, 306 aa, cotton leaf curl virus
KCSLTKEEALSQFQNLQTPVNKRYIKICREFHENGEPHLHVLIQFEGKYKCQNNRFFDLVSPTRSAHFHPNIQGAKSSSDVKSYLEKDGDTLDWGEFQIDGRSARGGQQSANDAYAAALNAGSKSEALRVIKELAPKDYVLQFHNLNANLGRIFTPPVEVYVSPFSSSSFDQVPEELEVWAAENVVDAAARPLRPKSIVIEGDSRTGKTMWARSLGPHNYLCGHLDLSPKVYCNEAWYNVIDDVDPHYLKHFKEFMGAQRDWQSNTKYGKPVQIKGGIPTIFLCNPGPNSSYKEFLDEEKNSALKN

SEQ ID NO: 15462 - protein, 132 aa, cotton leaf curl virus
MPRDLKTNAKNYFLTYPKCSLTKEETLSQLLNLHTPVNKKYIKICRELHQNGEPHLHVLIQFEGKYQCTNKRFFDLVSPTRTAHFHPNIQGAKSSSDVKAYIDKDGDTLGWGEFQIDGRSARGGRQTANDAY

SEQ ID NO: 15463 - protein, 306 aa, cotton leaf curl virus
KCSLTKEEALSQLQTLETPTAKKFIKICRELHEDGSPHIHVLIQFEGKFQCKNNRFFDLVSPSRSAHFHPNIQGAKSASDVKAYIDKDGDVLEWGVFQIDGRSARGGQQTANDAYAKAINTGNKEDALKVLKELAPKDYVLQFHNLISNLDRIFQPRSEVYVSPFSISSFDRVPPELVDWASVNVVCAAARPFRPISIVIEGDSRTGKTMWARCLGPHNYLCGHLDLSPKVYSNDAWYNVIDDVDPHYLKHFKEFMGAQRDWQSNTKYGKPVMIRGGIPTIFLCNKGPNSSYKEYLDEEKNAALKQ

SEQ ID NO: 15464 - protein, 306 aa, cotton leaf curl virus
TLLPNERGSTFPIKKPRNPNNKLFIRICRELHEDGSPHLHVLIQFEGKFQCKNQRFFDLTSPTRSAHFHPNIQGAKSSTDVKTYMEKDGDVLDHGVFQIDGRSARGGCQSANDAYAEAINSGSKHEALNILKEKAPKDYVLQFHNLNSNLDRIFTPPMEVYVSPFLSSSFDQVPEELEEWAAENVMDAAARPLRPMSIVIEGDSRTGKTMWARSLGPHNYLCGHLDLSPKVYNNDAWYNVIDDVDPHYLKHFKEFMGAQKDWQSNTKYGKPVQIKGGIPTIFLCNPGPNSSYKEFLDEEKNAALKS

SEQ ID NO: 15465 - protein, 306 aa, cotton leaf curl virus
KCSLSKEEALSQLQNLSTPTNKKFIRVSRELHENGEPHLHVLIQFEGKFKCQNNRFFDLVSPTRSAHFHPNIQGAKSSSDVKAYVEKDGDFIDFGVFQIDGRSARGGQQSANDAYAEAINSGSKAAALNILREKAPKDFVLQFHNLNSNLDRIFEPPREFYVSPFSSSSFDRVTEELEVWAAENVVGAAARPLRPVSIVIEGDSRTGKTMWARSLGPHNYLCGHLDLSPKIYSNDAWYNIIDDVDPHYLKHFKEFMGAQRDWQSNTKYGKPVQIKGGIPTIFLCNPGPNSSYKEFLDEEKNFALKN

SEQ ID NO: 15466 - protein, 85 aa, cotton leaf curl virus
MAPPRRFRIDAKNYFLTYPKCSLTKEEALSQLQTLETPTAKKFIKICRELHEDGSPHIHVLIQFEGKFQCKNNSSSTCFPKSVST

SEQ ID NO: 15467 - protein, 86 aa, cotton leaf curl virus
MAPPRRFRIDAKNYFLTYPKCSLTKEEALSQLQTLETPTAKKFIKICRELHEDGSPHIHVLIQFEGKFQCKNNRFFDLVSPSRSAH

SEQ ID NO: 15468 - protein, 86 aa, cotton leaf curl virus
MAPPRRFRIDAKNYFLTYPKCSLTKEEALSQLQTLETPTAKKFIKICRELHEDGSPHIHVLIQFEGKFQCKNNRFFDLVSPSRSVH

SEQ ID NO: 15469 - protein, 86 aa, cotton leaf curl virus
MAPPTRFRINAKNYFLTYPKCSLTKEEALSQLQNLETPTSKKFIKICRELHEDGSPHIHVLIQFEGKFQCKNNRFFDLVAPSRAAH

SEQ ID NO: 15470 - protein, 86 aa, cotton leaf curl virus
MAPPKQFQIYAKNYFLTYPKCSLTKEEALSQLQNLQTPVNKKYIKICRELHENGEPHLHVLIQFEGKYKCKNNRFFDLVSPTRSAH

SEQ ID NO: 15471 - protein, 85 aa, cotton leaf curl virus
MAPPKRFKVQAKNYFITYPQCSLTKEEALSQIQAINTPSNKKYIKICRELHEDGSPHLHVFIQFEGKFVCTNNSSSTWYPQPDQH

SEQ ID NO: 15472 - protein, 86 aa, cotton leaf curl virus
MAAPNRFKINAKNYFLTYPKCPLTKEEALSQILNLQTPTSKKFIRICRELHEDGTPHLHVLIQFEGKFQCRNNRFFDLSSPTRSAH

SEQ ID NO: 15473 - protein, 361 aa, papaya leaf curl virus
MPRLNSFCVNAKNIFLTYPKCPIPKEQMLEILQSINCPSDKLFIRVAQEKHQDGSLHIHALIQFKGKSKFRNTRHFDVTHPNNSTQFNPNFQGAKSSSDVKSYIEEDSDYIDWGQFQIDGRYGRGGQQTANDAAAEALNAGSADAALAINREKLPKDFIFQYHNLKCNLDRIFTPPVEVYVSPFLSSSFNQVPEELEEWAVENVMGAAARTLRPMSIVIEGDSRTGKTMWARSLGPHNYLCGHLDLSPKVYNNDAWYNVIDDVDPHYLKHFKEFMGAQRDWQSNTKYGKPVQIKGGIPTIFLCNPGPNSSYKEFLDEEKNNALKNWALKNAIFVTLEGPLYSGSNQSAAQASQEEEQTSSC

SEQ ID NO: 15474 - protein, 231 aa, African tomato leaf curl geminivirus
MPPPKRFQINSKNYFLTYPKCSLNKEEALSQLINTDTPTNKKYIKICRELHEDGEPHLHVLIQFEGKFNCKNNRFFDLVSPTRSTHFHPNIQGAKSSSDVKSYIDKDGDTLEWGEFQIDGRSARGGCHNANDACAEALNAGSAEAALAIIREKLPKDFIFQYHNLKCNLDRIFTPPLEDYVSPFLCSSFDQVPEELEEWAAQNVLTTAARPLRPMSIVIEGDSRTGKTMWA

SEQ ID NO: 15475 - protein, 149 aa, tomato yellow vein streak geminivirus
MPPPKRFSVNAKNFFLTYPHCSLTKDEALSQLQALQTPTNKKFIRVTRELHEDGEPHLHVLIQFEGKFICHNQRFFDLVSPTRSAHFHPNIQGAKSSSDSRPTWRKTETSLILELSKSMEDQLEEVANLQTTLMPRFSTQIIHPRHSIY

SEQ ID NO: 15476 - protein, 292 aa, bean yellow dwarf virus
MPSASKNFRLQSKYVFLTYPKCSSQRDDLFQFLWEKLTPFLIFFLGVASELHQDGTTHYHALIQLDKKPCIRDPSFFDFEGNHPNIQPARNSKQVLDYISKDGDIKTRGDFRDHKVSPRKSDARWRTIIQTATSKEEYLDMIKEEFPHEWATKLQWLEYSANKLFPPQPEQYVSPFTESDLRCHEDLHNWRETHLYHVSIDAYTFIHPVSYDQAQSDLEWMADLTRMREGLGSDTPASTSADQLVPERPPGLEVSGDTTTGTGPSTSPTTMNTPPIISSTTSPSSSSHCGSN

SEQ ID NO: 15477 - protein, 334 aa, bean yellow dwarf virus
MPSASKNFRLQSKYVFLTYPKCSSQRDDLFQFLWEKLTPFLIFFLGVASELHQDGTTHYHALIQLDKKPCIRDPSFFDFEGNHPNIQPARNSKQVLDYISKDGDIKTRGDFRDHKVSPRKSDARWRTIIQTATSKEEYLDMIKEEFPHEWATKLQWLEYSANKLFPPQPEQYVSPFTESDLRCHEDLHNWRETHLYHDEGRTGVRHPSLYICGPTRTGKTTWARSLGRHNYWNGTIDFTNYDEHATYNIIDDIPFKFVPLWKQLIGCQSDFTVNPKYGKKKKIKGGIPSIILWNPDEDWMLSMTSQQKDYFEDNCVTHYMCDGETFFARESSSH

SEQ ID NO: 15478 - protein, 226 aa, Leonurus mosaic virus
MPSKPRRFRVQAKNIFLTYPQCTLTKEEALSQLQAIQLPSNKKFIKICRELHDDGQPHLHVLLQLEGKVQITNNRLFDLVSTTRSAHFHPNIQGAKSSSDVKSYIDKDGDTVEWGEFQVDGRSSRGGQQTVNDAAAEALNAPDKRTALQIIKEKLPEKYLFQFHNLNSNLDRIFAKAPEPWVPPFPLSSFTNVPDEMQEWADEYFGRSSAARPLRPMSLIVEGGSR

SEQ ID NO: 15479 - protein, 359 aa, East African cassava mosaic virus
MTPPKRFKIQAKNYFLTYPKCSLSKHDALSQILNIPTPTNKKYIKVCRELHDDGQPHLHMLIQFEGKFSCTNKRFFDLVSPTRSTHFHPNIQGAKSSSDVKSYIDKDGDTTEWGEFQIDARSARGGCHNANDACAEALNSGSKAAALLIIKEKLPKEFIFQYHNLSSNLDKIFQEPPAPYVSPFLSYSFTNVPEELEVWVSENVMGSAARPWRPNSIVIEGDSRTGKTMWARSLGPHNYLCGHLDLSPKVYSNDAWYNVIDDVDPHYLKHFKEFMGAQRDWQSNTKYGKPIQIKGGIPTIFLCNPGPTSSYKEFLDEEKNQSLKAWALKNATFVTINEPLFSSAHQSPTPHSEDQGHQT

SEQ ID NO: 15480 - protein, 359 aa, East African cassava mosaic virus
MPRAGRFQINAKNYFITYPRCSLTKEEALSQLQALSYPTIIKFIRVCRELHQDGVPHLHVLIQFEGKFQCTNPRFFDLISPSRSTHFHPNIQGAKSSSDVKAYIEKGGEFLDAGLFQVDARSARGEGQHLAQVYADALNASSKSEALQIIKEKDPKSFFLQFHNISANADRIFQAPPQTYVSPFLSSSFTQVPEDIEVWVSENICSPAARPWRPISIVLEGDSRTGKTMWARSLGPHNYLCGHLDLSPKVYSNDAWYNVIDDVDPHYLKHFKEFMGAQRDWQSNTKYGKPIQIKGGIPTIFLCNPGPTSSYKEFLDEEKNQSLKAWALKNATFIALHEPLFSSAHQSPTPHSEDQGRQT

SEQ ID NO: 15481 - protein, 354 aa, South African cassava mosaic virus
MPRAGRFSIKAKNYFLTYPKCTLSKEAALDQLRQLQTPTNKLFIKICRELHENGEPHLHALIQFEGKYNCTNQRFFDLISPSRSTHFHPNIQGAKSSSDVKSYLDKDGDTIQWGEFQIDGRSARGGQQSANDAYAKALNAASKTEALNVIRELAPKDFVLQFHNLNSNLDRIFQEPPIPYISPFLSSSFTHVPEELEDWVSENVMGFAARPWRPSSIVIEGDSRTGKTMWARSLGPHNYLCGHLDLSPKVYSNDAWYNVIDDVDPHYLKHFKEFMGAQRDWQSNTKYGKPIQIKGGIPTIFLCNPGPTSSYKEFLDEEKNQSLKAWALKNATFITLHEPLFSSAHQSPTPHRED

SEQ ID NO: 15482 - protein, 203 aa, tobacco leaf curl virus
YFLTYPHCSLTKEEALSQLQNINTPTNKLYIKICRELHEDGSPHLHVLLQFEGKYKCQNNRFFDLVSPTRSAHFHPNIQGAKSSSDVKSYIDKDGDTLEWGTFQIDGRSARGACQNSNDACAESLNASSKAEALAIIREKLPKDFIFQYHNLNSNLDRIFAPPVEVFVCPFTASSFDQVPEELEEWASENVMSSAARPWRPMS

SEQ ID NO: 15483 - protein, 208 aa, tobacco leaf curl virus
INAKNYFLTYPHCSLTKEEALSQLQNINTPTNKLYIKICRELHDDGSPHLHVLLQFEGKYKCQNNRFFDLVSPTRSTHFHPNIQGAKSSSDVKSYIDKDGDTLEWGTFQVDGRSARGGCQNANDACAEALNAASKAEALSIIREKLPKDFIFQYHNLNSNLDRIFAPPLEVFVCPFSNSSFDQVPEEIEEWAAENVKSSAARPWRPMS

SEQ ID NO: 15484 - protein, 208 aa, tobacco leaf curl virus
INAKNYFLTYPHCSLTKEEALSQLQNLNTPTNKLYIKICRELHDDGSPHLHVLLQFEGKYKCQNKRFFDLVSPTRSAHFHPNIQGAKSSSDVKSYIDKDGDTLEWGTFQIDGRSARGGCQNANDACAEALNASSKADALAIIREKLPKDFIFQYHNLNSNLDRIFAPPLEVFVCPFSSSSFDQVPEELEEWAAENVMSSAARPWRPMS

SEQ ID NO: 15485 - protein, 208 aa, tobacco leaf curl virus
INAKNYFLTYPHCSLTKEEALSQLQNINTPSNKLYIKICRELHDDGSPHLHVLLQFQGKYKCQNNRFFDLVSPTRSAHFHPNIQGAKSSSDVKSYIDKDGDTLEWGTFQIDGRSARGGCQNANDACAEALNAATKAEALSIIREKLPKDFIFQYHNLNSNLDRIFSPPLEVFVCPFSSSSFDQVPEELEEWAQENVMSSVARPWRPMS

SEQ ID NO: 15486 - protein, 208 aa, tobacco leaf curl virus
INAKNYFLTYPHCSLTKEEALSQLQNINTPTNKLYIKICRELHDDGSPHLHVLLQFEGKYKCQNNRFFDLVSPTRSAHFHPNIQGAKSSSDVKSYIDKDGDTLEWGTFQIDGRSARGGCQNANDACAEALNASSKADALAIIREKLPKDFIFQYHNLNSNLDRIFAPPLEVFVCPFSSSSFDQVPEELEEWAAENVMSSAARPWRPMS

SEQ ID NO: 15487 - protein, 208 aa, tobacco leaf curl virus
INAKNYFLTYPHCSITKEEALSQLQNLNTPTNKLYIKICRELHDDGSPHLHVLLQFEGKYKCQNNRFFDLVSPTRSTHFHPNIQGAKSSSDVKSYIDKDGDTLEWGTFQIDGRSARGGCQNANDACAEALNAGSKAAALSIIREKLPKDFIFNYHNLNSNLDRIFAPPLEVFVCPFSSSSFDQVPEELEEWAAENVRSSAARPWRPMS

SEQ ID NO: 15488 - protein, 208 aa, tobacco leaf curl virus
  unsure (1)..(208): unsure at all Xaa locations
INSKNYFLTYPHCSLTKEEALSQIQSLQTPTNKLFIRICRELHEDGSPHLHVLIQFEGKYQCTNQRFFDLVSPTRSAHFHPNIQAAKSSSDVKTYMEKDGDVADFGVFQIDGRSARGGCQSANDAYAEAINSGSKSSALNILREKAPKDFVLQFHNLNSNLDRIFSPPLEVFVSPFLSSSFDXVPEELEEWAAENVRDSAARPWRPMS

SEQ ID NO: 15489 - protein, 208 aa, tobacco leaf curl virus
INAKNYFLTYPHCSLTKEEALSQLKNLNTPTNKLYIKICRELHDDGSPHLHVLLQFEGKYKCQNNRFFDLVSPTRSTHFHPNIQGAKSSSDVKSYIDKDGDTLEWGSFQIDGRSARGGCQNANDACAEALNAGSKAAALSIIREKLPKDFIFNYHNLNSNLDRIFAPPLEVFVCPFSSSSFDQVPEELEEWAAENVKPSAARPWRPMS

SEQ ID NO: 15490 - protein, 208 aa, tobacco leaf curl virus
INSKNYFLTYPHCSLTKEEALSQIQSLQTPTNKLFIRICRELHEDGSPHLHVLIQFEGKYQCTNQRFFDLVSPTRSAHFHPNIQAAKSSSDVKTYMEKDGDVADFGVFQIDGRSARGGCQSANDAYAEAINSGSKSSALNILREKAPKDFVLQFHNLNSNLDRIFTPPLEDFVSPFLSSSFDRVPEELEEWAAENVRDSAARPWRPMS

SEQ ID NO: 15491 - protein, 208 aa, tobacco leaf curl virus
INSKNYFLTYPHCSLTKEEALSQIQSLHTPTNKLFIRVCRELHEDGSPHLHVLIQFEGKYQCTNQRFFDLVSPTRSAHFHPNIQAAKSSSDVKTYMEKDGDVIDTGVFQIDGRSARGGCQSANDAYAEAINSGSKSSALNILREKAPKDFVLQFHNLNSNLDRIFTPPLEVFVSPFLSSSFDRVPEELEEWAAENVRDSAARPWRPMS

SEQ ID NO: 15492 - protein, 208 aa, tobacco leaf curl virus
INSKNYFLTYPQCSLTKEEALSQIKNLQTPTNKLFIRICRELHEDGNPHLHILIQFEGKYRCTNQRFFDLVSPTRSAHFHPNIQGAKSSSDVKAYMEKDGDILDFGIFQVDGRSARGGCQSANDAYAEAINSGSKSSALNILREKAPKDYVLQFHNLNSNLDRIFAPPLEVFVCPFTASSFDQVPEELEEWAQENVMSSAARPWRPMS

SEQ ID NO: 15493 - protein, 202 aa, tobacco leaf curl virus
YFLTYPHCSLTKEEALAQIQALETPTNKLFIRICRELHEDGSPHLHVLVQFEGKYQCTNQRFFDLVSPSRSAHFHPNIQGAKSSSDVKTYMEKDGDVVDYGVFQVDGRSARGGCQSANDAYAEAINSGSKSSALSILREKAPKDFVLQFHNLNSNLDRIFAPPLEEFVSPFLSSSFDQVPEQLEEWAAENIRDSAARPWRPM

SEQ ID NO: 15494 - protein, 208 aa, tobacco leaf curl virus
INAKNYFLTYPHCSLTKEEALSQIKQLQTPTNKLFIRICRELHEDGSPHLHVLIQFEGKYTCRNQRFFDLVSPNRSAHFHPNIQAAKSSSDVKTYMEKDGDILDSGVFQVDGRSARGGCQNANDAYAEAINSGSKSSALNILREKAPKDYVLQFHNLNTNLDRIFAPPLEVFVCPFSNSSFDQVPEEIEEWAAENVKSSAARPWRPMS

SEQ ID NO: 15495 - protein, 208 aa, tobacco leaf curl virus
INSKNYFLTYPHRSLTKEEAFSQLQSLQTPTNKLFIRICRELHEDGSPHLHVLIQFEGKYQCTNQRFFDLVSPTRSAHFHPNIQAAKSSSDVKTYMEKDGDVVDFGVFQIDGRSARGGCQSANDAYAEAINSGSKSSALNILREKAPKDFVLQFHNLNSNLDRIFTPPLEAFVSPFLSSSFDRVPEELEEWAAENVRDSAARPWRPMS

SEQ ID NO: 15496 - protein, 208 aa, tobacco leaf curl virus
INSKNYFLTYPRCSLTIEEALSQLRNIQTPVNKKFIRVCQEQHEDGSPHLHSLLQFEGKFQCTNPRFFDLVSPNRSTHFHCNIQGAKSSSDVKSYIEKDGQFSDWGEFQIDGRSARGGQQSANDAYAQAINTGSKSEALRVIKELAPKDYVLQFHNLNSNLDRIFAPPLEVFVCPFSSSSFDQVPEELEEWAAENVKSSAARPWRPMS

SEQ ID NO: 15497 - protein, 207 aa, tobacco leaf curl virus
NAKNYFLTYPHCSLTKEEALSQIKQLQTPTNKLFIRICRELHEDGSPHLHVLIQFEGKYTCRNQRFFDLVSPNRSAHFHPNIQAAKSSSDVKTYMEKDGDILDSGVFQVDGRSARGGCQNANDAYAEAINSGSKSSALNILREKAPKDYVLQFHNLNTNLDRIFAPPLEVFVCPFTASSFDQVPEELEEWAAENVKPSAARPWRPMS

SEQ ID NO: 15498 - protein, 207 aa, tobacco leaf curl virus
NARNYFLTYPQCSLTKEEALSQIKNLETPTNKLFIRICRELHEDGNPHLHILIQFEGKYKCTNQRFFDLVSPTRSAHFHPNIQGAKSSTDVKAYMEKDGDILDFGVFQVDGRSARGGCQSANDAYAEAINSGSKSSALNILREKAPKDFVLQFHNLNSNLDRIFAPPLEAFVCPFTASSFDQVPEELEEWAVENVMSSAARPWRPMS

SEQ ID NO: 15499 - protein, 204 aa, tobacco leaf curl virus
KNYFLTYPHCSLTKEEALSQIKQLQTNTNKKFIRICRELHEDGSPHLHVLIQFEGKYHCRNQRFFDLISPSRSAHFHPNIQAAKSSSDVKTYMEKDGKILDFGVFQVDGRSARGGCQSANDAYAEAINSGSKSSALNILREKAPKDFVLQFHNLNSNLDRIFAPPLEDFVCPFTASSFDQVPEELEEWAAENVMSSAARPWRPM

SEQ ID NO: 15500 - protein, 208 aa, tobacco leaf curl virus
INAKNYFLTYPHCSLTKEEALSQIKQLQTNINKKFIRICRELHEDGSPHLHVLIQFEGKYHCRNQRFFDLVSPNRSTHFHPNIQAAKSSSDVKTYMEKDGEILDFGVFQVDGRSARGGCQSANDAYAEAINSGSKSSALNILREKAPKDFVLQFHNLNSNLDRIFAPPLEVFVCPFTASSFDQVPEELEEWAVENVMSSAARPWRPMS

SEQ ID NO: 15501 - protein, 206 aa, tobacco leaf curl virus
NSKNYFLTYPHWSLTKEEALAQIPNLETPTNKLFIRICRELHEDGSPHLHILIQFEGKFKCTNQRFFDIVSPSRSAHFHPNIQAAKSSSDVKAYMEKDGDILDFGIFQVDGRSARGGCQSANDAYAEAINSGSKSSALNILREKAPKDFVLQFHNLNSNLDRIFAPPLEAFVCPFSSSSFDQVPEELEEWAAENVKSSAARPWRPM

SEQ ID NO: 15502 - protein, 208 aa, tobacco leaf curl virus
INRKNYFLTYPHCSLTIEEALSQLKNIQSPVNKKFIRVCQEQHEDGTPHLHSLVQFEGKFQCTNPRFFDLVSPNRSTHFHCNIQGAKSSSDVKSYIEKDGQFSDWGEFQVDGRSARGGQQSANDAYAQAINTGSKSEALRVIRELAPKDYVLQFHNLNSNLDRIFAPPLEAFVCPFTSSSFDQVPEELEEWAAENVKSSAARPWRPMS

SEQ ID NO: 15503 - protein, 190 aa, tobacco leaf curl virus
EEALSQLQNINTPTNKLYIKICRELHEDGSPHLHVLLQFEGKYKCQNNRFFDLVSPTRSAHFHPNIQGAKSSSDVKSYIDKDGDTLEWGTFQIDGRSARGGCQNANDACAEALNASSKAEALAIIREKLPKDFIFQYHNLNSNLDRIFAPPLEVFVCPFTASSFDQVPEELEEWASENVMSSAARPWRPM

SEQ ID NO: 15504 - protein, 190 aa, tobacco leaf curl virus
EEALSQLQNINTPTNKLYIKICRELHDDGSPHLHVLLQFEGKYKCQNNRFFDLVSPTRSAHFHPNIQGAKSSSDVKSYIDKDGDTLEWGTFQIDGRSARGGCQNANDACAEALNASSKAEALAIIREKLPKDFIFQYHNLNSNLDRIFAPPLEVFVCPFTASSFDQVPEELEEWASENVMSSPARPWRPM

SEQ ID NO: 15505 - protein, 190 aa, tobacco leaf curl virus
EEALSQLQNINTPTNKLYIKICRELHDDGSPHLHVLLQFEGKYKCQNNRFFDLVSPTRSTHFHPNIQGAKSSSDVKSYIDKDGDTLEWGTFQVDGRSARGGCQNANDACAEALNAASKAEALSIIREKLPKDFIFQYHNLNSNLDRIFAPPLEVFVCPFSNSSFDQVPEEIEEWAAENVKSSAARPWRPM

SEQ ID NO: 15506 - protein, 190 aa, tobacco leaf curl virus
EEALSQLQNINTPTNKLYIKICRELLDDGSPHLHVLLQFEGKYKWPNNRFFDLVSPTRSTHFHPNIQGAKSSSDVKSYIDKDGDTLEWGTFQVDGRSARGGCPNSHDACAEALDAASKAEALSIFREKLPKDFIFQYHNLNSNLDRIFAPPVEVLVSPFSISSIDQVPEEIEEWAAENVKSSAARPWRPM

SEQ ID NO: 15507 - protein, 190 aa, tobacco leaf curl virus
EGALSQLQNINTPTNKLYIKICRELHDDGSPHLHVLLQFEGKYKCQNNRFFDLVSPTRSAHFHPNIQGAKSSSDVKSYIDKDGDTLERGTFQIDGRSARGGCQNANDACAEALNASSKAEALAIIREKLPKDFIFQYHNLNSNLDRIFAPPLEVFVCPFTASSFDQVPEELEEWAAENVMSSAARPWRPM

SEQ ID NO: 15508 - protein, 190 aa, tobacco leaf curl virus
EEALAQIPNLETPTNKLFIRICRELHEDGSPHLHILIQFEGKFKCTNQRFFDIVSPSRSAHFHPNIQAAKSSSDVKAYMEKDGDILDFGIFQVDGRSARGGCQSANDAYAEAINSGSKSSALNILREKAPKDFVLQFHNLNSNLDRIFAPPLEVFVCPFSSSSFDQVPEELEEWAAENVKSSAARPWRPM

SEQ ID NO: 15509 - protein, 190 aa, tobacco leaf curl virus
EEALSQFKQLQTNTNKKFIRICRELHEDGSPHLHVLIQFEGKYHCRNQRFFDLISPSRSAHFHPNIQAAKSSSDVKTYMEKDGEILDFGVFQVDGRSARGGCQSSHDAYAEAINSGSKSSGLNILREKAPKDFVLLFHNLNSNLDRIFAPPVEDFVCPFTASSFDQVPEELEEWAAENVMSSAARPWRPM

SEQ ID NO: 15510 - protein, 225 aa, Cowpea golden mosaic virus
MPPPKRFKINAKNYFLTYPQCSIGKESAIEQLQTLQTPVNKKYIRVCRELHENGEPHLHALIQFEGKFQCTNCRLFDLKHPHTSSVSHPNIQSAKSSSDVKSYIEKDGDYVEWGHFQIDGRSARGGQQTINDAASEALNASSKEEAMQIIKEKLPEKFLFQYHNLSSNLDRIFKKPPEPWSPPFQLSSFTNVPKQMQDWADDYFGRDAAARPERPVSIIIEGDSR

SEQ ID NO: 15511 - protein, 207 aa, tomato dwarf leaf curl geminivirus
MPRKGYFSVKAKNYFLTYPQCSITKEEALSQLQNLNTPVNKKFIKICRELHENGVPHLHVLIQFEGKYNCTNKRFFDLGSPSRSAHFHPNIQGAKSSSDVKSYIDKDGDVLEWGEFQIDGRSARGGCQSANDTYARALNASCAEEALQIIKEQQPQHFFLQHHNLVANAHRIFHKPPEPWVPPFSLSSFTNVPEEMQQWADDYFEGL

SEQ ID NO: 15512 - protein, 226 aa, Havana tomato virus
MPPPKKFRVNSKNYFLTYPQCSITKEEALSQIKNLNTPVNKKFIKICRELHENGEPHLHVLLQFEAKYQCTTTRFFDLGSPSRSAHFHPNIQGAKSSSDVKTYIDKDGDVLEWGEFQIDGRSARGGCQSANDTYAKALNASCAEEALQIIKEQQPQHFFLHHHNLVANAHRIFQKPPEPWVPPFRLSSFTKVPEEMQQWADDYFGRGSAARPDRPISIIVEGDSRA

SEQ ID NO: 15513 - protein, 225 aa, Sinaloa tomato leaf curl virus
MPSVKRFKVSAKNYFLTYPQCSLRKEEALSQLQNLTIPVNKKFIKICRELHENGEPHLHVLIQFEGKYQCTNNRFFDLVSPTRSAHFHPNIQGAKSSSDVKSYIDKDGDTIEWGQFQIDGRSARGGKQSTNDTYAKALNAACADEAMRIIREEQPQHFFLQHHNLVANAAKIFKKAPERWVPPFQLSSFTNVPNEMQEWADDYFGKDSAARPERPISIIIEGDSR

SEQ ID NO: 15514 - protein, 276 aa, Sugarcane streak Egypt virus
MTTVGSTDSGSAVRSFKHRNVNTFLTYPKCHLEPEAVGLHLWSLIGHWNPAYIVVSREAHADGSWHIHALAQSVKPVQTTNPRFFDIEDFHPNIQSAKSADRVKEYVLKNPIKQWEKGTFIPRKKSFATTSSEDRQPKPTKDDIVRDIIEHSTSKQEYLSMLQKALPYEWATKLQYFEYSASRLFPETAEVYTNPHPPTEPDLINFETIEDWLNPNIYQVSPEAYMLLTPTCLTLEDAISDLEWMQSASRTSQGTGNNLSTSLGQQEQGNQHGQEA

SEQ ID NO: 15515 - protein, 276 aa, Sugarcane streak Egypt virus
MTTVGSTESGSASRSFKHRNVNTFLTYSKCHLEPEAVGLHLWSLIGHWNPAYIVVSREAHADGSWHIHALAQSVKPVQTTNPRFFDIEDFHPNIQSAKSADRVKEYVLKNPIKQWEKGTFIPRKKSFATTSSEDRQPKPTKDDIVRDIIEHSTSKQEYLSMLQKALPYEWATKLQYFEYSASRLFPETAEVYTNPHPPTEPDLVNFETIEDWLNPNIYQVSPEAYMLLTPTCLTLEEAISDLEWMQSASRTSQGTGNSLCTSLGQQEQGNQPGPEA

SEQ ID NO: 15516 - protein, 276 aa, Sugarcane streak Egypt virus
MTTVGSAESGSAIRSFKHRNVNTFLTYPKCHLEPEAVGLHLWSLIGHWNPAYIVVSREAHADGSWHIHALAQSVKPVQTTNPRFFDIEDFHPNIQSAKSADRVKEYVLKNPIKQWEKGTFIPRKKSFATTSSEDRQPKPTKDDIVRDIIEHSTSKQEYLSMIQKALPYEWATKLQYFEYSASRLFPETAEVYTNPHPPTEPDLINFETIEDWLNPNIYQVSPEAYMLLTPTCLTLEEAISDLEWMQSASRTSQGTGNSLCTSLGQQEQGNQHGPEA

SEQ ID NO: 15517 - protein, 276 aa, Sugarcane streak Egypt virus
MTTVGSTESGSASRSFKHRNVNTFLTYSKCHLDPEAVGLHLWSLIGHWNPAYIVVSREAHADGSWHIHALAQSVKPVQTTNPRFFDIEDFHPNIQSAKSADRVKEYVLKNPIKQWEKGTFIPRKKSFATTSSEDRQPKPTKDDIVRDIIEHSTSKQEYLSMLQKALPYEWATKLQYFEYSASRLFPETAEVYTNPHPPTEPDLVNFETIEDWLNPNIYQVSPEAYMLLTPTCLTLEEAISDLEWMQSASRTSQGTGNSLCTSWGQQEQGNQPGPEA

SEQ ID NO: 15518 - protein, 275 aa, Sugarcane streak Egypt virus
MTTVGSTESGSAIRSFKHRNVNTFLTYSKCHLEPEAVGLHLWSLIGHWNPAYIVVSREAHADGSWHIHALAQSVKPVQTTNPRFFDIEDFHPNIQSAKSADRVKEYVLKNPIKHWEKGTFIPRKKSFATTSSEDRQPKPTKDDIVRDIIEHSTSKQEYLSMIQKALPYEWATKLQYFEYSASRLFPETAEVYTNPHPATEPDLINFETIEDWLPNIYQVSPEAYMLLTPTCLTLEEAISDLEWMQSASRTSQGTGNSLSTSLGQQEQGNQPGPEA

SEQ ID NO: 15519 - protein, 236 aa, Jatropha mosaic geminivirus
MPSVRRFRVSAKNYFLTYPQCSLPKQEALSQLKNLETPVNKKFIKICRELHENGQPHLHVLIQFEGKYQCTNNRFFDLVSPTRSAHFHPNIQGAKSSSDVKSYIDKDGDTLEWGEFQIDGRSARGGCQSANDSYAKALNADSVQSAMAVLREEQPKDFVLQNHNIRSNLERIFAKAPEPWVPPFPLSSFTNVPDEMQEWADDYFGRGSAARPERPISVIVEGDSRTGKTMWACRCN

SEQ ID NO: 15520 - protein, 354 aa, cotton leaf crumple geminivirus
MPRNPDSFRLQARHIFLTYPKCDIPKNEALQMLQTLSWSVVKPTYIRVAREEHSDGFPHLHCLIQLSGKSNIKNERFFDLTHPRRSTNFHPNIQAAKDANAVKNYITKDGDCCESGQFTVPGGTKNNKDDVYYNAINAPSLAEALAIIRAGDPRAFIVSYHNIKANLERLFKKAPEQWVPPFPLSSFTNVPEQMQEWADDYFGMGPAARPVRPVSLIVEGDSRTGKTMWARALGPHNYLSGHLDFNNRVYSNNVAYNVIDDVAPQYLKLKHWKELLGAQQDWQSNCKYGKPVQIKGGIPSIVLCNPGEGSSYKDFLDKAENASLKHWTLKNVIFITLDAPLYQEGTQASQEEGD

SEQ ID NO: 15521 - protein, 354 aa, cotton leaf crumple geminivirus
MPRNPDSFRLQARHIFLTYPKCDIPKNEALQMLQTLSWSVVKPTYIRVAREEHSDGFPHLHCLIQLSGKSNIKNKRFFDLTHPRRSTNFHPNIQAAKDANAVKNYITKDGDCCESGQFKVPGGTKKNKDDVYYNAINAPSLAEALAIIRAGDPRAFIVSYHNITANLERLFKKAPEQWVPPFPLSSFTNVPEQMQEWADDYFGMGPAARPVRPVSLIVEGDSRTGKTMWARALGPHNYLSGHLDFNNRVYSNNVAYNVIDDVAPQYLKLKHWKELLGAQKDWQSNCKYGKPVQIKGGIPSIVLCNPGEGSSYKDFLDKAENASLKHWTLKNVIFITLDAPLYQEGTQASQEEGD

SEQ ID NO: 15522 - protein, 223 aa, cotton leaf crumple geminivirus
MPRNPDSFRLQARHIFLTYPKCDIPKNEALQMLQTLSWSVVKPTYIRVAREEHSDGFPHLHCLIQLSGKSNIKNERFFDLTHPRRSTNFHPNIQPAKDANAVKNYITKDGDCCESGQFKVPGGTKKNKDDVYYNAINAPNLAEALAIIRAGDPRAFIVSYHNIQANLERLFKKAPEQWVPPFPLSSFTNVPEQMQEWADDYFGMGPAARPVRPVSLIVEGDSR

SEQ ID NO: 15523 - protein, 359 aa, cotton leaf crumple geminivirus
MPRNPDSFRLQARNIFLTYPKCDIPKNEALQMLQALSWSVVSPTFIRVAREEHSDGSPHLHCLIQLSGKPNIKNERFFDLTHPRRSTNFHPNIHAAKDANAVKNYITKDGDCCESGQFEVPRGTKNNKDDVYYNAINAPSVAEALEIIRAGDPRAFIVSYHNIKANLDRLFKKAPEQWVPPFPLSSFTNVPDEMQEWADGYFGLGPAARPVRPVSLIVEGDSRTGKTMWARALGPHNYLSGHLDFNHRVYSNNVAYNVIDDVSPHYLKLKHWKELLGAQKDWQSNCKYGKPVQIKGGIPSIVLCNPGEGSSYKDFLDKAENASLKNWTIKNVIFITLDAPLYQEGTQASQEEGDQTTTN

SEQ ID NO: 15524 - protein, 312 aa, Sugarcane streak Reunion virus
MPSQEDSTVASRPFKHRNANTFLTYSRCRLDPEAVGLILWQLISHWSPAYILVSREAHADGEWHLHALVQSVRPVQTTNQGFFDIESFHPNIQSAKSANKVREYILKNPIAKWEKGTFIPRKQCFVSSSSESKNSKPSKDDIVRDIIEHSTSKEEYLSMLQKALPYDWATKLQYFEYSASKLFPDTVEEYTSPHPTTTPLLRDPTTIDNWVQPNLFQVSPEAYMLCNPHCLSLEEASSDLEWMSSTSRTIQVQESLASTSSAQQELENLLGPVAWEDIITGKTTSTGPATTRTQSTTSLTTSPSSSVLAGSN

SEQ ID NO: 15525 - protein, 354 aa, pepper leaf curl virus
MAPPKNLRINAKNYFLTYPHCSLTKEEALSQIQAIETPTIKLFIRICRELHEDGTPHLHILIQFEGKFQCKNPRFFDLTSPTRSAHFHPNIQGAKSSTDVKEYIAKNGDVLDHGVFQIDGRSARGGCQSANDAYAEALNSGTKASALAILKEEAPKDYILQFHNLNSNLDKIFSLRIEMYISPFLVSFDQVQRNLNEWVAANVVKPARPLRPISIVVEGDSRTGKTMWARSLGPHNYLCGHLDLSPKVYNNDPWYNVIDDVDPHYLKHFKEFMGAQRDWQSNTKYGKPVQIKGGIPTIFLCNPGPHSSYKEFLEEEKNTALKNWALKNAIFVTIEGPLFSGSHQGATQNRQEDN

SEQ ID NO: 15526 - protein, 361 aa, Tomato yellow leaf curl Thailand virus
MPPSKKFLINAKNYFLTYPHCSLTKEEEALSQILNLSTPTNKLIIRICRELHEDGTPHLHLLIQFEGKFKCQNNRFFDLTSPTRSAHFHPNIQGAKSSTDVKAYMEKDGDVLDHGIFQIDGRSARGGCQSANDAYAEAINSGSKASALNILREKAPKDFVLQFHNLNSNLDRIFTPPIEEYISPFSSSSFNQVPEELEEWACNNVLSRARPLRPITIVIEGDSRTGKTMWARSLGPHNYLCGHLDLSPKVYNNDAWFNVIDDVDPHYLKHFKEFMGAQRDWQSNTKYGKPVQIKGGIPTIFLCNPGPNSSYKEYLEEEKNSALRNWAIKNAIFVTLEGPLYSGTYQGATPNSQEDNQTTES

SEQ ID NO: 15527 - protein, 361 aa, soybean crinkle leaf virus
MAPPKPFKINAKNYFLTYPQCSLTKEEALSQLQNINTPTNKKYIKICRELHEDGSPHLHVLVQFEGKYQCKNNRFFDLVSPTRSAHFHPNIQGAKSSSDVKSYIDKDGDTLEWGEFQIDGRSARGGQQSANDAYAKALNSGSKSEALNVIRELAPKDFVLQFHNLNSNLDRIFTPPLEVMFLLFLLLLLIKFRKNLKFGLLIMYGNAARPWRPNSIVIEGESRTGKTMWARSLGPHNYLCGHLDLSPKVYSNDAWYNVIDDVDPHYLKHFKEFMGAQRDWQSNTKYGKPIQIKGGIPTIFLCNPGPTSSYKEYLDEDKNSALKAWAIKNAEFITLTEPLYSGTNQSATPNSQEEVSPQTES

SEQ ID NO: 15528 - protein, 223 aa, soybean crinkle leaf virus
MAPPKPFKINAKNYFLTYPQCSLTKEEALSQLQNINTPTNKKYIKICRELHEDGSPHLHVLVQFEGKYQCKNNRFFDLVSPTRSAHFHPNIQGAKSSSDVKSYIDKDGDTLEWGEFQIDGRSARGGQQSANDAYAKALNSGSKSEALNVIRELAPKDFVLQFHNLNSNLDRIFTPPLEVMFLLFLLLLLIKFRKNLKFGLLIMYGNAARPWRPNSIVIEGESR

SEQ ID NO: 15529 - protein, 351 aa, tomato yellow mottle virus
MPPLKKFSLWAKNIFLTYPRCSLTKEEALFQLQNISLPSNKLFIRVARELHEDGEPHLHVLIQLEGKAQIYNQKLFDLSSTTRSAYFHPNIQGAKSSSDVKSYMEKDGEFIDFGVFQIDGRSSRGGIQTTNDSYAKALNAGSTESALQIIKEEQPAHYFLHYHNLVNNANRIFQKAPEPWVPPFQLSSFNAVPDEMQEWADDYFGRGAAARPERPISIIVEGDSRTGKTMWARSLGPHNYLSGHLDFNSRVYSNEVEYNVIDDVAPHYLKLKHWKELIGAQKDWQSNCKYGKPVQIKGGIPSIVLCNPRDGGSYKDFLDREENASLKQWTLKNAKFIFLNSPLYQTSSQEC

SEQ ID NO: 15530 - protein, 362 aa, Indian mungbean yellow mosaic virus
MPRDGRFAINAKNYFLTYPKCPLTKEDALEQLLALSTPVNKKFIRICRELHEDGQPHLHVLLQFEGKHQTRNQRFFDLYSRCRSAHYHSIIQAAKSCSDVKTYMEKDGDILDHGTFQIDGRSARGGKQSANDAYAEALNSGSKLEALLILKEKAPKDFILQFHNLNCNLSRIFTEPTQAYESPFTLESFDKVPSYISSWAERNVRDPAVRPDRPISIVIEGDSRTGKTMWARAIGPHNYLCGHLDLNDKTYSNEAWYNVIDDVDPHYLKHFKEFMGAQRDWQSNVKYGKPTKIKGGIPTIFLCNAGPKSSYKEYLDEENNAALKQWASKNAEFYTLKEPLVSSVNQGSTQGRQEESNSTLSN

SEQ ID NO: 15531 - protein, 226 aa, tomato mild mottle geminivirus
MPLLPKKFLINSKNYFLTYPHCSLSKEETLEQLLRLNTPTNKKYIKIARELHEDGEYHLHVLIQFEGKFKTQNCRFFDLVSSTRSTHFHPNVQGAKSSTDVKSYVDKDGDTIEWGEFQIDGRSARGGQQTANDAAAEALNASSKEEAMRIIKEKLPKEFLFQYHNLSSNLDRIFAKAPEPWIPPFPLSSFTNVPDEMQEWTDDYFGRGVAARPERPISIIIEGDSR

SEQ ID NO: 15532 - protein, 223 aa, Tomato severe leaf curl virus
MPRNPNLFRLAAKNIFLTYPQCDIPKDEAIEMLQNLPWSVVKPTYIRVAREEHADGFPHLHCLIQLSGKSNIKDARFFDLTHPRSLPIFIPNAQAAKDTNAVQNYITKEGDYCESGQYKVSGGTKSNRDDVYHNAVNAASAGEALNIIKAGDPKTFIVSYHNVKANIERLFQKAPEPWVPPFPLSSFTNVPDEMQEWADDYFGRDAAARPERPISIIIEGESR

SEQ ID NO: 15533 - protein, 344 aa, Tomato severe leaf curl virus
MPRNPNLFRLAAKNIFLTYPQCDIPKDEAIEMLQNLPWSVVKPTYIRVAREEHADGFPHLHCLIQLSGKSNIKDARFFDLTHPRRSANFHPNAQAAKDTNAVQNYITKEGDYCESGQYKVSGGTKSNKDDVYHNAVNAASAGEALDIIRAGDPKTFIVSYHNVKANIERLFQKAPEPWVPPFPLSSFTNVPDEMQEWADDYFGRDAAARPERPISIIIEGESRTGKTMWARALGPHNYLSGHLDFNSRVYSNEAEYNVIDDITPQYLKMKHWKELIGAQKDWQSNCKYGKPVQIKGGIPSIVLCNPGEGASYKSFLEKEENKALKDWTLHNAKFIFLNSTLYQA

SEQ ID NO: 15534 - protein, 223 aa, Tomato severe leaf curl virus
MPRNPNLFRLAAKNIFLTYPQCDIPKDEAIEMLQNLPWSVVKPTYIRVAREEHADGFPHLHCLIQLSGKSNIKDARFFDLTHPRRSANFHPNAQAAKDTNAVQNYITKEGDYCESGQYKVSGGTKSNRDDVYHNAVNAASAGEALNIIKAGDPKTFIVSYHNVKANIERFFQKAPEPWVPPFPLSSFTNVPDEMQEWADDYFGRDAAARPERPISIIIEGESR

SEQ ID NO: 15535 - protein, 223 aa, pepper golden mosaic geminivirus
MPLPPKSFRLQCKNIFLTYPQWDITKDEALGMFRSLKWSVVKPIYIRVSREEHSDGFPHLHCLIQLTGKCNIKDARFFDITHPRRSAQFHPNVQAAKDANAVKNYITKDGDYCEHGQYKVSGGSKANKDDVYHNAVNAASAVEALDIIKAGDPKTFIVSYHNVKANIERIFRTPPQPWTPPYPLSSFNNVPEDMQHWVADYFGRSSAARPDRPISIVIEGDSR

SEQ ID NO: 15536 - protein, 351 aa, Dicliptera yellow mottle virus
MPRKGVFSIKAKNYFLTYPQCSLSKEEALQQLINLKTPTNKKFIKIARELHEDGQPHLHVLIQFEGKYNCTSNRFFDLVSPTRSAHFHPNIQGAKSSSDVKSYVSKDGDTLEWGQYQVDGRSARGGCQTANDSYARALNASSAEQALQILKEEQLKDYVTQQHNLRANLERIFMKAPEPWVPPFQLSSFTNVPEEMQEWADNYFGMSAAARPERPISIIVEGDSRTGKTMWARSLGKHNYLSGHLDFNSRVYSNDVEYNVIDDVSPSYLKLKHWKELIGAQKDWQSNCKYGKPVQIKGGIPSIVLCNPGEGSSYKDFLNKQENQALQNWTIHNAIFITLTGALYQTNSQES

SEQ ID NO: 15537 - protein, 351 aa, Dicliptera yellow mottle virus
MPISYTISVNAKNYFLTYPQCSLSKEEALTQIQSISTPVNKKFIKICRELHENGETHLHVLIQFEGKFNCKNNRFFDLVSPTRSAHFHPNIQGAKSSSDVKSYINKDGDTIEWGVFQVDGRSARGGCQSVNDTYAKALNASSAIEALQILKEEQPQHFFLQHHNLVTNATKIFMKAPEPWVPPFQLSSFTNVPEEMQEWADNYFGMSAAARPERPISIIVEGDSRTGKTMWARTLGKHNYLSGHLDFNSRVYSNDVEYNVIDDVSPNYLKLKHGEDLIGAQKDWQSNCKYGKPVQIKGGIPSIVLCNPGEGSSYKDFLNKEENKGLHNWTIHNAIFITLTLPLYQTNSQES

SEQ ID NO: 15538 - protein, 224 aa, Tomato leaf curl Philippines virus
MAPPRPFKINAKNYFLTYPQCSLTKEDALSQLQNLNTPTNKKFIKICRELHEDGSPHLHVLIQFERKYQCQIQRFFDLVSPTRSAHFHPNIQGAKSSSDVKSYIDKDGDTLEWGEFQVDGRSARGGQQSANDAYAKAINTGSKSEALNVIRELAPKDFVLQFHNLSANLDRIFAPPLEVFVSPFPSSSFNQVPKELEEWVSENVRDAAARPWRPKSIVLEGDSR

SEQ ID NO: 15539 - protein, 690 aa, Marchantia polymorpha
MKFRGRDAMTNFRPVQVTDPEAVFLLEQSKRQASMRVTSPQTPAGMVPNPPNESDDPPSLPPKPTMQREHLFEKAVTPSDVGKLNRLVIPKQHAERCFPLDLALNVPCQTLSFEDVSGKHWRFRYSYWNSSQSYVFTKSWSCFLKGKKLEAGDTVSFERGPNQELYIDFRRRLNNQVAQMLPGPSTSASDFARNREHLFEKAVTPSDVGKLNRLVIPKQHAERCFPLDLALNAPCQTLSFEDVSGKHWRFRYSYWNSSQSYVFTKGWSCFLKGKKLEAGDTVSFERGPNQELYIDFRRRLNNQVAQMLPGPSTSASDFARNRPWVPRLPNPAGGLNPAVWHQLSLQNPQSSLESREQLQMLYVRQAFPQRQQQQHMESGVSLPHQTRTGDDFFSLLTHGRVAAMDRTVVGASTTVVKQQQLLAEGPVSTPSAAPAGASGGTRLFGVDLENTSSSSAQGSTEREYAVVSGLNDWKSQTYAQQLQSLSRASYHQGESSFQQQQQQQHLPTARILPSFQGSLHGQSPAPVLMAASAKQQQQQQEQSPFMGLSIVRGRAGEQSLGTRLAASHSDLQLASSTNMNSGSAARAAGAGAELQEAGARTVVALGLAGPQQFAGDSRKRKVGILECLKNSGTADSYARVGAPDTSLSLAQHSESTTQVSFTTESSHFSSSTQPSGSSSTAEDRELKSPK

SEQ ID NO: 15540 - protein, 360 aa, Glycine max
  unsure (1)..(360): unsure at all Xaa locations
VTLYKSFSDVIXSEKAKPSSMITSSEKVSLSPPPSNRLCRVGSGASAVVDPDGGGSGAEVESRKLPSSKYKGVVPQPNGRWGAQIYEKHQRVWLGTFNEEDEAARAYDIAAQRFRGKDAVTNFKPLAGADDDDGESEFLNSHSKPEIVDMLRKHTYNDELEQSKRSRGVVRRRGSAAAGTANSISGACFTKAREQLFEKAVTPSDVGKLNRLVIPKQHAEKHFPLQSSNPTAAKGVLLNFEDVGGKVWRFRYSYWNSSQSYVLTKGWSRFVKEKNLKAGDTVCFHRSTGPDKQLYIDWKTRNGPVVEPIQMVRLFGVNIFSDTIVGNNNNASGCCNGKRREMXXLFSLECSKKPKIIGAL

SEQ ID NO: 15541 - protein, 369 aa, Glycine max
  unsure (1)..(369): unsure at all Xaa locations
MDAISCLDESTTTESLSISQAKPSSTTSEKASPSPPAAEXRLCRVGSGASAVVDSDGGGGGGSTEVESRKLPSSKYKGVVPQPNGRWGSQIYEKHQRVWLGTFNEEDEAARAYDVAVQRFRGKDAVTNFKPLSGTDDDDGESEFLNSHSKSEIVDMLRKHTYNDELEQSKRSRGFVRRRGXRRPAPETETHSGACVMKAREQLFQKAVTPSDVGKLNRLVIPKQHAEKHFPLQSAANGVSATATAAKGVLLNFEDVGGKVWRFRYSYWNSSQSYVLTKGWSRFVKEKNLKAGDTVCFQRSTGPDRQLYIDWKTRNEPIQMVRLFGVNILNGSDSIANNNNASGCCNGKRREMELFSLECSKKPKIIGAL

SEQ ID NO: 15542 - protein, 341 aa, Glycine max
  unsure (1)..(341): unsure at all Xaa locations
MDGGSVTDETTTTSNSLSVXXANLSPPPXSALSAAAQPPSSTPTVVASPXEAESRKLPSSKYKGVVPQPNGRWGAQIYEKHQRVWLGTFNEEDEAVRAYDIVAHRFRGRDAVTNFKPLAGADDAEAEFLSTHSKSEIVDMLRKHTYDNELQQSTRGGRRRRDAETASSGAFDAKAREQLFEKTVTPSDVGKLNRLVIPKQHAEKHFPLSGSAAAGAKGMLLNFEDVGGKVWRFRYSYWNSSQSYVLTKGWSRFVKEKNLRAGDAVQFFKSTGLDRQLYIDCKARSGKVNNPVQMVRLFGVDLLKLPVPGSDGIGVGCDGKRKEMELFAFECSKKLKVIGAL

SEQ ID NO: 15543 - protein, 353 aa, Glycine max
  unsure (1)..(353): unsure at all Xaa locations
HLQYSTITSNQTKPKPLSALTSHKPNVTDETTTSSDSLSVPPPSRVGSVASAVVDPDGCCVSGEAESRKLPSSKYKGVVPQPNGRWGAQIYEKHQRVWLGTFNEEDEAARAYDIAALRFRGPDAVTNFKPPAASDDAESEFLNSHSKFEIVDMLRKHTYDDELQQSTRGGRRRLDADTASSGVFDAKAREQLFEKTVTPSDVGKLNRLVIPKQHAEKHFPLSAATKARRAWPSAAKGMLLNFEDVGGKVWRFRYSYWNSSQSYVLTKGWSRFVKEKNLRAGDAVQFFKSTGPDRQLYIDCKARSGEVNNMVRLFGVNLLXXYPYPVRXGVGKRKEMELFAFECCKKLKVIGAL

SEQ ID NO: 15544 - protein, 393 aa, Oryza sativa (japonica cultivar-group)
MDSSSCLVDDTNSGGSSTDKLRALAAAAAETAPLERMGSGASAVVDAAEPGAEADSGSGGRVCGGGGGGAGGAGGKLPSSKFKGVVPQPNGRWGAQIYERHQRVWLGTFAGEDDAARAYDVAAQRFRGRDAVTNFRPLAEADPDAAAELRFLATRSKAEVVDMLRKHTYFDELAQSKRTFAASTPSAATTTASLSNGHLSSPRSPFAPAAARDHLFDKTVTPSDVGKLNRLVIPKQHAEKHFPLQLPSAGGESKGVLLNFEDAAGKVWRFRYSYWNSSQSYVLTKGWSRFVKEKGLHAGDVVGFYRSAASAGDDGKLFIDCKLVRSTGAALASPADQPAPSPVKAVRLFGVDLLTAPAPVEQMAGCKRARDLAATTPPQAAAFKKQCIELALV

SEQ ID NO: 15545 - protein, 317 aa, Oryza sativa (japonica cultivar-group)
MEQEAAMVVFSCNSGSGGSSSTTDSKQEEEEEEELAAMEEDELIHVVQAAELRLPSSTTATRPSSRYKGVVPQPNGRWGAQIYERHARVWLGTFPDEEAAARAYDVAALRFRGRDAVTNRAPAAEGASAGELAFLAAHSKAEVVDMLRKHTYDDELQQGLRRGSRAQPTPRWAREPLFEKAVTPSDVGKLNRLVVPKQQAERHFPFPLRRHSSDAAGKGVLLNFEDGDGKVWRFRYSYWNSSQSYVLTKGWSRFVREKGLRPGDTVAFSRSAAAWGTEKHLLIDCKKMERNNLATVDDDARVVVKLFGVDIAGDKTR

SEQ ID NO: 15546 - protein, 365 aa, Oryza sativa (japonica cultivar-group); identical to SEQ ID NO: 342

SEQ ID NO: 15547 - protein, 291 aa, Oryza sativa
MEQEAAMVVFSCNSGSGGSSSTTDSKQEEEEEEETRPSSRYKGVVPQPNGRWGAQIYERHARVWLGTFPDEEAAARAYDVAALRFRGRDAVTNRAPAAEGASAGELAFLAAHSKAEVVDMLRKHTYDDELQQGLRRGSRAQPTPRWAREPLFEKAVTPSDVGKLNRLVVPKQQAERHFPFPLRRHSSDAAGKGVLLNFEDGDGKVWRFRYSYWNSSQSYVLTKGWSRFVREKGLRPGDTVAFSRSAAAWGTEKHLLIDCKKMERNNLATVDDDARVVVKLFGVDIVGDKTR

SEQ ID NO: 15548 - protein, 317 aa, Oryza sativa; identical to SEQ ID NO: 343

SEQ ID NO: 15549 - protein, 317 aa, Oryza sativa; identical to SEQ ID NO: 15545

SEQ ID NO: 15550 - protein, 365 aa, Oryza sativa
MGVVSFSSTSSGASTATTESGGAVRMSPEPVVAVAAAAQQLPVVKGVDSADEVVTSRPAAAAAQQSSRYKGVVPQPNGRWGAQIYERHARVWLGTFPDEEAAARAYDVAALRYRGRDAATNFPGAAASAAELAFLAAHSKAEIVDMLRKHTYADELRQGLRRGRGMGARAQPTPSWAREPLFEKAVTPSDVGKLNRLVVPKQHAEKHFPLRRAASSDASASAAAGKGVLLNFEDGEGKVWRFRYSYWNSSQSYVLTKGWSRFVREKGLRAGDTIVFSRSAYGPDKLLFIDCKKNNAAAATTTCAGDERPTTSGAEPRVVRLFGVDIAGGDCRKRERAVEMGQEVFLLKRQCVVHQRTPALGALLL

SEQ ID NO: 15551 - protein, 338 aa, Oryza sativa
  unsure (1)..(338): unsure at all Xaa locations
STSSGASTATTESGGAVRMSPEPVVAVAAAAQQLPVVKGVDSADEVVTSRPAAAAAQQSSRYKGVVPQPNGRWGAQIYERHARVWLGTFPDEEAAARAYDVAALRYRGRDAATNFPGAAASAAELAFLAAHSKAEIVDMLRKHTYADELRQGLRRGRGMGARAQPTPSWAREPLFEKAVTPSDVGKLNRLVVPKQHAEKHFPLRRAASSDSASAAATGKGVLLNFEDGEGKVWRFRYSYWNSSQSYVLTKGWSRFVREKGLRAGDTIVFSRSAYGPDKLLFIDXXPTTSGAEPRVVRLFGVDIAGGDCRKRERAVEMGQEVFLLKRQCVVHQRTPALG

SEQ ID NO: 15552 - protein, 369 aa, Oryza sativa
  unsure (1)..(369): unsure at all Xaa locations
MGVVSFSSTSSGASTATTESGGAVRMSPDPVVAAPAAAQQLPVVKGVDSADEVVTSKPAAAAVAQQSSRYKGVVPQPNGRWGAQIYERHARVWLGTFPDEEAAARAYDVAAARYRGRDAATNFPGAAASAAELAFLAAHSKAEIVDMLRKHTYADELRQGLRRGRGMGARAQPTPSWAREPLFEKAVSPPVLGXLQRLAVPQQHADKHFPLRRAASSDSASAAATGKGVLLNFEDGEGKVWRFRYSYWNSSQSYVLTKGXWSRFVREKGLRAGDTIVFSRSAYAPDKLLFIDCKKNNAAAAATPSCPGDGRPTPTSTAXRVVRLFXGVARAGGDCRKRERAVEMGQEVSLLKSQGLVHPRTPALAALLV

SEQ ID NO: 15553 - protein, 272 aa, Triticum aestivum
  unsure (1)..(272): unsure at all Xaa locations
HARVWLGTFPDQDSAARAYDVASLRYRGRHAAFNFPCATVEAELAFLAAHSKAEILDMLRKQTYAXDELRQGLRRGRGMGARAQPTPSWAREPLFEKAVTPSDVGKLNRLVVPKHHAEKHFPLKRTPHTTTXXTXQGVLLNFEDGQGKVWRFRYSYWNSSQSYVLTKGWSRFVREKGLGAGDSIVFSCSAYGQEKQFFIDCKKNNADGGAATASPPVAEAANGEQVRVVRLFGVDIAGXXKRGRAAPAEQELFKRQCVAHSQHSPALGAIVL

SEQ ID NO: 15554 - protein, 163 aa, Triticum aestivum
  unsure (1)..(163): unsure at all Xaa locations
XAHTSTQTHTLQRTPGQETTEKQPAMGVEILSSTGEHSSQYSSGAVSTATTESASSRFKGVVPQPNGRWGAQIYERHARVWLGTFPDEDSAARAYDVAALRYRGREXTTNFPCAAAEAELAFLAAHSKAEIVDMLRKHTYADELRQGFRRGRGMGARAQPTPS

SEQ ID NO: 15555 - protein, 160 aa, Triticum aestivum
  unsure (1)..(160): unsure at all Xaa locations
XACQLSPPMASGKPTNPEIDNDMECSSPESGAEDAVESSSPAPAPSSRFKGVVPQPNGRWGAQIYEKHSRVWLGTFADEESAARAYDVAALRFRGRDAVTNSAPAGGGASTSELAFLADHSKAEIVDMLRKHTYADXLRQGLRRGHGRAQPTPAWAREFL

SEQ ID NO: 15556 - protein, 393 aa, Zea mays
  unsure (1)..(393): unsure at all Xaa locations
MDSASRLLDDTRSGSGGGGGASTDKLRALAVFAAASAPLERMGSGASAVXVDAAEPGAEADSGSGAAAVSVGGKLPSSRYKGVVPQPNGRWGAQIYERHQRVWLGTFAGEADAARAYDVAAQRFRGRDAVTNFRPLADADPDAAAELRFLASRSKAEVVDMLRKHTYFDELAQNKRAFAAASAATASSLANTSYASLSPATATAAAAAAREHLFDKTVTPSDVGKLNRLVIPKQHAEKHFPLQLPSAGGESKGVLLNLEDAAGKVWRFRYSYWNSSQSYVLTKGWSRFVKEKGLQAGDVVGFYRSAAGADTKLFIDCKLRPNSVVAASTAGPSPPAPVAKAVRLFGVDLLTAPATAAAAPAEAVAVAGCKRARDLGSPPQAAFKKQLVELALV

SEQ ID NO: 15557 - protein, 225 aa, Zea mays
  unsure (1)..(225): unsure at all Xaa locations
MDSTSCLLDDASSGASTGKKAPVPAPAAATGKPLQRVGSSGTSAVMDAAEPGAEADSGKLPSSKYKGVVPQPNGRWGAQIYERHQRVWLGTFTGEAEAARAYDVAAQRFRGRDAVTNFRPLAESEPEAAVELRFLASRSKAEVVDMLRKHTYGEELAHNRRAFAAASPAASPPPENNRRPPAASSSSSPAAAREHLFDKTVTPSDVGKLNRLVIPKQHAEKHVPX

SEQ ID NO: 15558 - protein, 237 aa, Zea mays
  unsure (1)..(237): unsure at all Xaa locations
MDSTSCLLDDASSGASTGKKAPVPAPAAATGKPLQRVGSSGTSAVMDAAEPGAEADSGGAGRAXXGGVSGKLPSSKYKGVVPQPNGRWGAQIYERHQRVWLGTFTGEAEAARAYDVAAQRFRGRDAVTNFRPLAESEPEAAVELRFLASRSKAEVVDMLRKHTYGEELAHNRRAFAAASPAASPPPENNRRPPAASSSSSPAAAREHLFDKTVTPSDVGKLNRLVIPKQHAEKHVPX

SEQ ID NO: 15559 - protein, 223 aa, Zea mays
  unsure (1)..(223): unsure at all Xaa locations
LGTSRPAGMPLSLYTAHGTPPXHSPLPLLAAREHLFDKTVTPSDVGKLNRLVIPKQHAEKHFPLQLPSGGGESTGVLLNLEDAAGKVWRFRYSYWNSSQSYVLTKGWSRFVKEKGLQAGDVVGFYRSAAGADSKLFIDCKLRPNSVDTASTTSPVGSSPPPAPVAKAVRLFGVDLLTAPADAMARCKRARDLASPPQAAIKKQLVELALASVDQCYGAGRSFS

SEQ ID NO: 15560 - protein, 238 aa, Zea mays
  unsure (1)..(238): unsure at all Xaa locations
XWRRTTWPRATRSVAVGDGHVHQPALPPPPAAAAVLRXREHLFEKPLTPSDVGKLNRLVIPKQHAERHFPLGGGDGNGNEKGLLLEFDDEGGRPWRFRYSYWVSSQSYVLTKGWSRYVKEKRLDAGDVVGFYRSAAGADTKLFIDCKLRPNSVVVASTAGPSPPAPVAKAVRLFGVDLLTAPATAAAPAEAVAGCKRARDLGSPPQAAFKKQLVELALVFQMLPAIHDPSTSTGGRGA

SEQ ID NO: 15561 - protein, 148 aa, Zea mays
  unsure (1)..(148): unsure at all Xaa locations
SRAQPTPAWARVLLFDKAVTPSDVGKLNRLVVPKQHAEKHFPLKRAPPSVEAQAPTTAKGVLLNFEDGEGKVWRFRYSYWNSSQSYVLTKGWSRFVREKGLRAGDTIVFSHSTYGSEKQLFIDCKKTKTTTPATDGVPVPLXSTSGEX

SEQ ID NO: 15562 - protein, 352 aa, Arabidopsis thaliana
MDSSCIDEISSSTSESFSATTAKKLSPPPAAALRLYRMGSGGSSVVLDPENGLETESRKLPSSKYKGVVPQPNGRWGAQIYEKHQRVWLGTFNEQEEAARSYDIAACRFRGRDAVVNFKNVLEDGDLAFLEAHSKAEIVDMLRKHTYADELEQNNKRQLFLSVDANGKRNGSSTTQNDKVLKTREVLFEKAVTPSDVGKLNRLVIPKQHAEKHFPLPSPSPAVTKGVLINFEDVNGKVWRFRYSYWNSSQSYVLTKGWSRFVKEKNLRAGDVVTFERSTGLERQLYIDWKVRSGPRENPVQVVVRLFGVDIFNVTTVKPNDVVAVCGGKRSRDVDDMFALRCSKKQAIINAL

SEQ ID NO: 15563 - protein, 352 aa, Arabidopsis thaliana
MDSSCIDEISSSTSESFSATTAKKLSPPPAAALRLYRMGSGGSSVVLDPENGLETESRKLPSSKYKGVVPQPNGRWGAQIYEKHQRVWLGTFNEQEEAARSYDIAACRFRGRDAVVNFKNVLEDGDLAFLEAHSKAEIVDMLRKHTYADELEQNNKRQLFLSVDANGKRNGSSTTQNDKVLKTREVLFEKAVTPSDVGKLNRLVIPKQHAEKHFPLPSPSPAVTKGVLINFEDVNGKVWRFRYSYWNSSQSYVLTKGWSRFVKEKNLRAGDVVTFERSTGLERQLYIDWKVRSGPRENPVQVVVRLFGVDIFNVTTVKPNDVVAVCGGKRSRDVDDMFALRCSNKQAIINAL

SEQ ID NO: 15564 - protein, 361 aa, Arabidopsis thaliana
MEYSCVDDSSTTSESLSISTTPKPTTTTEKKLSSPPATSMRLYRMGSGGSSVVLDSENGVETESRKLPSSKYKGVVPQPNGRWGAQIYEKHQRVWLGTFNEEEEAASSYDIAVRRFRGRDAVTNFKSQVDGNDAESAFLDAHSKAEIVDMLRKHTYADEFEQSRRKFVNGDGKRSGLETATYGNDAVLRAREVLFEKTVTPSDVGKLNRLVIPKQHAEKHFPLPAMTTAMGMNPSPTKGVLINLEDRTGKVWRFRYSYWNSSQSYVLTKGWSRFVKEKNLRAGDVVCFERSTGPDRQLYIHWKVRSSPVQTVVRLFGVNIFNVSNEKPNDVAVECVGKKRSREDDLFSLGCSKKQAIINIL

SEQ ID NO: 15565 - protein, 334 aa, Arabidopsis thaliana
ATTAKKLSPPPAAALRLYRMGSGGSSVVLDPENGLETESRKLPSSKYKGVVPQPNGRWGAQIYEKHQRVWLGTFNEQEEAARSYDIAACRFRGRDAVVNFKNVLEDGDLAFLEAHSKAEIVDMLRKHTYADELEQNNKRQLFLSVDANGKRNGSSTTQNDKVLKTCEVLFEKAVTPSDVGKLNRLVIPKQHAEKHFPLPSPSPAVTKGVLINFEDVNGKVWRFRYSYWNSSQSYVLTKGWSRFVKEKNLRAGDVVTFERSTGLERQLYIDWKVRSGPRENPVQVVVRLFGVDIFNVTTVKPNDVVAVCGGKRSRDVDDMFALRCSKKQAIINAL

SEQ ID NO: 15566 - protein, 344 aa, Arabidopsis thaliana
MESSSVDESTTSTGSICETPAITPAKKSSVGNLYRMGSGSSVVLDSENGVEAESRKLPSSKYKGVVPQPNGRWGAQIYEKHQRVWLGTFNEEDEAARAYDVAVHRFRRRDAVTNFKDVKMDEDEVDFLNSHSKSEIVDMLRKHTYNEELEQSKRRRNGNGNMTRTLLTSGLSNDGVSTTGFRSAEALFEKAVTPSDVGKLNRLVIPKHHAEKHFPLPSSNVSVKGVLLNFEDVNGKVWRFRYSYWNSSQSYVLTKGWSRFVKEKNLRAGDVVSFSRSNGQDQQLYIGWKSRSGSDLDAGRVLRLFGVNISPESSRNDVVGNKRVNDTEMLSLVCSKKQRIFHAS

SEQ ID NO: 15567 - protein, 333 aa, Arabidopsis thaliana
MDAMSSVDESSTTTDSIPARKSSSPASLLYRMGSGTSVVLDSENGVEVEVEAESRKLPSSRFKGVVPQPNGRWGAQIYEKHQRVWLGTFNEEDEAARAYDVAAHRFRGRDAVTNFKDTTFEEEVEFLNAHSKSEIVDMLRKHTYKEELDQRKRNRDGNGKETTAFALASMVVMTGFKTAELLFEKTVTPSDVGKLNRLVIPKHQAEKHFPLPLGNNNVSVKGMLLNFEDVNGKVWRFRYSYWNSSQSYVLTKGWSRFVKEKRLCAGDLISFKRSNDQDQKFFIGWKSKSGLDLETGRVMRLFGVDISLNAVVVVKETTEVLMSSLRCKKQRVL

SEQ ID NO: 15568 - protein, 333 aa, Arabidopsis thaliana
MDAMSSVDESSTTTDSIPARKSSSPASLLYRMGSGTSVVLDSENGVEVEVEAESRKLPSSRFKGVVPQPNGRWGAQIYEKHQRVWLGTFNEEDEAARAYDVAAHRFRGRDAVTNFKDTTFEEEVEFLNAHSKSEIVDMLRKHTYKEELDQRKRNRDGNGKETTAFALASMVVMTGFKTAELLFEKTVTPSDVGKLNRLVIPKHQAEKHFPLPLGNNNVSVKGMLLNFEDVNGKVWRFRYSYWNSSQSYVLTKGWSRFVKEKRLCAGDLISFKRSNDQDQKFFIGWKSKSGLDLETGRVMRLFGVDISLNAVVVVKETTEVLMSSLRCKNQRVL

SEQ ID NO: 15569 - protein, 337 aa, Arabidopsis thaliana
MRLDDEPENALVVSSSPKTVVASGNVKYKGVVQQQNGHWGAQIYADHKRIWLGTFKSADEAATAYDSASIKLRSFDANSHRNFPWSTITLNEPDFQNCYTTETVLNMIRDGSYQHKFRDFLRIRSQIVASINIGGPKQARGEVNQESDKCFSCTQLFQKELTPSDVGKLNRLVIPKKYAVKYMPFISADQSEKEEGEIVGSVEDVEVVFYDRAMRQWKFRYCYWKSSQSFVFTRGWNSFVKEKNLKEKDVIAFYTCDVPNNVKTLEGQRKNFLMIDVHCFSDNGSVVAEEVSMTVHDSSVQVKKTENLVSSMLEDKETKSEENKGGFMLFGVRIECP

SEQ ID NO: 15570 - protein, 352 aa, Arabidopsis thaliana
MDEMSNVAKTTTETSGLTDSVLSLTKRMKPTEVTTTTKPALSNTTKFKGVVQQQNGHWGAQIYADHRRIWLGTFKSAHEAAAAYDSASIKLRSFDANSHRNFPWSDFTLHEPDFQECYTTEAVLNMIRDGSYQHKFRDFLRIRSQIVANINIVGSKQVLGGGEGGQESNKCFSCTQLFQKELTPSDVGKLNRLVIPKKYAVKYMPFISDDQSEKETSEGVEDVEVVFYDRAMRQWKFRYCYWRSSQSFVFTRGWNGFVKEKNLKEKDIIVFYTCDVPNNVKTLEGQSKTFLMIDVHHFSGNGFVVPEEVNKTVHEISDEEMKTETLFTSKVEEETKSEEKKGGFMLFGVRIQ

SEQ ID NO: 15571 - protein, 202 aa, Triticum aestivum
  unsure (1)..(202): unsure at all Xaa locations
MAEKNWPIHTLQRDVPPKGRGQATEKQQSMGLQILSSTPEHSSQHSSGASTATTESGAAGRLPTPLGLPVAIPDEAVTSRSASASAQSASSRFKGVVPQPNGRWGAQIYDRHARVWIGTFPDEDAAARAYDVAALRYRGLDAATNFPRTAGSXXELAFLXAAHSKAEIVDMLRKHTYSDELRRGLRRGRGIGGRAEPTPSWA

SEQ ID NO: 15572 - protein, 533 aa, Pisum sativum
MWDLNGSPSKRKDQESEGCSSPKTSLDGDEDKAKRVGVGGSVSNSSSSAIVIEEDSEEDNNNNNNRSMVKKKNSKIFGFSVTQEQEQEQEEEESLDSENFPVTRNFFPMDQEAENMVVASSGGNGTSSCSSTFPRAHWVGVKFCQSETLGSGKSMEVSSSSQPMKKSRRGPRSRSSQYRGVTFYRRTGRWESHIWDCGKQVYLGGFDTAHAAARAYDRAAIKFRGVEADINFNIEDYEEDLKQMSNLTKEEFVHVLRRQSTGFPRGSSKYRGVTLHKCGRWEARMGQFLGKKYVYLGLFDTEVEAARAYDKAAIKCNGKEAVTNFEPSIYDSELNTAEPASSGSDHNLDLSLGNSSSKHMNNTQSFGNNTSNVANHDQSNWQNGGNINKPKLVNILPKPYNRPNNMEPYGRDLHGENEALRMLSQTHLQSSSPNGIHRYGSLSRSTTNVHSFAHTNHQPPNFHFPSSSYGGRVGSDLSLSTNNHQQQQQQWQPGSHYLSSAAAASSGFPPQIRTPSSQTWLHKNGFHTLMRPS

SEQ ID NO: 15573 - protein, 296 aa, Streptomyces coelicolor A3(2)
MAERIVHRRGYRKGLGGEMCAEFLGTFVLILFGVGSVAVAVAGLPGSGRQTADFGPANWLIISWGWGLAVVFGVYVAGGISGAHLNPAVTLGFAVRRDFPWRKVLPYWLAQVVGAFVAAALVYACYRWAIDAAIAKAGETRETSLNTYSIFATFPAEYFGDSWWGPLLDQIVGTGILLLLICALIDTRNTAPMANLHPYLIGLVVVAIGLTFGTNAGYAINPARDFGPRLFTFFEGWGDIALPGTFQWFSGYWWIPIVGPLIGGVVGVLVYDLLVSPVLKARLTEREEGPATEEPS

SEQ ID NO: 15574 - protein, 355 aa, Mus musculus
MVHGFGCFVFFFLISLSSLWASEDSTCNSTLPLCHLATTLDCCKCGHSCSRESIMVAFKGVWTQAFWKAVSAEFLATLIFVLLGVGSTINWGGSENPLPVDMVLISLCFGLSIATMVQCFGHISGGHINPAVTVAMVCTRKISIAKSVFYIIAQCLGAIIGAGILYLVTPPSVVGGLGVTTVHGNLTAGHGLLVELIITFQLVFTIFASCDSKRTDVTGSIALAIGFSVAIGHLFAINYTGASMNPARSFGPAVIMGNWANHWIYWVGPIMGAVLAGALYEYVFCPDVELKRRLKEAFSKAAQQTKGSYMEVEDNRSQVETEDLILKPGVVHVIDIDRGEEKKGKDSSGEVLSSV

SEQ ID NO: 15575 - protein, 301 aa, Mus musculus
MVAFKGVWTQAFWKAVSAEFLATLIFVLLGVGSTINWGGSENPLPVDMVLISLCFGLSIATMVQCFGHISGGHINPAVTVAMVCTRKISIAKSVFYIIAQCLGAIIGAGILYLVTPPSVVGGLGVTTVHGNLTAGHGLLVELIITFQLVFTIFASCDSKRTDVTGSIALAIGFSVAIGHLFAINYTGASMNPARSFGPAVIMGNWANHWIYWVGPIMGAVLAGALYEYVFCPDVELKRRLKEAFSKAAQQTKGSYMEVEDNRSQVETEDLILKPGVVHVIDIDRGEEKKGKDSSGEVLSSV

SEQ ID NO: 15576 - protein, 323 aa, Mus musculus
MSDRAAARRWGKCGHSCSRESIMVAFKGVWTQAFWKAVSAEFLATLIFVLLGVGSTINWGGSENPLPVDMVLISLCFGLSIATMVQCFGHISGGHINPAVTVAMVCTRKISIAKSVFYIIAQCLGAIIGAGILYLVTPPSVVGGLGVTTVHGNLTAGHGLLVELIITFQLVFTIFASCDSKRTDVTGSIALAIGFSVAIGHLFAINYTGASMNPARSFGPAVIMGNWANHWIYWVGPIMGAVLAGALYEYVFCPDVELKRRLKEAFSKAAQQTKGSYMEVEDNRSQVETEDLILKPGVVHVIDIDRGEEKKGKDSSGEVLSSV

SEQ ID NO: 15577 - protein, 323 aa, Mus musculus
MSDGAAARRWGKCGHSCSRESIMVAFKGVWTQAFWKAVSAEFLATLIFVLLGVGSTINWGGSENPLPVDMVLISLCFGLSIATMVQCFGHISGGHINPAVTVAMVCTRKISIAKSVFYIIAQCLGAIIGAGILYLVTPPSVVGGLGVTTVHGNLTAGHGLLVELIITFQLVFTIFASCDSKRTDVTGSIALAIGFSVAIGHLFAINYTGASMNPARSFGPAVIMGNWANHWIYWVGPIMGAVLAGALYEYVFCPDVELKRRLKEAFSKAAQQTKGSYMEVEDNRSQVETEDLILKPGVVHVIDIDRGEEKKGKDSSGEVLSSV

SEQ ID NO: 15578 - protein, 354 aa, Mus musculus
MVHGFGCFVFFFLISLSSLWASEDSTCNSTLPLCHLATTLDCCKCGHSCSRESIMVAFKGVWTQAFWKAVSAEFLATLIFVLGVGSTINWGGSENPLPVDMVLISLCFGLSIATMVQCLGHISGGHINPAVTVAMVCTRKISIAKSVFYIIAQCLGAIIGAGILYLVTPPSVVGGLGVTTVHGNLTAGHGLLVELIITFQLVFTVFASCDSKRTDVTGSIALAIGFSVAIGHLFAINYTGASMNPARSFGPAVIMGNWANHWIYWVGPIMGAVLAGALYEYVFCPDVELKRRLKEAFSKAAQQTKGSYMEVEDNRSQVETEDLILKPGVVHVIDIDRGEEKKGRDSSGEVLSSV

SEQ ID NO: 15579 - protein, 322 aa, Mus musculus
MSDGAAARRWGKCGHSCSRESIMVAFKGVWTQAFWKAVSAEFLATLIFVLGVGSTINWGGSENPLPVDMVLISLCFGLSIATMVQCLGHISGGHINPAVTVAMVCTRKISIAKSVFYIIAQCLGAIIGAGILYLVTPPSVVGGLGVTTVHGNLTAGHGLLVELIITFQLVFTVFASCDSKRTDVTGSIALAIGFSVAIGHLFAINYTGASMNPARSFGPAVIMGNWANHWIYWVGPIMGAVLAGALYEYVFCPDVELKRRLKEAFSKAAQQTKGSYMEVEDNRSQVETEDLILKPGVVHVIDIDRGEEKKGRDSSGEVLSSV

SEQ ID NO: 15580 - protein, 300 aa, Mus musculus
MVAFKGVWTQAFWKAVSAEFLATLIFVLGVGSTINWGGSENPLPVDMVLISLCFGLSIATMVQCLGHISGGHINPAVTVAMVCTRKISIAKSVFYIIAQCLGAIIGAGILYLVTPPSVVGGLGVTTVHGNLTAGHGLLVELIITFQLVFTVFASCDSKRTDVTGSIALAIGFSVAIGHLFAINYTGASMNPARSFGPAVIMGNWANHWIYWVGPIMGAVLAGALYEYVFCPDVELKRRLKEAFSKAAQQTKGSYMEVEDNRSQVETEDLILKPGVVHVIDIDRGEEKKGRDSSGEVLSSV

SEQ ID NO: 15581 - protein, 263 aa, Mus musculus
MWELRSASFWRAIFAEFFATLFYVFFGLGASLRWAPGPLHVLQVALAFGLALATLVQTVGHISGAHVNPAVTFAFLVGSQMSLLRAFCYIAAQLLGAVAGAAVLYSVTPPAVRGNLALNTLHAGVSVGQATTVEIFLTLQFVLCIFATYDERRNGRMGSVALAVGFSLTLGHLFGMYYTGAGMNPARSFAPAILTRNFSNHWVYWVGPIIGGGLGSLLYDFLLFPRLKSVSERLSILKGARPSDSNGQPEGTGEPVELKTQAL

SEQ ID NO: 15582 - protein, 263 aa, Mus musculus
MWELRSASFWRAIFAEFFATLFYVFFGLGASLRWAPGPLHVLQVALAFGLALATLVQTVGHISGAHVNPAVTFAFLVGSQMSLLRAFCYIAAQLLGAVAGAAVLYSVTPPAVRGNLALNTLHTGVSVGQATTVEIFLTLQFVLCIFATYDERRNGRMGSVALAVGFSLTLGHLFGMYYTGAGMNPARSFAPAILTRNFSNHWVYWVGPIIGGGLGSLLYDFLLFPRLKSVSERLSILKGARPSDSNGQPEGTGEPVELKTQAL

SEQ ID NO: 15583 - protein, 271 aa, Mus musculus
MWELRSIAFSRAVLAEFLATLLFVFFGLGSALQWASSPPSVLQIAVAFGLGIGTLVQALGHVSGAHINPAVTVACLVGCHVSFLRAAFYVAAQLLGAVAGAAILHEITPVEIRGDLAVNALHNNATAGQAVTVELFLTMQLVLCIFASTDERRSDNLGSPALSIGFSVTLGHLLGIYFTGCSMNPARSLAPAVVTGKFDDHWVFWIGPLVGAVIGSLLYNYLLFPSTKSLQERLAVLKGLEPDTDWEEREVRRRQSVELHSPQSLPRGSKA

SEQ ID NO: 15584 - protein, 271 aa, Mus musculus
MWELRSIAYCRAVLAEFLATLLFVFFGLGSALQWASSPPSVLQIAVAFGLGIGTLVQALGHVSGAHINPAVTVACLVGCHVSFLRAAFYVAAQLLGAVAGAAILHEITPVEIRGDLAVNALHNNATAGQAVTVELFLTMQLVLCIFASTDERRSDNLGSPALSIGFSVTLGHLLGIYFTGCSMNPARSLAPAVVTGKFDDHWVFWIGPLVGAIIGSLLYNYLLFPSTKSLQERLAVLKGLEPDTDWEEREVRRRQSVELHSPQSLPRGSKA

SEQ ID NO: 15585 - protein, 249 aa, Vitis berlandieri x Vitis rupestris
MPKIAFGRFDDSFSLASFKAYLAEFHSTILFVFAGVGSVMAYNKLTSDAALDPAGLVAVAVAHGFALFVAVAVSANISGGHVNPAVTFGLVVGGQITILTGILYWIAQLVGSILACFLLKLVTGGLTTPVHSLGAGVGVIDAIVFEIVITFALVYTVYATAVDPKKGSLGIIAPIAIGLVVGANILAAGPFSGGSMNPARSFGPAVVSGDFKDNWIYWVGPLIGGGMGGSVYAFMYLGSDHQPLASSEF

SEQ ID NO: 15586 - protein, 289 aa, Rhodobacter sphaeroides
MKATFRVHIGRRARRSQPALRRLRRAEAPSRLEELPRPIPSSRRPFMTKKLLAELLGTFILVFFGCGAAVLMGPQIGMLGISLAFGLSIVAAAYSLGAISGAHLNPAVSLGFLMAGRMPMAEFGGYVLAQIAGALLGSLVVFLIASGKAGYVLATDGLGQNGFGAGYLGEYSMGAALIFELIATFVFVSVILAATASHVSSASTALAGLAIGLTLTGIHLVGINVTGVSVNPARSLAPALFVGGKALSDLWVFIVAPLAGGAAAGLAHASGFFRPGGIEPAPATGAATL

SEQ ID NO: 15587 - protein, 247 aa, Rhodopseudomonas palustris
MTIEETHMNTNKYLAEMIGTFWLTFAGCGSAVIAAGFPQVGIGLVGVSLAFGLSVVTMAYAIGHISGCHLNPAVTLGLAAGGRFPVKQIAPYIIAQVLGAIAAAALLYLIASGAAGFDLAKGFASNGYGAHSPGQYNLVACFVMEVVMTMMFLFVIMGSTHGKAPAGFAPLAIGLALVMIHLVSIPVTNTSVNPARSTGPALFVGGWAIGQLWLFWVAPLLGGVLGGVIYRVLSPEPTGVVEGVKAR

SEQ ID NO: 15588 - protein, 281 aa, Chloroflexus aurantiacus
MLRVRIGAHHVLCLNAGSRVIRRNWFRLFCVARRRPSMPASFLGEVFGTMVLILFGNGVVANVLLTQSKGNGGGWIVITTGWAFAVMSGVFTAAALGSPGADLNPAVTIAVMIRGGYDVGTAVMHIIAQFIGAFIGATLVWLTYLSHWEVTKDPGLKLACFSTGPAINNPVNNIITEVIGTFALVFIIFAIFSGDGATGGSPASGLGPYLVAALVWGIGLSLGGPTGYAINPARDLGPRIAHFVLPIAGKGDSNWGYSWVPVVGPIIGGSIAALLANALGM

SEQ ID NO: 15589 - protein, 247 aa, Synechocystis sp. PCC 6803
MKKYIAEFIGTFWLVLGGCGSAVFAAFIAAPGGGNTNEFGLGYLGVALAFGLTVFTGAYALGHISGGHFNPAVSFGLWMGKRFPGSQLAPYIGAQVLGAIVASLFIFIVAQGGPNFSLDGSNPLATNGFGDHSPQGYGFLAALLIEFVLTFIFLIVILGVTDKTAPAGFAPAAIGLALTLIHLISIPITNTSVNPARSTGVALFCGNPALIGQLWLFWLAPIAGALLAGFVYHNVLEDLGRPEPEAE

SEQ ID NO: 15590 - protein, 242 aa, Thermoanaerobacter tengcongensis
MSDFAKYLAEFFGTMILIWLGDGVVANVVLNKSKGQNSGWIVITAGWGFAVMVGAYTVGWLSGAHLNPAVTIGLATIGKFSWSLVPGYIIAQVLGAFVGAIIVYLMYIDHFAATEDPTAKLGTFATIPAIRNLGKNFITEAFGTAMLLIGILGITNSNNPIGGMGPLLVGLLVWAIGLSLGGPTGYAINPARDFGPRLAHAILPIPGKRDSDWGYGLIVPIFGPIVGGIIGAWIYQLIMSVH

SEQ ID NO: 15591 - protein, 234 aa, Ralstonia metallidurans
MNIGKRFTAEWLGTFWLVFGGCGAAVFAAAFPNVGIGLLGVSLAFGLTVVTMAYAIGPVSGCHLNPAVTVGLAVAGRFPVAEAPLYILAQLLGAICAAGTLLYLASANPGFDLMANGLATNGYGAASPGGYGLRAVVTTETLMTAFFLIIIIGATSYRRTRAAAPVAIGLALTLIHLISIPISNTSVNPARSTGPAIIVGGVAIQQLWVFWVAPICGAILAGLLGRLLFVNEAD

SEQ ID NO: 15592 - protein, 274 aa, Deinococcus radiodurans
MSTMKFTAAQEFVAELLGTLVLILFGCGVVAMVKLFGSSPAIPGEVVMGGYTNIVLGWGFAVLMGIFVAGTITGAHLNPAVTIALAATGRFPWAKVGYFILAQMIGAFLGAAIVFAVYHAKWLGVDPGLDHTAGIFSTFPAVPGFLPGFIDQVVGTALLVGLILAIGDKLNNPAGAAWGSLAVAFVVMAVGISFGGMNGYAINPARDLGPRLFALLAGFKNLGDINVWLVPVIGPIVGGLVGAFIYDFCIGRPLLRAGEAHVGVQGVDPEFNRQ

SEQ ID NO: 15593 - protein, 233 aa, Streptococcus pneumoniae
MMNELFGEFLGTLILILLGNGVVAGVVLPKTKSNSSGWIVITMVGIAVAVAVFVSGKLSPAHLNPAVTIGVALKGGLPWASVLPYILAQFAGAMLGQILVWLQFKPHYEAEENAGNILATFSTGPAIKDTVSNLISEILGTFVLVLTIFALGLYDFQAGIGTFAVGTLIVGIGLSLGGTTGYALNPARDLGPRIMHSILPIPNKGDGDWSYAWIPVVGPVIGAALAVLVFSLF

SEQ ID NO: 15594 - protein, 286 aa, Rhodnius prolixus
MPAATRNRRMSSICKTRIGETKDMSNVEIESSLKIEDNHLSHRPSLAVQTFSWRKCIEIFIAEVVATSLLLCLGCMSTVVGFDGSQSVHKLQPALAFGFLVSSLITSFGHISGAHMNPVVTICFYMMGTIEAFLIPIYLAAEIIGSVLGMGLLLLVTPVGIIGSRDVCTTIPNPTLNSFQALGVEFVCTSLLLLVLLGCSDVRNADKQDSVPLKFAGVIITLSLLGGPYTGASVNPVRSFAPALWSHNWTANWVYWVGPSLSGFDNTFFLPMLFSTRKKMKTCIIK

SEQ ID NO: 15595 - protein, 259 aa, Tulipa gesneriana
MPISRIAIGSPQEATQAGALKAALAEFISTLIFVYAGQGSGIAFGKLSVDGVTTPAGLVAAAIAHAFALFVAVSVGANISGGHVNPAVTFGAFLGGNITLLRGVLYIIAQLLGSSVACLLLRFTTGLGTGHFGLVAGVSIWSGLVMEIVMTCGLVYTVYATAVDPKKGDIGTIAPIAIGFIVGANILVGGAFTGASMNPARSRSGRALVSWSWTSHWVYWVGPLIGGGIAGIVYDLFFINSTHEPAPKHRLLIGGWRRR

SEQ ID NO: 15596 - protein, 248 aa, Burkholderia fungorum
MVALGKRLLVESAGTAWLVFIGCGSIVLNVGAIQQAGGVLEAALAFGLALATASYCVGSLSGGHFNPAVTVGFTVAQRFPVRDLLPYIASQIFGAIVAAALLLYVAGGRPGFDLHATEFAANGFGDHSPADYQMHSALAIEFVLSFCFVMATLVISRRHDMEPIAPLVAGACLVLVYLVSIPVTNGSVNPARSTAQALFVGDWALDQLWLFWAAPLSGGVIAGALFSFLHGKPDNHTAALAEGRGEVV

SEQ ID NO: 15597 - protein, 260 aa, Burkholderia fungorum
MRASGSIIFLGLPIMQLSKRLAAELFGTFWLVLGGCGSAVLAASFDGPVHGLGIGFVGVALAFGLTVLTMAYAIGHISGCHLNPAVSVGLTVAGRFPARDLLPYIVAQVIGAVLGAFVLSLIATGKPGFDLVASGFASNGYGERSPGHYSLAAAFICEVVMTGFFLFVILGATDKRAPAGFAPIAIGLCLTLIHLISIPVTNTSVNPARSTGPALFVGGAAVDQLWLFWLAPILGAVIAGVLYPALAESRDSNSQKLALD

SEQ ID NO: 15598 - protein, 237 aa, Burkholderia fungorum
MHPYIAEFIGTALVVLLGDGAVANVLLARTKGKGADLIVIVMGWAMAVFIAVYVTASFSGAHLNPVVTISLALAGKFAWTKVPGYVAAQMLGGMAGALLVWIAYRQHFAKEGDADVKLGVFCTAPAIRSVPHNLLTEMIATFVLILGVLYLASPQVGLGALDALPVGLLVLGIGISLGGPTGYAMSPARDLSPRLMHALLPIPGKRDSDWHYAWIPVCGPLLGGAAAACLYLYLHVH

SEQ ID NO: 15599 - protein, 245 aa, Lactococcus lactis subsp. lactis
MHSEMVQLLGEFLGTFILILLGNGVVSGVVLNKTKATGAGWVAITLGWGFAVMMGVYISGFMSPAHLNPAVTIAMAMIGSFSWSLVLPYIIAQMLGAMVASIILYLMFYPHYAETKNPADILGTFSTGPAIRQTSSNLISEIVGTAVLTTGILAFGQYAITQTSGVSPLLVGAIITAIGLSLGATTGYSLNPARDLGPRIMHAILPIKGKGDSDWSYAWIPVVGPIIGGSLGALLFNMVIQFASK

SEQ ID NO: 15600 - protein, 282 aa, Adiantum capillus-veneris
MSSVRVDSPRSSVDPSCSNGEVAVRHHKGCLAMETPSWMPPSITNAGILQKVGAELISTYILVFAGCGAAMVDEKSGGAITHFGVSAAFGLVVMIMIYSVGHISGAHMNPAVTLAFATVRHFPWAQVPAYIGAQVVAAISAAFSLRLILGGAAKIGATLPVGSDVQSLALEVITSYILMFVVSAVATDTRAIGELAGLAVGSAVALDAIFAGPICGASMNPARSIGPAVASYDFKSLWVYIVGPILGCLLGAWSYTMIKLPEQPQDLAMISQSKSFKSSRRG

SEQ ID NO: 15601 - protein, 246 aa, Methanothermobacter thermautotrophicus
MVSLTKRCIAEFIGTFILVFFGAGSAAVTLMIASGGTSPNPFNIGIGLLGELGDWVAIGLAFGFAIAASIYALGNISGCHINPAVTIGLWSVKKFPGREVVPYIIAQLLGAAFGSFIFLQCAGIGAATVGGLGATAPFPGISYWQAMLAEVVGTFLLMITIMGIAVDERAPKGFAGIIIGLTVAGIITTLGNISGSSLNPARTFGPYLNDMIFAGTNLWNYYPIYVIGPIVGAVLAALTYQYLTSE

SEQ ID NO: 15602 - protein, 231 aa, Escherichia coli O157:H7 EDL933
MFRKLAAECFGTFWLVFGGCGSAVLAAGFPELGIGFAGVALAFGLTVLTMAFAVGHISGGHFNPAVTIGLWAGGRFPAKEVVGYVIAQVVGGIVAAALLYLIASGKTGFDAAASGFASNGYGEHSPGGYSMLSALVVELVLSAGFLLVIHGATDKFAPAGFAPIAIGLALTLIHLISIPVTNTSVNPARSTAVAIFQGGWALEQLWFFWVVPIVGGIIGGLIYRTLLEKRN

SEQ ID NO: 15603 - protein, 272 aa, Staphylococcus aureus subsp. aureus Mu50
MNVYLAEFLGTAILILFGGGVCANVNLKRSAANGADWIVITAGWGLAVTMGVFAVGQFSGAHLNPAVSLALALDGSFDWSLVPGYIVAQMLGAIVGATIVWLMYLPHWKATEEAGAKLGVFSTAPAIKNYFANFLSEIIGTMALTLGILFIGVNKIADGLNPLIVGALIVAIGLSLGGATGYAINPARDLGPRIAHAILPIAGKGGSNWSYAIVPILGPIAGGLLGAVVYAVFYKHTFNIGCAIAIVVVIITLILGYILNKSSKKGDIESIY

SEQ ID NO: 15604 - protein, 230 aa, Pseudomonas putida KT2440
MSLGKRMGAELIGTFWLVLGGCGSAVLAASSPLGIGVLGVAFAFGLTVLTMAFAIGHISGCHLNPAVSFGLVVGGRFPAKELLPYVIAQVIGAILAAGVIYLIASGKAGFELSAGLASNGYADHSPGGYTLGAGFVSEVVMTAMFLVVIMGATDARAPAGFAPIAIGLALTLIHLISIPVTNTSVNPARSTGPALFVGGWALQQLWLFWVAPLIGAAIGGALYRGLAKEP

SEQ ID NO: 15605 - protein, 288 aa, Beta vulgaris
MTKDVEAVSEQQQPEFSTKDYHDPPPAPLIDMEELKKWSFYRAIIAEFVATLLFLYVTVLTVIGHFRSADLENGGENCTGVGILGIAWAFGGMIFILVYCTAGISGGHINPAVTFGLFLARKVSLIRALAYMVAQCLGAICGVGFVKAFQSAYYDRYGGGANQMAHGYNKGTGLGAEIIGTFVLVYTVFAATDPKRSARDSHVPVLAPLPIGFAVFMVHLATIPITGTGINPARSFGAAVIFNEEKSWNEHWIFWVGPFVGAAIAAFYHQYILRAGAIKALGSFRSSA

SEQ ID NO: 15606 - protein, 281 aa, Beta vulgaris
MTKEVSEEAQVHQHGKDYVDPPPAPLFDMGELKLWSFWRAVIAEFIATLLFLYITVATVIGYKNETDPCATVGLLGIAWSFGGMIFILVYCTAGISGGHINPAVTFGLFLARKVSLLRAFFYMVGQCAGAICGVGLVKAFMSGAYVRLGGGANSVQPGYNKGTALGAEIIGTFVLVYTVFSATDPKRSARDSHVPILAPLPIGFAVFMVHLATIPITGTGINPARSFGAAVIFNDKKAWDDHWIFWVGPFVGALAAAAYHQYILRAAAIKALGSFRSNPTN

SEQ ID NO: 15607 - protein, 234 aa, Listeria innocua
MSAYLAEFIGTMVLIMFGNGLLAGLTLNKSLSQGANWVVVTFGWGFAVMIGIYVAGAYSGAHLNPAVTIALAVGGSFSWAAVVPYIIAQIAGAFVGASIIILHYYPHFKATPQEIDTHGIFSTGPAIRNTPFNLISEIIATFAFIFGLLMIGENSFTNGLNPLILGFLVVAIGMSFGPTTGYAINPARDLGPRLAYFLLPVPNKSGSDWRYAWIPIVGPIIGGLLAIGLFNILL

SEQ ID NO: 15608 - protein, 272 aa, Listeria innocua
MIDTSLATQFLGEVIGTAILIILGAGVVAGVSLKKSKAENGGWVVVTLAWGLGVTMGVYVSGYMSMAHLNPAVTIGMALAGAFPWNYVLPYIVAQFIGAFIGATLVWLHYYPHWKKTEDKPTKLGVFATAPAIRHFTSNFFGEALGTFMLVFGLLSLGANSFSDGLNPLVVGALIVAIGMSLGGTTGYAINPARDLGPRIAHFVWPISGKGGSDWGYSWVPVIGPIMGGALGALGYNAIINGELGMWFWVFAVLFVLILILTMQLDKKKDLA

SEQ ID NO: 15609 - protein, 234 aa, Listeria monocytogenes EGD-e
MSAYLAEFIGTMVLIMFGNGLLAGLTLNKSLSQGANWVVVTFGWGFAVMIGIYVAGAYSGAHLNPAVTIALAVGGSFPWADVVPYIIAQIAGAFVGASIVILHYYPHFKATPPEIDTHGIFSTGPAIRNTPFNLISEIIATFAFIFGLLMIGANSFTDGLNPLILGFLVVAIGMSFGPTTGYAINPARDLGPRLAYFLLPVPNKSGSDWRYAWIPIVGPIIGGLLAIGLFNILL

SEQ ID NO: 15610 - protein, 272 aa, Listeria monocytogenes EGD-e
MIDTSLATQFLGEVIGTAILIILGAGVVAGVSLKRSKAENGGWVVITLAWGLGVTMGVYVSGYMSMAHLNPAVTIGMALAGAFPWNYVLPYILAQFIGAFIGATLIWLHYYPHWKQTEDKPTKLGVFATAPAIRHFTSNFFGEALGTFILVFGLLSLGANSFSDGLNPLVVGALIVAIGMSLGGTTGYAINPARDLGPRIAHFVWPISGKGGSDWGYSWVPVIGPIMGGALGALGYNAIINGELGMWFWVFAVLFVLILILTMQLDKKKDLA

SEQ ID NO: 15611 - protein, 222 aa, Streptococcus pneumoniae TIGR4
MKKFVAELIGTFMFVFVGTGAVVFGNGLDGLGHLGIAFAFGLAIVVAAYSIGTVSGAHLNPAVSIAMFVNKRLSSSELVNYILGQVVGAFIASGAVFFLLANSGMSTASLGENALANGVTVFGGFLFEVIATFLFVLVIMTVTSESKGNGAIAGLVIGLSLMAMILVGLKITGLSVNPARSLAPAVLVGGAALQQVWIFILAPIAGGVLAALVAKNFLGTEE

SEQ ID NO: 15612 - protein, 234 aa, Streptococcus pneumoniae TIGR4
MMNELFGEFLGTLILILLGNGVVAGVVLPKTKSNSSGWIVITMGWGIAVAVAVFVSGKLSPAYLNPAVTIGVALKGGLPWASVLPYILAQFAGAMLGQILVWLQFKPHYEAEENAGNILATFSTGPAIKDTVSNLISEILGTFVLVLTIFALGLYDFQAGIGTFAVGTLIVGIGLSLGGTTGYALNPARDLGPRIMHSILPIPNKGDGDWSYAWIPVVGPVIGAALAVLVFSLF

SEQ ID NO: 15613 - protein, 222 aa, Streptococcus pneumoniae R6
MKKFVAELIGTFMLVFVGTGAVVFGNGLDGLGHLGIAFAFGLAIVVAAYSIGTVSGAHLNPAVSIAMFVNKRLSSSELVNYILGQVVGAFIASGAVFFLLANSGMSTASLGENALANGVTVFGGFLFEVIATFLFVLVIMTVTSESKGNGAIAGLVIGLSLMAMILVGLKITGLSVNPARSLAPAVLVGGAALQQVWIFILAPIAGGVLAALVAKNFLGTEE

SEQ ID NO: 15614 - protein, 234 aa, Streptococcus pneumoniae R6
MMNELFGEFLGTLILILLGNGVVAGVVLPKTKSNSSGWIVITMGWGIAVAVAVFVSGKLSPAHLNPAVTIGVALKGGLPWASVLPYILAQFAGAMLGQILVWLQFKPHYEAEENAGNILATFSTGPAIKDTVSNLISEILGTFVLVLTIFALGLYDFQAGIGTFAVGTLIVGIGLSLGGTTGYALNPARDLGPRIMHSILPIPNKGDGDWSYAWIPVVGPVIGAALAVLVFSLF

SEQ ID NO: 15615 - protein, 251 aa, Anopheles gambiae str. PEST
KMTESAGVKQIVGVSDITENRNIWRMLVAEFLGTFFLVAIGIGSTTGWTDYSPTLTQIAFTFGLVVATLAQAFGHVSGCHINPAVTIGLIVTADVSILKGAFYIVSQCIGAIAGAAVIKAATPSEVVGGLGVTGIAPGLSTGQGVLIEALITFMLVFVVHGVCDNRRTDVKGSAPLAIGLSITAGHLAAIKYTGASMNPARSFGPAVVMGNYTDLWVYWVGPIVGGIVAGAVYRLFFKVRKGDEESNSYDF

SEQ ID NO: 15616 - protein, 241 aa, Agrobacterium tumefaciens str. C58 (Cereon)
MSRKFISEFLGTFWLVFGGCGSAVFAAAFPELGIGFLGVAFAFGLTVLTMAYAVGGISGGHFNPAVSVGLTVAGKFPAANLVPYIVAQVLGAVVAAAALYVILTGKAGAEIGGFAANGYGEHSPGGYSLLSALLIEIILTAFFLVVILGSTHGRVPVGFAPVAIGLALTLIHLISIPVTNTSVNPARSTGQALFVGGWALQQLWLFWLAPILGGAIGAVVWKIFGEEEKAGHAGSVQPAKT

SEQ ID NO: 15617 - protein, 228 aa, Agrobacterium tumefaciens str. C58 (Cereon)
MGRKLLAEFFGTFWLVFGGCGSAVFAAAFPELGIGFTGVALAFGLTVLTMAYAVGGISGGHFNPAVSVGLTVAGRFPASSLVPYVIAQVAGAIVAAAALYVIATGKAGIDLGGFASNGYGEHSPGGYSLVSALLIEIILTAFFLIVILGSTHGRVPAGFAPIAIGLALTLIHLISIPVTNTSVNPARSTGQALFVGGWALQQLWLFWLAPIVGGAAGAVIWKLFGEKD

SEQ ID NO: 15618 - protein, 236 aa, Streptococcus pyogenes MGAS8232
MNFIGELLGTFILVLLGDGVVSACILNKTKAQNSGWIAIVLGWGIAVTVAVYISGFMSGAHLNPAVTLAMAAIGSLPWSQVVTYLVAQFLGAMLGALVLYLHYYPHWNETKDAGTILACFSTGPAIRHTWSNLFGEALGTAVLVITVMAIGPNKVAAGFGPIIVGFVVMAVGFSLGATTGYAINPARDLGPRIMHALLPIPNKGDSDWSYAWIPVLGPILGGVAGALIYQAILNMM

SEQ ID NO: 15619 - protein, 246 aa, Methanothermobacter thermautotrophicus str. Delta H
MVSLTKRCIAEFIGTFFLVFFGAGAAAITLMIASGGTAPNPFNIGIGLLGGLGDWVAIGLAFGFAIAASIYALGNISGCHINPAVTIGLWSVKKFPGRDVVPYIIAQLLGAAFASFIFLQCAGITAATIGGLGATAPFPGIGYWQAMLAETVGTFLLMITIMGIAVDERAPKGFAGIIIGLTVAGIITTIGNITGSSLNPARTFGPYLNDMVFAGTNLWNYFPIYVIGPVVGAVLAALTYQYLTSE

SEQ ID NO: 15620 - protein, 274 aa, Magnetospirillum magnetotacticum
PAPRHAHRSLRTDRSMSASRPHETRGVAMDHDTLRRTTAEFFGTFWLTFGGCGAAVLSAAFPELGIGFLGVAFAFGFTVLTMAYAVGHISGGHFNPAVTLGLWSARRCANRHVLPYIVAQVIGAIVAAFALYTIASGKAGWVPNGFASNGYGALSPGKYGLAACLLTEVLTTFIFLFIIVGTTSKGAATGFAGIPIGLALVLIHLISIPVTNTSVNPARSTGPALFAGGEYVAQLWMFWLAPIVGAIAAGAMARWLYEPADVVDTTIVERRAEV

SEQ ID NO: 15621 - protein, 221 aa, Bacillus anthracis str. A2012
MLKKAIAEFIGTFVLVLFGTGVAVIGGGIEGIGTLGIAMAFGLSIVAMAYSIGTISGCHINPAVSVAMFINKRMNAMELCYYVLAQILGGLLGAATLVTILQSAKTPLDNLGQNGFGTLGLSGAFLVEFILTFVFILVIVAVTGKKGSSSLAGLVIGFTLVLVHLLGIPLTGTSVNPARSIAPALFVGGEALSQLWVFIVAPILGGIVAAIVGKFILNTEK

SEQ ID NO: 15622 - protein, 250 aa, Bacillus anthracis str. A2012
WCKFKEVVCESSGWIVITMGWGLAVAVAAYVVGSISGAHLNPALTIGLAFKGAFPWGDVPGYIAAQMIGAIIGAVIVYLHYLPHWKETEDPGTKLGVFATGPAIPNTFANLLSEMIGTFVLVFGILAIGANKFADGLNPFIVGFLIVSIGLSLGGTTGYAINPARDLGPRIAHFFLPIAGKGGSNWKYAWIPVVGPILGGSLAGLFHQVVFEGKQNAALIYVIIATVIVLAISYMTSKKSGSNTNSRKVA

SEQ ID NO: 15623 - protein, 268 aa, Chlorobium tepidum TLS
MVSGNDNNHHAAQRARMLLTQIAPNFLDPKHEWQRIFAELWGTFLLVLVAAGGPVAATSSGNHAGDALLPVAPGLMVMAIIYFMGTVSGAHLNPAVTLAFAMRRNFPWVRVPGYILAQVAGGWLAALFLGFMFGNAAVAPGMTLPGHEVTPLKALVMEMVLTAALVNTILGTSSGARNIGTNGAIAVGGYIALAGMWAAPVSGASMNPVRSLAPALVCGDTTLAWVYVAGPIAGALIGVVFEWILKGPPTTAGTVAAQGTLDIDDREG

SEQ ID NO: 15624 - protein, 235 aa, Clostridium perfringens str. 13
MVNQFLAELFGTALLILLGDGVVANIALKKTKGNGADLIVVTVGWAIAVAIPVYIFSRVSGAVFNPAVTIALGITGGLTWSQVIVFCIAQFIGAFIGAVLVYLTYYTHFESTEDHDAKLGTFCTIPAIRNFKWNFFTEFIGTFVLMFGILGLGDAKMADGIMPIAVGLLILVIGVSLGGPTGYAINPARDFSPRLAHFLLPMKNKGGSDWAYAWIPIVGPILGAIAGAMVYTNIF

SEQ ID NO: 15625 - protein, 233 aa, Shigella flexneri 2a str. 301
MDMFRKLAAECFGTFWLVFGGCGSAVLAAGFPELGIGFAGVALAFGLTVLTMAFAVGHISGGHFNPAVTIGLWAGGRFPAKEVVGYVIAQVVGGIVAAALLYLIASGKTGFDAAASGFASNGYGEHSPGGYSMLSALVVELVLSAGFLLVIHGATDKFAPAGFAPIAIGLALTLIHLISIPVTNTSVNPARSTAVAIFQGGWALEQLWFFWVVPIVGGIIGGLIYRTLLEKRD

SEQ ID NO: 15626 - protein, 250 aa, Leuconostoc mesenteroides subsp. mesenteroides ATCC 8293
MRKYIAEFLGTFMLVFFGTGSVVYSAATTQSAITVGLAFGLSLAVAIYAFGHISGGHFNPAVSLAMAIQKRLPWVTFIGYVIAQLLGAIVASAAVYGGVTAYLKSSTVTTALSGQSMTVKQFVSLAGLGQTNFSDGSGWYAFAFELVLTFLFVLVIAIVTKLNNVPAPFIIGIWLAVLIVVVLPITGGAFNPARALAPAIFVQGKALTHVWVYLVADLLGGALAAFAANFLDKKEEVASTPKEVKETKKA

SEQ ID NO: 15627 - protein, 228 aa, Brucella suis 1330
MLNKLSAEFFGTFWLVFGGCGSAILAAAFPELGIGFLGVALAFGLTVLTMAYAVGGISGGHFNPAVSLSLTVAGRLPAKDLIPYWVAQVLGAIATAAILYVIASGKDGFSAGGLASNGYGELSPGGYSMMAGLLIEIILTAFFIIIILGSTSSLAPAGFAPIAIGFGLTLIHLVSIPVTNTSVNPARSTGVALFADTAALSQLWLFWVAPLVGAVIGAIIWKGLLGRD

SEQ ID NO: 15628 - protein, 231 aa, Pseudomonas fluorescens PfO-1
MSLFKRSVTELLGTFWLVLGGCGSAVIAASSPLGIGVLGVALAFGLTVLTMAFAIGHISGCHLNPAVSVGLVVGGRFPAKELPAYVIAQVLGGILAAALLYHIASGKEGFDIAAGLASNGYGEHSPGKYSMASGFVTELVMTAMFVVIILGATDKRAPAGLAPIAIGLALTLIHLISIPVTNTSVNPARSTGPALMVGGWAIAQLWMFWVAPLLGAVVGGVLYRWLGKEDS

SEQ ID NO: 15629 - protein, 232 aa, Streptococcus agalactiae 2603V/R
MDIFGEFLGTALLVLLGNGVVAGVVLPKTKNHNSGWIVITFGWGLAVAIAALVSGNISPAHLNPAVSLAFAIKGDLAWGTAILYMIAQIIGAMLGSLLVYLQFRPHYEAAENRADILGTFATGPALKDNFSNFLSEVLGTLVLVLTIFAIGKYNMPPGVGTMSVGMLVVGIGLSLGGTTGYAINPARDFGPRLLHALLPMKNKGDSDWTYSWIPIVGPMVGAILAALIFAMM

SEQ ID NO: 15630 - protein, 237 aa, Streptococcus agalactiae 2603V/R
MTQFLGEFLGTFILVLLGDGVVAGNVLSKTKEEGTGWTAIVFGWGIACTVAVYVSGLFSPAHLNPAVTLAMASIGAISWGQVIPFIIAQMLGAMVAATILWLHYYPHWKETKDSGLILASFSTGPAIRHTPSNLLGEIIGTAILVITIMAIGPSKVAAGLGPIIVGIVIFAVGFSLDPTTGYAINPARDLGPRLMHAILPIENKGNSDWSYAWIPVVGPIIGGVLGAILYNIALTLV

SEQ ID NO: 15631 - protein, 229 aa, Pseudomonas aeruginosa PAO1
MKQYGAEFFGTFWLVLGGCGSAVLAAGVPELGIGYLGVALAFGLSVLTMAYAIGPISGAHLNPAVSVGLWVGGRFPASQLLPYVVAQVLGGLAAGGVLYLIASGKAGFDLAAGFASNGYGEHSPGGYSLQAALVSEVVLTGMFLLIILGATSKRAPQGFAPIAIGLTLTLIHLISIPVTNTSVNPARSTAVALYVGDWAVSQLWLFWVAPILGAVLGALAYRLIGDKND

SEQ ID NO: 15632 - protein, 232 aa, Streptococcus agalactiae NEM316
MDIFGEFLGTALLVLLGNGVVAGVVLPKTKNHNSGWIVITFGWGLAVAIAVLVSGNISPAHLNPAVSLAFAIKGDLAWGTAILYMIAQIIGAMLGSLLVYLQFRPHYEAAENKADILGTFATGPALKDNFSNFLSEVLGTLVLVLTIFAIGKYNMPPGVGTMSVGMLVVGIGLSLGGTTGYAINPARDFGPRLLHALLPMKNKGDSDCTYSWIPIVGPMVGAILAALIFAMM

SEQ ID NO: 15633 - protein, 237 aa, Streptococcus agalactiae NEM316
MTQFLGEFLGTFILVLLGDGVVAGNVLSKTKEEGTGWTAIVFGWGIACTVAVYVSGLFSPAHLNPAVTLAMASIGAISWGQVIPFIIAQMLGAMVAATILWLHYYPHWKETKDSGLILASFSTGPAIRHTPSNLLGEIIGTAILVITIMAIGPSKVAAGLGPIIVGIVIFAVGFSLGPTTGYAINPARDLGPRLMHAILPIENKGDSDWSYAWIPVVGPIIGGVLGAILYNIALTLI

SEQ ID NO: 15634 - protein, 229 aa, Shewanella oneidensis MR-1
MSQKMAAEFLGTLWLVLGGCGSAVLAAAFPEVGIGLLGVSLAFGLTVLTMAFAIGHISGCHLNPAVSFGLWAGGRFPTSELLPYIIAQVAGGIAGAGVLYLIASGQEGFSLAAGFASNGFGEHSPGGYSMISVMICEIVMTLFFLLVILGSTDERAPKGFAPIAIGLCLTLIHLISIPISNTSVNPARSTGPALFVGDWAVSQLWLFWAAPIIGAILAGVIYRYFNAAK

SEQ ID NO: 15635 - protein, 234 aa, Clostridium tetani E88
MSAFMGELLGTMILILLGNGVVANNVLKHSKGEGSGWIVITTGWAIAVAIPVYIFGPISGAHFNPAVTIAFASIGQFSWADVPGYIIAQLVGAIIGATLVWLTYLPHWEATEDQATKLAAFSTAPAIKNTTANLITEIIGTFFLVFGILGVANTSMADGLAPLVVGLIILAAGVSLGGPTGYAINPARDLGPRIAHAILPIKGKGDSDWGYAWIPIVGPIIGGLIGAIFFNIMF

SEQ ID NO: 15636 - protein, 231 aa, Vibrio vulnificus CMCP6
MNKYLAELFGTFWLVLGGCGSAVLAAAFPDVGIGLLGVSLAFGLTVLTMAFAIGHISGCHLNPAVTIGLWAGGRFEAKEIVPYILAQVIGGVIAGGVLYTIASGQMGFDATSSGFASNGYGEHSPGGYSLTSALVTEVVMTMMFLLVILGATDQRAPQGFAPIAIGLCLTLIHLISIPVTNTSVNPARSTGVALYVGDWATAQLWLFWVAPILGALLGAVAYKLISGSNKD

SEQ ID NO: 15637 - protein, 240 aa, Lactobacillus plantarum WCFS1
MMKDPLALQLLGEFLGTFILILLGDGVVAGVTLNKSKAQNAGWVAITLGWGFAVTMGVYASSFMSPAHLNPAVSLGMAVAGKFPWAYVIPYSAAQIAGGVIGGLVVWLHYYPHWQATKDAGAILGIFATGPGIRRYFWNFISEVIGTFVLVFGLLAFTKGQFTAGLNPIVVGILIIAIGLSLGGTTGYAINPARDLGPRIAHAVLPIANKGTSDWAYSWVPIAGPLVGGALGALLFNVLP

SEQ ID NO: 15638 - protein, 216 aa, Lactobacillus plantarum WCFS1
MRKYLAEFLGTFMLVFLGTATVVIAKGDVLAIGLAFGLAITVSAYAFGGISGGHFNPAVTTAMLINRRIDAADAIGYIIAQIIGAIVASAAVKSFVSALGLSATLLGQTDFPKIGSGMAFFVEALVTFLFLMVILNVTSNDHGNADFAGLTIGVTLAFLIIVALNLTGGSLNPARSIGPAIFAGGSALSHLWVYILAPEVGAILAAFCARVMGSED

SEQ ID NO: 15639 - protein, 249 aa, Methanosarcina barkeri
MTVPNLMKRALAELVGTYVLVFLGTGSVITTVLLMEGWEAFPGNQFYIGIDIAAWFAIGMSFAIAITSMIYAFGHISGTHINPAVSLALWATGRFPTKDLPAYIISQLIGASLASFTLVAILGMRAVDAGLGATSMFYGVGYGQAIFCEAVCTFFLMLTIMGTAVDRRAPPGFAGLAIGLVVAADVIVVGNITGSSLNPARTFGPYLAESLLGGANLWAQFPIYIIGPIAGALVAAFLYDFIAEPKKAD

SEQ ID NO: 15640 - protein, 276 aa, Oceanobacillus iheyensis HTE831
MSEFIAELVGTMILIIFGGGVVAGVVLKKSKAEGTGWVLITLGWGLAVALGVYAVGNFTGAHINPAVTIGFAAVGDFPWSKVPLYILAQVIGAIIGAIIVFLNYLPHWKVTESKEDKLGVFATGPAIRSPFSNLISEMIGTFALLLGLMFIGSNDFTEGLNPLIVGALIAAIGMSLGGTTGYAINPARDLGPRIAHAILPIPGKGSSDWGYAWIPVVGPIIGGVYGALFYDSVFLANYTFPFWVMTIFVIVLFIGAAVSELKTGSNPAEKMNQKLR

SEQ ID NO: 15641 - protein, 285 aa, Pseudomonas syringae pv. tomato str. DC3000
MTIALKQPTLTGQCVAEFLGTALMIFFGTGCVAALKVAGATFGLWEICIIWGMAVSMGIYLSAGISGAHLNPAVSIALSLFAGFEKRKLPFYISAQIAGAFCGAGLVYLLYISLFFDFEHAHHIIRGSEQSLELASVFSTYPNPAISVGQAFLVEVVITTILMGVIMALGDDNNGLPRGALAPLLIGLLVAVIGSAMGPLTGFAMNPARDFGPKLMTFFAGWGEIAFTGGRDIPYFLVPIFAPILGACLGAAGYRALIARHLPSTVTVENEKEAPVVRGKVQASS

SEQ ID NO: 15642 - protein, 232 aa, Vibrio parahaemolyticus RIMD 2210633
MNKYLAEAFGTFWLVLGGCGSAVLAAGFPDVGIGLLGVALAFGLTVLTMAFAIGHISGCHLNPAVTVGLWAGGRFDTKDVAPYIIAQVIGGLIAGGILYVIATGQAGFDVVGSGFAANGYGEHSPGQYSMLAALVSEIVMTMMFLIVIMGATDKRAPQGFAPIAIGLCLTLIHLISIPVTNTSVNPARSTAVAMYVGDWAVSQLWLFWVAPIVGGVLGAVIYKNLLGKESND

SEQ ID NO: 15643 - protein, 274 aa, Bacillus subtilis subsp. subtilis str. 168
MTAFWGEVIGTMLLIIFGAGVCAGVNLKKSLSFQSGWIVVVFGWGLGVAMAAYAVGGISGAHLNPALTIALAFVGDFPWKEVPVYIAAQMIGAIIGAVIIYLHYLPHWKSTDDPAAKLGVFSTGPSIPHTFANVLSEVIGTFVLVLGILAIGANQFTEGLNPLIVGFLIVAIGISLGGTTGYAINPARDLGPRIAHAFLPIPGKGSSNWKYAWVPVVGPILGGSFGGVFYNAAFKGHITSSFWIVSVILVVVLLGLYVYTKSHSAKTLSNSKYI

SEQ ID NO: 15644 - protein, 246 aa, Archaeoglobus fulgidus DSM 4304
MTMTLAKRFTAEVVGTFILVFFGPGAAVITLMIANGADKPNEFNIGIGALGGLGDWFAIGMAFALAIAAVIYSLGRISGAHINPAVTIALWSIGRFPGREVVPYIVAQFIGAALGSLLFLACVGPAAATVGGLGATAPFPGIGYGQAILTEAIGTFLLMLVIMGVAVDERAPPGFAGLVIGLTVGGIITTIGNITGSSLNPARTFGPYLGDSLMGINLWQYFPIYVIGPIVGAVAAAWLYNYLAKE

SEQ ID NO: 15645 - protein, 254 aa, Borrelia burgdorferi B31
MNYTKFQEFISEFLGTFILLALGTGSVAMTVLFSSSPEIPGEIIKGGYTNIVFGWGLGVTFGIYTAARMSGAHLNPAVSIGLASVGKFPVSKLLHYIVAQILGAFTGALMTLVVFYPKWIEMDPGLENTQGIMATFPAVPGFLPGFIDQIFGTFLLMFLISVVGDFTKKHSDNPFIPFIVGAVVLSIGISFGGMNGYAINPARDLGPRILLLFAGFKNHGFNNLSIVIVPIIGPIIGAILGATIYEFTLKNNKD

SEQ ID NO: 15646 - protein, 240 aa, Bradyrhizobium japonicum USDA 110
MDMKKYAAEAIGTFWLTFAGCGSAVIAAGFPQVGIGLVGVSLAFGLSVVTMAYAIGHISGCHLNPAVTVGLAAGGRFPAGQILPYVIAQVCGAIVAAELLYIIASGAPGFDVTKGFASNGYDAHSPGQYSMMACFLTEVVMTMMFLFIIMGATHGRAPAGFAPLAIGLALVMIHLVSIPVTNTSVNPARSTGPALFVGGWAMAQLWLFWVAPLIGGALGGVIYRWLSEEPTGVVAGAKAA

SEQ ID NO: 15647 - protein, 228 aa, Brucella melitensis 16M
MLNKLSAEFFGTFWLVFGGCGSAILAAAFPELGIGFLGVALAFGLTVLTMAYAVGGISGGHFNPAVSLGLTVAGRLPAKDLIPYWVAQVLGAIAAAAILYVIASGKDGFSAGGLASNGYGELSPGGYSMMAGLLIEIILTAFFIIIILGSTSSLAPAGFAPIAIGFGLTLIHLVSIPVTNTWVNPARSTGVALFADTAALSQLWLFWVAPLVGAVIGAIIWKGLLGRD

SEQ ID NO: 15648 - protein, 221 aa, Enterococcus faecalis V583
MKKAIAECLGTFILVFFGTGTAVLGNGMEGIGTTGIALAFGLTIVAAAYSIGTISGAHLNPAVSIGMWLNKRMTTMELIYYVVGQIVGGLIASFALLSILKGAGKSIENLGQNGVGELSVAGALTVEIILTFIFVLVVMTVTSAKKGNASLAGIVIGLTLTMIHLVGIPLTGTSVNPARSIAPAVFAGGSALSELWIFIVAPLIGGLLAALVAKFVLDTEE

SEQ ID NO: 15649 - protein, 222 aa, Bacteroides thetaiotaomicron VPI-5482
MIGTMVLVLMGCGSAVFAGSMAGTVGAGVGTVGVALAFGLSVVAMAYAIGGISGCHINPAITLGVFLSGRMNGKDAGMYMLFQVIGAIIGSAILYALVTTGGHDGPTATGSNGFGDGEMLQAFIAEVVFTFIFVLVVLGSTDPKKGAGAFAGLAIGLSLVLVHIVCIPITGTSVNPARSIGPALFQGGEALSQLWLFIVAPFVGAAVSALVWNYFGDKNEKK

SEQ ID NO: 15650 - protein, 278 aa, Bacillus cereus ATCC 14579
MWRDTMSAFLGELIGTALLIVLGGGVCAGVSLKKSFAKDSGWIVITMGWGLAVAVAAYAVGSISGAHLNPALTIGLAFKGAFPWSDVPGYIVAQMIGAIIGAVIVYLHYLPHWKETEDPGTKLGVFATGPAIPNTFANLLSEMIGTFVLVFGILAIGANKFADGLNPFIVGFLIVSIGLSLGGTTGYAINPARDLGPRIAHFFLPIAGKGGSNWKYAWIPVVGPILGGSLAGLFHQVVFEGKQNSALIYVIIATVIVLAISYMTSKKSGSNTNSRKVA

SEQ ID NO: 15651 - protein, 221 aa, Bacillus cereus ATCC 14579
MLKKAIAEFIGTFVLVLFGTGVAVTGGGIEGIGILGIAMAFGLSIVAMAYSIGTISGCHINPAVSVAMFINKRMNAMELCYYVLAQILGGLLGTATLVTILKSAKTPLDNLGQNGFGTLGLSGAFLVEFILTFVFILVIVAVTGKKGSSSLAGLVIGFTLVLIHLLGIPLTGTSVNPARSIAPALFVGGEALSQLWVFIVAPILGGIFAAIVGKFILNTEK

SEQ ID NO: 15652 - protein, 281 aa, Streptomyces avermitilis MA-4680
MAERLKRLGLIGELSAEFAGTMILILFGAGVVAQVVAGGALTTPPGGLGNHDSIAWAWGIGVTMGVYVAARLSGAHLNPAVTVTLAAFKGFPWSKVAPYAVAQTLGAFVAALLVRWNYTEALAKADPGHTLKTQGVFSTLPANGNPNLPVHEWGAFRDQVIGTAILLLLILAITDLLNTPPGANLAPFIIGLVVVAIGMAWGTNAGYAINPARDFGPRLASFITGYGSAWRDQYGNFYFWVPIIGPLIGGLLGGVVYKFFVGRFLPTAEPEPPGRVPTPEA

SEQ ID NO: 15653 - protein, 249 aa, Streptomyces avermitilis MA-4680
MSNGDIFVGEIIGTAILILFGAGVCAAVTLRYSKARASGWVVIAFGWGFGVLAGAYTAAPLSGGHLNPAVTIGIAIDTGTWGKVWIYLLGQLVGAVLGAVLAYLVYLAQFQANVRKEGTTEGTADEPVPTLGIFSTIPEIRNPVANLITEIIATIALVLPILAFGLTKGLGESGITVLIVSLLVVGIGLSLGGPTGYAINPARDLGPRIVHTFLPIPNKGTSDWGYAWIPVVGPLIGGALAGLIYHVAF

SEQ ID NO: 15654 - protein, 234 aa, Thermotoga maritima
MSVYLAEFLGTMLLIILGDGVVANVVLKKSKGHNSGWIVITTGWGLAVAMSVYLVGRISGAHINPAVTIGLAFIGQFPWSKVPGYIFSQILGAFVGAILVYLTYLPHWKETDDPDAKLAVFCTGPAVRKYGANLLTEIIGTMVLLMGVLGIGANKLADGLNPLLVGFLVWSIGLSLGGPTGYAINPARDFGPRLAHAILPIPGKRDSDWSYSWVPIIGPIIGGILGASLYNWLF

SEQ ID NO: 15655 - protein, 228 aa, Brucella melitensis biovar Abortus
MLNKLSAEFFGTFWLVFGGCGSAILAAAFPELGIGFLGVALAFGLTVLTMAYAVGGISGGHFNPAVSLGLTVAGRLPAKDLIPYWVAQVLGAIAAAAILYVIASGKDGFSAGGLASNGYGELSPGGYSMMAGLLIEIILTAFFIIIILGSTSSLAPAGFAPIAIGFGLTLIHLVSIPVTNTSVNPARSTGVALFADRAALSQLWLFWVAPLVGAVIGAIIWKGLLGRD

SEQ ID NO: 15656 - protein, 272 aa, Thermus aquaticus
MSPFLGELIGTALLIIFGAGVCAGVNLKKSYAANSGWIVITMGWGLAVAVAVYAVGQYSGAHLNPALTVALALAGDFPWKDVPGYIAAQVLGAVMGAVIVYLHYWPHWKETDDPGVKLGVFATGPAVPNAAANLLSEIIGTFVVGVAILAIGANQFADGLNPFVVGFLIVAIGLSLGGTTGYAINPARDFGPRLAHFLLPIPGKGSSNWAYAWVPIVGPLLGGALGSLVYKAVFLGKPTGALWGVLAATAVVLAAAKMAKGKTANAASRRSL

SEQ ID NO: 15657 - protein, 257 aa, Rhizobium etli
MKKYVCEFFGTFTLVFLGCGTLLYMRQEVGLLGVALAFGTTVVAMAYTIGPVSGAHLNPAVSLGFLVSRRLRVWDFLAYVSAQCAGAIAAAGTLYLIAMNKVGGYDITLEGFAQTGWVVYGWRAAFLFEFIATFLFVTVFLKCTAGRGAVARLAIGLALVAIHLGGITVSGSSVNPARSIGPALFAGGAALSQLWLYICAPMLGAIAAGLLQLRGIVASSEPQSLRQFESREMTSDISSPVSFFRHRRRGIPKRESH

SEQ ID NO: 15658 - protein, 249 aa, Vitis vinifera
MPKIAFGRFDDSFSLASFKAYLAEFHPTILFVFAGVGSVMAYNKLTSDAALDPAGLVAVAVAHGFALFVAVAISANISGGHVNPAVTFGLVVGGQITILTGILYWIAQLVGSILACFLLKLVTGGLTTPVHSLGAGVGVIDAIVFEIVITFALVYTVYATAVDPKKGSLGIIAPIAIGLVVGANILAAGPFSGGSMNPARSFGPAVVSGDFKDNWIYWVGPLIGGGMGGSVYAIMYMGSDHQPLASSEF

SEQ ID NO: 15659 - protein, 264 aa, Pinus taeda
MAIEILLGVAPMEEGRRGRSCGSLLPSVRKVVAEFIGTFFLIFVGCGSVVVDKISNGSITHLGVSLVWGMAAMIVIYSIGHISGAHLNPAVTLALAAVKRFPWVQVPGYIVAQVFGSISAGFLLRFMFGEVAFMGATVPSGSEMQSFALEIITTSLLVFVVSAVATDTKAVGELGGLAIGATIAMNVAISGPISGASMNPARTIGSAVAGNKYTSIWVYMVGPVIGALMGAMSYNMIRETKMSEREIMKSGSFVKDMGSSESTA

SEQ ID NO: 15660 - protein, 291 aa, Blumeria graminis
MPTDGIPPMLGQSSPLKLRKYEGRLSDDNFRNHVIAAIGEFLGTTLFLFYGFLAAQIINSKPDNLSDAPSLLQLIFVASAFGVSGAVNVWLFYRVSGGHLNPAITIGLTLIGAVPVTRALLLVSVQLLGGILAASLVLAVTPGSLNVQTALGNATSVKQGFFLEMILTATLVLTVFMLAVEKHRTTPLAPLGIGLILFLDVLLAAQFSGGSLNPARSFGPAVVELNFATYHWIYWFGPIAGAVLAAAIFKVLKFLAYETAVAGQDHDGLDVYRLIDDAGGHEVDREIQLEV

SEQ ID NO: 15661 - protein, 251 aa, Haematobia irritans exigua
MVEKLDMSAVVGVKDITDNKKIWRQLMAELIGTFFLVVIGVGSCTGGSEWSPSIPQIAFTFGLTVATLAQAIGHISGCHINPAVTVGFLIVGEMSIIKSVLYIAVQCVGAIAGAAVIKVGVSEAVSGLDLGVSSFSSTLTVGQAVLIEALITFILVVVVKGVSDPGRTDIKGSAPLAVGLSIAAGHLCAIKLTGASMNPARSFGPAVVQNMWIDHWVYWVGPIVGAIVAALLYKFVFKVRKGDDEANSYDF

SEQ ID NO: 15662 - protein, 237 aa, Azotobacter vinelandii
MNRYGAEFLGTFWLVLGGCGSAVLAAAFPEVGIGLHGVSLAFGLTVLTMAFAIGHISGCHLNPAVSIGLWAGGRFPAKDLLPYIVAQVLGGIAAGAVLYVIASGTAGFDVTKGFASNGYGAHSPGGYSLLSALVTEVVMTLFFLLIILGATDKRAPAGFAPIAIGLALTLIHLISIPVTNTSVNPARSTGVAVFAGGWAIAQLWLFWIAPIVGALLGAAAYRLIAEQPGLASQPARG

SEQ ID NO: 15663 - protein, 248 aa, Mesembryanthemum crystallinum
MAGLAFGRFDDSFSWASIKAYIAEFISTLLFVFAGVGSCIAFNKLTADAALSPSGLVAVAVCHAFALFVAVSVGANISGGHVNPAVTFGLAVGGQITILTGVLYWIAQLAGSVAGCFLLKAATGGLTTPIHSVASGVGAIEAVVMEIIITFALVYTVYATAVDPKRGSVGTIAPIAIGFIVGANILAAGPFSGGSMNPARSFGPALASGDFHDHWVYWVGPLIGGGLAGLTYSNVFMHHEHAPLSSEY

SEQ ID NO: 15664 - protein, 206 aa, Mesembryanthemum crystallinum
LTSDGALDPAGLVAVALAHAFALFVGVSMAANVSGGHLNPAVTFGLAIGGHITVLTGLIYWVAQVLGSIVACLLLKFVTNGMSIPAHGVASGMNAFEGIVMEIVITFALVYTVYATAADPKKGTIGTIAPIAIGFIVGANILAAGPFSGGSMNPARSFGPAIVSGDLSQSWIYWVGPLIGGGLAGLVYGDVFIGSYAPLPTPENYP

SEQ ID NO: 15665 - protein, 247 aa, Spinacia oleracea
MAIAFGRFDDSFSWASIKAYIAEFISTLLFVFAGVGSCIAFAKLTEDAALSPSGLVAVAVCHAFALFVAVSVGANISGGHVNPAVTFGLALGGQITILTGILYWIAQCAGSVAACLLLKASTGGLATPIHSVAAGVGSIEAVVMEIIITFALVYTVYATAVDPKKGSIGTIAPIAIGFIVGANILAAGPFSGGSMNPARSFGPAVASLDFSDHWVYWVGPLVGGGLAGLIYGNVFMQDDHAPLSNEY

SEQ ID NO: 15666 - protein, 282 aa, Atriplex canescens
MSKEVISEEGQVHQHGKDYVDPPPAPFFDMGELKLWSFWRAAIAEFIATLLFLYITVATVIGYKKETDPCASVGLLGIAWSFGGMIFVLVYCTAGISGGHINPAVTFGLFLARKVSLLRALVYMIAQCAGAICGVGLVKAFMKGPYNQFGGGANSVALGYNKGTAFGAELIGTFVLVYTVFSATDPKRSARDSHVPILAPLPIGFAVFMVHLATIPITGTGINPARSFGAAVIYNKKRVWDDHWIFWVGPFVGALAAAAYHQYVLRAAAIKALGSFRSNPTN

SEQ ID NO: 15667 - protein, 255 aa, Cicadella viridis
MAADKSVDNTKKIIGIDDITDTKTIWRCLAAELIGTLLLVLIGTGSCTGVQISEGDVVVRIALTFGFIIATMVQCIGHVSGCHINPAVTCGLLVTGHISILKAIFYIIVQCVGAIAGSAILKVITPAEFRGTLCMTSLAPGVTPPMGFLVEACITFVLILLVQSVCDDRRKNLGNAAPVAVGLAITCCHLAAIKYTGSSMNPARSFGPAVNGDDNWANHWVYWAGPIVGGVVAGITYRALFRARKPEEEASSYDF

SEQ ID NO: 15668 - protein, 248 aa, Gossypium hirsutum
MAGIAFGRFDDSFSLGTVKAYLAEFISTLVFVFAGVGSAIAYNKLTTDAALDPDGLVAIAVCHGFALFVAVAIGANISGGHVNPAVTFGLALGGQITILTGIFYWIAQLLGSIVACFLLKAVTGGLTVPIHGLGAGVGAIQGVVMEIIITFALVYTVYATAADPKKGSLGTIAPIAIGFIVGANILAAGPFSGGSMNPARSFGPAVASGDFNGIWIYWVGPLIGGGLSGLIYGNVFMNSDHAPLSNDF

SEQ ID NO: 15669 - protein, 105 aa, Gossypium hirsutum
LPLGGQITILTGIFYWIAQLLGSIVACFLLKAVTGGLTVPIHGLGAGVGAIQGVVMEIIITFALVYTVYATAADPKKGSLGTIAPIAIGFIVGANILAAGPFSGG

SEQ ID NO: 15670 - protein, 187 aa, Carica papaya
INPAVTFGLLLARKLSLTRAIFYMVMQCLGAICGAGVVKGFEGSATFELKGGGANVRQPWIHKGDGLGAEIVGTFVLVYTVLSATDAKRNARDSHVPILAPLPIGFAVFLVHLATIPITGTGINPARSLGAAIIFNRDKAWDDHWIFWVGPFIGAALAALYQQVVIRAIPFKSKCKFPKWVSIKYVI

SEQ ID NO: 15671 - protein, 250 aa, Arabidopsis thaliana
MVKIEVGSVGDSFSVSSLKAYLSEFIATLLFVFAGVGSAVAFAKLTSDGALDPAGLVAIAIAHAFALFVGVSIAANISGGHLNPAVTLGLAIGGNITLITGFFYWIAQCLGSIVACLLLVFVTNGKSVPTHGVSAGLGAVEGVVMEIVVTFALVYTVYATAADPKKGSLGTIAPIAIGFIVGANILAAGPFSGGSMNPARSFGPAVVSGDLSQIWIYWVGPLVGGALAGLIYGDVFIGSYEAVETREIRV

SEQ ID NO: 15672 - protein, 250 aa, Arabidopsis thaliana
MVKIEIGSVGDSFSVASLKAYLSEFIATLLFVFAGVGSALAFAKLTSDAALDPAGLVAVAVAHAFALFVGVSIAANISGGHLNPAVTLGLAVGGNITVITGFFYWIAQCLGSIVACLLLVFVTNGESVPTHGVAAGLGAIEGVVMEIVVTFALVYTVYATAADPKKGSLGTIAPIAIGFIVGANILAAGPFSGGSMNPARSFGPAVVSGDFSQIWIYWVGPLVGGALAGLIYGDVFIGSYAPAPTTESYP

SEQ ID NO: 15673 - protein, 250 aa, Arabidopsis thaliana
MAGVAFGSFDDSFSLASLRAYLAEFISTLLFVFAGVGSAIAYAKLTSDAALDTPGLVAIAVCHGFALFVAVAIGANISGGHVNPAVTFGLAVGGQITVITGVFYWIAQLLGSTAACFLLKYVTGGLAVPTHSVAAGLGSIEGVVMEIIITFALVYTVYATAADPKKGSLGTIAPLAIGLIVGANILAAGPFSGGSMNPARSFGPAVAAGDFSGHWVYWVGPLIGGGLAGLIYGNVFMGSSEHVPLASADF

SEQ ID NO: 15674 - protein, 250 aa, Arabidopsis thaliana
MAGVAFGSFDDSFSLASLRAYLAEFISTLLFVFAGVGSAIAYAKLTSDAALDTPGLVAIAVCHGFALFVAVAIGANISGGHVNPAVTFGLAVGGQITVITGVFYWIAQLLGSTAACFLLKYVTGGLAVPTHSVAAGLGSIEGVVMEIIITFALVYTVYATAADPKKGSLGTIAPLAIGLIVGANILAAGPFSGGSMNPARSFGPAVAAGDFSGHWVYWVGPLIGGELAGLIYGNVFMGSSEHVPLASADF

SEQ ID NO: 15675 - protein, 286 aa, Brassica rapa
MEGKEEDVRVGANKFPERQPIGTSAQSDKDYKEPPPAPLFEPGELASWSFWRAGIAEFIATFLFLYITVLTVMGVKRSPSMCASVGIQGIAWAFGGMIFALVYCTAGISGGHINPAVTFGLFLARKLSLTRAVYYIVMQCLGAICGAGVVKGFQPKQYQALGGGANTVAPGYTKGSGLGAEIIGTFVLVYTVFSATDAKRNARDSHVPILAPLPIGFAVFLVHLATIPITGTGINPARSLGAAIIFNKDNAWDDHWVFWVGPFIGAALAALYHVIVIRAIPFKSRS

SEQ ID NO: 15676 - protein, 248 aa, Raphanus sativus
MAGVAFGSFDDSFSLASLRAYLAEFISTLLFVFAGVGSAIAYAKLTSDAALDTPGLVAIAVCHGFALFVAVAIGANISGGHVNPAVTFGLAVGGQITLITGVFYWVAQLLGSTAACFLLKYVTGGLAVPTHSVAAGVGAIEGVVMEIIITFSLVYTVYPTAADPKKGSLGTIAPLAIGLIVGANILAAGPFSGGSMNPARSFGPAVAAGDFSGHWVYWVGPLIGGGLAGVTYGNVFMTSEHVPLASEF

SEQ ID NO: 15677 - protein, 136 aa, Prunus persica
GGHVNPAVTFGAFIGGNISLVRSVLYWIAQLLGAVIACLLLRFATGGLETSAFSLSSGVSVWNAVVLEIVITFGLVYTVYATALDPKKGNIGIIAPIVIGFIVGANILVAGAFDGASMNPAVSFGPAVVSWTWTNH

SEQ ID NO: 15678 - protein, 225 aa, Mesorhizobium loti
MKTYLAEVLGTFLLVFIGTASVVTGGFGGALPLGQEGIGLAFGIGLIAAAYAIGPISGAHLNPAVTLGVFLAGRLPAKDVIPYWIAQIIGAILASLALWIIVSGQAGGHTGGFGANGWDETKWGMSSAFLWELIGTFTFVTVILGVTAEKHSTAFAGLVIGLTLAGIHFAMIPVTGTSVNPARSIGPALFTGGAALSQLWLFIVAPLIGGAIAGVVAKARIFEKD

SEQ ID NO: 15679 - protein, 232 aa, Sinorhizobium meliloti
MFKKLCAEFLGTCWLVLGGCGSAVLASAFPQVGIGLLGVSFAFGLTVLTMAYTVGGISGGHFNPAVSLGLAVAGRVPAASLVSYVIAQVAGAIIAAAVLYVIATGKADFQLGSFAANGYGEHSPGGYSLTAALVTEVVMTFFFLIIILGSTHRRVPAGFAPIAIGLALTLIHLVSIPVTNTSVNPARSTGQALFVGGWALSQLWLFWIAPLFGAAIAGIVWKSVGEEFRPVD

SEQ ID NO: 15680 - protein, 228 aa, Sinorhizobium meliloti
MFRKLSVEFLGTFWLVLGGCGSAVLAAAFPEVGIGLLGVSFAFGLTVLTMAYAVGGISGGHFNPAVSVGLAVAGRMPPASLVGYILAQVTGAIAAAAVLYVIASGKADFQLGGFAANGYGEHSPGGYSLTAALVTEVVMTAFFLLIILGSTHSRVPVGFAPIAIGLGLTLIHLVSIPVTNTSVNPARSTGQALFVGDWAISQLWLFWVAPLIGAVIAGIVWKIVGDDS

SEQ ID NO: 15681 - protein, 142 aa, Cicer arietinum
AQLLGSIVASLLLVFATGLSVPAFSLSAGVGVGPALVLEIVLTFGLVYTVYATAVDPKKGNIGIIAPIAIGFIVGANILVGGAFTGASMNPAVSFGPAVVSWSWSNHWIYWAGPLIGGGLAGLIYEVVFISHTHEQLPTTDY

SEQ ID NO: 15682 - protein, 248 aa, Glycine max
MGGIAFGRLDDSFSLTSIKAYIAEFHSTLLFVFAGVGSAIAYGKLTSDAALDPAGLLAVAICHGFALFVAVSVGANISGGHVNPAVTFGLALGGHITILTGFFYWIAQLLGSIVACFLLNYVTGGLPTPIHSVASGVGAVEGVVTEIIITFGLVYTVYATAADPKKGSLGTIAPIAIGFIVGANILAAGPFSGGSMNPARSFGPAVVSGDFHDNWIYWVGPLIGGGLAGLIYGNVFIRSDHAPLSSEF

SEQ ID NO: 15683 - protein, 248 aa, Glycine max
MAGIAFGSFNDSFSLASIKAYIAEFISTLLFVFAGVGSAIAYAKLTSDAPLDPTGLVAVAICHGFALFVAVSVGANISGGHVNPAVTFGLALGGHITILTGLFYWIAQLLGSIVACFLLNYVTGGLPTPIHSVASGVGAVEGVVTEIIITFGLVYPVYATAADPKKGSLGTIAPIAIGFIVGANILAAGPFSGGSMNPARSFGPAVVSGDFHDNWIYWVGPLIGGGLAGLIYGNVFIRSDHAPLSSEF

SEQ ID NO: 15684 - protein, 250 aa, Glycine max
  unsure (1)..(250): unsure at all Xaa locations
MGGIAFGRLDDSFSLTSIKAYIAEFHSTLLFVFAGVGSAIAYGKLTSDAALDPAGLLAVAICHGFALFVAVSVGANISGGHVNPAVTFGLALGGHILIXLTGLYYWIAQLLGSIVACFLLNYVTGGLPTPIHSVAPGVGAVEGVVTEIIITFGLVYTVYATAADPKKGSLGTIAPIAIGFIVGXANILAAGPFSGGSMNPARSFGPAVVSGDFHDNWIYWVGPLIGGGLAGLIYGNVFIRSDHAPLSSEF

SEQ ID NO: 15685 - protein, 247 aa, Glycine max
MAGIAFGSFNDSVSFASIKAYIAEFISTLLFVFAGVGSAIAYAKLTSDAALDPTGLVAVAICHGFALFVAVSVGANISGGHVNPAVTFGLALGGHITILTGLFYWIAQLLGSIVASLLLKFVTGYDTPIHSVAAGIGAGEGVVTEIIITFGLVYTVYATAADPKKGSLGTIAPIAIGFIVGANILAAGPFSGGSMNPARSFGPAVVSGDFHDNWIYWVGPLIGGGLAGLIYTYAFIPTNHAPLATEF

SEQ ID NO: 15686 - protein, 253 aa, Glycine max
  unsure (1)..(253): unsure at all Xaa locations
MVKITLGTFDDSFGVASLKAYLAEFHATLIFVFAGVGSAIAYNELTKDAALDPTGLVAVAVAHAFALFVGVSVAANISGGHLNPAVTFGLAIGGNITLITGFLYWIAQLLGSIVACLLLNFITAKSIPSHAPATGVNDFQAVVFEIVITFGLVYTVYATAADPKKGSLGIIAPIAIGFVVGANILAAGPFSGGSMNPARSFGPXAVVSGDFAANWIXYWVGPLXLGGGLAGLIXYGDVFIGPICGCPTSETYP

SEQ ID NO: 15687 - protein, 227 aa, Glycine max
  unsure (1)..(227): unsure at all Xaa locations
MVKITLGTFDDSFGVASLKAYLAEFHATLIFVFAGVGSAIAYXRAYKRCSLGSNGAGGHLNPAVTFGLAIGGNITLITGFLYWIAQLLGSIVACLLLNFITAKSIPSHAPATGVNDFQAVVFEIVITFGLVYTVYATAADPKKGSLGIIAPIAIGFVVGANILAAGPFSGGSMNPARSFGPAVVSGDFAANWIYWVGPLIGGGLAGLIYGDVFIGSYAAVPASETYP

SEQ ID NO: 15688 - protein, 249 aa, Medicago sativa
MPIRNIAVGTPQEATHPDTLKAGLAEFISTFIFVFAGSGSGIAYNKLTNDGAATPAGLISASIAHAFALFVAVSVGANISGGHVNPAVFGAFVGGNITLLRGIVYIIAQLLGSIVCSALLVFVTASSVPAFGLSEGVGVGPALVLEIVMTFGLVYTVYATAVDPKKGNIGIIAPIAIGFIVGANILVGGAFTGASMNPAVSFGPAVVSWSWSNHWVYWAGPLIGGGIAGLVYEVLFINSTHEQLPTTDY

SEQ ID NO: 15689 - protein, 250 aa, Medicago truncatula
MPIRNIAVGTPQEATHPDTLKAGLAEFISTFIFVFAGSGSGIAYNKLTNDGAATPAGLISASIAHAFALFVAVSVGANISGGHVNPAVTFGAFVGGNITLLRGIVYIIAQLLGSIVASALLVFVTASSVPAFGLSEGVGVGPALVLEIVMTFGLVYTVYATAVDPKKGNIGIIAPIAIGFIVGANILVGGAFTGASMNPAVSFGPAVVSWSWSNHWVYWAGPLIGGGIAGLVYEVLFINSTHEQLPTTDY

SEQ ID NO: 15690 - protein, 256 aa, Phaseolus vulgaris
MATRRYSFGRTDEATHPDSMRASLAEFASTFIFVFAGEGSGLALVKIYQDSAFSAGELLALALAHAFALFAAVSASMHVSGGHVNPAVTFGALIGGRISVIRAVYYWIAQLLGSIVAALVLRLVTNNMRPSGFHVSPGVGVGHMFILEVVMTFGLMYTVYGTAIDPKRGAVSNIAPLAIGLIVGANILVGGPFDGACMNPALAFGPSLVGWQWHQHWIFWVGPLLGAALAALVYEYAVIPIEPPPHHHQPLATEDY

SEQ ID NO: 15691 - protein, 256 aa, Phaseolus vulgaris
MATRRYSFGRTDEATHPDSMRASLAEFASTFIFVFAGEGSGLALVKIYQDSAFSAGELLALALAHAFALFAAVSASMHVSGGHVNPAVSFGALIGGRISVIRAVYYWIAQLLGSIVAALVLRLVTNNMRPSGFHVSPGVGVGHMFILEVVMTFGLMYTVYGTAIDPKRGAVSYIAPLAIGLIVGANILVGGPFDGACMNPALAFGPSLVGWQWHQHWIFWVGPLLGAALAALVYEYAVIPIEPPPHHHQPLATEDY

SEQ ID NO: 15692 - protein, 169 aa, Phaseolus vulgaris
FSTCIFVFVGEGSVLALNHIYKEPGSSATELVVVAVAHAFALFAAISISAHVSGGHVNPAVTFGALLGGRISVLKALYYWIAQILGSIVAALLLRLVTNNMRPEGFGLSSGVGAVHGLILEISLTFGLMYTVYATAIDPKRGANSTIAPLAIALVVGANILAGGPFDGA

SEQ ID NO: 15693 - protein, 250 aa, Pisum sativum
MPIRNIAIGTPQEATHPDTLKAGLAEFISTFIFVFAGSGSGIAYNKLTDNGAATPAGLISASIAHAFALFVAVSVGANISGGHVNPAVTFGAFVGGNITLLRGIVYIIAQLLGSIVASALLVFVTASSVPAFALSAGVGVGPALVLEIVMTFGLVYTVYATAVDPKKGNIGIIAPIAIGFIVGANILVGGAFTGASMNPAVSFGPAVVSWSWANHWIYWAGPLIGGGLAGLIYEVLFINSTHEQLPTTDY

SEQ ID NO: 15694 - protein, 247 aa, Trifolium repens
NIAVGTPAEATHPDTLKAGLAELISTFIFVFAGSGSGIAYNKLTDNGAASPAGLISASIAHAFALFVAVSVGANISGGHVNPAVTFGAFVGGNITLFRGIVYIIAQLIGSVLASLLLVFVTASSVPAFALSEGVGIGPALVLEIVMTFGLVYTVYATAVDPKKGNIGIIAPIAIGFIVGANILVGGAFTGASMNPAVSFGPAVVSWSWSNHWIYWAGPLIGGGIAGIIYEVLFISHTGHEQLPTTDY

SEQ ID NO: 15695 - protein, 181 aa, Oryza sativa (indica cultivar-group)
HINPAVTFGLFLARKVSLVRAILYIVAQCLGAICGVGLVKAFQSAYFNRYGGGANTLAAGYSKGTGLAAEIIGTFVLVYTVFSATDPKRNARDSHVPVLAPLPIGFAWFMVQLATIPITGTGINPARTTGPAVIFNNEKAWHNQWIFWVGPFVGAAIAAFYHQYILRAGPIKALGSFRSNA

SEQ ID NO: 15696 - protein, 252 aa, Oryza sativa (japonica cultivar-group)
MPVSRIAVGAPGELSHPDTAKAAVAEFISMLIFVFAGSGSGMAFSKLTDGGGTTPSGLIAASLAHALALFVAVAVGANISGGHVNPAVTFGAFVGGNISLVKAVVYWVAQLLGSVVACLLLKIATGGAAVGAFSLSAGVGAWNAVVFEIVMTFGLVYTVYATAVDPKKGDLGVIAPIAIGFIVGANILAGGAFDGASMNPAVSFGPAVVTGVWDNHWVYWLGPFVGAAIAALIYDIIFIGQRPHDQLPTADY

SEQ ID NO: 15697 - protein, 248 aa, Daucus carota
MVKLAIGSVGDSFSAVSLKSYLAEFIATLLFVFAGVGSAIAYGHLTADAALDPAGLVAIAIAHAFALFVGVSMAANISGGHLNPAVTLGLAIGGNITIITGLFYWIAQCLGSTVACFLLKFVTAGKAIPTHGVGAGLGAAEGVVFEIVITFALVYTVYATAADPKKGSLGTIAPIAIGFIVGANILAAGPFSGGSMNPARSFGPAVASFDFSGHWIYWVGPLIGGGLAGLVYGDVFIGSYAPIAEDYA

SEQ ID NO: 15698 - protein, 226 aa, Petroselinum crispum
MVKIAIGSIGDSFTHGSLKCYLAEFIATLLFVFAGVGSAIAFNNLTADAGLDPAGLVAIAVAHAFALFVGVSIAANISGGHLNPAVTFGLAVGGHITLITGFFYWIAQLLGATVASFLLIFVNGGKAVPIHGVGAGLGAAEGVVFEIIITFALVYTFYATAADPKKGSLGTIAPIAIGFIVGANILAAGPFSGGSMNPARHSGQLLLAETFLDTGSTGLVLSLEEA

SEQ ID NO: 15699 - protein, 250 aa, Lycopersicon esculentum
MVRIAFGSIGDSLSVGSLKAYLAEFIATLLFVFAGVGSAIAFNKLTSGAALDPAGLVAIAVAHAFALFVGVSMAANISGGHLNPAVTLGLAVGGNITILTGLFYWVAQLLGSTVACLLLKYVTNGLAVPTHGVAAGMSGAEGVVMEIVITFALVYTVYATAADPKKGSLGTIAPIAIGFIVGANILAAGPFSGGSMNPARSFGPAVVAGDFSQNWIYWVGPLIGGGLAGFIYGDVFIGCHTPLPTSEDYA

SEQ ID NO: 15700 - protein, 270 aa, Nicotiana alata
MAKKDGNQEEEISQMEEGNIHSASNSDSNVGFCSSVSVVVILQKLIAEAIGTYFVIFAGCGSVAVNKIYGSVTFPGICVTWGLIVMVMVYTVGYISGAHFNPAVTITFSIFGRFPWKQVPLYIIAQLMGSILASGTLALLFDVTPQAYFGTVPVGSNGQSLAIEIIISFLLMFVISGVATDDRAIGQVAGIAVGMTITLNVFVAGPISGASMNPARSIGPAIVKHVYTGLWVYVVGPIIGTLAGAFVYNLIRSTDKPLRELAKSASSLRS

SEQ ID NO: 15701 - protein, 248 aa, Nicotiana glauca
MPGIAFGRIDDSFSVGSLKAYLAEFISTLLFVFAGVGSAIAYNKLTANAALDPAGLVAVAVCHGFALFVAVAVGANISGGHVNPAVTFGLALGGQITLLTGLFYIIAQLLGSIVACLLLKVVTGGLAVPTHNVAAGVGALEGVVMEIIITFALVYTVYATAADPKKGSLGTIAPIAIGFIVGANILAAGPFSGGSMNPARSFGPAVASGDFTNNWIYWAGPLVGGGLAGLTYSNVFMQHEHAPLSSDF

SEQ ID NO: 15702 - protein, 250 aa, Nicotiana tabacum
MVRIAFGSIGDSFSVGSLKAYVAEFIATLLFVFAGVGSAIAYNKLTADAALDPAGLVAVAVAHAFALFVGVSIAANISGGHLNPAVTLGLAVGGNITILTGFFYWIAQLLGSTVACLLLKYVTNGLAVPTHGVAAGLNGLQGVVMEIIITFALVYTVYATAADPKKGSLGTIAPIAIGFIVGANILAAGPFSGGSMNPARSFGPAVVAGDFSQNWIYWAGPLIGGGLAGFIYGDVFIGCHTPLPTSEDYA

SEQ ID NO: 15703 - protein, 250 aa, Nicotiana tabacum
MVLIAFGSIGDSFSVGSLKAYVAEFIATLLFVFAGVGSAIAYNKLTADAALDPAGLVAVAVAHAFALFVGVSIAANISGGHLNPAVTLGLAVGGNITILTGFFYWIAQLLGSTVACLLLKYVTNGLAVPTHGVAAGLNGFQGVVMEIIITFALVYTVYATAADPKKGSLGTIAPIAIGFIVGANILAAGPFSGGSMNPARSFGPAVVAGDFSQNWIYWAGPLIGGGLAGFIYGDVFIGCHTPLPTSEDYA

SEQ ID NO: 15704 - protein, 250 aa, Petunia x hybrida
MPINQISLGSHEELRHSGALKAALAEFISTLIFVFAGQGSGMAYNKLTADGAASPAGLISASLAHAFGLFVAVSVGANISGGHVNPAVTFGAFIGGNITFFRGILYIIAQLLGSTAACFILEFTTGMSTGSFALSDGVGVWNALVFEIVMTFGLVYTVYATAVDPKKGDLGVIAPIAIGFIVGANILAGGAFTGASMNPAVSFGPSLVSWTWTHQWIYWAGPIIGGGLAGVVYELLFINHSHEPLPSGDF

SEQ ID NO: 15705 - protein, 250 aa, Solanum tuberosum
MVRIAFGSIGDSLSVGSLKAYLAEFIATLLFVFAGVGSAIAYNKLTSDAALDPAGLVAIAVAHAFALFVGVSMAANISGGHLNPAVTLGLAVGGNITTLTGLFYWVAQLLGSTVACLLLKYVTNGLAVPTHGVAAGMNGAEGVVMEIVITFALVYTVYATAADPKKGSLGTIAPIAIGFIVGANILAAGPFSGGSMNPARSFGPAVVAGDFSQNWIYWVGPLIGGGLAGFIYGDVFIGSHTPLPTSEDYA

SEQ ID NO: 15706 - protein, 250 aa, Antirrhinum majus
MVKIAFGSIGDSFSVASIKAYVAEFIATLLFVFAGVGSAIAYNKLTSDAALDPAGLVAVAVAHAFALFVGVSMAANVSGGHLNPAVTLGLAVGGNITILTGLFYWIAQCLGSTVACLLLKFVTNGLSVPTHGVAAGMDAIQGVVMEIIITFALVYTVYATAADPKKGSLGVIAPIAIGFIVGANILAAGPFSGGSMNPARSFGPAVASGDFSQNWIYWAGPLIGGALAGFIYGDVFITAHAPLPTSEDYA

SEQ ID NO: 15707 - protein, 228 aa, Antirrhinum majus
FGSIGDSFSVASIKAYVAEFIATLLFVFAGVGSAIAYNKLTSDAALDPAGLVAVAVAHAFALFVGVSMAANVSGGHLNPAVTLGLAVGGNITILTGLFYWIAQCLGSTVACLLLKFVTNGLSVPTHGVAAGMDAIQGVVMEIIITFALVYTVYATAADPKKGSLGVIAPIAIGFIVGANILAAGPFSGGSMNPARSFGPAVASGDFSQNWIYWAGPLIGGALAGFIYG

SEQ ID NO: 15708 - protein, 287 aa, Craterostigma plantagineum
MEAKEEDVRLGANKFSERNPIGTAAQTHDDKDYTEPPPAPLFEPGELSSWSFYRAGIAEFMATFLFLYITILTVMGVNRAPNKCASVGIQGIAWAFGGMIFALVYCTAGISGGHINPAVTFGLFLARKLSLTRAVFYMVMQCLGAICGAGVVKGFYKPTYNLEGGGANVVANGYTKGDGLGAEILGTFVLVYTVFSATDAKRSARDSHVPILAPLPIGFAVFLVHLATIPITGTGINPARSLGAAIIYNHDRAWHDHWVFWVGPFIGAALAALYHVVVIRAIPFKSK

SEQ ID NO: 15709 - protein, 288 aa, Craterostigma plantagineum
MAENREEDVRLGANKYRETQPIGTSAQTDKDYKEPPPAPLFEPGELKSWSFYRAGIAEFVATFLFLYITILTVMGVSRAPNKCASVGIQGIAWAFGGMIFALVYCTAGISGGHINPAVTFGLFLARKLSLTRAIFYMIMQCLGAICGAGVVKGFQVGPYQRLGGGANTVAHGYTKGAGLGAEIIGTFVLVYTVFSATDAKRSARDSHVPILAPLPIGFAVFLVHLATIPITGTGINPARSLGAAIIYNKDHAWDDHWVFWVGPFIGAALAAVYHQIVIRAIPFKSGRA

SEQ ID NO: 15710 - protein, 198 aa, Craterostigma plantagineum
MIFILVYCTAGISGGHINPAVTFGLFLARKVSLIRAVSYMIAQCLGAICGVGLVKAFMHNPYNRLGGGANTVAPGYNKGTALGAEIIGTFVLVYTVFSATDPKRSARDSHVPVLAPLPIGFAVFMVHLATIPITGTGINPARSFGAAVIFNNGKAWDDHWIFWVGPFLGALAAAIYHQYILRAQAAKALGSFRSNPTN

SEQ ID NO: 15711 - protein, 250 aa, Helianthus annuus
MVKLAIGSIGDSLSAGSIKSYLAEFIATLLFVFAGVGSAIAYGKLTTDAALDPAGLVAIAIAHAFALFVGVSMAANISGGHLNPAVTFGLAIGGNITIITGLFYWIAQCLGSIVACFLLQFVTGGLAVPTHGVADGMNGVQGVVMEIIITFALVYTVYATAVDPKKGSLGTIAPMAIGFIVGANILAAGPFSGGSMNPARSFGPAVVSGDFSQNWIYWVGPLIGGGLAGFIFGDVFIGSYETLPDSGDYA

SEQ ID NO: 15712 - protein, 248 aa, Helianthus annuus
MPGIAFGSFDDSFSSSSIKAYIAEFISTLLFVFAGVGSAIAYAKLTADAALDPSGLVAIAVCHGLALFVAVSIAANISGGHVNPAVTFGLAVGGQITILTGLFYWIAQLLGSVAACFLLSFVTGGLAVPTHGVAAGVGVLQGVVFEIIITFALVYTVYATACDPKKGALGTISPIAIGFIVGANILAAGPFSGGSMNPARSFGPTVAAFDFSGHWFYWVGPLIGGGLAGAIYPNVFISNEHIPLTNDY

SEQ ID NO: 15713 - protein, 248 aa, Helianthus annuus
MPGIAFGSFDDSFSLSSIKSYVAEFISTLLFVFAGVGSAIAFAKLTADADLDPAGLVAIAVCHGLALFVAVSIAANISGGHVNPAVTFGLAVGGQITILTGIFYWIAQCIGSIAACYLLSFVTGGLAVPTHAVAAGVGAIQGVVMEIIITFALVYNVYATAVDPKKGDLGTIAPLAIGLIVGANILAAGPFSGGSMNPARSFGPAVAAGDFSGHWIYWVGPLVGGGLAGAIYSNVFISNEHAPLSSEF

SEQ ID NO: 15714 - protein, 248 aa, Helianthus annuus
MPGIAFGSFDDSFSSSSIKAYIAEFISTLLFVFAGVGSAIAYAKLTADAALDPPGLVAVAVCHGFALFVAVCIAANICGGHVNPAVTLGLAVGGQITFLTGLFYWIAQLLGSTVACFLLSFVTGGLAVPTHGVAEGVGTIQGVVFEIIITFAMVYTVYATACDPKKGALGTIAPIAIGFIVGANILAAGPFSGGSMNPARSFGPAVASFDFSGHWIYWVGPLVGGGLAGLIYPNVFISNEHIPLTNEY

SEQ ID NO: 15715 - protein, 277 aa, Dictyostelium discoideum
MPFLHLFTPYTNADNTKLILRVNESRLRLFTRQLLAEFFGTLFVVYIVSGSTLAANFAVSDPIVRVCLICLVQGFAFAAIIWSISGISGCQLNPAVTVGCVTTGRMGILNGIAFIIFQCVGALVGAGMMKASLPTFYERDLSATTLATGVNVARGFFLEMVTTSFLVFVVLGVAVYNEWDPRDPKISRVAPLAIGCAVIAGVGFLNLFTGGSLNPARSFGPAVFSDTWHRHYIYWFGPICGGIIAGLFWRIFLSEKVLLIDRPYTDFHRSTYGTATK

SEQ ID NO: 15716 - protein, 279 aa, Dictyostelium discoideum
MVKVVPLRFITYDPLKDPSKMIYRRPISKPVKAFKGFFSEFLGTLYLVYFCGGSVCAAFAVAGDSAARALLGGLIQGMALAALIWAVSGVSGCNLNPAVTLANLLSGRVGLIDSLYYVAAQILGCIAGAGILYGCLPNMYRIDLGVPHLAPGMNTGQAFLMEMMLTSILCLCVLGTSVFNVWDRRLNRIAPFAIGLALFIGVAIGFNFSGGALNPVRVLGPSIISGVWSHHWVYWLGPIVGAILAAFIYRCLLQERFDVIERPGYIAPLIDPSTAVSSY

SEQ ID NO: 15717 - protein, 249 aa, Hordeum vulgare
MVKLAFGSFGDSFSATSIRSYVAEFIATLLFVFAGVGSAISYGQLTQGGALDPAGLVAIAIAHAFALFVGVAMAANISGGHLNPAVTFGLAVGGHVTILTGLFYWVAQLLGASVACLLLQFVTHAQAMPTHAVSGISEVEGVVMEIVITFALVYTVYATAADPKKGSLGTIAPMAIGFIVGANILAAGPFSGGSMNPARSFGPAVAAGNFSGHWVYWVGPLIGGGLAGLVYGDVFIASYQPVGHQQEYP

SEQ ID NO: 15718 - protein, 248 aa, Oryza sativa
MVKLAFGSLGDSFSATSVKAYVAEFIATLLFVFAGVGSAIAYGQLTNGGALDPAGLVAIAIAHALALFVGVSVAANISGGHLNPAVTFGLAVGGHITILTGLFYWIAQLLGASIACLLLKFVTHGKAIPTHGVAGISELEGVVMEIVITFALVYTVYATAADPKKGSLGTIAPIAIGFIVGANILAAGPFSGGSMNPARSFGPAVAAGNFAGNWVYWVGPLIGGGLAGLVYGDVFIGSYQPVADQDYA

SEQ ID NO: 15719 - protein, 248 aa, Oryza sativa; identical to SEQ ID NO: 15718

SEQ ID NO: 15720 - protein, 249 aa, Triticum aestivum
MVKLAFGSCGDSFSATSVRAYVAEFIATLLFVFAGVGSAIAYGKLTDDGALDPAGLVAIAIAHAFALFVGVAIAANISGGHLNPAVTFGLAVGGHITILTGIFYWVAQLLGSTAACFLLKFVTHGKAIPTHGVTAGMNEFEGVVMEIVITFALVYTVYATAADPKKGSLGTIAPIAIGFIVGANILAAGPFSGGSMNPARSFGPAVAAGNFAGNWVYWVGPLIGGGLAGFVYGDVFIASYQPVADQDYA

SEQ ID NO: 15721 - protein, 111 aa, Allium cepa
ELQGVVMEIVITFALVYTVYATAADPKKGSLGTIAPIAIGFIVGANILAAGPFSGGSMNPARSFGPAVAAANFAGHWVYWVGPLVGGALAGLVYGDIFIGTSYEPVAQDYP

SEQ ID NO: 15722 - protein, 288 aa, Lilium longiflorum
MEGKEEDVKLGANKYSERQPIGTAAQTQDRDYKEPPPAPFFEPGELKSWSFYRAGIAEFVATFLFLYITILTVMGVSKNATNKCVTVGIQGIAWSFGGMIFALVYCTAGISGGHINPAVTFGLFLARKLSLTRAIFYIIMQCLGAICGAGVVKGFQKGLYESNGGGANVVNHGYTKGDGLGAEIIGTFVLVYTVFSATDAKRNARDSHVPILAPLPIGFAVFLVHLATIPITGTGINPARSLGAAIIYNKSHAWHDHWVFWVGPFIGAALAAVYHQIVIRAIPFKSRS

SEQ ID NO: 15723 - protein, 327 aa, Saccharomyces cerevisiae
MSSNDSNDTDKQHTRLDPTGVDDAYIPPEQPETKHHRFKISRDTLRNHFIAAVGEFCGTFMFLWCAYVICNVANHDVALVAAPDGSHPGQLIMIAIGFGFSVMFSIWCFAGVSGGALNPAVSLSLCLARAVSPTRCVVMWVSQIVAGMAAGGAASAMTPGEVLFANSLGLGCSRTRGLFLEMFGTAILCLTVLMTAVEKRETNFMAALPIGISLFIAHVALTAYTGTGVNPARSLGAAVAARYFPHYHWIYWIGPLLGSILAWSVWQLLQILDYTTYVTAEKAASTKEKAQKKVKPAVPLLWLKSNFPLLFFISRSLALNVIIFGKN

SEQ ID NO: 15724 - protein, 289 aa, Saccharomyces cerevisiae
MSNESNDLEKNISHLDPTGVDNAYIPPEQPETKHSRFNIDRDTLRNHFIAAVGEFCGTFMFLWCAYVICNVANHDVALTTEPEGSHPGQLIMIALGFGFSVMFSIWCFAGVSGGALNPAVSLSLCLARAISPARCVVMWFPQIIAGMAAGGAASAMTPGKVLFTNALGLGCSRSRGLFLEMFGTAVLCLTVLMTAVEKRETNFMAALPIGISLFMAHMALTGYTGTGVNPARSLGAAVAARYFPHYHWIYWIGPLLGAFLAWSVWQLLQILDYTTYVNAEKAAGQKKED

SEQ ID NO: 15725 - protein, 305 aa, Saccharomyces cerevisiae
MSSNDSNDTDKQHTRLDPTGVDDAYIPPEQPETKHHRFKISRDTLRDHFIAAVGEFCGTFMFLWCAYVICNVANHDVALVAAPDGSHPGQLIMIAIGFGFSVMFSIWCFAGVSGGALNPAMSLSLCLARAVSPTRCVVMWVSQIVAGMAAGGAASAMTPGEVLFANSLGLGCSRTRGLFLEMFGTAILCLTVLMTAVEKRETNFMAALPIGISLFIAHVALTAYTGTGVNPARSLGAAVAARYFPHYHWIYWIGTLLGSILAWSVWQLLQILDYTTYVTAEKAASTKEKAQKKGETSSSSAVAEV

SEQ ID NO: 15726 - protein, 237 aa, Desulfitobacterium hafniense
MIKRLGAEFIGTFWLVLGGCGSAVLAANFGGAGNPLGIGLLGVALAFGLTVLTGAYALGHISGGHFNPAVSFGLWAGGRFPAKDLLPYIVAQVLGAILAGFVLFHIASGTGSFSIDPNAAGTFASNGYDLMSPGGYSAASAFLTEVVMTAMFLVIILGATHKNAPAGFAPIAIGLGLTLIHLISIPVTNTSVNPARSTGVALFAGAAALSQLWMFWVAPILGGLIGGAVYRWLGKDD

SEQ ID NO: 15727 - protein, 289 aa, Neurospora crassa
MSQPMRTHLVFGIGEFVGTFMFLFFAFAGTQVANTAPANAAKLPSTSNLLYIAFAFGFSLMVNVWAFFRVTGGAFNPAVTLALVLVGGFPAVRAVIVIVAQILGATAAAGLVQVIFPGPLAVETTLGGGATVAQGFFIELFLTCELVFVILMMAVEKHQGTFVAPVAIGLALFLSELVGVYFTGGSLNPVRSLGPAIVNRHFPGYHWIYWLGPVLGALLACGFFKLLQALRYDDINSGADDDGRGDLEGARHAHQDGLKHTPTNLTQPLANGEAAALHNQPAQVPREEL

SEQ ID NO: 15728 - protein, 250 aa, Posidonia oceanica
MPFSRIAMGRREEVTHGDALKATLAEFISTLIFVFAGEGSGIAYNNLSGDGDTTASSLIAAALAHGLGLFVAVSVGANISGGHVNPAVTFGAFVGGNITFLRGILYWHGQLLGSIVACLLLKFVTGGMTTGGFAVSGVSVWNALVFEIVMTFGLVYTVYATAIDPKKGAIGTIAPLAIGLIVAANIFVGGVFTGASMNPAVAFGPALVSWNWVNHWIYWVGPLVGAAIAGIVYQLLFINHTHEQLPTTDY

SEQ ID NO: 15729 - protein, 142 aa, Posidonia oceanica
ISGGHLNPAVTFGAFVGGNITFLRGILYWHGQLLGSIVACLLLKFVTGGMTTGGFAVSGVSVWNALVFEIVMTFGLVYTVYATAIDPKKGAIGTIAPLAIGLIVAANIFDGGVFTGASMNPAVAFGPALVSWNWVNQWVYWV

SEQ ID NO: 15730 - protein, 231 aa, Escherichia coli
MFRKLAAECFGTFCLVFGGCGSAVLPAGFPELGIGFAGVALAFGLTVLTMAFAVGHISGGHFNPAVTIGLWAGGRFPAKEVVGYVIAQVVGGIVAAALLYLIASGKTGFDAAASGFASNGYGEHSPGGYSMLSALVVELVLSAGFLLVIHGATDKFAPAGFAPIAIGLALTLIHLISIPVTNTSVNPARSTAVAIFQGGWALEQLWFFWVVPIVGGIIGGLIYRTLLEKRD

SEQ ID NO: 15731 - protein, 231 aa, Escherichia coli
MFRKLAAECFGTFWLVFGGCGSAVLAAGFPELGIGFAGVALAFGLTVLTMAFAVGHISGGHFNPAVTIGLWAGGRFPAKEVVGYVIAQVVGGIVAAALVYLIASGKTGFDAAASGFASNGYGEHSPGGYSMLSALVVELVLSAGFLLVIHGATDKFAPAGFAPIAIGLALTLIHLISIPVTNTSVNPARSTAVAIFQGGWALEQLWFFWVVPIVGGIIGGLIYRTLLEKRD

SEQ ID NO: 15732 - protein, 250 aa, Sporobolus stapfianus
MPMRNIAVGNTQEVTHPGALKAALAEFISTLIFVFAGQGSGVAYSKLSGGITTPSSLISAAVAHAFALFVAVSVSANISGGHVNPAVTFGAFLGGNISLFRSILYWIAQLLGSIVACLLLRFVTGGLPTGTFGLTGISVWEALVLEIVMTFGLVYTVYATAVDPKKGSLGTIAPIAIGFIVGANILVGGAFDGASMNPAVSFGPSLVSWSWNNHWVYWVGPFIGAALAALIYDMLFISSHTHEQLPTTDY

SEQ ID NO: 15733 - protein, 231 aa, Trypanosoma cruzi
MTFSPGMSEIVAEFVGTFLFVLTIPLASLGVGSLAPLPIGFMLAAMTFSFGYISGAHFNPAITFATFINGKIPFRKMFFYMISQILAAFLASLYGSAIVGLRIPVPSTDVALVSVWQAILCEMVYTFALASVVLHVNYSRQRGNEFYGFAIGMTVLSASFAVGGFTGGAFNPAVATGTQLVGCIGGNCKPLIFFWIYWVAPLGGSFLASIAYQILDTHDRVAPIELSGQVF

SEQ ID NO: 15734 - protein, 252 aa, Kandelia candel
MPIRQIAVGHPHEATRPDVLKAALAEFISTLIFVFAGEGSGMAFNKLTDNGSTTPAGLIAASIAHAFGLFVGVSVSANISGGHVNPAVTFGAFIGGNITLLRGILYWIGQLLGSTVACLLLKFSTGGLTTSAFSLSSGVSVWNAFVFEIVMTFGLVYTVYATAIDPKKGNLGTIAPSPSVSLWVPSVWTGGAFDGASMNPAVSFGPALVSWTWENHWVYWAGPLIGSAIAALIYDSFFIGYGTHEQLPTADY

SEQ ID NO: 15735 - protein, 287 aa, Nicotiana excelsior
MAENKEEDVKLGANKFRETQPLGTAAQTDKDYKEPPPAPLFEPGELSSWSFYRAGIAEFMATFLFLYITILTVMGLKRSDSLCSSVGIQGVAWAFGGMIFALVYCTAGISGGHINPAVTFGLFLARKLSLTRAIFYMVMQCLGAICGAGVVKGFMVGPYQRLGGGANVVNPGYTKGDGLGAEIIGTFVLVYTVFSATDAKRNARDSHVPILAPLPIGFAVFLVHLATIPITGTGINPARSLGAAIIYNDEHAWDDHWIFWVGPFIGAALAAVYHQIIIRAIPFHKSS

SEQ ID NO: 15736 - protein, 285 aa, Nicotiana excelsior
MENKEEDVRLGANKYSERQAIGTAAQSDKDYTEPPPAPLFEAGELTSWSFYRAGIAEFMATFLFLYITILTVMGVSKSESKCSTVGIQGIAWAFGGMIFALVYCTAGISGGHINPAVTFGLFLARKLSLTRAVFYMVMQCLGAICGAGVVKGFGKTLYQTKGGGANVVNHGYTKGSGLGAEIVGTFVLVYTVFSATDAKRSARDSHVPILAPLPIGFAVFLVHLATIPITGTGINPARSLGAAIIYNQDHAWDDHWIFWVGPFIGAALAALYQQVVIRAIPFKSK

SEQ ID NO: 15737 - protein, 287 aa, Nicotiana excelsior
MAENKEEDVKLGANKYRETQPLGTAAQTDKDYKEPPPAPLFEPGELSSWSFYRAGIAEFMATFLFLYITILTVMGLKRSDSLCSSVGIQGVAWAFGGMIFALVYCTAGISGGHINPAVTFGLFLARKLSLTRALFYMVMQCLGAICGAGVVKGFMVGPYQRLGGGANVVQPGYTKGDGLGAEIIGTFVLVYTVFSATDAKRNARDSHVPILAPLPIGFAVFLVHLATIPITGTGINPARSLGAAIIFNHDQAWDDHWIFWVGPFIGAALAAVYHQIIIRAIPFKTKS

SEQ ID NO: 15738 - protein, 289 aa, Saccharomyces chevalieri
MSNESNDLEKNISHLDPTGVDNAYIPPEQPETKHSRFNIDRDTLRNHFIAAVGEFCGTFMFLWCAYVICNVANHDVALTTEPEGSHPGQLIMIALGFGFSVMFSIWCFAGVSGGALNPAVSLSLCLARAISPARCVVMWFSQIIAGMAAGGAASAMTPGKVLFTNALGLGCSRSRGLFLEMFGTAVLCLTVLMTAVEKRETNFMAALPIGISLFMAHMALTGYTGTGVNPARSLGAAVAARYFPHYHWIYWIGPLLGAFLAWSVWQLLQILDYTTYVNAEKAAGQKKED

SEQ ID NO: 15739 - protein, 231 aa, Shigella flexneri
MFRKLAAECFGTFWLVFGGCGSAVLAAGFPELGIGFAGVALAIGLTVLTMAFAVGHISGGHFNPAVTIGLWAGGRFPAKEVVGYVIAQVVGGIVAAALVYLIASGKTGFDAAASGFASNGYGEHSPGGYSMLSALVVELVLSAGFLLVIHGATDKFAPAGFAPIAIGLALTLIHLMSIPVTNTSVNPARSTAVAIFQGGWALEQLWFFWVVPIVGGIIGGLIYRTLVEKRD

SEQ ID NO: 15740 - protein, 244 aa, Caenorhabditis elegans
MVEDEKDYTIYSKCAAEFIAVLLFVYIGSMQAAGVFLHDGVLHAAFAHGVAIFVLAATFGGVSGAHINPAVTFGIALVGRISPIHAVCYVVSQLLGSVFGALLVRISLPYKMYNVISAGATLCGKGYNWQEGLTAEIVTTYILVQTVLLCAVDTDKNRLAPLAIGFSLIIEILAAGAISGASMNPARSFGPNIMGQVFLKPEHLDAQYMYWNYHWIYYIGPIIGAFIAAGVYRMFFARDYRVLA

SEQ ID NO: 15741 - protein, 273 aa, Caenorhabditis elegans
MVSPYEEDSRPPYMSSYAEETWGQPATTNRKSSYTSRKKEYSLLTKCVAEFLGDLTFVYVGTMQASLFQYADGILHAAFAHGFTIFILVTAFGHISGGHFNPAVSWAIAGAGKMPIFHLPFYVVSQLLGGICGAFLTAAVLSQEQLTSCEAGATLLSPGSQWWQGLIAETVVTFFLVHTILITAADTDTVTLAPLAIGLTLSIDILSTGSITGASMNPARSLGPSIIGSIFATQKTSFYWNNHYIYWAGPLLGSTIALCIYKLFESREERIVR

SEQ ID NO: 15742 - protein, 279 aa, Caenorhabditis elegans
MVSPYEEDSRPPYMSSYAEETWGQPATTNRKSSYTSRKKEYSLLTKCVAEFLGDLTFVYVGTMQASLFQYADGILHAAFAHGFTIFILVTAFGHIRMFPNYSGGHFNPAVSWAIAGAGKMPIFHLPFYVVSQLLGGICGAFLTAAVLSQEQLTSCEAGATLLSPGSQWWQGLIAETVVTFFLVHTILITAADTDTVTLAPLAIGLTLSIDILSTGSITGASMNPARSLGPSIIGSIFATQKTSFYWNNHYIYWAGPLLGSTIALCIYKLFESREERIVR

SEQ ID NO: 15743 - protein, 291 aa, Blumeria graminis f. sp. hordei
MPTDGIPPMLGQSSPLKLRKYEGRLSDDNFRNHVIAAIGEFLGTTLFLFYGFLAAQIINSKPDNLSDAPSLLQLIFVASAFGVSGAVNVWLFYRVSGGHLNPAITIGLTLIGAVPVTRALLLVSVQLLGGILAASLVLAVTPGSLNVQTALGNATSVKQGFFLKMILTATLVLTVFMLAVEKHRTTPLAPLGIGLILFLDVLLAAQFSGGSLNPARSFGPAVVELNFATYHWIYWFGPIAGAVLAAAIFKVLKFLAYETAVAGQDHDGLDVYRLIDDAGGHEVDREIQLEV

SEQ ID NO: 15744 - protein, 233 aa, Plesiomonas shigelloides
MFKPFSAEFFGTFWLVLGGCGSALISAAFPQLGIGFLGVALAFGLTVVTMAYAVGHISGAHFNPAVTLGLWAGGRFPAARVLPYIIAQVIGGIAAAAVLYGIASGKAGFDATTSGFAANGYGIHSPGGYALSACMLSEFVLSAFFVIVIHGATEKRAPAGFAPLAIGLTLTIIHLVSIPVTNTSVNPARSIAAAVFQGTWALDQLWMFCLIPSLGGIAGGLIYRALLARPAEA

SEQ ID NO: 15745 - protein, 271 aa, Pyrocoelia rufa
MGGFSEVLGINEFKTKRESIWKALLAEFVGNIILNYFGCASCMMIAPNVAKPNLVLIALSFGLSVLSLFRHWPYKWRTYNPAVTIAMLYQNISPLKAILYYVIVQCIGAIVGSGLLMASLPERYHDTKMGVTELSVPAGNGIIVEIMLGFILVFTVFGVVDINKHEVKPIAAFAIGVSVVIGHLATVDYTGSSMNPARTFGASVINNDWEDHWVYWVGPIIGGIIAGLLYKYVFAAPPTGPLKIIERYTAVVTDEKELQRLAGGKQDESMP

SEQ ID NO: 15746 - protein, 249 aa, Aedes aegypti
MTESAGVKQLVGVADITENRNIWRMLVAEFLGTFFLVSIGIGSTMGWGGDYAPTMTQIAFTFGLVVATLAQAFGHVSGCHINPAVTIGLMITADISILKGAFYIVSQCVGAIAGAALIKAATPSDVIGGLGVTGIDPRLTAGQGVMMEALITFILVFVVHGVCDNRRSDIKGSAPLAIGLSITAGHLSAIKYTGASMNPARSFGPAVVMGNWTDQWVYWVGPIVGGILAGAVYRLFFKVRKGDEESYDF

SEQ ID NO: 15747 - protein, 239 aa, Drosophila melanogaster
MSKFVGVADITENKKIWRMLLGELVGTFFLIFVGVGSTTSGSVPQIAFTFGLTVATIAQGLGHLSGCHINPAVTLGFLIVGEISILKAAFYIIVQCVGAIAGAAVIKVALDGVAGGDLGVSSFDPSLNCAQAVLIEALITFILVFVVKAVSDPGRQDIKGSAPLAVGLAIAAGHLCAIKLSGASMNPARSFGPAVVQGVWTYHWVYWVGPIAGGLLAGIIYRLIFKVRKGDDETDSYDF

SEQ ID NO: 15748 - protein, 245 aa, Drosophila melanogaster
MVEKTEMSKFVGVADITENKKIWRMLLGELVGTFFLIFVGVGSTTSGSVPQIAFTFGLTVATIAQGLGHLSGCHINPAVTLGFLIVGEISILKAAFYIIVQCVGAIAGAAVIKVALDGVAGGDLGVSSFDPSLNCAQAVLIEALITFILVFVVKAVSDPGRQDIKGSAPLAVGLAIAAGHLCAIKLSGASMNPARSFGPAVVQGVWTYHWVYWVGPIAGGLLAGIIYRLIFKVRKGDDETDSYDF

SEQ ID NO: 15749 - protein, 699 aa, Drosophila virilis
MADESLHTMPLEHNIDYHIVTLFERLEAMRKDSHGNAINNRLSSTLQAPKRSMQAEIRTLEFWRSIISECLASFLYVFIVCGAAAGAGVGASVSSVLLATALASGLAMATLTQCFLHISGAHINPAVTLACCVVRSISPIRAAMYMTAQCGGGIAGAALLYGVTVPGYQGNSQAAISHSAALAAWERFGVEFILTFVVVLCYFVSTDAIKKFMGNSAFAIGAAYSACCFVSMPYLNPARSLGPSFVLNKWDNHWVYWFGPLVGGMASGLVYEHIFSSRRSVRHAKGSIDNDSSSIHSEDELNYDMDLEKPNKYQQSQGTYPRGQSNGGGAAAAQHAAANMAPMGVVNAGAGNYCQNLYTAPPLSSKYEQQQQEPLYGGTRSLYCRSPTLTRSNLNRSQSVYAKSNTAINRDIVPRPGPLVPAQSLYPLRTHQQQQQQQQQQQQQQHQQAVTATQSSHLQNQNVQNQMQQRTESIYAMRGSMRGQQQPLQQQQQQQQQAPVGMQQQQQQQQQQQQLHQGAQLISEPQAQPQGFQPVYGSRNNPTPLDGNHKFERRDQQQQQQQLYGMTGPRNRGQSAQSDDSSYGSYHGSAVTPPARHPSVEPSPPPPPMLMYAPPPQPNAAHPQPIRTQSERKVSAPVVVSQPATCAVTYTTSQVPPTITTSTAQQQQQQQQQQQQQMMMQQQQQAHQQHYGMLPLRPN

SEQ ID NO: 15750 - protein, 248 aa, Vernicia fordii
MARIAFGRFDDSFSLGSFKAYLAEFISTLLYVFAGVGSAIAYNKLTANAALDPAGLVAIAICHGFALFVAVAVGANISGGHVNPAVAFGLALGGQITILTGIFYWIAQLLGSIVACFLLKLVTGGLAIPTHSVAGRVGAIEGVVMEIIITFALVYTVYATAADPKKGSLGTIAPIAIGFIVGANILAAGPFSGGSMYPARSFGPAVVSGDFHDNWIYWVGPLIGGGLAGLIYGNLYISGDHTPLSNDF

SEQ ID NO: 15751 - protein, 262 aa, Pasteurella multocida
MDKSLKAACIGEFLGTALLIFFGVGCVAALKVAGANFGQWEISIMWGLGVAIAVYASAGLSGAHLNPAVTIALWQFACFDGKKVVPYILAQLAGAFCSAALVYFLYHNLFIDVEIAQQMVRGTPESLSLASTFSTYPHPSISVLHAFIVEFVITAVLMALILALTDDGNGLPRGPLAPLLIGFLIAIIGGAMGPLTGFAMNPARDLGPKVFASLAGWGEIALTGGREIPYIFIPVIAPILGGLFGGWIYTKFVGKNLPCHCE

SEQ ID NO: 15752 - protein, 107 aa, Aster tripolium
GGHVNPAVTFGLAVGGNITILTGLFYWIAQLLGSVVACFLLQFVTGGLAVPTHGVADGMNGLQGVVMEIIITFALVYTVYATAADPKKGSLGTIAPIAIGFIVGANI

SEQ ID NO: 15753 - protein, 107 aa, Aster tripolium
GGHVNPAVTFGLAIGGNITILTGLFYWIAQLLGAVVASFLLGFVTGGLAVPTHGVADGMNAIQGVVFEIIITFALVYNVYANAADPKKGSFGTIAPVAIGFIVGANI

SEQ ID NO: 15754 - protein, 107 aa, Aster tripolium
GGHVNPAVTFGLAVGGQITILTGIIYVVAQLAGSIVACYLLSFVTGGLAVPIHGVADGVGAIQGVVMEIIITFALVYTVYATACDPKKGALGTIAPIAIGFIVGANI

SEQ ID NO: 15755 - protein, 107 aa, Aster tripolium
GGHVNPAVTFGLAVGGQITIITGVFYWIAQLLGSVAASFLLSFVTGGLAVPIHGCADGVGAIQGMVMEIIITFALVYTVYGTACDPKKGDVGTIAPIAIGFIVGANI

SEQ ID NO: 15756 - protein, 107 aa, Aster tripolium
GGHVNPAVTFGAFVGGNITLLRGIVYIIAQLLGSTVACLLLKFVTNDMAVGVFSLSAGVGVTNALVFEIVMTFGLVYTVYATAIDPKKGSLGTIAPIAIGFIVGANI

SEQ ID NO: 15757 - protein, 107 aa, Aster tripolium
GGHVNPAVTFGAFVGGHISFFKSILYWIAQCLGSVVACLLLKFATGGLETSAFALSSGVGEWNAVVFEIVMTFGLVYTVYATAIDPKKGDLGIIAPIAIGFIVGANI

SEQ ID NO: 15758 - protein, 287 aa, Samanea saman
MAKDVEVAERGSYSAKDYHDPPPAPLIDAEELGKWSFYRALIAEFIATLLFLYITVLTVIGYKSQSDTKAGGDVCGGVGILGIAWAFGGMIFILVYCTAGISGGHINPAVTFGLFLARKVSLIRAILYMVAQCLGAICGVGLVKAFQKAYYSRYGGGANTLSDGYSTGTGLGAEIIGTFVLVYTVFSATDPKRSARDSHVPVLAPLPIGFAVFMVHLATIPVTGTGINPARSLGAAVIFNQQKAWDDHWIFWVGPFIGAAIAAFYHQFILRAGAAKALGSFRSNPSV

SEQ ID NO: 15759 - protein, 231 aa, Escherichia coli K12
MFRKLAAECFGTFWLVFGGCGSAVLAAGFPELGIGFAGVALAFGLTVLTMAFAVGHISGGHFNPAVTIGLWAGGRFPAKEVVGYVIAQVVGGIVAAALLYLIASGKTGFDAAASGFASNGYGEHSPGGYSMLSALVVELVLSAGFLLVIHGATDKFAPAGFAPIAIGLALTLIHLISIPVTNTSVNPARSTAVAIFQGGWALEQLWFFWVVPIVGGIIGGLIYRTLLEKRD

SEQ ID NO: 15760 - protein, 262 aa, Xenopus laevis
WEFRSFSFWRAVFAEFFGTMFYVFFGLGASLKWAAGPANVLVIALAFGLVLATMVQSIGHVSGAHINPAVTFAFLIGSQMSLFRAIFYIAAQLLGAVAGAAVLYGVTPAAIRGNLALNTLHPGVSLGQATTVEIFLTLQFVLCIFATYDERRNGRLGSVSLAIGFSLTLGHLFGLYYTGASMNPARSFAPAVLTRNFTNHWVYWVGPIIGGALGGLVYDFILFPRMRGLSERLSILKGARPAEPEGQQEATGEPIELKTQSL

SEQ ID NO: 15761 - protein, 273 aa, Xenopus laevis
MRNEICSLAFVRAVFAEFLATMIFVFLGLGSALSWKPSLPNVLQISLAFGLAISTLVQAFGHVSGAHINPAVTVAFLIGCHISFLRALFYIIAQLVGAIAGAAIVRAVAPLDVRGNLAINAINSGSPGQACAVELFLTFQLVLCVFASTDSRRSDNVGSPALSIGLSVTVGHLLGIYLTGCSMNPARSFGPAAITGIFTDHWVFWIGPLVGGIMASLFYNYIFFPHKKSFSDRLAILKGTYQPEEAWDNKQEQRRQSVELYSAHPLPKVIDKF

SEQ ID NO: 15762 - protein, 274 aa, Bufo marinus
MRNEICSLAFVRAVFSEFLATLIFVFLGLGSALNWPSALPTVLQISIALGLAIGTLVQTLGHVSGAHINPAVTVAFLLGSHISILRAVFYIVAQLVGAIAGAGILHALAPGDVRGNLAINQVSAGSPGLALVVELVLTFQLVLCIFASTDGRRTDNVGSPALSIGLSVTLGHLLGIYFTGCSMNPARSLGPAAITGIFTDQWVFWIGPLVGGILASLLYNYLLYPYNKSLSERIAVLKGTYEPEEESWDNKQDHKRQSVELYSAHPLPKVTEKF

SEQ ID NO: 15763 - protein, 263 aa, Rana pipiens
MWEFRSFSFWRAVFAEFFGTMFYVFFGLGASLKWAAGPANVLVIALAFGLVLATMVQSIGHVSGAHINPAVTFAFLIGSQMSLFRAIFYIAAQLLGAVAGAAVLYGVTPAAIRGNLALNTLHPGVSLGQATTVEIFLTLQFVLCIFATYDERRNGRLGSVSLAIGFSLTLGHLFGLYYTGASMNPARSFAPAVLTRNFTNHWVYWVGPIIGGALGGLVYDFILFPRMRGLSERLSILKGARPAEPEGQQEATGEPIELKTQSL

SEQ ID NO: 15764 - protein, 276 aa, Bacillus halodurans
MSPFLGEVIGTMILIILGGGVVAGVVLKGTKSENGGWIVITAAWGLAVATAVYCVGQISGAHLNPAVTIGLALVGAFEWSQVAGYIVAQMLGAMIGATLVFLHYYPHFKATEDQGAKLAVFSTDPAIKHLPANFFSEVLGTFVLVLGILAIGANEFTEGLNPLIVGLLIVVIGLSLGGTTGYAINPARDLGPRIAHFLLPIPGKGSSNWSYAWIPIVGPIIGGGIGALTYAALFEGIVYSALWLFLAAFALVLLYASFIEKKHEAKGKDQPVAMAK

SEQ ID NO: 15765 - protein, 262 aa, Gallus gallus
MRELRSSSFWRAILAEFLGSLLYTLLGLGASLRWAPGPHGVLGSALAFGLAQATLVQALGHVSGGHINPAITLAFLLASQLSLPRALGYLLAQLLGALAGAGVLYGVTPAAVRGTLGLSALHPSVGPGQGTVVELLLTAQFILCVFASFDDRHDGRPGSAALPVGFSLALGHLFGIPFTGAGMNPARSFAPAVITRNFTNHWVFWAGPLLGAALAALLYELALCPRARSMAERLAVLRGEPPAAAPPPEPPAEPLELKTQGL

SEQ ID NO: 15766 - protein, 264 aa, Salmonella enterica subsp. enterica serovar Typhi
MNDSLKAQCGAEFLGTGLFLFFGIGCLSALKVAGASLGLWEICIIWGLGISLAVYLTAGISGGHLNPAVTIALWLFACFPKQKVLPYIIAQFAGAFGGDLLAYVLYSSLFTEFETAHHMVRGSVESLQLASIFSTYPAAALNVWQAALVEVVITSILMGMIMALTDDGNGIPKGPLAPLLIGILVAVIGASTGPLTGFAMNPARDFGPKLFTWLAGWGNMAMSGGREIPYFIVPIVAPVIGACAGAAIYRYFIGKNLPCNRCKL

SEQ ID NO: 15767 - protein, 153 aa, Macaca radiata
AQCVGAIVAAAILSGITSSLPGNSLGRNDLADGVNSGQGLGIEIIGTLQLVLCVLATTDRRRRDLGGSAPLAIGLSVALGHLLAIDYTGCGINPARSFGSAVITHNFSNHWIFWVGPFIGGALAVLIYDFFLAPRSSDFTTPVKVWTSGQERG

SEQ ID NO: 15768 - protein, 214 aa, Thellungiella halophila
MGVKRSPNMCASVGIQGIAWAFGGMIFALVYCTAGISGGHINPAVTFGLFLARKLSLTRAVYYIVMQCLGAICGAGVVKGFQPKQYQALGGGANTIAHGYTKGSGLGAEIIGTFVLVYTVFSATDAKRNARDSHVPILAPLPIGFAVFLVHLATIPITGTGINPARSLGAAIIFNKDNAWDDHWVFWVGPFIGAALAALYHVIVIRAIPFKSRS

SEQ ID NO: 15769 - protein, 109 aa, Orycteropus afer
SIAFSKAVFSEFLATLLFVFFGLGSALNWPQALPSGLQIAMAFGLAIGTLVQTLGHISGAHINPAVTVACLVGCHVSFLRAIFYVAAQLLGAVAGAALLHELTPPDIRG

SEQ ID NO: 15770 - protein, 323 aa, Bos taurus
MSDRPAATRWGKCGPLCTRESIMVAFKGVWTQTFWKAVTAEFLAMLIFVLLSLGSTINWGGAEKPLPVDMVLISLCFGLSIATMVQCFGHISGGHINPAVTVAMVCTRRISIAKSVFYIAAQCLGAIIGAGILYLVTPPSVVGGLGVTTVHGNLSAGHGLLVELIITFQLVFTIFASCDSKRTDVTGSIALAIGISVAIGHLFAINYTGASMNPARSFGPAVIMGNWENHWIYWVGPIIGAVLAGGLYEYVFCPDVELKRRFKEAFSKAAQQTKGSYMEVEDNRSQVETDDLILKPGVVHVIDIDRGEEKKGKDPSGEVLSSV

SEQ ID NO: 15771 - protein, 323 aa, Bos taurus
MSDRPAARRWGKCGPLCTRESIMVAFKGVWTQTFWKAVTAEFLAMLIFVLLSLGSTINWGGAEKPLPVDMVLISLCFGLSIATMVQCFGHISGGHINPAVTVAMVCTRRISIAKSVFYIAAQCLGAIIGAGILYLVTPPSVVGGLGVTTVHGNLSAGHGLLVELIITFQLVFTIFASCDSKRTDVTGSIALAIGISVAIGHLFAINYTGASMNPARSFGPAVIMGNWENHWIYWVGPIIGAVLAGGLYEYVFCPDVELKRRFKEAFSKAAQQTKGSYMEVEDNRSQVETDDLILKPGVVHVIDIDRGEEKKGKDPSGEVLSSV

SEQ ID NO: 15772 - protein, 301 aa, Bos taurus
MVAFKGVWTQTFWKAVTAEFLAMLIFVLLSLGSTINWGGAEKPLPVDMVLISLCFGLSIATMVQCFGHISGGHINPAVTVAMVCTRRISIAKSVFYIAAQCLGAIIGAGILYLVTPPSVVGGLGVTTVHGNLSAGHGLLVELIITFQLVFTIFASCDSKRTDVTGSIALAIGISVAIGHLFAINYTGASMNPARSFGPAVIMGNWENHWIYWVGPIIGAVLAGGLYEYVFCPDVELKRRFKEAFSKAAQQTKGSYMEVEDNRSQVETDDLILKPGVVHVIDIDRGEEKKGKDPSGEVLSSV

SEQ ID NO: 15773 - protein, 263 aa, Bos taurus
MWELRSASFWRAICAEFFASLFYVFFGLGASLRWAPGPLHVLQVALAFGLALATLVQAVGHISGAHVNPAVTFAFLVGSQMSLLRAICYMVAQLLGAVAGAAVLYSVTPPAVRGNLALNTLHPGVSVGQATIVEIFLTLQFVLCIFATYDERRNGRLGSVALAVGFSLTLGHLFGMYYTGAGMNPARSFAPAILTRNFTNHWVYWVGPVIGAGLGSLLYDFLLFPRLKSVSERLSILKGSRPSESNGQPEVTGEPVELKTQAL

SEQ ID NO: 15774 - protein, 264 aa, Salmonella typhimurium LT2
MNDSLKAQCGAEFLGTGLFLFFGIGCLSALKVAGASLGLWEICIIWGLGISLAVYLTAGISGGHLNPAVTIALWLFACFPKQKVLPYIIAQFAGAFGGALLAYVLYSSLFTEFETAHHMVRGSVESLQLASIFSTYPAAALNVWQAALVEVVITSILMGMIMALTDDGNGIPKGPLAPLLIGILVAVIGASTGPLTGFAMNPARDFGPKLFTWLAGWGNMAMSGGREIPYFIVPIVAPVIGACAGAAIYRYFIGKNLPCNRCEL

SEQ ID NO: 15775 - protein, 323 aa, Ovis aries
MSDRPAARRWGKCGPLCTRESIMVAFKGVWTQTFWKAVTAEFLAMLIFVLLSLGSTINWGGAEKPLPVDMVLISLCFGLSIATMVQCFGHISGGHINPAVTVAMVCTRRISIAKAVFYIAAQCLGAIIGAGILYLVTPPSVVGGLGVTTVHRNLSAGHGLLVELIITFQLVFTIFASCDSKRTDVTGSIALAIGISVAIGHLFAINYTGASMNPARSFGPAVIMGNWENHWIYWVGPIIGAVLAGGLYEYVFCPDVELKRRFKEAFSKAAQQTKGSYMEVEDNRSQVETDDLILKPGVVHVIDIDRGEEKKGKDPSGEVLSSV

SEQ ID NO: 15776 - protein, 259 aa, Mus musculus
MGRKKIQITRIMDERNRQVTFTKRKFGLMKKAYELSVLCDCEIALIIFNSSNKLFQYASTDMDKVLLKYTEYNEPHESRTNSDIVETLRKKGLNGCESPDADDYFEHSPLSEDRFSKLNEDSDFIFKRGPPGLPPQNFSMSVTVPVTSPNALSYTNPGSSLVSPSLAASSTLADSSMLSPPPATLHRNVSPGAPQRPPSTGSASGMLSTTDLTVPNGAGNSPVGNGFVNSRAPPIPMPSRRKMNWSVWPSLTADFPAAA

SEQ ID NO: 15777 - protein, 498 aa, Mus musculus
MGRKKIQITRIMDERNRQVTFTKRKFGLMKKAYELSVLCDCEIALIIFNSSNKLFQYASTDMDKVLLKYTEYNEPHESRTNSDIVETLRKKGLNGCENPDADDYFEHSPLSEDRFIKLNEDSDFIFKRGPPGFPPQNFSMSVTVPVTSPNPLSDTNPGSSLVSPSLAASSTLAETSMLSPPPATLHRNVSPGAPQRPPSTGSASGMLSTTDLTVPNGAGNSPVGNGFVNSRASPNLIGNTGANSLGKVMPTKSPPPPGGGSLGMNSRKPDLRVAIPPSSKGMMPPLSEEEELELNAQRISSSQATQPLATPVVSVTTPSLPPQGLVYSAMPTAYNTDYSLTSADLSALQGFTSPGMLSLGQASAWQEHHLGQTTLSSLVAGGQLSQGSNLSINTNQNINIKSEPISPPRDRMTPSGFQHHHHHPQQQPPPQPPQPQPRQEMGRSPVDSLSSSSSSYDGSDREDPRGDFHSPIVLGRPANTEDRESPSVKRMRMDTWVT

SEQ ID NO: 15778 - protein, 125 aa, Harmonia nutans
TNRQVTYSKRRNGIFKKAHELTVLCDAKVSLIMFSNTGKFHEYISPSTTTKKIYDMYQTTLGFDLWSSHYERMTETMKKLKDSNNKLRREIRQRVLGEDLDGLDMNDLTILEQQMQDSLTVVRER

SEQ ID NO: 15779 - protein, 228 aa, Hieracium piloselloides
MARGKIQIKKIENSTNRQVTYSKRRNGLFKKASELTVLCDAKVSIIMVSCTDKLHEYISPSTTTKQFFDQYQKAAGIDLWNSHYEKMQEELRQLKEVNKNLRRQIRQRLGDCLEHLGFEKLLDLEKESQEAVYIIRERKLKVIGNKLETSKKKVRSAQDVYKKLMHEFGIRGEDPQFGMIEDGEYDAVYGYPPQMSAPRILTFRLQPNNHPNNLHATASDLTTYALLG

SEQ ID NO: 15780 - protein, 224 aa, Hieracium piloselloides
MARGKIQIKKIENSTNRQVTYSKRRNGLFKKASELTVLCDAKVSIIMVSCTDKLHEYISPSTTTKQFFDQYQKAAGIDLWNSHYEKMQEELRQLKEVNKNLRRQIRQRLGDCLEHLGFEKLLDLEKESQEAVYIIRERKLKVIGNKLETSKKKVRSAQDVYKKLMHEFGIRGEDPQFGMIEDGEYDAVYGYPPQMSAPRILTFRLHPNNLHATASDLTTYALLG

SEQ ID NO: 15781 - protein, 208 aa, Sagittaria montevidensis
MGRGKIEIKRIENSANRQVTYSKRRNGIIKKAREISVLCGCEVSLVIFSSSGKMSEFHSTTLSKILETFQQNQGQTLWGAKHESLKAEIDRMKKENDNMRIQLRHMKGEDLTSMEPRDLYTIETALINGIANVRGKQMEIFKKKAKNQKALEEENKQLAYILHQQSLAMNGNLREMPQDYHQKDRDFTAPVPFGFRVQPMQPNLQENK

SEQ ID NO: 15782 - protein, 248 aa, Rosa hybrid cultivar
MAYENKPNTVLDADAQRRLGRGKIEIKRIENTTNRQVTFCKRRNGLLKKAYELSVLCDAEVALIVFSNRGRLYEYSNNSVRETIERYKKACADSSNNGSVSEATTQYYQQEAAKLRAQITTLQNSNRGYMAEGLSNMSIKELKGVETKLEKAISRIRSKKNELLFAEIEYMQKRELDLHNNNQLLRAKIADNERHQQSINAIAGGHGSYEIMQPTQPFHEARNYFQVNALEPNIHQYSRHDQISLQLV

SEQ ID NO: 15783 - protein, 200 aa, Chloranthus spicatus
IENSTNRQVTFSKRRNGIVKKAKEITVLCDAKVSFIIFSTTGKMFEFVSPSTTLMDMLERYQTNSGKRLWDAKHERLSAELDRIKKENDSMQIELRHLKGEDINSLHPKELIPIEEALQSGLTNVRAKQMDFLKMLKKNERTLEDENKRLSYILHHQQLALDGNMRDLDNGFHPKERDYSSQMPFIFRVQPIQPNLQQSK

SEQ ID NO: 15784 - protein, 194 aa, Chloranthus spicatus
GGILKKAKELSVLCDAQVSLIMSSSTGKFYEYCSPGTNTKKIFDRYQQASGINLWNSQYEKMQEYFEKLKETNNKLRKEIRQRRGEDLNGLNINELRSLEQNLDDSLKIIRERKYHVIKTQTETYGKKLKHRQEEHEKLLHRLEGIDMNQGYDMLDREGDYETAFGLANGGGHVFAFRLQPIQPNLHDNGYGTH

SEQ ID NO: 15785 - protein, 187 aa, Akebia quinata
NGIMKKAKEITILCDAQVSLVIFSSSGKMSDYCSPSTTLTKVLDRYQKTSGKRLWDAKHEYLSTEVDRVKKENDCMQIELRHLKGEDITSLNPKELIPIEEALENGLVNVRAKQMEYLKMLKKNERYLEEENKHLRCILHHQQIEIEGNMRMEMENGYNTQKGRDYPSQMPFAFRAQPIQPNLQENK

SEQ ID NO: 15786 - protein, 187 aa, Akebia quinata
NGIMKKAKEITILCDAQVSLVIFSSTGKMCDYCSPSTTLTKVLDRYQKTSGKRLWDAKHEYLSTEVDRIKKENDCMQIELRHLKGEDITSLNPKELIPIEEALENGLVNVRAKQMEYLKMLKKNERYLEEENKHLRCILHHQQIEIEGNMRMEMENGYNTQKGRDYPSQMPFAFRAQPIQPNLQENK

SEQ ID NO: 15787 - protein, 203 aa, Akebia quinata
AGIIKKARELSVLCDAQVSLIMFSGTEKLSEYISPTVTTKKVFDRYQQTAGINLWSTHYERLQENLNKQKEINRRLRKEIRQRMGEDLNELSIDVLRGLEQNMEHSLNIVRERKLKVIRTQSDTYRKKVTHLEQVHNNLMRELVQEGRNEDPHYVFANHNGDYQSALELANNGGSHIFALRLQPSQPILREGGGYGSHDLRLA

SEQ ID NO: 15788 - protein, 143 aa, Cichorium intybus
MAREKIKIRKIDNITARQVTFSKRRRGLLKKAEELAVLCDADVALVIFSATGKLFEYASSSMQELLGKYKLHSTNNVNKVDEPSLDLQLVESQESRMSQEVLEKDRELSQLRGEDLQGLTLEELQRLESLLEGRLNRVAPDKG

SEQ ID NO: 15789 - protein, 189 aa, Michelia figo
GGIMKKAKELTVLCDAQVSLIMFSSTGKFSEYCSPSTTTKNIFDRYQQASGTSLWNSHYERMQGHLIKLKEENNNLRREIRQRIGEDLDDLEIEELRGLEQNLESSIKVVRERKYHVIQTQTETYKKKLRSLNDEQAKLIRVLEGQAENGAYGLVDNGGPDYESALVLANGGAHILHDTGFGIHDLRLA

SEQ ID NO: 15790 - protein, 256 aa, Selaginella remotifolia
ETWLVTTTSSSNPEVGLATGLAATGGAQDLLNPPLNKQKEPPVGRGKIEIKRIENATSRQVTFSKRRGGLLKKAHELSVLCDAQVALIIFSSTGKLFEYASTSMKEILDRYGKYPESVQGGNMASHHEASDFISHEIRRLKQQLQRSQQSRRHLLGDDLSHLPIKDLQNLEQQLEVGLSRVRSRKDQVLMDQVDELRRRELTLHKDNEMLRRRLSDVQGMAESGRSTLIVNPWRQGNLLQTWQMYPCHFLDTKAAA

SEQ ID NO: 15791 - protein, 183 aa, Helleborus orientalis
NGILKKAKEIAVLCDAQLSLVIFSSTGKMTDYTSPNTSLIKILDRYQTSSGNKLWDAKHEHLHHEVDRVKKENDSMRIELRHLKGEDLTSLNPRELIPIEEGLEHGLSKVRDKKTEIWKRIKKNDRMLEEENEHLHNIVKQQAMDGNVRDFENEYHQKGMDYHSQMPFAFHIQPMQPNLQDTE

SEQ ID NO: 15792 - protein, 185 aa, Helleborus orientalis
NGILKKAKEIAVLCDAQLSLVIFSSTGKMTDYTSPNSSLIKILDRYQKSSGNKLWDAKHEYLHHEVDRIKKENDSMQIELRHLKGEDLTSLNPRELIPIEEALEHGLSKVRDKKTEIWKKMKKNDRMLEEENTHLHNIVKQQTVDGNVRDFQNGYHHQKGGMDYHSQIPYNFHVQQMQPNLQDAK

SEQ ID NO: 15793 - protein, 200 aa, Helleborus orientalis
AGILKKAKELTVLCDAQVSLLMFSSSGKVHEYTSPSTTMKNVYDRYQQVLGVNLWQSHYERLQDNLKKQKEINSKLRREIRQRNGEDLDNLSCQQLRGLEQNMEKSVNCVRARKFHVLHTQTETFKKKVKHLEQEQTNLFRTCERDNGDEHYAVIGPEGDYQSAIGLANGGSHIFAFRLQPSQANIQDEEGYDPYSLSLA

SEQ ID NO: 15794 - protein, 164 aa, Cleisostoma racemiferum
IENKINRQVTFAKRRNGLLKKAYELSVLCDAEVALIIFSNRGKLYEFCSSTSMLKTLEKYQKCNFGSPESTIISRETQSSQQEYLKLKSRVEALQRSQRNLLGEDLGPLGSKELEQLERQLDSSLKQIRSTRTQFMLDQLADLQRREHMLCEANKALKRRFEES

SEQ ID NO: 15795 - protein, 242 aa, Gerbera hybrid cultivar
MGKGRLELKRIENKINRQVTFAKRRNGLLKKAYELSVLCDAEVALIVFSTRGKLYEFSSTSSMLKTLERYEKCSFGPPEQRRPAAKEDLQEQSSYQEYMRLKERYDALKRLERNYYGEEIDSLTTSELESLERQLHCSLKQIRTIRTQSLLDKLYEQQKMEHQLYESNKTLRLRLDEEGQAEALQWDAHAHANGMVYAHQHQVSQPMRDTFYHPTGCETTLQIGYQSEQMSAVNHQMQGWPA

SEQ ID NO: 15796 - protein, 243 aa, Agapanthus praecox
MGRGRVELKRIENKINRQVTFSKRRNGLLKKAYELSVLCDAEVALIVFSSRGKLYEFGSAGTSKTLERYQRCCYTSQDATIADREKQNWYQEVARLKAKFESLQSAQRHLLGEDLGPLSVKELQQLERQLEASLSQARQRKTQIMFDQMEELRKKEHHLGEINKQLKTKLEAEGENLRAIQGSWESDATNVGGGNVFSMHPSHSSAMECEPTLQIGYHQLVQPEGSLPRNSGGENNFMLGWVL

SEQ ID NO: 15797 - protein, 185 aa, Aquilegia alpina
NGILKKAREIHILCGAEIALVIFSSTGKMSEYISPPGPTTLIKILDKYQKTSGKKLWDAKHEYLSSELDRIKKENDNMQIELRHLKGEDINSLNAKELIPIEEALQNGLSKVRDKKSDIWRMMRKNTGLLEEENKRLSYHLHSLEIGGNDREMENGYHQKGRDYPAQMPFTFRVQPIQPNLQESK

SEQ ID NO: 15798 - protein, 203 aa, Clematis chiisanensis
NRLVTYSKRRTGIMKKARELTVLCDAEVSLIMFSCTGKLAEYTSPSTTPKKVYDQYQRVTRINLWKSYYEKLQESLKQQKEVNMKLHKEIGQRTGKESLDGVSFEKLHGLEQDLDGTLKVVRERKYHVIATQTETSKKKLKNKQEAHKRLVREIEARNEVAYYGGDFESIMAMSNGGAHLFSYHLQPNPQEVEAHGACDFHLA

SEQ ID NO: 15799 - protein, 185 aa, Berberis gilgiana
NGIMKKAKEISVLCEAEVSLVIYSGTGKMSEYCSPSTSLIKILDRYQKASGKKLWDAKHEYLNTEVDRVKKENDNMQIELRHLKGEDITSLHPKELIPIEEALQNGLTKVKAKQNEYIKMMKKKERMLEEENKHLSCILHQQQVEMDGNVREMENGYQQKSRDFLNHIPFAFCVQPIQPNLQQNK

SEQ ID NO: 15800 - protein, 185 aa, Berberis gilgiana
NGIMKKAKEITVLCEAEVSLVIFSGTGKMSEYCSSSTSLIKILDRYQKASGKRLWDAKHEYLNTEVDRVKKENDSMQIELRHLKGEDITSLHPKELIPIEAALQHGLTKVIAKQTEYVKMMKKKERMLEEENKHLSYILHQQQGEMDGNLREMENGYQQNNRDFPNNIPFAFRGQPIQPNLQGNK

SEQ ID NO: 15801 - protein, 210 aa, Gerbera hybrid cv. 'Terra Regina'
MGRGKVQLKRIENKINRQVTFSKRRGGLLKKAHEISVLCDAEVALIVFSAKGKLFEYSTDSCMENILDRYEQYSNIDRQHVAVDTDSPIRWTQECNKLKSRAELLQRNLRHYMGEDIESLGLREIQNLEQQLDTALKRIHSKKNQLLHQSISELQKKEKAIQEQNNTLIKNIKEKEKTITQKAQWEPHNYGPNTTPLLFSLPPHSSLNIG

SEQ ID NO: 15802 - protein, 187 aa, Hydrangea macrophylla
NGILKKAKEITVLCDASVSLIVFASSGKMHEYCSPKTTLIDILDKYHTQSGKRLWDAKHENLSNEIDRIKKENDNMQIELRHLKGEDVTSLNHKELMALELALENGLASIRDRKDEVFEMIKKNVKIQALEDDNKRLIYELHQQEMNMECNVREMENGYQRVGDYQSHQMPFAFRVQPIQPNLQERM

SEQ ID NO: 15803 - protein, 125 aa, Osmadenia tenella
TNRQVTYSKRRNGIFKKAHELTVLCDAKVSLIMFSNTGKFHEYISPSTTTKKIYDMYQTTLGFDLWSSHYERMTETMKKLKDSNNKLRREIRQRVLGEDLDGLDINDLTILEQQMQDSLTVVRER

SEQ ID NO: 15804 - protein, 222 aa, Canavalia lineata
MARQKIKIKKIDNVTARQVTFSKRRRGIFKKAEELSVLCDAEVGLIIFSATGKLFEYPSSSMKDIITKYNQHSHDNNQLGRPQNLQVEQCVDLSKEVAERNQQLRQMKGEDFQGLNLDDLQQLEKTLETGLERVNETKEKRIMDEIVALHKKGLKLEEENKHLKQKMAMLCMGKSSFLVDSDITLQEVVSSESMNVCSCNSGPSLEDDSSDTSLKLGLPFPN

SEQ ID NO: 15805 - protein, 221 aa, Pinus radiata
MVRGKTQMKRIENDTSRQVTFSKRRNGLLKKAYELSVLCDAEVGLIIFSPRGKLYEFASPSMEEILEKYKKRSKENGMAQTTKEQDTQYSKHSKQKLANMEEQIRILESTQRKMLGEGLESCSMAELNKLESQAERGLSHIRARKTEILVDQIECLKRKERLLSEENALLSRKWVDRQSVDGSGSTSSSIGLGSIEQIEVETQLVIRPPNAQDHCSVNSGH

SEQ ID NO: 15806 - protein, 208 aa, Gnetum gnemon
LKKAYELSILCDAEVALIIFSSTGKLYDYCSSSMKVLLERYENDFREKGTARDQEIDNGDVLKAQQQVAELERARRQMLGEDLEGLSLKQLQILEANLETALNRVRNRKGVQILKDINDLQRKGQEILEENNRLRQQLRQRYNNRAPLENFEAEESLPIGQLLAHEPPQSQSSDSISTSFSLKLGNGVVIPDNEVSDTSLHLGLPSHS

SEQ ID NO: 15807 - protein, 244 aa, Gnetum gnemon
  unsure (1)..(244): unsure at all Xaa locations
MVRGKTQMKRIENATSRQVTFSKRRNGLLKKAYELSILCDAEVGLIIFSPRGKLYEFANPSMQKMLDRYQKCCQESTANTSKNLVEDTQHLKREVAIMEEKIKMLEYAQKKLLGENLESLSMKELTQLENQAERGLVNIRARKTEILMDQINQLKRKSQLLGEENAVLRKKCNGPYMGGGLLSILHAGASGAGPXNNNNNNGGSGVTHHDDNNNNNRSNNVNVEDVETQLNIGPPDVHCSINQC

SEQ ID NO: 15808 - protein, 253 aa, Gnetum gnemon
MGRGRVQLRRIENKINRQVTFSKRRNGLLKKAYELSVLCDAEVALIIFSTRGKLYEFASSSMSKTLERYEKCSYSMQENASTDRDAQNWHHEVTKLKAKLESLHKAQRSLMGEDLGPLNIKELQSLEQQLEVALGHVRNRKTQLLIQTIDELRDKERTLQEVNKSLQKKLSETEGRNVIPALPHAPNGSGEWESSTLTTTTYALQTQQTSNIHHVDCEPTLHIGPYHQAVHHEAITAPPATHSEPHNQYIWWV

SEQ ID NO: 15809 - protein, 185 aa, Liriodendron tulipifera
GGILKKAKEITVLCDAQVSLVIFSSTGKISEYCSPSTTLVKILDRYQKSSGKKLWDAKHEHLSNEVERIKKENDSMQIKLRHLKGEDITSLHPRELIPIEEALQNGLACVRSKQMEYLKMLKKNERTLEEENKRLSYILHQQQLAMDGNAREMDHGYNQREREYHQQLPFTFRLQPIQPNLHQNQ

SEQ ID NO: 15810 - protein, 200 aa, Syringa vulgaris
NRQVTYSERRNGLMKKAKEISVLCDAQVSVVIFASSGKMHEFCSPSTTLIDMLDQYHKLSGKKLWDAKHEHLDNEINRIKKENDRMQTELRHLVGEDITTLNYKELMVLEEVLENGISSLKAKQMEFVPAMRKHNEMLGGRRTGGLQFKLRQMHLDPTMDEHNVLENGDVYHQQGVGDYEYQMPFAFRVQPMQPNLQDRF

SEQ ID NO: 15811 - protein, 184 aa, Calycanthus floridus
SGLLKKAKEITVLCDADVSLIIFSATGKMSEYCSPSTSLIKILDRYQKASGNKLWDAKHEYLSMEVERIKKENDSMQIELRHLKGEDLTSLRPKELIPIEEALQNGLTNVRERQEELLKILKKNEKVLEEENMRLSYILHHQQLAMDGSMREMEQGYHHEESDYPSDMQLAFRVQPLQPNLQNK

SEQ ID NO: 15812 - protein, 186 aa, Calycanthus floridus
GGILKKAKEITVLCDAQVSLVIFSSTGKMSEYCSPSTTLVKILDRYQKASGKRLWDAKHEYLNNEVERIKKENDSMQIKLRHLKGEDLTSLHPKELIPIEEALENGLASVRDRQMECLRIYKKNERTLEDENKRLTYILHQQQQMAMDGNVREVDHGYHHKIRDYSNQMPFAFRIQPIQPNLHQDK

SEQ ID NO: 15813 - protein, 245 aa, Eucalyptus globulus
MGRGRVQLKRIENKINRQVTFSKRRCGLLKKAHEISVLCDADVALIVFSTKGKLFEYATDCCMERILERYERYSYAESQVLTNNAETNGNWTLEHAKLKARMEILQKNQKNLMGEELDSLSLKELQNLEHQLDTALKNIRSRKIQLMCESISELQRKDKALQEQNNMLAKKVKEKEKALAQQTQWDNPQDDGLTSSSVILSQSLQPLNIGGPYHPSGIEEGAALGPPQHRNATLFPSWMLSHLQE

SEQ ID NO: 15814 - protein, 205 aa, Eucalyptus globulus
MGRGRVQLKRIENKINRQVTFSKRRCGLLKKAHEISVLCDADVALIVFSTKGKLFEYATDCCMERILERYERYSYAESQVLTNNAETNGNWTLEHAKLKARMEILQKNQKNLMGEELDSLSLKELQNLEHQLDTALKNIRSRKIQLMCESISELQRKDKALQEQNNMLAKKVKEKEKALAQQTQWDNPQDDGLTSSSGSLPSEWN

SEQ ID NO: 15815 - protein, 244 aa, Eucalyptus globulus
MGRGRLQLKRIENKINRQITFSKRRAGLLKKAHEISVLCDAEVALIVFSAKGKLFEYSTDSCMERILERYERYSYAEHQVLASETESIGSWTLEHAKLKARLEVLHRNYRHFMGEDLDSLSLKDLQNLEQQLESALKHIRSRKNQLMHESISVLQKKDRALQEQNNLLTKKIKEKERALAQQAQWEQQDHALDSPVVLPHYLPSLDINGSYQARHNGHDDGENLTQPRAGTLLPPWISASQLRL

SEQ ID NO: 15816 - protein, 198 aa, Sanguinaria canadensis
AGIMKKARELTVLCDAEVSLIMFSSTGKFSEYISPSATTKRIYDRYQQVSGTNLWNSHYESMQNHLNKQKEINNRLRREIRQRMGEDLDDLTFEELRGLEQNLDTSLKVVRDRKYHVITTQTDTTRKKIRSLTETHHNLLREFEGRDEDPHYALANQEEDYEAVLELANGGPNIFAFRLQPSQPNLHDGYSSNDLRLA

SEQ ID NO: 15817 - protein, 247 aa, Ipomoea nil
MGRGRVQLKRIENKINRQVTFSKRRTGLLKKAHEISVLCDAEVALIVFSTKGKLFEYATESCMEKILERYERYSYAERQLNSTDQNSQGSWTLEHAKLKARMEVLQRNQRHYEGEDLDSLSLKELQNLERNLIQHSNIRSKRNQLMYESILCSEKDKHCRTKYQLSKKIKEREKEMATQQQQQQEVQWEQPNDDINSSYVVPPPLVHLSSEGEYQGEGEYGETEGTQRQQQNNTSAMPQWMLSHLQG

SEQ ID NO: 15818 - protein, 126 aa, Actinidia deliciosa
  unsure (1)..(126): unsure at all Xaa locations
IENKINRQVTFSKRRSGLLKKANXISVLCDAEVALIVFSHRGKLFEYSTDACMEKILERYERYSYAERELVNDPETPFLNVQKNWSLECTRLGEKIELLQRNIGHYMGQHLDSLSLKDLQHFEQQL

SEQ ID NO: 15819 - protein, 236 aa, Gossypium hirsutum
MGRGRVELKRIENKINRQVTFAKRRNGLLKKAYELSVLCDAEVALIIFSNRGKLYEFCSSSSMIKILERYQKCNYGAPEPNVSSREAALELSSRQEYLKLKARYDALQRSQRNLLGEDLGPLSSKELESLEKQLDSSLKLIRSTRTQYMLDQLNDLQRKEHLLNEANRTLKQRLVEGYQVNSLQLNPNATEDVGYGRQQVHHQPHGDAFFHPLDCEPTLQIGYQHDPMSVVTAGPV

SEQ ID NO: 15820 - protein, 240 aa, Arabidopsis thaliana
MAREKIQIRKIDNATARQVTFSKRRRGLFKKAEELSVLCDADVALIIFSSTGKLFEFCSSSMKEVLERHNLQSKNLEKLDQPSLELQLVENSDHARMSKEIADKSHRLRQMRGEELQGLDIEELQQLEKALETGLTRVIETKSDKIMSEISELQKKGMQLMDENKRLRQQGTQLTEENERLGMQICNNVHAHGGAESENAAVYEEGQSSESITNAGNSTGAPVDSESSDTSLRLGLPYGG

SEQ ID NO: 15821 - protein, 210 aa, Arabidopsis thaliana
MAREKIQIRKIDNATARQVTFSKRRRGLFKKAEELSVLCDADVALIIFSSTGKLFEFCSSSMKEVLERHNLQSKNLEKLDQPSLELQLVENSDHARMSKEIADKSHRLRQMRGEELQGLDIEELQQLEKALETGLTRVIETKSDKIMSEISELQKKGMQLMDENKRLRQQVCVLPSLLITNPFLLSTINVHTPKFNPQLSTTHMFDHTVR

SEQ ID NO: 15822 - protein, 220 aa, Arabidopsis thaliana
MAREKIRIKKIDNITARQVTFSKRRRGIFKKADELSVLCDADVALIIFSATGKLFEFSSSRMRDILGRYSLHASNINKLMDPPSTHLRLENCNLSRLSKEVEDKTKQLRKLRGEDLDGLNLEELQRLEKLLESGLSRVSEKKGECVMSQIFSLEKRGSELVDENKRLRDKLETLERAKLTTLKEALETESVTTNVSSYDSGTPLEDDSDTSLKLGLPSWE

SEQ ID NO: 15823 - protein, 264 aa, Brassica napus
MGRGKIEIKRIENANSRQVTFSKRRAGLLKKAHELSVLCDAEVAVIVFSKSGKLFEFSSTSMKKTLLRYGNYQISSDVPGINCKTENQEECTEVDLLKDEISMLQEKHLHMQGKPLNLLSLKELQHLEKQLNFSLISVRERKELLLTKQLEESRLKEQRAELENETLRRQVQELRSFLPSINQHYAPSYIRCFAIDPKNSLLSNTCLGDINCSLQNTNSDTTLQLGLPGEAHDTRKNEGDRESPSSDSVTTSTTRATAQRISLV

SEQ ID NO: 15824 - protein, 265 aa, Brassica napus
MDRGKIEIKRIENANSRQVTFSKRRAGLLKKAHELSVLCDSEVAVIVFSKSGKLFEFSSTGMKRTVLRYENYQRSSDAPLIKYKPENQEEDCTEVDFLKNEISKLQEKHLQMQGKGLNALCLKELQHLEQQLNVSLISVRERKELLLTKQIEESRIREQRAELENETLRRQVQELRNFLPSINQNYVPSYITCFAIDPKNSPVNNSGLDDTNYSLQKTNSDTTLQLGLPGEAQARRRSEANRESPSSDSVTTSTTKATPQRINLV

SEQ ID NO: 15825 - protein, 205 aa, Brassica oleracea var. botrytis
VLCDADVALIIFSSTGKLFEFCSSSMREVLERHNLQSKNLEKLDQPSLELQLVENSDHALLSKEIAGKSHRLRQMRGEELQGLNIEELQQLEKALESGLTRVIETKSEKIMNEISYLQRKGMQLMDVNKRLRQQGTQLTEENERLGQQIYNNVHERYGGGESENTAVYEEGHSSESITNAGNSTGAPVDSESSDISLRLGLPYGG

SEQ ID NO: 15826 - protein, 106 aa, Eranthis hyemalis
STNRQVTYSKRKNGILKKAKEITVLCDAEVSLVIFSSTGKMSEFCSPSIPLIKILENYHKSSGRKLWDAKHEYLHSEVERIKKENDNMQIQLRHLKGEDLTSLNPK

SEQ ID NO: 15827 - protein, 246 aa, Silene latifolia
MGRGRVQLKMIENKINRQVTFSKRRSGIIKKAHEISVLCDAEVALIIFSHRGKLFDFASDSCMEKILERYERYCYAEKQLASNDPDAQVNWTFDYAKLKAKLDLLQRNHRQYLGQDLDALNLKELQSLEQQLDVGLKHIRSKKNQLMHDSISELQKKERSMEEQNKMLTKKIKEKGKAATTETQQMQWQQQQQNHQDVATSSDYLIHPPVPLNMSNSYEKEQGGEGSRNDLNLTLESNCWAHHSLF

SEQ ID NO: 15828 - protein, 231 aa, Glycine max
  unsure (1)..(231): unsure at all Xaa locations
MVREKIQIKKIDNATARQVTFSKRRRGLFKKAEELSVMCDADVALIIFSSTGKLFEYSSSSMKEILERHHLHSKNLARMEQPSLELQLVENSNCSRLSKEVAEKSHQLRQLRGEDLQGLNIEELQQLERSLETGLGRVIEKKGEKIMSEIADLQRKGMLLMEENERLKRHVAGIINXAKGMGGAESENFVMDEGXQSSESVTVRXCNSXLGPPQDFESSDTSLKLGLPYSG

SEQ ID NO: 15829 - protein, 212 aa, Glycine max
  unsure (1)..(212): unsure at all Xaa locations
MTRKRIQIKKIDNISSRQVTFSKRRKGLFKKAQELSTLCDADIALIVFSATSKLFEYASSSMHQVIERRDSHSAMNRLDRPSIELQIENDSNEILRKKVEDKNRELRQMNGEDLQGLTLQELHKLEEHLKRGLINVSKVKDEKLMQEISTLKRKGVELMEENQRLKQVVPXXLIHVHRQSSESILSNSSNLPEDGGSDTSLKLGLPXVFNKM

SEQ ID NO: 15830 - protein, 251 aa, Glycine max
  unsure (1)..(251): unsure at all Xaa locations
MTRKRIQIKKIDNISSRQVTFSKRRKGLFKKAQELSTLCDADIALIVFSATSKLFEYASSSMHQVIERHDRYSAIHRLDRPSIELQIESDSNNILRKKVEDKTRELRQMNGEDLQGLTLQELQKLEEHLKRSLTNVSKVKDAKFMQEISTFKRKGVELMEENQRLKQVPSLIHAXXSYRQSSESILSTSNLPEDGGSNTSLKLGLPXIMNKMXIIXKXSVSLPLYVSQNQLNILCCLLFKNNSCKVSKSKG

SEQ ID NO: 15831 - protein, 212 aa, Glycine max
  unsure (1)..(212): unsure at all Xaa locations
MVRRKIPIKKIDDVTARQVTFSKRKSGLFKKARELSLLCDAEIALIVFSPGGKLFDYGSSSMQKVIERHILRSELNLEKLDQSCPTEQVRCNYADLNKEFADRTREMRQLNGEELQGLTLRELQKLEERLDSSLNRVYKAKVENFIKEIGILKEKGKKLMEDNMLIKQXCIIVAMIKLPRNEICSVQRHEHEQGQLFDTSLTLGLPFPAGSK

SEQ ID NO: 15832 - protein, 240 aa, Medicago sativa
RGKIQIKRIENTTNRQVIFSKRRNGLLKKAKELAILCDAEVGVMIFSSTAKLYDFASTSLRSVIGRYNKSKEEHNQLGSTASEIKFGQREAAVLRQQLHNLQESHRQIMGEELSGLTVKELQGLENQLEISLRGVRMKKEQLFMDEIQELNRKGDIIHQENVELYRKVYGTKDKNGTNRVLSLTNGVGIGDDSNRTCESPAQPATETRTTTALMHSLEISVLTCKQGKWTQILISYMNGI

SEQ ID NO: 15833 - protein, 247 aa, Pisum sativum
MGRGRVELKRVENKINRQVTFAKRRNGLLKKAYELSVLCDAEVALIVFSNRGKLYEFCSTSSMLKTLERYQKCNYGAPEGNVTSKEALVLELSSQQEYLKLKARYESLQRSQRNLMGEDLGPLSSKDLETLERQLDSSLKQIRSTRTQFMLDQLGDLQRKEHLLCEANRALRQRMEGYQINSLQLNLSAEDMGYGRHHQGHTHGDELFQVQPIECEPTLQIGYHQGDPGSVVTAGPSMNNYMGGWLP

SEQ ID NO: 15834 - protein, 240 aa, Pisum sativum
MGRGRVQLKRIENKINRQVTFSKRRAGLLKKAHEISVLCDAEVALIVFSHKGKLFEYATDSCMEKILERYERYSYAERQLVANDSESQGNWTIEYTRLKAKIDLLQRNYRHYMGEDLGTMSLKELQSLEQQLDTALKLIRTRRNQLMYESISELQKKEKVIQEQNNMLAKKIKEKEKIAAEQQVQWEHPNHHGVNPNYLLHQQLPSLNMGGNYREEAPEMGRNELDLTLEPLYTCHLGCF

SEQ ID NO: 15835 - protein, 228 aa, Oryza sativa (japonica cultivar-group)
MARERREIKRIESAAARQVTFSKRRRGLFKKAEELSVLCDADVALIVFSSTGKLSHFASSSMNEIIDKYNTHSNNLGKAEQPSLDLNLEHSKYAHLNEQLAEASLRLRQMRGEELEGLSIDELQQLEKNLEAGLHRVMLTKDQQFMEQISELQRKSSQLAEENMQLRNQVSQISPAEKQVVDTENFVTEGQSSESVMTALHSGSSQSQDNDDGSDVSLKLGLPCGAWK

SEQ ID NO: 15836 - protein, 265 aa, Lycopersicon esculentum
MAREKIQIKKIDNSTARQVTFSKRRRGLFKKAEELSVLCDADVALIIFSSTGKLFDYSSSSMKQILERRDLHSKNLEKLDQPSLELQLVENSNYSRLSKEISEKSHRLRQMRGEELQGLNIEELQQLERSLETGLSRVIERKGDKIMREINQLQQKGMHLMEENEKLRQQVMEISNNNNNNNNGYREAGVVIFEPENGFNNNNNEDGQSSESVTNPCNSIDPPPQDDDSSDTSLKLGLATLLRLKRSKARCGYFCMLLEEGEKKK

SEQ ID NO: 15837 - protein, 241 aa, Nicotiana sylvestris
MGRGRVELKRIENKINRQVTFAKRRNGLLKKAYELSVLCDAEVALIIFSNRGKLYEFCSSSSMLKTLERYQKCNYGAPETNISTREALEISSQQEYLKLKARYEALQRSQRNLLGEDLGPLNSKELESLERQLDMSLKQIRSTRTQLMLDQLTDLQRKEHALNEANRTLKQRLMEGSQLNLQWQQNAQDMGYGRQTTQTQGDGFFHPLECEPTLQIGYQNDPITVGGAGPSVNNYMAGWLP

SEQ ID NO: 15838 - protein, 245 aa, Nicotiana sylvestris
MGRGRVQLKRIENKINRQVTFSKRASGLLKKAHEISVLCDAEVGLIVFSTKGKLFEYSTDSCMERILERYERYSYAERQLTATDDETPGSWTLEHAKLKARLEVLQRNQRHYAGEDLDSLSMKELQNLEHQLDSALKHIRSRKNQLMHESISELQKKDKALQEQNNNLSKQVKEREKELAQQTQWEQQSHDHLNSSSFVLTQPLSSLHLGEAYPTAGDNGEVEGSSRQQQQNTVMPPWMLRHLNG

SEQ ID NO: 15839 - protein, 242 aa, Nicotiana sylvestris
MGRGKVQLRRIENKINRQVTFSKRRGGLVKKALEISVLCDAEVALIVFSHKGKIFEYSSDSCMEQILERYERYSYTERRLLASNSESSVQENWSLEYAKLKAKIDLQQRNHKHYMGEDLDSLSLKDLQNLEQQLDTSLKLIRSRKNQLMHESISMLQKKEKAIQEENNMLSKKIKEKDNTVGQQVEWHQQNQVPTSASFLLQPHPCLNIGGNYQEEREERRRNELDLNLDSLYPCHMGCFAT

SEQ ID NO: 15840 - protein, 245 aa, Petunia x hybrida
MAREKIKIKKIDNITARQVTFSKRRRGLMKKAAELSVLCDAEVALIIFSATGKLFEYASSSMEDILGKYKFHSASLEKDDQPSLDLQLENSLNMRLSKEIADKNRELRQMRGEELEGLSLNELQKIEKKLEAGLTRVLQIKGTRIMDEITNLQKKGADLMEENKQLKQKMVIMSEGKLPLHSELECMVMEEGQSSESITTHVCSCSSGPPEDDYSNASLKLGCSNGPTVEDDCSDTFLKLGLPFN

SEQ ID NO: 15841 - protein, 219 aa, Petunia x hybrida
MVRQKIQIKKIDNLTAGQVTFSKRRRGLFKKAQELSTLCDADIGLIVFSATGKLFEYSGSSMMQLIEKHKIHSERDMDNPEQLQSSNLQCQKKTYGMLSKEFLEKNRELRQIKGEELQGLGLEELMKLEKLVEGGIGRVMKMKGDKFMKEISSLKKKEAQLQEENSQLKQQSEARLSQNATEPGHSANSITNCPSFVYGDHQDYNDSDTSLKLGLPFPY

SEQ ID NO: 15842 - protein, 250 aa, Solanum commersonii
  unsure (1)..(250): unsure at all Xaa locations
MGRGRVQLKRIENKINRQVTFSKRRSGLLKKAHEISVLCDAEVGLIVFSTKGKLFEYATDSCMERLLERYERYSFAEKQLVPTDHTSPGSWTLENAKLKARLEVLQRNEKLYVGEDLESLNMKELQNLEHQLASALKHIRSRKNQLMHESISVLQKQDRALQEQNNQLSKKVKEREKEVEQQNQWDQQNHEINSSTFVLPQQLDSPHLGEASQNTNVVDNGEVEGGNSSQXQGAANNTVMPQWMVRHLNG

SEQ ID NO: 15843 - protein, 234 aa, Solanum tuberosum
MAREKIKIKKIDNITARQVTFSKRRRGLFKKAEELSVLCDADVALIIFSSTGKLFDFASTSMKDILGKYKLQSASLEKVDEPSLDLQLENSLNMRLSKQVADKTRELRQMRGEELEGLSLEELQQIEKRLEAGFNRVLEIKGTRIMDEITNLQRKGAELMEENKQLKHKMEIMKGKLPLLTDMVMEEGQSSESIITTNNPDQDDSSNASLKLGGTTAVEDDCSITSLKLGLPFS

SEQ ID NO: 15844 - protein, 221 aa, Solanum tuberosum
MVRQKIQIKKIDNLTARQVTFSKRRRGLFKKAQELSTLCDADIGLIVFSATGKLFEYSSSSMMQLIEKHKMQSERDSMDNPEQLHSSNLLSEKKTHAMLSRDFVEKNRELRQLHGEELQGLGLDDLMKLEKLVEGGISRVLRIKGDKFMKEISSLKKKEAQLQEENSQLKQQSQARLNEEGQNVIEQGHSADSITNNRSLVNSHQDYNDSDTSLKLCLAFP

SEQ ID NO: 15845 - protein, 227 aa, Ipomoea batatas
MAREKIKIKKIDNITARQVTFSKRRRGLFKKAEELSVLCDADVALIIFSSTGKLFDYASSSMKGILERRNLHSKNLEKMDQPSLELQLVENANHSRLSKEIADMTHRLRQMRGEDLQGMSIEELQQLERSLETGLSRVIEKKGEKIMKEINELQQKGMNLMEEKERLTQQVMAISNGQRVTAVINSDNMLNEEGLSSESITNVCNSTSPPQDYDDSSDTSLKLGLPY

SEQ ID NO: 15846 - protein, 229 aa, Ipomoea batatas
MAREKIKIKKIDNITARQVTFSKRRRGLFKKAEELAVLCDADVALIVFSATGKLFEFASSNMKDILGKYELHSSNLDQATQPSRELQLENSLHVRLSKEVADKTRELRQMKGEELQGLSLEELQKLEKRLENGLTRVLETKGERVVTEIATLQRKGAELMKENKQLKEKMARVNGEKFPVIADVEAAGLIPEEGQSSESITTNVCSCNSGPPPEDDCSDTSLKLGLPIN

SEQ ID NO: 15847 - protein, 234 aa, Antirrhinum majus
MGRGKIVIQRIDKSTSRQVTFSKRRSGLLKKAKELAILCDAEVGVVIFSSTGKLYEFSSTSMKSIIERHTKTKEDHHQLLNHGSEVKFWQREAATLRQQLQDLQENHRKLMGEELQGLNVEDLHRLENQLEMSLRGVRMKKVQMLTDEVHELRRKGHLIHQENNELYEKVKLLQQENKELCKKAYGTRDVSAANGTALVPFGFAIGREQFEPIQLHLSQPEPENIETSRASGSK

SEQ ID NO: 15848 - protein, 216 aa, Chrysanthemum x morifolium
MVRGKTQMRRIENATSRQVTFSKRRNGLMKKAFELSVLRDAEVALIIFSPRGKLYEFANSSMQETIERYRSHVKDIQTDTSSVEDVQNLKHETAAMAKKVEALEVAKRKLLGEGLGTSTIDELVQIEQQLERSVRIIRARKMQVYNEQIEQLHAKEKMLAAENAILTEKCIIKTDKATEEMGVDLNVLESGENSDVETELFIGLPETRMKQLSWPK

SEQ ID NO: 15849 - protein, 237 aa, Chrysanthemum x morifolium
MGRGRVTLKRIENKINRQVTFSKRRSGLLKKAHEISVLCDADVALIVFSTKGKLCEYSTDSSMDRILERYERYSYAEMQLTSTHNESQGSWTLEHAKLKARIELLQKSKRHLMGEELDSLTLKELQGLEQQLDTALKHVRLRKNQLMFESISALQKKDKDMQERNNILSKQIKEKEKDAAHHDKEPQIHAAVPSLHLGILNNCDAHQAGSDWEVEDIPRPAQPLTFMPPWMVQHMSK

SEQ ID NO: 15850 - protein, 246 aa, Chrysanthemum x morifolium
MGRGKVQLRRIENKINRQVTFSKRRGGLLKKAHEISVLCDAEVALIVFSNKGKLFEFSTDSCMESILERYERYSYTERQLVATDATPRSWTLEYNKLKSRADLLQRNHRHYMGEDIESLSLKEIQNLEQQLDTGLKNIRTRKNQLLHESISELQKKGKAIQEQNTTLTKKIKEKEKDKTITENVQWEQHNYVDHDTSFLMPQPPPGLNMGGNYNQSGGGAGERADGMTNELDLSLQYSCHMRCFPS

SEQ ID NO: 15851 - protein, 243 aa, Chrysanthemum x morifolium
MGRGRVQMKRIENKISRQVTFSKRRTGLLKKAHEISVLCDADVALIVFSTKGKLFEYSTHSSMESILERYERYSYAEKLLTAPENETQASWTLESSRLKAKIEVLERNIRHYGGEDLEPLSLRDLQSVEQQLDTALKRIRTKKNQLMHESISELHKKEKTLQERNNSLSKKLKENEKNSEQQNERVELPQPPPPPPQPQPYSVPSFATSRPFIGAAMREEELARAHHVSTTMMPLWMIRHLNQ

SEQ ID NO: 15852 - protein, 249 aa, Chrysanthemum x morifolium
MGRGRVELKRIENKINRQVTFAKRRNGLLKKAYELSVLCDAEVALIIFSNRGKLYEFCSSSSMLKTLERYQKCNYGAPETNVSAREALELSSQQEYLKLKARYEALQRSQRNLLGEDLGPLNCKELESLERQLDTSLKQIRSARTQFMLDTLTDLQKKEHALNDANRTLKQRLMEGHQVTSLHWNPHVQQEMGYDQQHEPQHQNGEAFFHPLDCGPTLQMGYPSDSLTAEAAASVAGPSCSNYMPGWYQ

SEQ ID NO: 15853 - protein, 250 aa, Chrysanthemum x morifolium
MGRGRVELKRIENKINRQVTFSKRRNGLLKKAYELSVLCDAEVGLIIFSSRDKLYEFGSVGVMKTLERYQRCCFNPQDNNNERETQSWYQEVSKLKAKFESLQRTQRHLLGEDLGPLSVKELHNLEKQLEGALTQARQRKTQILVEQMEELRCKERELGDMNKHLKIKVSHELSTFETEGQGYRTHQLPCPWNSSNNNTFLMHPSQSNPMGCQQEQPILQIGDNQFMQGEGSSGQRNMVDETNIHGNWVI

SEQ ID NO: 15854 - protein, 246 aa, Chrysanthemum x morifolium
MGKGRLELKRIENKINRQVTFAKRRNGLLKKAYELSVLCDAEVALIIFSTRGKLYEFSSTSSMLKTLERYEKSSFGPPEQRRPAKEDLQEQSSYQEYMRLKERYDALKQLERNYYGEEIDNLSTNELESLERQLHCSLKQIRTIRTQSLVDRLYEQQKMEHHLYESNKTLRLKFEEESQAEALQWEAHARANGMVYGHPQHQLSQTTHDAFYHPTGCETTLQIGYQTDMSAVTSTSMNHQMQGWPA

SEQ ID NO: 15855 - protein, 229 aa, Dicentra eximia
NRQVTYSKRRNGIMKKAKEITVLCDAEVSLVIFSSTGKMSEYCSPSTTLIKILDRYQKASGKRLWDAKHEYLSSEVDRVKKENDNMQIELRHLKGEDLTSLHPKELISIEDALQNGLVGVRAKQMEFMKMMKKNERMLEEENKRLSYILHNQQIEMADGSNVGEMENNGYHQHHHHHHHHHQKGRGDHYGQAAAAHASSQQMPPFAFRVQPIQPNLHNNNNNTNNTNNK

SEQ ID NO: 15856 - protein, 251 aa, Helianthus annuus
MGRGKVQLRRIENKINRQVTFSKRRGGLLKKAHEISVLCDAEVALIVFSNKGKLFEFSTDSCMESILERYERYCYSERQLVATDATPRSWTLEYNKLKSRAELLQRNHRHYMGEDIESLSLKEIQNLEQQLDTGLKNIRARKNQLLHESINELQKKGKAIQEQNTTLTKQLKEKEKDKTIPQNTQWEQHNYVDHDTTFFLPQPHPALNIGGDYNQATTSAASGGEGADGRTSQLDLSLQPIYSHHLRCFPS

SEQ ID NO: 15857 - protein, 248 aa, Helianthus annuus
MGRGKVQLRRIENKINRQVTFSKRRGGLLKKAHEISVLCDAEVALIVFSNKGKLFEFSTDSCMDSILERYERYSYTERQLVAADATPRSWTLEYNKLKSRAELLQRNHRHYMGEDIESLSLKEIQNLEQQLDTGLKNIRTRKNQLLHESISELQKKGKAIQEQNTTLTKKIKEKEKDKTIPQNTQWEMHNYVDHDTTFLMPPPPPALNMGGDYNHGGGGSSEGADGRTNELDLSLQPIYSCHMRCFPS

SEQ ID NO: 15858 - protein, 253 aa, Helianthus annuus
MGKGRLELKRIENKINRQVTFAKRRNGLLKKAYELSVLCDAEVALIIFSTRGKLYEFSSTSSMLKTLERYEKCSFGPPEQRKPAKEDLQEQSSYQEYMRLKERYDALKQLERNYYGEEIDSLTTNELESLERQLHCSLKQIRTIRTQSLIDKLYEQQKMEHQLYEYNKTLRLRLDEESQAEALQWDVHAHAHANGMVYGHHHQHQVSHPAHGAFYHPTGCETTLQIGYQTEQISGATSSSMSHHHHQMQGWPA

SEQ ID NO: 15859 - protein, 125 aa, Adenothamnus validus
TNRQVTYSKRRNGIFKKSHELTVLCDAKVSLIMFSNTGKFHEYISPSTTTKKIYDMYQTTLGFDLWSSHYERMTETMKKLKDSNNKLRREIRQRVLGEDLDGLDMNDLTILEQQMQDSLTVVRER

SEQ ID NO: 15860 - protein, 125 aa, Argyroxiphium caliginis
TNRQVTYSKRRNGIFKKAHELTVLCDAKVSLIMFSNTGKFHEYISPSTTTKKIYDMYQTTLGFDLWSSHYERMTETMKKLKDSNNKLRREIRQRVLGEDLDGLDMNDLTTLEQQMQDSLTVVRER

SEQ ID NO: 15861 - protein, 125 aa, Kyhosia bolanderi
TNRQVTYSKRRNGIFKKAHELTVLCDAKVSLIMFSNTGKFHEYVSPSTTTKKIYDMYQTTLGFDLWSSHYERMTETMKKVKESNNKLRREIRQRVLGEDLDGLDMNDLTILEQQMQDSLTVVRER

SEQ ID NO: 15862 - protein, 125 aa, Carlquistia muirii
TNRQVTYSKRRNGIFKKAHELTVLCDAKVSLIMFSNTGKFHEYISPSTTTKKIYDMYQTTLGFDLWSSHYERMTEIMKKLKDSNNKLRREIRQRVLGEDLDGLDMNDLTILEQQMQDSLTVVRER

SEQ ID NO: 15863 - protein, 125 aa, Anisocarpus scabridus
TNRQVTYSKRRNGIFKKAHELTVLCDAKVSLIMFSNTGKFHEYISPSTTTKKIYDMYQTTLGFDLWSSHYERMTETMKKLKESNNKLRREIRQRVLGEDLDGLDMNDLTILEQQMQDSLTVVRER

SEQ ID NO: 15864 - protein, 200 aa, Platanus occidentalis
GGITKKAQELSVLCDAEVSLIMFSSTGKFHEYISPTTTTKKIFDRYQQISRIDLWQPHYEKMQNNLNKLKEVNNNLRREIRQRMGEDLNDLSIEELRGLEQNLDDSLNIVREQKYHKIQTQTDTCKKKLKNSQETHRELLRHFEVRDEDLDYGLGDNEEDYESELGVANVGSHSFAYRLQPIQLNIQDGGIYGFRDLRLA

SEQ ID NO: 15865 - protein, 228 aa, Oryza sativa; identical to SEQ ID NO: 15835

SEQ ID NO: 15866 - protein, 229 aa, Triticum aestivum
  unsure (1)..(229): unsure at all Xaa locations
MARERREIKRIESAAARQVTFSKRRRGLFKKAEELSVLCDADVALIVFSSTGKLSQFASSSMNEIIDKYSTHSPARAXPDLPALHVCLVHRXYANLNDQLAEXASLRLRQMRGEELEGLSVDELQLLEKNLETGLHRVLQTKDQQFLEQINELHRKSSQLAEENMKLRNQVGQIPTAGKLVVADTENVVAEDGQSSESVMTALHSGSSQDNDDGSDVSLKLGLPCLPWK

SEQ ID NO: 15867 - protein, 226 aa, Triticum aestivum
  unsure (1)..(226): unsure at all Xaa locations
MARERRAIRRIESAAARQVTFSKRRRGLFKKAEELAVLCDADVALVVFSSTGKLSQFASSSMNEIIDKYSTHSKNLGKSEQPAIDLNLEHCKYDSLNEQLAEXASLRLRHMRGEELDGLSVGELQQMEKNLETGLQRVLCTKDRQFMQQISDLQHKGTQLAEENMRLKNQMHEVPTASTVAVAEAENVVPEDAHSSDSVMTAVHSGSSQDNDDGSDISLKLALPWK

SEQ ID NO: 15868 - protein, 87 aa, Triticum aestivum
  unsure (1)..(87): unsure at all Xaa locations
MARERREIKRIESAAARQVTFSKRRRGLFKKAEELSVLCDADVALIVFSSTGKLSQFASSSMNEIIDKYSTHSKNLGKTDQPALDLX

SEQ ID NO: 15869 - protein, 186 aa, Thalictrum thalictroides
NGILKKAREIHVLCDAQIALVIFSSTGKMSEYISPSPGPSTTLIGILDKYQKTSGKKLWDAKHEFLSSELDRIKKENDSMQIELRHLKGEDITSLNAKELIPIEEALNNGLSKIRDKKNDVWRMMTKNTSMLEEENKRLSYHLHSLEIGGNDRDMENGYHQKGRDYPAQMPFTFRVQPIQPNLQEK

SEQ ID NO: 15870 - protein, 187 aa, Trollius laxus
NGILKKAREIAVLCDAQVSLVIFSATGKIDEFSSSPLVTILDRYQNSSGNKLWDAKHEYLNSEVERVKKENDNMQIQLRHLKGEDITSLNPKELIPIEEALLDGLTKVRDKKMEYWNRMKKNGRMLEEENKRLRCMLNPKQHMEMEEKADLENGYHHNCRNYPSQIPFSLQIQTIQPNLQEPRGHNY

SEQ ID NO: 15871 - protein, 182 aa, Trollius laxus
NGILKKAKEITVLCDAKVSLVIFSSTGKLTQFSSDPLVTILDKYQKSSGNKLWDAKHEYLNSEVERVKKENDNMQIQLRHLKGEDITSLNPRELIPIEEALLNGLTKVRDKKMEFCNRMKKTGRMLEEENKRLKDMLNPKQHMEMEEKEDLEHCRSYPSQIPFSLQIQPIHPNLQDPKGYNY

SEQ ID NO: 15872 - protein, 184 aa, Trollius laxus
NGILKKAKELTVLCDAKVSLVIFSSTGKMTEFSSSPLETILDKYQRSSGNKLWDAKHEYLNSEVERVKKENDNMQIQLRHLKGEDITALNPKELIPIEEALLDGLTKVRDKKMEYWNRMKNNGRMLEEENKRLKYMENPKQYMEMEEKGELENCRNYPSQIPFSSLHIKPIHPDLQEPKGYYNF

SEQ ID NO: 15873 - protein, 184 aa, Trollius laxus
NGILKKAKELTVLCDAKVSLVIFSSTGKMTEFSSSPLEIILDKYQRSSGNKLWDAKHEYLNSEVERVKKENDNMQIQLRHLKGEDITALNPKELIPIEEALLDGLTKVRDKKMEYWNRMKNNGRMLEEENKRLKYMENPKQYMEMEEKGELENCRNYPSQIPFSSLHIKPIHPDLQEPKGYYNF

SEQ ID NO: 15874 - protein, 187 aa, Trollius laxus
NGILKKAREIAVLCDAQVSLVIFSATGKIDEYSSSPLVTILDRYQNSAGNKLWDAKHEYLNSEVERVKKENDNMQIQLRHLKGEDITSLNPKELIPIEEALLDGLAKVRDKKMEYWNRMKKNGRTLEEENKRLRCMLNPKQHMEMEEKADLENGYHHNCRNYPSQIPFSLQIQTIHPNLQEPRGHNY

SEQ ID NO: 15875 - protein, 173 aa, Trollius laxus
NGILKKAKEITVLCDAKVSLVIFSSTGKLTQFSSDPLVTILDRYQKSSGIKLWDAKHEYLNSEVERVKKENDNMQIQLRHLKGEDITSLNPRELIPIEEALLNGLTKVRDKKMEFCDRMKKNGRMLEEENKRLKDMLNPKQHMEMEEREDLEHCRSYPLQIPFSLQDPKGYNY

SEQ ID NO: 15876 - protein, 207 aa, Trollius laxus
NRQVTYSKRRTGIIKKATELAVLCDAEVSLIMFSSTGKLSEFTSPNTTTKKLFDQYQRVTGTPLWDTHYERMQESLKQQKEVNMKLRKQIRQRIGEGSLDNLSFEELRNLEQDLDTSVKAVRDRKYHMIATQTETHRKKLRNMQETHTHLVRELEARGEDPYYEGDYESSYIGMTNGGAHLLSYRLQPNQPNLQDEEGYGSYNLRLA

SEQ ID NO: 15877 - protein, 170 aa, Trollius laxus
NGILKKAKELTVLCDAIVSLVIFSSSGKMVAYASNPLGEILDKYHKISGKRLWDAKHEYLNSEVERVKKENDSMQIELRHLKGEDLTSLNPKELIPIEDALQNGLAKVREKKNEFLKVVKKNGRMLEEDNKRLTYILQKQQMEINGYHQNDSQIPFNFRVQPIQPNLQEP

SEQ ID NO: 15878 - protein, 167 aa, Trollius laxus
NGILKKAKELTVLCDAIVSLVIFSSSGKMVAYASHPLGEILDRYHKISGKRLWDAKHEYLNSEVERVKKENDSMQIELRHLKGEDLTSLNPKELIPIEDALQNGLAKVREKKNEFLKVVKKNGRMLEEDNKRLTYILQKQQMEINGYHQNDSQIFRVQPIQPNLQEP

SEQ ID NO: 15879 - protein, 210 aa, Asarum europaeum
GGLLKKARELAILCDAQLGVIIFSSSGKMFEFSSPPISMREIIDRYQKLSGNCAPVYDNQQVYCEITRMKNEIDKLQATMRHFAGEDLTSLTMNEMLQLEQQLEISVNKVRSRKEQLLQQQLDNLRRKENMLEEQNRELYRVIQDHHAASMEQKMVDPSMLDHFGVFYQDDHQAARSSMLQLSPQLHPFRLQPAQPNLQDANLLPHDLQL

SEQ ID NO: 15880 - protein, 200 aa, Asarum europaeum
GGIFKKAQELTVLCDAQVSLIMFSSTGKYSEYCSPSTTTKQIYDKYQEASGINLWSSHYEKMQNLLNKLNDDNNKLRKEIRQRIGEDLSGLEIEELRGLEQNLESSLKVVRDKKYQVISSQTETKKKKVKNLEQTHKNLGCALAGKDAICAYGIAYNETLDYKSVLGLANDASHIFAFRIQPCQPNLHNAGYGIHDLRLA

SEQ ID NO: 15881 - protein, 313 aa, Ceratopteris richardii
MAMPCSDIDLLDSDNDNVDDQHISLELRQVHEDTDDGSHDEPRELSLLNHESNLCKIVNSKGKGAEAGNSLLPSTGTSRGKIQIRRIENTTSRQVTFSKRRNGLLKKAHELSVLCDAEIALIIFSSTGKLFEYSSSRGIKKILERYKRCSGILQDVGGTVIRDVEYWKQEAERLKERLTYMEEIQRNMLGESLGSLQIKDLQNLEAKLDSGLYKIRGAKTQLMARQVQELQKKEQILLQQNEALRAKLAELSCLQAPVSGLTTATTSQDVQESSSGRGSRQRETSLSAAETTLQLASHNEQTFLLRAVPHMRL

SEQ ID NO: 15882 - protein, 205 aa, Juglans regia
KRRNGLLKKAYELSVLCDAEVALIVFSSRGRLYEYANNSVKSTIDRYKKARADSSNTGSVSEANTQFYQREAATLRQQINSVQESNRKMLGESLSGMAFRDLKSLESKLESGIRRIRSKKNELLFAEIEYMQKREVDLHNNNQLLRAKIAENERNQQNLNVMPGGGNLELMHSQPFDSRNYFQVDALQPNHDQYPRQDQMALQLV

SEQ ID NO: 15883 - protein, 215 aa, Juglans regia
IENETNRQVTYSKRRKGLFKKAHELTVLCDAKVSLIMISSNKKLRDYVSPSTTTKQIFDQYQHTMGVDLWSSHYERMQEELKKLNDVNRSLRREIRHRRGESLIDLNLEELYHLEQNVESAVKVIRDRKYHVIGKKTDILKKKKKRAESIHKVLLHELVARDEDPYGLVDNGGGDYCDPDIIGCSNTDSCMFALRLQPNFHMGEGSDLTTYTLLE

SEQ ID NO: 15884 - protein, 254 aa, Brassica rapa subsp. pekinensis
MGRGRVEMKRIENKINRQVTFSKRRAGLLKKAHEISILCDAEVSLIVFSHKGKLFEYSSESCMEKVLERYERYSYAEKQLKAPDSHVNAQTNWSMEYSRLKAKIELLERNQRHYLGEDLESISIKELQNLEQQLDTSLKHIRSRKNQLMHESLNHLQRKEKEILEENSMLTKQIKERESILRTHQNQSEQQNRSHHVAPQPQPQLNPYMISHQASPFLSMGGMYQGEDPTAVRRNRLDLTLEPIYNCNLGYFAA

SEQ ID NO: 15885 - protein, 214 aa, Elaeis guineensis
MVRGKTEMKLIENATSRQVTFSKRRNGLLKKAFELSVLCDAEVAVIVFSPRGKLYEFSSTSMEKTIDRYRRHAKSGINNNEVTQQWKFEAASMSRKIESLEVSKRKLLGENLESCSAEELHEIEGKIEQSLCHVRGKKNQLLEEQIATLKEQEQTLMEENALLREKCKLQSQLRPAAAPEETVPCSQDGENMEVETELYIGWPGRGRTNCRSQG

SEQ ID NO: 15886 - protein, 242 aa, Pinus resinosa
MGRGRVELKRIENKINRQVTFSKRRNGLLKKAYELSVLCDAEVALIIFSSRGKLYEFGSAGMLKTLERYQKCSYVLQDATVSDREAQNWHQEVGKLKARVELLQRSQRHLLGEDLGPLSIKELQQLERQLEVALTHVRSRKTQVMLEMMDELRRKERILQEVNKSLRKKLQEAEGQAFNAMQPPPHAWDSHAVANNAYAMQHPSNAVDCEPTLQTGYQYAPPESSMPRHEQAQNNYMQGWMV

SEQ ID NO: 15887 - protein, 199 aa, Ceratopteris pteridoides
RNGLLKKAHELSVLCDAEIALIIFSSTGKLFEHSSSRGIKKILERYKRCSGILQDVGGTVIRDVEYWKQEAERLKERLTYMEEIQRNMLGESLGSLQIKDLQNLEAKLDSGLYKIRGAKTQLMVRQVQELQKKEQILLQQNEALRTKLAELSRLQAPVSGLTTATTSQDVQESSSGSGSRQHETSLSAAETTLQLGFAQ

SEQ ID NO: 15888 - protein, 217 aa, Ceratopteris pteridoides
SKRRGGLIKKAHDLSVLCDADVAVIIFSSKGKLFHFANPSMETVLGKYVKASGDPGAGDNGSSTDNLDTDRLTVFTEKLKMLQSNVIGDDLERLSLRDLIHLEQQVHESLGRIRAKKDELILDQIDDFNQKVADTRKTMNASMSMLDRLVDFCSSDITGSQEFVESEAGHVLRVPTTDALRAAQIASSDQSNDDPEYVASGRRFGITEDLNESPASE

SEQ ID NO: 15889 - protein, 193 aa, Ceratopteris pteridoides
RTGLLKKAYELSVLCDAEVAVIVFSSTGRLSEFATPSMPKMLEKYHRAIQRSQGNEHSLQNIEHWQHEAINLRKRIQLLQLRQSHLMGENLTCFQLKDLDILESRLSVTVEKIREEKMRRFHVHAEEMHKQECLLHQENTLLKLKIENVESMKHSAHVIDLLSDDDCMLESPKISQESGLKDSRFSLQLGLKP

SEQ ID NO: 15890 - protein, 218 aa, Ceratopteris pteridoides
SKRRGGLFKKAHDLSVLCDAEVAVIIFSSKGKLFHFGNPSMETVLKRYMKANGDPKAGDNGSSTDNVEADHLTVFTEKLKLLQSVVIGDDLERLSVRDIIYLEQQFHENLGRIRAKKDELMLERNNDLMQKVADTRRRTNVNTSMLNRLADFCSSDIIGSRTFVENEPADHVVGVPRTDTSRAGRIAPSDRNNNEREIVPFAKRFRIIEDLNESPASE

SEQ ID NO: 15891 - protein, 251 aa, Arabidopsis lyrata
MGRGRVQLKRIENKINRQVTFSKRRAGLLKKAHEISVLCDAEVALVVFSHKGKLFEYSTDSCMEKILERYERYSYAERQLIAPESDVNTNWSMEYNRLKAKIELLERNQRHYLGEDLNAMSPKELQNLEQQLDTALKNIRTRKNQLMYESINELQRKEKAIQEQNSMLSKQIKEREKILRAQQEQWDQQNHGHNMPPPPPPQQHQIQHPYMLSHQPSPFLNMGGLYQEEDPMAMRRNELELTLEPVYNCNL

SEQ ID NO: 15892 - protein, 217 aa, Ophioglossum pedunculosum
RSGLLKKAYELSVLCDAEVALIIFSGTGKLFEFASSSMKKILERYRKYGGGLHDNSIATRDAEYWRNEVMRMKEHIACLEESQRHLLGENLVSLSVKNLQKLEHQLEIGANRIRTRKTQILLEQIQELQKKEHFLHGENNILKTKLEQLSTRQVPSLGTLIYTSTVTTTSTTSAGAGVEDNAGGHDSMNAMQKMTLHSNFQPATSAQNTLQLGYYPD

SEQ ID NO: 15893 - protein, 216 aa, Ophioglossum pedunculosum
SKRRNGLLKKAYELSVLCDAEVAVIVFSGTGKLSEFASSSMMRRILEKHRQVVEGSQSIKPTSQDVVEYWRHEATRLKHQLGVVQETQRHMLGESLETLTYRDLQKLESKLNGALNQVRGRKNQIISERLVYLQEKEDLLNAENIMMRAKLAEIMAGGVPLMSQSMQDPAARESFLNESSTQPNPPIMKNQNGEETNLQLGLELFPTTSFGDGAST

SEQ ID NO: 15894 - protein, 186 aa, Ophioglossum pedunculosum
RGGLMKKAFELSVLCDVEIAVIIFSSTGKLYEYASSCMQKILSKYTSRPEGLQSLRVLNDDQAYYYCYQMAWLRQQITQLERLQRQMTGEDLTSLNMEELNDLEHSIYLALLRVQARKERLLMEKLQNGGLKAAQQLHEDECGGGSREVREEEAMPAQPSSVKRVLEKSTYSEASLELRLRLLSES

SEQ ID NO: 15895 - protein, 232 aa, Ophioglossum pedunculosum
RRGLLKKAEELAVLCDAEVGVVILSNTGKVFEYPIGRTKAILERYIKHVQEKRKSSSSEHGDGSFQEMESLKQEILHLEATQKHFGGGELSSLTLQDVHQLELQVEMGLSNVRSRKVQLLLEQTEHLKRKEHCLHEESRTLQEKISEVCGYIQSNARTTNTGQTQAFRDNDPQVSQVLFSLQPSRSDIQDSANIRTSLRLGMYETSPQMNERSTAESSDVNSVLYTPQDWMH

SEQ ID NO: 15896 - protein, 340 aa, Caenorhabditis elegans
MGRKKIQITRIQDERNRQVTFTKRKFGLMKKAYELSVLCDCEIALIVFNSTNKLFQYASTDMDKVLLKYTEYNEPHESRTNNDIMEALNRKEGNQGGGNSDDESPGPSTSPVIQITMPAVVNGHSSNNSVASAASASAAAVAAAAAAVAAVEGTSSGAAAAAAALQASNAQRHHNLNLYQNLIFNPNYTRHLNQRNDPLSSTSVAPSSSSSKHLDIPPSTSFAYDTSRLHPIAAADADGDLVPSSRAAADQNIWSSALQQRPVSQPAPSISNSSTNGISNGTSSLLSPNVSSLNGHSVLDLGGPNLPYKLDPNTYVKMEPHSPPEKRPRITTEWRPQQLT

SEQ ID NO: 15897 - protein, 340 aa, Caenorhabditis elegans
MGRKKIQITRIQDERNRQVTFTKRKFGLMKKAYELSVLCDCEIALIVFNSTNKLFQYASTDMDKVLLKYTEYNEPHESRTNNDIMEALNRKEGNQGGGNSDDESPGPSTSPVIQITMPAVVNGHSSNNSVASAASASAAAVAAAAAAVAAVEGTSSGAAAAAAALQASNAQRHHNLNLYQNLIFNPNYTRHLNQRNDPLSSTSVAPSSSSSKHLDFPPSTSFAYDTSRLHPIAAADADCDLVPSSRAAADQNIWSSALQQRPVSQPAPSISNSSTNGISNGTSSLLSPNVSSLNGHSVLDLGGPNLPYKLDPNTYVKMEPHSPPEKRPRITTEWRPQQLT

SEQ ID NO: 15898 - protein, 339 aa, Caenorhabditis elegans
MGRKKIQITRIQDERNRQVTFTKRKFGLMKKAYELSVLCDCEIALIVFNSTNKLFQYASTDMDKVLLKYTEYNEPHESRTNNDIMEALNRKEGNQGGGNSDDESPGPSTSPVIQITMPAVVNGHSSNNSVASAASASAAAVAAAAAAVAAVEGTSSGAAAAAAALQASNAQRHHNLNLYQNLIFNPNYTRHLNQRNDPLSSTSVAPSSSSSKHLDFPPSTSFAYDTSRLHPIAAADADCDLVPSSRAAADQNIWSSALQQRPVSQPAPISNSSTNGISNGTSSLLSPNVSSLNGHSVLDLGGPNLPYKLDPNTYVKMEPHSPPEKRPRITTEWRPQQLT

SEQ ID NO: 15899 - protein, 119 aa, Metrosideros excelsa
NKINRQVTFSKRRCGLLKKAHEISVLCDAEVALIVFSTKGKLFEYATDACMEKILERYERYSYAERQILTNNAETNGNWTLEHAKLKARMEILQKNQKNLMGEELDSLSLKELQNLEHQ

SEQ ID NO: 15900 - protein, 191 aa, Cimicifuga racemosa
NRQVTYSKRRNGILKKAKEITVLCDAQVSLVIFSSSGKMSEFTSQSTPLIKILDKYQKSSGRKLWDAEHESLNNGVERIKKENDSMQIQLRHLKGEDITSLTPRELIPTEEAPQDGLSKVTAKKMEVWERMKRNDTQLEEENRRLRFIMHQMQRMEMDGTSRDMADGYHQNGGRDYPTEMPFAFHNLQLNK

SEQ ID NO: 15901 - protein, 181 aa, Cimicifuga racemosa
NGILKKAKEITVLCDAQVSLVIFSSSGKMSEFTSQSTPLIKILDKYQKSSGRKLWDAEHESLNNEVERIKKENDSMQIQLRHLKGEDITSLTPRELIPIEEALQDGLSKVTAKKMEVWERMKRNDTQLEEENRRLRFIMHQMQRMEMDGTSRDMAGGYHQNGGRDYPTEMPLAFHNLQLNK

SEQ ID NO: 15902 - protein, 187 aa, Cimicifuga racemosa
NGILKKAKEITVLCDAEVSLVIFSSTGKMSEFSSPSTPLIKILDKYQKSSGRKLWDAKHEYLNSEVERVKKENDSMQIQLRHLKGEDLTSLNPKELIPIEEALLDGLSKVKDKQMEVWRKMKKNDRALEEENKRLNLILHQQQQMKMDGNVRDMENGYHQNGGRDYPTQMPFSFRVQPIQPNLQENK

SEQ ID NO: 15903 - protein, 187 aa, Cimicifuga racemosa
NGILKKAKEITVLCDAQVSLVIFSSSGKMSEFTSQSTPLIKILDKYQKSSGRKLWDAEHESLNNEVERIKKENDSMQIQLRHLKGEDITSLTPRELIPIEEALLDGLSKVKDKQMEVWRKMKKNDRALEEENKRLNLILHQQQQMKMDGNARDMENGYHQNGGRDYPTQMPFSFRVQPIQPNLQENK

SEQ ID NO: 15904 - protein, 227 aa, Paulownia kawakamii
MAREKIQIKKIDNATARQVTFSKRRRGIFKKAEELSVLCDADVGLIIFSSTGKLFEYASSSMKEILGRHNLHSKNLDKLEQPSLELQLVEDSNYSRLSKEVAERSHQLRRMRGEELQGLSIEKLQHLKKSLESGLSRVIEKKGEKIMKGDQSTSRKGKQLMEENERLRQQVADISNDCKNNAASDSENIVYDEGQSSESVNACNSVGPPQDYDSSDTSLKLGLPYSG

SEQ ID NO: 15905 - protein, 245 aa, Eucalyptus grandis
  unsure (1)..(245): unsure at all Xaa locations
MGRGKVELKRIENKINRQVTFAKRRNGLLKKAYELSVLCDAEVALIIFSNRGKLYEFCSSSSMMKTIEKYQKCSYGSLETNCSINEMQNSYQDYLKLKARVEVLQRSQRNPPWEELGPLNSKELEQLEHQLENSLKQIRSAKTQFMFDQLXHLQHKEQMLVEANRELWKKLEESNTRIPLRLGWEAEDHNNISYSRLPTQSQGLIFQPLGGNPTLQIGYNPAGSNELNVSAADQHPNGFIPGWML

SEQ ID NO: 15906 - protein, 205 aa, Eucalyptus globulus subsp. globulus
MVRGKTQMKRIENDTSRQVTFSKRRNGLLKKAFELSVLCDAEVALIIFSPRGKLYEFSSSSLCKTIEKYQTRAKDMEAKTAEISMQPSKGNTLDMEKKIEHFEISRRRLLGEGLDSCSVEELQQTENQLERSLTKIRARKNHLIREHIERLKAEERKLLEEKRKLLQEIECGKGLTPVSSERPREEIRAESMDVETELFIGPPKR

SEQ ID NO: 15907 - protein, 196 aa, Delphinium ajacis
NRQVTYSKRRNGILKKAKEITVLCDAEVSLVVFSSTGKMSEFISPNASLIKILDKYQRTSGRRLWDAKHEYLNSEVERIKKENDNMQIELRHLKGEDLTSLNPKELIPIEAALQNGLTEVRAKQAEVWKMMKKNDRLLEEENKHLNYVLQKQQQMHMNGNARDLENEYHQNGRDYPSHMPFTFRAQPMQPNLQENQ

SEQ ID NO: 15908 - protein, 234 aa, Papaver californicum
IENPTNRQVTYSKRRSGIFKKAKELTILCDAQVCLIMFSNTGKVCEYVSPSTTMKEFFDRFRRVTNIDLWASQYETLQEELKKQKEINSRLKKEIRQRTGQDDLNELTFEELRSLEANLLSSVEIVRLRKFHVLGSHTETSKKRNKAMEETHKNLLRATYSQADRDEEFLFYAIPADREGDHNRDYLSSSSSMRTLSINGGDCENSQITFQLQPSQPNLHHAAGGGYLYNQHYV

SEQ ID NO: 15909 - protein, 201 aa, Pachysandra terminalis
NGIFKKAKELSVLCDAKVSIIMVATNRKLHEYTSPHTTTKDLYDLYQKASGNSLWNSHYERMKDNLNKLKDINNKLRTEIRQRMGEDLNDLRLEELRGLEQNIQESLMIVGDRKEHQLRNQIGTYKKKSRNAEEINRKLLRRLDGIDDDSQYGLEDDGGDDESAIALTNGNSHIFAFRLQPNQPNLHINGGGYGFHNLHLA

SEQ ID NO: 15910 - protein, 216 aa, Peperomia hirta
IENDTNRQVTFSKRRNGLFKKAQELTVLCDAQISIILISSTNRLYDYCSPSTSHKKVYDQYQDGRKVDLWKKRYENMKHQLNEQSERSNKLKKEIRQFMGEELDGLSFEQLHGLEQKVERASNIVRERKEKAISTKVDTLNKKVKGYEKQHEGYRQKLEMMEVDYGGTQYKGIPMCGPHFLGYNMQGNPYHESAHSDVTTANNISSAYGIYDLRLA

SEQ ID NO: 15911 - protein, 194 aa, Piper magnificum
IENMTNRQVTYSKRKKGIIKKAQEISVLCDTQVSLVIFSSAGNMGEFCSPKTTMDAILTRYQNSKGSQLWNAKHEYLKQEKERIEKENGRLQLRLRQLKGEDITSLKPEELIEIENILEDGLTNIRNKSDGLLEGSNQEYKGFGGEEPAHGLYLHQQMGLYSGETKGLLNKCAPKSIPIAFHVQPLHPNLQEMK

SEQ ID NO: 15912 - protein, 196 aa, Piper magnificum
IENVSNRQVTFNKRKAGLLKKAREISVLCDAEVALVIVSSSANVKVEEFCSPQNKLEDVLKKYQDLSGNKLWDAKHECLSQEIDRIRKENDAMSIRLRHLEGIDVSSLNHQELEVLEKTLENGLASIRRQEMEIRDARENNIKTEEEEKRRLTYIMHEQHMRMGESLRDLESGSMKRDLPFAFRVQPIQPNLQEQK

SEQ ID NO: 15913 - protein, 180 aa, Ranunculus bulbosus
NRQVTFSKRRNGILKKAKEIAILCEAKVSLVIFTSNSKMFEFNSHPLPEILHKYQKDTGNKLWDAKHEYLHQECARIKKENESMQRELGHLKGEDINSLQPIELIPIEQALDDGIARVKERKNEIYRMMKRNDKMLEEENKLLVLKLQQMMNGNSREHPSQMPMPFTFRVQPAQPNLQDN

SEQ ID NO: 15914 - protein, 188 aa, Ranunculus bulbosus
NRQVTYTKRKNGILKKAKEISILCSAEVSLVIFSCNNKMSEFHSHSLINSLKRYHKLCPGKRLWDAKHEFLHQEIERIENENKSMQIELRHLKGEDINSLQPRELIPIERALDNGITKVRAKIDEIPRILEKNGRMIEEENKLLAFKLEQQQQQINGNGRNVDHGYPPPSQMPFTFLVQPIHPNFQDN

SEQ ID NO: 15915 - protein, 125 aa, Argyroxiphium sandwicense
TNRQVTYSKRRNGIFKKAHELTVLCDAKVSLIMFSNTGKFHEYISPSTTTKKIYDMYQTTLGFDLWTSHYERMTETMKKLKESNNKLRREIRQRVLGEDLDGLDMNDLTILEQQMQDSLTVVRER

SEQ ID NO: 15916 - protein, 125 aa, Argyroxiphium sandwicense
TNRQVTYSKRRNGIFKKAHELTVLCDAKVSLIMFSNTGKFHEYISPSTTTKKIYDMYHTTLGFDLWSSHYERMTETMKKLKDSNNKLRREIRQRVLGEDLDGLDMNDLTILEQQMQDSLTVVRER

SEQ ID NO: 15917 - protein, 125 aa, Dubautia laevigata
TNRQVTYSKRRNGIFKKAHELTVLCDAKVSLVMFSNTGKFHEYISPSTTTKKIYDMHQTTLGFDLWTSHYERMTETMKKLKESNNKLRREIRQRVLGEDLDGLDMNDLTILEQQMQDSLTVVRER

SEQ ID NO: 15918 - protein, 125 aa, Dubautia latifolia
TNRQVTYSKRRNGIFKKAHELTVLCDAKVSLIMFSNTGKFHEYISPSTTTKKIYDMYQTTLGFDLRTSHYERMTETMKKLKESNNKLRREIRQRVLGEDLDGLDMNDLTILEQQMQDSLTVVRER

SEQ ID NO: 15919 - protein, 125 aa, Dubautia plantaginea
TNRQVTYSKRRNGIFKKAHELTVLCDAKVSLIMFSNTGKFHEYISPSTTTKKIYDMYQTTLGFDLWTSHYERMTETLKTLKESNNKLRREIRQRVLGEDLDGLDMNDLAILEQQMQDSLTVVRER

SEQ ID NO: 15920 - protein, 125 aa, Dubautia raillardioides
TNRQVTYSKRRNGIFKKAHELTVLCDAKVSLIMFSNTGKFREYISPSTTTKKIYDMYQTTLGFDLWISHYERMTETMKKLKESNNKLRREIRQRVLGEDLDGLDMNDLTILEQQMQDSLTVVRER

SEQ ID NO: 15921 - protein, 125 aa, Dubautia raillardioides
TNRQVTYSKRRNGIFKKAHELTVLCDAKVSLIMFSNTGKFHEYISLSTTTKKIYDMYQTTLGFDLWSSHYERMTETMKKLKDSNNKLRREIRQRVLGEDLDGLDMNDLTILEQQMQDSLTVVRER

SEQ ID NO: 15922 - protein, 125 aa, Dubautia scabra
TNRQVTYSKRRNGIFKKAHELTVLCDAKVSLIMFSNTGKFHEYISPSTTTKKIYDMYQTTLGFDLWTSHYERMTETMKKLKESNNKLRREIRQKVLGEDLDGLDMNDLTILEQQMQDSLTVVRER

SEQ ID NO: 15923 - protein, 125 aa, Dubautia sherffiana
TNRQVTYSKRRNGIFKKAHELTVLCDAKVSLIMFSNTGKFHEYISPSTTTKKIYDMYQTTLGFDLWSSHYERMTETMKKLKDSNNKLRREIRQRVVGEDLDGLDMNDLTILEQQMQDSLTVVRER

SEQ ID NO: 15924 - protein, 183 aa, Ranunculus ficaria
NRQVTYSKRRNGIIKKAKEIAILCAAEVSLVIFSSSDKMSEFNSRPLPQILEKYQKSSGNKLWDAKHEYLSQEIARVEKENQSMRQELKHLKGEEINSLQPKELIPIEHALENGITKVKEKQMEIYRMMKRNDRKLEEDNKRLVLKLQHQQQLMNGNGREYPSQMPPFTFQLHPSQPNLQEIK

SEQ ID NO: 15925 - protein, 193 aa, Ranunculus ficaria
AGIMKKAQELTVLCDAKVALLMFSSSGKVSEYVSPGTSFKSVYDQYQAINKMSLWDSEYEKMQGTLKKVKETNNNLRREIRQRQGDDLDGLSFMELRGLEQNLESSVDRVRHRKNHVIRTQTDTTNKKIKSHEETNRNFMSALEQMGKVEPQYAYVPQDEDYDANNMGSRIYAIHMQTHQNGEDYGSYGLSLA

SEQ ID NO: 15926 - protein, 195 aa, Ranunculus ficaria
TGIVKKARELTVLCDAQVSLIMFSSTGKLSEYISPTTTRKKVYDMYQKVAEVDLWNSEYERMQKELKKLKETNMELRKEIRQRVGEEIDDLSIDQLRGLEQDLDESVKAVRDRKYHTIATQTETYRKKLRNLHETHTHLVREIEARGEDAYYDGDYEAIMALTNAGAHFLPYGLHPGQPDHHDGDGYALHNLRLA

SEQ ID NO: 15927 - protein, 202 aa, Ranunculus ficaria
NRQVTYSKRRAGIMKKAKELTVLCDAKVSLIMFSSTGKCVDFISPSISPKAFYDKYRDVTGDDLWKSQYDKMQQELKTLVETNRKLRREIGQRVGEDLSNLSIKELRGLEQDLRDTEKVVRQRKFGLLSSQGETQRKKIRNLAEINGNLWQEYQERMEDEYALANGMSTLELGNGVFSFRLRPSQTNLHNDEEYEIHDLRLA

SEQ ID NO: 15928 - protein, 229 aa, Magnolia praecocissima
MARGKIQIKKIDNVTARQVTFSKRRRGLFKKAEELSILCDAEVALIIFSATGKLFEYSSSSMKEIIERHTMHSKNLQKLDQQPSLELQLENSNYNRLSKQVAEKSHLIRQMRGEDIQGLTVEELQKLEKTLETGLSRVMERKAEQIMKEISGLQIKGVKLMEENMRLRQRIIEMSRGDSKGDRQIIESEIVVNEDGQSSDSVTNACNSGAPQDYESSDTSLKLGVPFSS

SEQ ID NO: 15929 - protein, 220 aa, Dendrobium grex Madame Thong-IN
MGRGRVELKRIENKINRQVTFAKRRNGLLKKAYELSVLCDAEVALIVFSNRGRLFEFCSSTSMTKTLERYQKCSYNASESAVPSKDAQNSYHEYLTLKAKVEYLQRSQGNLLGEDLIELSSKELDQLELQLEMSLKQIRSTKTQLMLDQLCDIKRKEQMLHEANRALSMKLKEDGPEIPLELSWPGGETNGSSERQQPQSDKFFQPLPCSNPSLQIGYSP

SEQ ID NO: 15930 - protein, 174 aa, Dendrobium grex Madame Thong-IN
MGRGRVEMKRIENKINRQVTFAKRRTGLLKKAYELSVLCDVEVALIIFSNRGKLYEFCSSRSMLKTLEKYQKCSDGAPEMTMTSRETQSSQVEYLKLKSQVEALQRSQRNLLGEDLNPLGGKDLDQLERQLEASLKQIISTRMQYMLDQLGDLQQRELLLFETNKSLGTRVSAL

SEQ ID NO: 15931 - protein, 247 aa, Dendrobium grex Madame Thong-IN
MGRGRVQLKRIENKINRQVTFSKRRSGLLKKAHEISVLCDAEVALIVFSNKGKLYEYSTDSSMEKILERYERYSYAERALFSNEANPQADWRLEYNKLKARVESLQKSQRHLMGEQLDSLSIKELQRLEQQLESSLKFIRSRKTQLILHSISELQKMEKILLEQNKTLEKEIIAKEKAKALVQHAPWEKQNQSQYSSALPPVISDSVPTPTSRTFQARANEEESPQPQLRVSNTLLPPWMLSHMNGQ

SEQ ID NO: 15932 - protein, 186 aa, Tacca chantieri
NGIIKKAREISVLCDAQVSVVIFSSSGKMSEYCSPSTSLSKMLEKYQQNSGKKLWDAKHENLSAEIDRMKKENDNMQIELRHLKGEDLNQLNAKELIPIEDALHNGLTNVREKQMDFLKMLKKNERLLEEENKRLTYILHHQQLAMNGNVREMDLAYHQKDREYPPQMPLAFRVQPLQPNLQEDKQ

SEQ ID NO: 15933 - protein, 200 aa, Tacca chantieri
QGIMKKAKELTVLCDAEVSIIMFSSTGKFAEYCSPSTDTKKVYDRYQQVTGIDLWSSQYERMQNNLNHLEEINRNLRREIRQRTGEDLDGLDIKELRGLEQNVDEALRIVRQRKYHVITTQTDTYKKKLKNSHEAHRNLMRELEMRDEHPVYGFVDNDPTNYDSALALANAGSHVYAYRVQPSQPNLHGIGYSSHDLRLA

SEQ ID NO: 15934 - protein, 499 aa, Gallus gallus
MGRKKIQITRIMDERNRQVTFTKRKFGLMKKAYELSVLCDCEIALIIFNSSNKLFQYASTDMDKVLLKYTEYNEPHESRTNSDIVETLRKKGLNGCESPDADDYFEHSPLSEDRFSKLNEDSDFIFKRGPPGLPAQNFSMSVTVPVSNPNTLTYSNPGSSLVSPSLAASSSLTSTTMLSPPQTTLHRNVSPGAPQRPPSTGNAGGILGTTDLTVPNGAGTSPVGNGVWNSRASPSLLGTAGGGNGLGKVMPTKSPPPPGGGGLGMNNRKPDLRVVIPPSSKGMMPPLTEEDELELNTQRISSSQSTQPLATPVVSVTTPSFPPAGLVYSAMPTAYNTDYSLTSADLSAFEGFNSPGMLSLGQVSPWQQHHLGPATLSSLVSGSQLSQGSNLSINTNQNINIKSEPISPPRDRVNSSGFPQQQPPQQPQPPQPPQQPPQRQEMGRSPVDSLSSSSSSYDGSDREDPRSDFHSPVVLGRPPNSEDRESPSVKRMRMDTWVT

SEQ ID NO: 15935 - protein, 81 aa, Camelina sativa
ENSDHARMSKEIADKSHRLRQMRGEELHGLNIEELQQLEKALEAGLTRVIETKSGKIMNEISELQRKGMQLMDENKRLRQN

SEQ ID NO: 15936 - protein, 504 aa, Homo sapiens
MGRKKIQITRIMDERNRQVTFTKRKFGLMKKAYELSVLCDCEIALIIFNSSNKLFQYASTDMDKVLLKYTEYNEPHESRTNSDIVETLRKKGLNGCESPDADDYFEHSPLSEDRFSKLNEDSDFIFKRGPPGLPPQNFSMSVTVPVTSPNALSYTNPGSSLVSPSLAASSTLTDSSMLSPPQTTLHRNVSPGAPQRPPSTGNAGGMLSTTDLTVPNGAGSSPVGNGFVNSRASPNLIGATGANSLGKVMPTKSPPPPGGGNLGMNSRKPDLRVVIPPSSKGMMPPLSEEEELELNTQRISSSQATQPLATPVVSVTTPSLPPQGLVYSAMPTAYNTDYSLTSADLSALQGFNSPGMLSLGQVSAWQQHHLGQAALSSLVAGGQLSQGSNLSINTNQNISIKSEPISPPRDRMTPSGFQQQQQQQQQQPPPPPQPQPQPPQPQPRQEMGRSPVDSLSSSSSSYDGSDREDPRGDFHSPIVLGRPPNTEDRESPSVKRMRMDAWVT

SEQ ID NO: 15937 - protein, 495 aa, Homo sapiens
MGRKKIQITRIMDERNRQVTFTKRKFGLMKKAYELSVLCDCEIALIIFNSSNKLFQYASTDMDKVLLKYTEYNEPHESRTNSDIVETLRKKGLNGCESPDADDYFEHSPLSEDRFSKLNEDSDFIFKRGPPGLPPQNFSMSVTVPVTSPNALSYTNPGSSLVSPSLAASSTLTDSSMLSPPQTTLHRNVSPGAPQRPPSTGNAGGMLSTTDLTVPNGAGSSPVGNGFVNSRASPNLIGATGANSLGKVMPTKSPPPPGGGNLGMNSRKPDLRVVIPPSSKGMMPPLNTQRISSSQATQPLATPVVSVTTPSLPPQGLVYSAMPTAYNTDYSLTSADLSALQGFNSPGMLSLGQVSAWQQHHLGQAALSSLVAGGQLSQGSNLSINTNQNISIKSEPISPPRDRMTPSGFQQQQQQQQQPPPPPQPQPQPPQPQPRQEMGRSPVDSLSSSSSSYDGSDREDPRGDFHSPIVLGRPPNTEDRESPSVKRMRMDAWVT

SEQ ID NO: 15938 - protein, 486 aa, Homo sapiens [sequence omitted]

SEQ ID NO: 15939 - protein, 472 aa, Mus musculus
MGRKKIQITRIMDERNRQVTFTKRKFGLMKKAYELSVLCDCEIALIIFNSTNKLFQYASTDMDKVLLKYTEYNEPHESRTNSDIVEALNKKENKGSESPDPDSSYALTPRTEEKYKKINEEFDNMIKSHKIPAVPPPSLEMPVTIPVSSHNSLVYSNPVSTLGNPNLLPLAHPSLQRNSMSPGVTHRPPSAGNTGGLMGGDLTSGAGTSAGNGYGNPRNSPGLLVSPGNLNKNIQAKSPPPMNLGMNNRKPDLRVLIPPGSKNTMPSVSEDVDLLLNQRINNSQSAQSLATPVVSVATPTLPGQGMGGYPSAISTTYGTEYSLSSADLSSLSGFNTASALHLGSVTGWQQQHLHNMPPSALSQLGACTSTHLSQSSNLSLPSTQSLSIKSEPVSPPRDRTTTPSRYPQHTTRHEAGRSPVDSLSSCSSSYDGSDREDHRNEFHSPIGLTRPSPDERESPSVKRMRLSEGWAT

SEQ ID NO: 15940 - protein, 229 aa, Hordeum vulgare subsp. vulgare
MAGKRERIAIRRIENLAARQVTFSKRRRGLFKKAEELSILCDAEVGLAVFSATGKLFQFASSSMNQIIDRYNSHSKILKKVDEPSQLDLHEDSNCARLRDELAEASLWLQQMRGEELQSLNVQQLQALEKSLESGLSSVLKTKSQKIMDQISELEKKRVQLIEENARLKEQLQASKMEMQVAADPLVVVYDEGQSSESVTNTSYPRPPLDTEDSSDTSLRLGLSLFNSK

SEQ ID NO: 15941 - protein, 227 aa, Hordeum vulgare subsp. vulgare
MAGKRERIAIRRIENLAARQVTFSKRRRGLFKKAEELSILCDAEVGLAVFSATGKLFQFASSSMNQIIDRYNSHSKILKKVDEPSQLDLHEDSNCARLRDELAEASLWLQQMRGEELQSLNVQQLQALEKSLESGLSSVLKTKSQKIMDQISELEKKRVQLIEENARLKEQASKMEMQVAADPLVVVYDEGQSSESVTNTSYPRPPLDTEDSSDTSLRLGLSLFNSK

SEQ ID NO: 15942 - protein, 186 aa, Michelia figo
GGILKKAKEITVLCDAQVSLVIFSSTGKMSEYCSPSTELVNVLDRYHKSAGKKLWDAKHEHLSNELERIKKENDSMHVKLRHLKGEDITSLHPKELIPIEEALENGLACVRSRQMQCLKMLKKNERSLEEENRRLSYILQHQQQLAMDVNVREMDHGYHQREREYHPQMPFTFRVQPIQPNLHQNK

SEQ ID NO: 15943 - protein, 237 aa, Lycopodium annotinum
MGRGKIEIKRIENATCRQVTFSKRRSGLLKKAHELSVLCDAQVAVIIFSSTGKLFQFASTRMKEILERYERNSDPLQIDAVIPRDLEYWSREAAKAKDELDRCHQKNRHMLGEDLSALNLNELEELEQQLDSGLRRVRCRKDQVLRDRIEELTKQESFLREENRMLRSKIAVPKESTEPILDEMNMETREPPSMAIVEEELSLKLNSKTWPDIHFSLQLGQYQPPRTETPTANHRPN

SEQ ID NO: 15944 - protein, 231 aa, Lycopodium annotinum
MGRGKIEIKRIENATSRQVTFSKRRGGLLKKAHELSVLCDAQVALIIFSSTGKLFEYASPSMKEILDRYGKYPEGVQTGTVTDPNNDVMLQYLNREVIRMKQQIERTHQTQRHMMGEDLAILPLKDLQQLEEQLDIGLRRIRARKDQLLVEQLEELHRKERHWLEENEALRRKLAGGQALSGPVPSPLSIVNPLETREPPSLGTVSLPFSVQFNQQNMQDTPNLQTSLQLG

SEQ ID NO: 15945 - protein, 182 aa, Clematis integrifolia
NGILKKARELNVLCDAQVSLVVFSSTGNMFEFHSKPLSKTLERYQSASGNKLWDAKLEYLSKEVDRIKKENDRMQIELRHLKGEDINSLQPRDLIPIEDALSNGLRKVKDKQMEFLENTKRRTLKVEEDNKLLCYTLQQQEQQMEMNRNADKGYHQNGGEYPSHVPFTFRVQPIQPNLQENK

SEQ ID NO: 15946 - protein, 221 aa, Hemerocallis hybrid cultivar
MGRGKIEIKKIENSTNRQVTYSKRRSGIMKKAKELTVLCDADVSIIMFSSTGKFSEYCSPGTDTKTVFERYQQATQTNLWSTQYEKMQNTLNHLKEINHNLRKEIRQRIGEELDGMDFKELRGLEQNLDEALKSVRARKYHVITTQTDTYKKKVKNSQEAHKTLLHELDDAVYGYADEDPGNYDSSLALAHGGSNMYAYRVQPSQPNLHGMSYGPHDLRLA

SEQ ID NO: 15947 - protein, 189 aa, Liriodendron tulipifera
GGIMKKAKELTVLCDAEVSLIMFSSTGKFSEYCSPSTTTKKIFDRYQQVSGSSLWNSHYEKMQSHLNKLKEDNNSLRRAIRHRIGEDLDDLEIEELRGLEQNLESSIKVVRERKYHVINTQTETYKKKLRNLHEAHANLIRELEGQAENGGYGLVDNGGPDYESALVLANGGAHRLHNTGFGIHDLRLA

SEQ ID NO: 15948 - protein, 202 aa, Calycanthus floridus
GGILKKARELTVLCDAEVSLIMFSSTGKFSEYCSPSSTAKKIFDRYQQVSGINLWNSHYEKMQNHLNKLKEDNNNLRREIRQRMGEDLNDLEIDELRGLEQNLDNSLKVVRERKYHVINTQTETYKKKLRSLHEAHANLLRALEEGNDDNGDYGMGNNGGADYQAAAFGWANEGSQMFALCVQPCHPNLQDARSGHHDLRLA

SEQ ID NO: 15949 - protein, 214 aa, Sanguinaria canadensis
NGILKKAKEITVLCDAKVSLVIFSSTGKMAEYCSPCPLIEILDRYQKSSGKRLWDAKHEYLSAEVDRIKKENDNMQIELRHLKGEDLTSLHPKELIPIEKALEVGYASVRAKQMEIWKTLKKNGRLLEDEHKRLSYKYHQQHQMEIEGGARGEMEQNGGTAGGGSGGYNHQKAAAGAAGRPDYPPSHHQQQQQQMPFAFCVQAIQPNVHNNNNK

SEQ ID NO: 15950 - protein, 260 aa, Betula pendula
MGRGRVQLKRIENKISRQVTFSKRRTGLLKKAHEISVLCDAEVALIVFSTKGKLFEFSSDSSMDRILERYERYSYADRHLMATESESQGSWSLEFPKLSARIEVLERNIRNLLGEDLDPLSLRELQNMEQQLDTGLKRLRTRKNQVMHESIMELQKKEKALQEQNNLLSKKIKENEKAVAEHAHLEQPSIGQNLSTFMLSLPQQPQPQPQLQPQPPTLPLPSLTIGGTFQAGAGDEDAGAQTRPSANRLMPPWMLSHING

SEQ ID NO: 15951 - protein, 244 aa, Betula pendula
MGRGRVQLKRIENKINRQVTFSKRRSGLLKKAHEISVLCDAEVALIVFSTKGKLFEYSTDSCMERILERYERYSYADRQLLANDLEQNGSWTLEHAKLKARIEVLQRNQKHFVGEDLDSLSLKELQNLEQQLDSALKHIRSRKNQLMYESISELQRKDKALQEQNNVLAKKVKEKEKELAQQAQWEQQSHTLDSVPSLLPQPLQSSLNIGGSQQARGNGRVDEGTPPHRANALLPPWMLRHLNQ

SEQ ID NO: 15952 - protein, 243 aa, Betula pendula
MGRGRVQLKRIENKINRQVTFSKRRGGLLKKAHEISVLCDAEVAVIVFSHKGKLFEYATDSSMEKILERYERYSYAEAQLVAADSEGQGSWTMEFARLKGKVELLQRNHRHYLGDDLESLSHKELQNLEQQLDTALKHVRTRKNQLMYESISQLQKKEKAIQEQNTILAKKIKEKEKTVAQHVDWEQQNQGAPNGSSSFLLPQPLPCLNIGGNYQEEAPEVRRNELELTLEPIYSCHLGCFAT

SEQ ID NO: 15953 - protein, 203 aa, Cucumis sativus
MGRGKVELKRIENPTSRQVTFSKRRNGLLKKAYELSVLCDAQVALLIFSPSGKAYQFSSHDMDGTLARYRTDVGLPQSNHPHSRALFWKTEMDDMKRSISSMEARLRHFVGEDLEPLNVKELKQLERQMSVGIERIRSKKRRIIAEHINLLKRKYKGLQEEHSRLQKRLNQLKDVVVTNSSRNSDANPASALEIEFQVDGLLI

SEQ ID NO: 15954 - protein, 200 aa, Cucumis sativus
GKVELKRIENPTSRQVTFSKRRNGLLKKAYELSVLCDAQVALLIFSPSGKAYQFSSHDMDGTLARYRTDVGLPQSNHPHSRALFWKTEMDDMKRSISSMEARLRHFVGEDLEPLNVKELKQLERQMSVGIERIRSKKRRIIAEHINLLKRKYKGLQEEHSRLQKRLNQLKDVVVTNSSRNSDANPASALEIEFQVDGLLI

SEQ ID NO: 15955 - protein, 227 aa, Momordica charantia
MGRGKIEIKRIENTTNRQVTFCKRRNGLLKKAYELSVLCDAEVALIVFSSRGRLYEYSNNSIKTTIGRYKKACSDSSATSSVTELNTQYYQQESAKLRQQIQMLQNSNSNLVRHLMGDSLSALTVKELKQLENRLERGITRIRSKKHEMLLAEIEYLQKREIELENENVCIRTKIAEVERLQQANMVSGQELNAIQALASRNFFTPNMMEGGAVTFSHQDKKMLHLG

SEQ ID NO: 15956 - protein, 245 aa, Populus tremuloides
MGRGRVELKRIENKINRQVTFAKRRNGLLKKAYELSVLCDAEVALIIFSNRGKLYEFCSTSNMLKTLERYQKCSYGAEEVNKPAKELENSYREYLKVKARFEGLQRTQRNLLGEDLGPLNTKDLEQLERQLESSLNQVRSTKTQYMLDQLADLQNKEHLLQEANRGLTIKLDEISARNSLRPSWEGDDQQNMSYGHQHAQSQGLFQALECNPTLQIGYNPVGSDQVSAITHATQQVHGFIPGWML

SEQ ID NO: 15957 - protein, 248 aa, Populus tremuloides
MGRGRVQLKRIENKINRQVTFSKRRTGLLKKAHEISVLCDAEVALIVFSHKGKLFEYSTDDCMEEILERYERYSYAERQLVATDLDSQGDWTLEYNRLKAKVELLQRNHRNYVGEDLDSMSLKELQNLEQQIETALKHIRARKNHLMSQSISEMQRKEKAIQVQNNMLVKQIKEKEKKDKAVAQPAFWDQQNHGPDASSFLLSQPAGLPLPCLNIGGSYQEEAPEARRNGLGHTLEPIYSFHLGGYGA

SEQ ID NO: 15958 - protein, 237 aa, Populus tremuloides
SGTENKINRQVTFAKRRNGLLKKAYELSVLCDAEVALIIFSNRGKLYEFCSTSNMLKTLERYQKCSYGAEEVNKPAKELENSYREYLKVKARFEALQRTQRNLLGEDLGPLNTKDLEQLERQLESSLNQVRSTKTQYMLDQLADLQNKEHLLLEANRGLTIKLDEISARNSLRPSWEGDDQQNMSYGHQHAQSQGLFQALECNPTLQIGYNAVGSDQVSAITHATQQVHGFIPGWML

SEQ ID NO: 15959 - protein, 240 aa, Populus tremuloides
MGRGRVQLKRIENKINRQVTFSKRRAGLLKKAHEISVLCDAEVALIVFCHKGKLFEYSTNACMEKILERHERYSYAERQLVATDLDSQGNWTLEYNRLKEKVELLQRNHRHYLGEDLDSVSLKELQNLEKQIDTALELIRERKNHLMYQSISELQIKEKAIKEQNNMLVKQIKEKEKALAQPALWDQQDHGPNASSFLLPQPPLPCLNISYQEEDPIARRNELDLTLEPIYSCHLGCFGT

SEQ ID NO: 15960 - protein, 263 aa, Glycine max
  unsure (1)..(263): unsure at all Xaa locations
MTRKKIPIKKIDNINARQVTFSKRRKGLFKKAQELSTLCDAEIALIVFFATGKLFEYASSSMQQTLERRNQHSGIQGLDNPSIGQQLGSDSFGMLPLRKEIEDKTNELSQLNEEELQGLKIKELQKLEDILQRRWTTISKTKDEKVIQEINHLKTKEAKLMEENQKLKQSFLQXNKGNHTSHLPVVHLXFPPDNGSSDTSLKLGLSLFEXNKNVGSEDXQVNAFASISVSVKINVVFRIXQFAGECTAGFILGKNSQLXQLIC

SEQ ID NO: 15961 - protein, 233 aa, Oryza sativa
EGEGRAATGKRERIAIRRIDNLAARQVTFSKRRRGLFKKAEELSILCDAEVGLVVFSATGKLFQFASTSMEQIIDRYNSHSKTLQRAEPSQLDLQGEDSSTCARLKEELAETSLRLRQMRGEELHRLNVEQLQELEKSLESGLGSVLKTKSKKILDEIDGLERKRMQLIEENLRLKEQVSRMSRMEEMQPGPDSEIVYEEGQSSESVTNASYPRPPPDNDYSSDTSLKLGLHS

SEQ ID NO: 15962 - protein, 247 aa, Oryza sativa
  unsure (1)..(247): unsure at all Xaa locations
MAGGGGGGGRGEGEGRAATGXKRERIAIRRIDNLAARQVTFSKRRRGLFKKAEELSILCDAEVGLVVFSATGKLFQFASTSMEQIIDRYNSHSKTLQRAEPSQLDLQGEDSSTCARLKEELAETSLRLRQMRGEELHRLNVEQLQELEKSLESGLGSVLKTKSKKILDEIDGLERKRMQLIEENLRLKEQLQVSRMSRMEEMQPGPDSEIVYEEGQSSESVTNASYPRPPPDNDYSSDTSLKLGLHS

SEQ ID NO: 15963 - protein, 268 aa, Oryza sativa
  unsure (1)..(268): unsure at all Xaa locations
XPGKKERIPIGGFANLAARQVTXSKRRRGLFKKAEELSILCNTEVGLVVFSATGKLFQFASTSMEQIIDRYNSHSKTLQRAEPSQLDLQDSSTCARLKEELAETSLRLRQMKGEELHRLNVEQLQELEKSLESGLGSVLKTKSKKILDEIDGLERKRMQLIEENLRLKEQVSRMSRMEEMQPGPDSEIVYEEGQSSESVTNASYPRPPPDNDYSSDTSLRLGDPRPRVTGGEEDEDEDGDGDGGFVTRAWGSLAKKLLEAPSEAANIL

SEQ ID NO: 15964 - protein, 213 aa, Oryza sativa
  unsure (1)..(213): unsure at all Xaa locations
GKKERIPIGGFANLAARQVTXSKRRRGLFKKAEELSILCNTEVGLVVFSATGKLFQFASTSMEQIIDRYNSHSKTLQRAEPSQLDLQVSDSSTCARLKEELAETSLRLRQMKGEELHRLNVEQLQELEKSLESGLGSVLKTKSKKILDEIDGLERKRMQLIEENLRLKEQVSTLXQSSESVTNASYPRPPPDNDYSSDTSLRLGXVLPYFQFQ

SEQ ID NO: 15965 - protein, 166 aa, Triticum aestivum
  unsure (1)..(166): unsure at all Xaa locations
XSRDLLPPPDRPRPPLLXCAAAPSLRGGPGGGRWAGLSDGLAVPSLGLLPARGEELQSLNVQQLQALEKSLESGLGSVLKTKSQKIMDQISELENKRVQLIEENARLKEQASKMEMQVAADSXXVVYEEGQSSESVTNTSYPRPPLDTEDSSDTSLRLGLPLFNSK

SEQ ID NO: 15966 - protein, 244 aa, Triticum monococcum
MGRGKVQLKRIENKINRQVTFSKRRSGLLKKAHEISVLCDAEVGLIIFSTKGKLYEFSTESCMDKILERYERYSYAEKVLVSSESEIQGNWCHEYRKLKAKVETIQKCQKHLMGEDLESLNLKELQQLEQQLESSLKHIRSRKNQLMHESISELQKKERSLQEENKVLQKELVEKQKAHAAQQDQTQPQTSSSSSSFMLRDAPPAANTSIHPAAAGERAEDAAVQPQAPPRTGLPPWMVSHING

SEQ ID NO: 15967 - protein, 228 aa, Lilium longiflorum
MGRGKIEIKKIENSTNRQVTYSKRRTGIIKKATELTVLCDAEVSLLMFSSTGKLSEFCSPSTDTKKIFDRYQQLSGINLWSAQYEKMQNTLNHLSEINRNLRKEISQRMGEELDGLDIKDLRGLEQNLDEALKLVRHRKYHVINTQTETYKKKVKNSEEAHKNLLRDLVNREMKDENPVYGYVDEDPSNYDGGLGLANGASHLYEFRVQPSQPNLHGMGYGSHDLRLA

SEQ ID NO: 15968 - protein, 57 aa, Perilla frutescens
MGRGRVQLKRIENKINRQVTFSKRRSGLLKKAHEISILCDADVGLIVFSTKGKLFEY

SEQ ID NO: 15969 - protein, 198 aa, Saururus chinensis
NRQVTYSKRRNGLFKKAHELSVLCDAQVSIILIPNTRRHHDYCSPSATHKQVYDRYQQVRGVDLWSTQYEKNKSESFYWRQRMGKDLGHLTYNELRGLEQTVENAVNVIRDRKIKQIQNQIQKYDKKCKSLDDDNDVRLLQLQAIHENCRYYGFMENGGADHRTGFKLANQASHIFAFRGQPCQPNLHDASFRDRDTH

SEQ ID NO: 15970 - protein, 209 aa, Orchis italica
MGRGNTEIKRIENSTNRQVTFSKRRSGIIKKAREISVLCDAQVSLVIFSSLGKLSEYCSPSTTLSKMLERYQQNSGKKLWDATHENLSAEIDRIKKENDTMQIELRLKGEDLNSLTPKELIPIEEGLQNGLTSVREKQMDFLKMLKKNERMLEEENKRLKYLLQHQQLAIEGSMRELEISYHQKDPEYADQMPMTFRVQPFQPNLHGNN

SEQ ID NO: 15971 - protein, 430 aa, Podocoryne carnea
MGRKKIQISRINDERNRQVTFTKRKFGLMKKAYELSILCDCEIALIIFNSGNKLFQYASTDMDKILLKYTEYNEPHESRTNADIHETISRKENKQCGSPEDGDAASFVLTPRTEMKYQKINEEFEMMMKKTNGSGTESPSIPSLYVSQEQRYSQQQPLQQQSMMRMQTLGPQGYQQMPSITHPLPSPREDSNTGKDPRSNTPLQRDGRLSISPHPSLHHALSPPPQSLPLPTRSPHTMNQQMPQNGNMVQSRGGTPNLKTAMQNSRAQQNQTPNQMMHVNADSSLSTPIVSLATPSFPGIPSNFPSGLPSSYTGYSDMDSGQIQYHHGSTINNNHPGSTSLTMSHHQQDMGNPMSRSHPNMVGSKHGVNIKVEPPDHLRVTSPSLHAFQSHPTQYTSQRHKDLMDQSNLIPGGGPMSKRPRIDAHNDGWQ

SEQ ID NO: 15972 - protein, 183 aa, Eucalyptus grandis
MGRGRVELKRIENKINRQVTFAKRRNGLLKKAYELSVLCDAEVGLIIFSNRGKLYEFCSSSSMLKTLERYQKCNYGALEPNVSARESLELSCQQEYLRLKARYEGLQRTQRNLLGEELGQLCSKELESLERQLDGSLKQIRSRRTQYMLDQVTDLQHREQVVHEANRTLNQRLMEGYQVMRSS

SEQ ID NO: 15973 - protein, 465 aa, Homo sapiens
MGRKKIQITRIMDERNRQVTFTKRKFGLMKKAYELSVLCDCEIALIIFNSTNKLFQYASTDMDKVLLKYTEYNEPHESRTNSDIVETLRKKGLNGCDSPDPDADDSVGHSPESEDKYRKINEDIDLMISRQRLCAVPPPNFEMPVSIPVSSHNSLVYSNPVSSLGNPNLLPLAHPSLQRNSMSPGVTHRPPSAGNTGGLMGGDLTSGAGTSAGNGYGNPRNSPGLLVSPGNLNKNMQAKSPPPMNLGMNNRKPDLRVLIPPGSKNTMPSVNQRINNSQSAQSLATPVVSVATPTLPGQGMGGYPSAISTTYGTEYSLSSADLSSLSGFNTASALHLGSVTGWQQQHLHNMPPSALSQLGACTSTHLSQSSNLSLPSTQSLNIKSEPVSPPRDRTTTPSRYPQHTRHEAGRSPVDSLSSCSSSYDGSDREDHRNEFHSPIGLTRPSPDERESPSVKRMRLSEGWAT

SEQ ID NO: 15974 - protein, 204 aa, Oncidium cv. 'Gower Ramsey'
MGRGKIEIKKIENPTSRQVTYSKRRLGITKKAMELTVLCDAKVSLIMFSSSGKLSDYCSPSTEIKDAFQRYQQVTGFDIWDAQYQRMQSTLMNLREVNHKLQMEIRQRKGENLEGLDVKELRGLEQKLEESIKIVRERKYHVIATQTDTYKKKLRSTREMYPALLNELQEVDDENQQRSFIAEDLSGVYNSAISMANQRLAHCL

SEQ ID NO: 15975 - protein, 442 aa, Mus musculus
MGRKKIQITRIMDERNRQVTFTKRKFGLMKKAYELSVLCDCEIALIIFNSTNKLFQYASTDMDKVLLKYTEYNEPHESRTNSDIVETLRKKGLNGCDSPDPDADDSVGHSPESEDKYRKINEDIDLMISRQRLCAVPPPSFEMPVTIPVSSHNSLVYSNPVSTLGNPNLLPLAHPSLQRNSMSPGVTHRPPSAGNTGGLMGGDLTSGAGTSAGNGYGNPRNSPGLLVSPGNLNKNIQAKSPPPMNLGMNNRKPDLRVLIPPGSKNTMPSVSEDVDLLLNQRINNSQSAQSLATPVVSVATPTLPGQGMGGYPSAISTTYGTEYSLSSADLSSLSGFNTASALHLGSVTGWQQQHLHNMPPSALSQLGDRTTTPSRYPQHTTRHEAGRSPVDSLSSCSSSYDGSDREDHRNEFHSPIGLTRPSPDERESPSVKRMRLSEGWAT

SEQ ID NO: 15976 - protein, 466 aa, Mus musculus
MGRKKIQITRIMDERNRQVTFTKRKFGLMKKAYELSVLCDCEIALIIFNSTNKLFQYASTDMDKVLLKYTEYNEPHESRTNSDIVETLRKKGLNGCDSPDPDADDSVGHSPESEDKYRKINEDIDLMISRQRLCAVPPPSFEMPVTIPVSSHNSLVYSNPVSTLGNPNLLPLAHPSLQRNSMSPGVTHRPPSAGNTGGLMGGDLTSGAGTPAGNGYGNPRNSPGLLVSPGNLNKNIQAKSPPPMNLGMNNRKPDLRVLIPPGSKNTMPSVNQRINNSQSAQSLATPVVSVATPTLPGQGMGGYPSAISTTYGTEYSLSSADLSSLSGFNTASALHLGSVTGWQQQHLHNMPPSALSQLGACTSTHLSQSSNLSLPSTQSLSIKSEPVSPPRDRTTTPSRYPQHTTRHEAGRSPVDSLSSSSSSYDGSDREDHRNEFHSPIGLTRPSPDERESPSVKRMRLSEGWAT

SEQ ID NO: 15977 - protein, 507 aa, Mus musculus
MGRKKIQIQRITDERNRQVTFTKRKFGLMKKAYELSVLCDCEIALIIFNHSNKLFQYASTDMDKVLLKYTEYNEPHESRTNADIIETLRKKGFNGCDSPEPDGEDSLEQSPLLEDKYRRASEELDGLFRRYGSSVPAPNFAMPVTVPVSNQSSMQFSNPSSSLVTPSLVTSSLTDPRLLSPQQPALQRNSVSPGLPQRPASAGAMLGGDLNSANGACPSPVGNGYVSARASPGLLPVANGNSLNKVIPAKSPPPPTHNTQLGAPSRKPDLRVITSQGGKGLMHHLNNAQRLGVSQSTHSLTTPVVSVATPSLLSQGLPFSSMPTAYNTDYQLPSAELSSLPAFSSPAGLALGNVTAWQQPQPPQQPQPPQPPQSQPQPPQPQPQQPPQQQPHLVPVSLSNLIPGSPLPHVGAALTVTTHPHISIKSEPVSPSRERSPAPPPPAVFPAARPEPGEGLSSPAGGSYETGDRDDGRGDFGPTLGLLRPAPEPEAEGSAVKRMRLDTWTLK

SEQ ID NO: 15978 - protein, 514 aa, Mus musculus
MGRKKIQIQRITDERNRQVTFTKRKFGLMKKAYELSVLCDCEIALIIFNHSNKLFQYASTDMDKVLLKYTEYNEPHESRTNADIIETLRKKGFNGCDSPEPDGEDSLEQSPLLEDKYRRASEELDGLFRRYGSSVPAPNFAMPVTVPVSNQSSMQFSNPSSSLVTPSLVTSSLTDPRLLSPQQPALQRNSVSPGLPQRPASAGAMLGGDLNSANGACPSPVGNGYVSARASPGLLPVANGNSLNKVIPAKSPPPPTHNTQLGAPSRKPDLRVITSQGGKGLMHHLTGDHLDLNNAQRLGVSQSTHSLTTPVVSVATPSLLSQGLPFSSMPTAYNTDYQLPSAELSSLPAFSSPAGLALGNVTAWQQPQPPQQPQPPQPPQSQPQPPQPQPQQPPQQQPHLVPVSLSNLIPGSPLPHVGAALTVTTHPHISIKSEPVSPSRERSPAPPPPAVFPAARPEPGEGLSSPAGGSYETGDRDDGRGDFGPTLGLLRPAPEPEAEGSAVKRMRLDTWTLK

SEQ ID NO: 15979 - protein, 432 aa, Mus musculus
MGRKKIQITRIMDERNRQVTFTKRKFGLMKKAYELSVLCDCEIALIIFNSTNKLFQYASTDMDKVLLKYTEYNEPHESRTNSDIVEALNKKENKGSESPDPDSSYALTPRTEEKYKKINEEFDNMIKSHKIPAVPPPSFEMPVTIPVSSHNSLVYSNPVSTLGNPNLLPLAHPSLQRNSMSPGVTHRPPSAGNTGGLMGGDLTSGAGTSAGNGYGNPRNSPGLLVSPGNLNKNIQAKSPPPMNLGMNNRKPDLRVLIPPGSKNTMPSVNQRINNSQSAQSLATPVVSVATPTLPGQGMGGYPSAISTTYGTEYSLSSADLSSLSGFNTASALHLGSVTGWQQQHLHNMPPSALSQLGDRTTTPSRYPQHTTRHEAGRSPVDSLSSCSSSYDGSDREDHRNEFHSPIGLTRPSPDERESPSVKRMRLSEGWAT

SEQ ID NO: 15980 - protein, 349 aa, Mus musculus
MGRKKIQISRILDQRNRQVTFTKRKFGLMKKAYELSVLCDCDIALIIFNSAQRLFQYASSDMDRVLLKYTEYSEPHESRTNADILQTLKRRGVGLDGPELDMEEGPEGPGEKLLRTLGGDRGSASPRPRIYPVAPAMSVSELSYRVPPATPGCDPGGLGEVPSVHSRPAYFRPPGLGHPIFSPSHLASKTPPPLYLATDGRRPDLPPGLVGARGGLGTSRSLYSGLQSPGAPGPALGSFAFLPSGSTDCSPGDAAQGPLQPSPWPPTRDAVDPARPVARSLCKEGPPSRGGSPPTPPVSIKSERLSPVTGTSGDFPRSFPYPLLLARPLAEPLRPSASLHRLTPDSWPR

SEQ ID NO: 15981 - protein, 339 aa, Mus musculus
MGRKKIQISRILDQRNRQVTFTKRKFGLMKKAYELSVLCDCDIALIIFNSAQRLFQYASSDMDRVLLKYTEYSEPHESRTNADILQTLKRRGVGLDGPELDMEEGPEGPGEKLLRTLGGDRGSASPPPRIYPVAPAMSVSELSYRVPPATPGCDPGGLGEAPSVHSRPPHFRPPGLGHPIFSPSHLASKTPPPLYLATDGRRPDLPPGLRSLYSGLQSPGAPGPALGSFAFLPSGSTDCSPGDAAQGPLQPSPWPPTRDAVDPARPVARSLCKEGPPSRGASPPTPPVSIKSERLSPVTGTSGDFPRSFPYPLLLARPLAEPLRPSASLHRLTPDSWPR

SEQ ID NO: 15982 - protein, 242 aa, Mus musculus
MGRKKIQISRILDQRNRQVTFTKRKFGLMKKAYELSVLCDCDIALIIFNSAQRLFQYASSDMDRVLLKYTEYSEPHESRTNADILQTLKRRGVGLDGPELDMEEGPEGPGEKLLRTLGGDRGSASPRPRIYPVAPAMSVSELSYRVPPATPGCDPGGLGEVPSVHSRPAYFRPPGLGHPIFSPSHLASKTPPPLYLATDGRRPDLPPGLVGARGGLGTSIAARETQLRDPCNPHPGHQRGTL

SEQ ID NO: 15983 - protein, 232 aa, Mus musculus
MGRKKIQISRILDQRNRQVTFTKRKFGLMKKAYELSVLCDCDIALIIFNSAQRLFQYASSDMDRVLLKYTEYSEPHESRTNADILQTLKRRGVGLDGPELDMEEGPEGPGEKLLRTLGGDRGSASPRPRIYPVAPAMSVSELSYRVPPATPGCDPGGLGEVPSVHSRPAYFRPPGLGHPIFSPSHLASKTPPPLYLATDGRRPDLPPGLIAARETQLRDPCNPHPGHQRGTL

SEQ ID NO: 15984 - protein, 349 aa, Mus musculus
MGRKKIQISRILDQRNRQVTFTKRKFGLMKKAYELSVLCDCDIALIIFNSAQRLFQYASSDMDRVLLKYTEYSEPHESRTNADILQTLKRRGVGLDGPELDMEEGPEGPGEKLLRTLGGDRGSASPRPRIYPVAPAMSVSELSYRVPPATPGCDPGGLGEVPSVHSRPAYFRPPGLGHPIFSPSHLASKTPPPLYLATDGRRPDLPPGLVGARGGLGTSRSLYSGLQSPGAPGPALGSFAFLPSGSTDCSPGDAAQGPLQPSPWPPTRDAVDPARPVARSLCKEGPPSRGASPPTPPVSIKSERLSPVTGTSGDFPRSFPYPLLLARPLAEPLRPSASLHRLTPDSWPR

SEQ ID NO: 15985 - protein, 339 aa, Mus musculus
MGRKKIQISRILDQRNRQVTFTKRKFGLMKKAYELSVLCDCDIALIIFNSAQRLFQYASSDMDRVLLKYTEYSEPHESRTNADILQTLKRRGVGLDGPELDMEEGPEGPGEKLLRTLGGDRGSASPRPRIYPVAPAMSVSELSYRVPPATPGCDPGGLGEVPSVHSRPAYFRPPGLGHPIFSPSHLASKTPPPLYLATDGRRPDLPPGLRSLYSGLQSPGAPGPALGSFAFLPSGSTDCSPGDAAQGPLQPSPWPPTRDAVDPARPVARSLCKEGPPSRGGSPPTPPVSIKSERLSPVTGTSGDFPRSFPYPLLLARPLAEPLRPSASLHRLTPDSWPR

SEQ ID NO: 15986 - protein, 339 aa, Mus musculus
MGRKKIQISRILDQRNRQVTFTKRKFGLMKKAYELSVLCDCDIALIIFNSAQRLFQYASSDMDRVLLKYTEYSEPHESRTNADILQTLKRRGVGLDGPELDMEEGPEGPGEKLLRTLGGDRGSASPRPRIYPVAPAMSVSELSYRVPPATPGCDPGGLGEVPSVHSRPAYFRPPGLGHPIFSPSHLASKTPPPLYLATDGRRPDLPPGLRSLYSGLQSPGAPGPALGSFAFLPSGSTDCSPGDAAQGPLQPSPWPPTRDAVDPARPVARSLCKEGPPSRGASPPTPPVSIKSERLSPVTGTSGDFPRSFPYPLLLARPLAEPLRPSASLHRLTPDSWPR

SEQ ID NO: 15987 - protein, 172 aa, Mus musculus
MGRKKIQITRIMDERNRQVTFTKRKFGLMKKAYELSVLCDCEIALIIFNSTNKLFQYASTDMDKVLLKYTEYNEPHESRTNSDIVEAVPPPSFEMPVTIPVSSHNSLVYSNPVSTLGNPNLLPLAHPSLQRNSMSPGVTHRPPSAGNTGRSLRGLHVHKVLEGSTSSESFLI

SEQ ID NO: 15988 - protein, 506 aa, Mus sp.
MGRKKIQIQRITDERNRQVTFTKRKFGLMKKAYELSVLCDCEIALIIFNHSNKLFQYASTDMDKVLLKYTEYNEPHESRTNADIIEALHNNDRECESPEVDEAFALTPQTEEKYKKIDEEFDKMMQSYRLASSVPAPNFAMPVTVPVSNQSSMQFSNPSSSLVTPSLVTSSLTDPRLLSPQQPALQRNSVSPGLPQRPASAGAMLGGDLNSANGACPSPVGNGYVSARASPGLLPVANGNSLNKVIPAKSPPPPTHNTQLGAPSRKPDLRVITSQGGKGLMHHLNNAQRLGVSQSTHSLTTPVVSVATPSLLSQGLPFSSMPTAYNTDYQLPSAELSSLPAFSSPAGLALGNVTAWQQPQPPQQPQPPQPPQSQPQPPQPQPQQPPQQQPHLVPVSLSNLIPGSPLPHVGAALTVTTHPHISIKSEPVSPSRERSPAPPPPAVFPAARPEPGEGLSSPAGGSYETGDRDDGRGDFGPTLGLLRPAPEPEAEGSAVKRMRLDTWTLK

SEQ ID NO: 15989 - protein, 437 aa, Rattus norvegicus
MGRKKIQITRIMDERNRQVTFTKRKFGLMKKAYELSVLCDCEIALIIFNSTNKLFQYASTDMDKVLLKYTEYNEPHESRTNSDIVELLKKIEKFYTGILQVSDHPAYKTLRKKGLNGCDSPDPDADDSVGHSPESEDKYRKINEDIDLMISRQRLCALNKKENKGSESPDPDSSYALTPRTEEKYKKINEEFDNMIKSHKIPAVPPPNFEMPVTIPVSSHNSLVYSNPVSSLGNPNLLPLAHPSLQRNSMSPGVTHRPPSAGGLMGGDLTSGAGTSAGEILDFSGLLGGEKMRLAGVLLPRPERRRKGPSLEGLSPPNCGPARQVSRCVVTLTICFGVMFFNGFTAQPCFVSVYRGDGAAYFVLVSPKDNYESWLGQLTRSTGLALETYNQLAEAKPRTGPRSGPHQALGGVRDNHRHCGPGAARRAYSLHAAKILT

SEQ ID NO: 15990 - protein, 507 aa, Rattus norvegicus
MGRKKIQIQRITDERNRQVTFTKRKFGLMKKAYELSVLCDCEIALIIFNHSNKLFQYASTDMDKVLLKYTEYNEPHESRTNADIIETLRKKGFNGCDSPEPDGEDSLEQSPLLEDKYRRASEELDGLFRRYGSSVPAPNFAMPVTVPVSNQSSMQFSNPSSSLVTPSLVTSSLTDPRLLSPQQPALQRNSVSPGLPQRPASAGAMLGRDLNSANGACPNPVGNGYVSARASPGLLPVANGNGLNKVIPAKSPPPPTHNTQLGAPSRKPDLRVITSQGGKGLMHHLNNAQRLGVSQSTHSLTTPVVSVATPSLLSQGLPFSSMPTAYNTDYQLPSAELSSLPAFSSPAGLALGNVTAWQQPQQPQQPQPPQPPQSQPQPPQPQPQQPPQQQPHLVPVSLSNLIPGSPLPHVGAALTVTTHPHISIKSEPVSPSRERSPAPPPPAVFPAARPEPGEGLSSPAGGSYETGDRDDGRGDFGPTLGLLRPAPEPEAEGSAVKRMRLDTWTLK

SEQ ID NO: 15991 - protein, 230 aa, Sagittaria montevidensis
MGRGKIEIKKIENSTNRQVTYSKRRAGLIKKAEELTVLCDAQINLILISGSRKVHHYCSPSTDIHTVMDRYQQLTDSDLWQPQYEGMQKTLNHLKETNNNLRKQIRQRMGEDLEDLNMNELLALEREMDESITVVRDKKYHVLTTRTDTAKKKWKNGQQRYNSLVQDLVKLEGVEILDYACASIEASDYKPPIAMSIASRPADVGYAFHHSAGQSNVHDVGYGFHELRLA

SEQ ID NO: 15992 - protein, 200 aa, Akebia quinata
AGIMKKAQELTVLCDAEVSLIMFSNTGKFTEYISPSVTTKQIFDQYQKVSGINIWQPHYERMQDNLNKQKEINNKLRREIRQRIGEDLNDLTIHELRGLEQNMESSLKTVRDRKFQVISTRTETHKKKFKNMQETHAKLLREFEGRDDEPHFAMAGHEGEYESVLGLGNGGSHVFAFRLQQNQPNLQSGGEFGMNDLRLA

SEQ ID NO: 15993 - protein, 200 aa, Akebia quinata
AGIMKKAQELTVLCDAEVSLIMFSNTGKFTEYISPSVTTKQIFDQYQKVSGINIWQPHYERMQDNLNKQKEINNKLRREIRQRIGEDLDDLTIHELRGLEQNMESSLKTVRDRKFQVISTRTETHKKKFKNMEQTHAKLLREFEGRNDEPHFAMAGHEGEYESVLGLGNGGSHVFAFRLQQSQPNLQSGGEFGMNDLRLA

SEQ ID NO: 15994 - protein, 242 aa, Corylus avellana
MEFQNQSMSVSPQRKLGRGKIEIKRIENTTNRQVTFCKRRNGLLKKAYELSVLCDAEIALIVFSSRGRLYEYANNSSVKTTIERYKKACADSSNSGSVSEANTQFYQQEAAKLRGQIRSVQDSNRHMLGEALSELNFKELKNLEKNLEKGINRIRSKKNELLLAEIEYMHKREVDLHNNNQFLRAKIAENERNQQNLNVMPGGGNYELMQSQSFDSRNYFQVDALQPNHHYPRQDQMALQLV

SEQ ID NO: 15995 - protein, 224 aa, Cycas edentata
MGRGKIEIKRIENTTNRQVTFCKRRNGLLKKAYELSVLCDAEVALIVFSSRGRLYEFANNSVKRTIERYKKTCADNTQGGAISESNSQYWQQEAGKLRQQIDILQNANRHLMGDALTSLSVKELKQLEIRLERGLSRVRSKKNEMLLEEIEIMQRREHILLAENQFLRTKIAEYESNQNTNVLIPGPEFDALPAFDSRNFLHANLIEAAAHHYTQQDQAALQLG

SEQ ID NO: 15996 - protein, 560 aa, Anopheles gambiae str. PEST
MGRKKIQISRITDERNRQVTFNKRKFGVMKKAYELSVLCDCEIALIIFSSSNKLYQYASTDMDKVLLKYTEYNEPHESLTNKNIIEVPLTVNAQKENKNGTMSPDSPEPEDSYTLTPRTEAKYNKIDEDFQIMMQRNQQLTAGGARPNMATNSYSLPVSVPVSVPVIGTYNDSMLQSSPQMAHNSISPRPSSSETDSVYPSGGILEMSNGYPHSASPLGGSPSPGPSPGIGSHQAHNNNNNSHNTHNKMQTIKQSPSGGSGSSGSRSLRVVIPAPMNPTITADDISYVEHTRQQTNLNTPVVALQTPIPGLTNYTTTLGSFGAQDFSLNPDIMIGPWSAASSHSQNTSAAAAAAAMGSLQHSSTPPPSTSPLSVKIKAEPISPPRDHHNTSHHHGGAPGGGSSSGASGSAPGANGVQSASGGGASSTATGVNANSSNNNGSGNSQQQNGAQQLTAMGNVVVTGGGGGGSGGGGAGTSSLGANLNHSHLIHSRPSSTGHLTPTPDSYMPIGGHLAGSVTPTNAPSPVDIRHLSTGGSHLPEYDAPTAQAHKRPRISEGWAT

SEQ ID NO: 15997 - protein, 235 aa, Agapanthus praecox
MGRGKIEIKRIENTTNRQVTFCKRRNGLLKKAYELSVLCDAEVALIVFSTRGRLYEYSNNSIKSTIERYKKACADSSNSTAVVEVNTQQYYQQEAAKLRHQIQSLQNSNRHLMGDSLSSLSIKELKQLENRLERGITRIRSKKHELLFAEIEYMQKREAELQNDNMYLRAKITDNERAHQVSVVQSGTEYDTLPTFDSRNYYTHVTMLEAAPHFSHHQDHTALHLGYETKADPTE

SEQ ID NO: 15998 - protein, 250 aa, x Aranda deborah
MGRGRVELKMIENKINRQVTFAKRRKRLLKKAYELSVLCDAEVALIIFSNRGKLYEFCSSTSMLKTLEKYQKCNFGSPESTIISRETQSSQQEYLKLKNRVEALQRSQRNLLGEDLGPLGSKELEQLERQLDSSLRQIRSTRTQFMLDQLADLQRREQMLCEANKTLKRRFEESSQANQQQVWDPSNTHAVGYGRQPAQHHGEAFYHPLECEPTLQIGYHSDITMATATASTVNNYMPPGWLGQISGSYE

SEQ ID NO: 15999 - protein, 283 aa, Physcomitrella patens
MGRGKIEIKKIENTTSRQVTFSKRRGGLLKKAHELAVLCDAEVALVIFSSTGKLFEYASSGSMRDIIERYKKSPNGAMKSGASTDFLGREVVKLQEQVERLKSSQRRMLGEDLSALKVPDLLQLEQQLDLGASRVRARKNQLILEEIEGLQKKEQELMVANEDLRKKIADAEAVARANLSEARPESPRHLARTLSRDVSASSHPAATVYPHPNLRDVQRSQTSLQLGMFSSESYPPSSSRWPSEQQFPSASEGCAGESSMKWDHPHYHIQNRLHANILPSVRI

SEQ ID NO: 16000 - protein, 284 aa, Physcomitrella patens
MGRGKIEIKKIENTTSRQVTFSKRRGGLLKKAHELAVLCDAEVALVIFSSTGKLFEYASSGSIRDIIDRYKKGSDGMQNGARNDFMGCEVVKLREQLEQLKASHRHMLGEDLSLLKVPDLLQLEQQLDLGASRVRARKNQLILEEVESLRRKEHELLIANEDLRQKLADAQGIADAVTARANVSESPRPLTSALTRDIVMSSQQQEVTVHPHPNLRDAQRSQTSLQLGMFSSESYLPSSSRGPSEHPIPVGPEGCAGESAMRWEHPHFHSQNRLHANISPSVRI

SEQ ID NO: 16001 - protein, 222 aa, Picea mariana
MGRGKIEIKRIENTTNRQVTFCKRRNGLLKKAYELSVLCDAEVALIVFSSRGRLYEFANHSVKRTIERYKKTCVDNNHGGAISESNSQYWQQEAGKLRQQIEILQNANRHLMGDGLTALNIKELKQLEVRLEKGIGRVRSKKNEMLLEEIDIMQRREHILIQENEILRSKIAECQNSHNTNMLSAPEYDALPAFDSRNFLHANLIDAAHHYAHQEQTTLQLG

SEQ ID NO: 16002 - protein, 222 aa, Picea mariana
MGRGKIEIKRIENTTNRQVTFCKRRNGLLKKAYELSVLCDAEVALIVFSSRGRLYEFANHSVKRTIERYKKTCVDNNHGGAISESNSQYWQQEAGKLRQQIEILQNANRHLMGDGLTALNIKELKQLEVRLEKGIGRVRSKKNEMLLEEIDIMQRREHILIQENEILRSKIAECQNSHNTSMLSAPEYDALPAFDSRNFLHANLIDAAHHYAHQEQTTLQLG

SEQ ID NO: 16003 - protein, 218 aa, Picea mariana
KIEIKRIENTTNRQVTFCKRRNGLLKKAYELSVLCDAEVALIVFSSRGRLYEFANHSVKRTIERYKKTCVDNNHGGAISESNSQYWQQEAGKLRQQIEILQNANRHLMGDGLTALNIKELKQLEVRLEKGIGRVRSKKNEMLLEEIDIMQRREHILIQENEILRSKIAECQNSHNTNMLSAPEYDALPAFDSRNFLHANLIDAAHHYAHQEQTTLQLG

SEQ ID NO: 16004 - protein, 210 aa, Gnetum gnemon
MGRGKIEMKKIENTNNRQVTFSKRRNGLMKKAQELAVLCDAEVGLIIFSSTGKLFQYCNTSMSQVLEKYHKSPGVDHWDIELQIMGQELIKERRENEKLRSKLRYMMGEDIGELKIAQLEKLEHDLESALRLVRRKKDHAWDYQRTILLKKVKLQYALHEQMSRQLPMEVLAKAEEEARQILASTAEEEARQNMTFSFLPNASTQYARIA

SEQ ID NO: 16005 - protein, 233 aa, Dianthus caryophyllus
MGRGRVELKRIENKINRQVTFAKRRNGLLKKAYELSVLCDAEVALIVFSNRGKLYEFCSTSCMNKTLERYQRCSYGSLETSQPSKETESSYQEYLKLKAKVDVLQRSHRNLLGEDLGELSTKELEQLEHQLDKSLRQIRSIKTQHMLDQLADLQKKEEMLFESNRALKTKLEESCASFRPNWDVRQPGDGFFEPLPLPCNNNLQIGYNEATQDQMNATTSAQNVHGFAQGWML

SEQ ID NO: 16006 - protein, 225 aa, Cucumis sativus
MGRGKIEIKRIENTTNRQVTFCKRRNGLLKKAYELSVLCDAEVALIVFSSRGRLYEYSNNSIKTTIERYKKACSDSSATSSVTELNTQYYQQESAKLRQQIQMLQNSNRHLMGDSLSALTVKELKQLENRLERGITRIRSKKHEMLLAEIEYLQKREIELENENVCIRTKIAEVERVQQANMVSGQELNAIQALANSRNFFSPNIMEPAGPVSYSHQDKKMLHLG

SEQ ID NO: 16007 - protein, 229 aa, Cucumis sativus
MGRGKIEIKRIENTTNRQVTFCKRRNGLLKKAYELSVLCDAEVALIVFSSRGRLYEYSNNSIKTTIERYKKACSDSSATSSVTELNTQYYQQESAKLRQQIQMLQNSNSNLVRHLMGDSLSALTVKELKQLENRLERGITRIRSKKHEMLLAEIEYLQKREIELENENVCIRTKIAEVERVQQANMVSGQELNAIQALANSRNFFSPNIMEPAGPVSYSHQDKKMLHLG

SEQ ID NO: 16008 - protein, 241 aa, Populus balsamifera subsp. trichocarpa
MEYQNESLESSPLRKLGRGKVEIKRIENTTNRQVTFCKRRSGLLKKAYELSVLCDAEVALIVFSSRGRLYEYSNDSVKSTIERYKKASADSSNTGSVSEANAQYYQQEAAKLRSQIGNLQNSNRHMLGEALSSLSVKELKSLEIRLEKGISRIRSKKNELLFAEIEYMQKREVDLHNNNQLLRAKISENERKRQSMNLMPGGADFEIVQSQPYDSRNYSQVNGLQPASHYSHQDQMALQLV

SEQ ID NO: 16009 - protein, 238 aa, Populus balsamifera subsp. trichocarpa
MAYQNEPQESSPLRKLGRGKVEIKRIENTTNRQVTFCKRRNGLLKKAYELSVLCDAEVALIVFSSRGRLYEYSNNSVKSTIERYKKACADSSNNGSVSEANAQFYQQEAAKLRSQIGNLQNSNRNMLGESLSALSVKELKSLEIKLEKGIGRIRSKKNELLFAEIEYMQKREIDLHNNNQLLRAKIAENERKRQHMNLMPGGVNFEIMQSQPFDSRNYSQVNGLPPANHYPHEDQLFS

SEQ ID NO: 16010 - protein, 249 aa, Fragaria x ananassa
MGRGRVELKRIENKINRQVTFAKRRNGLLKKAYELSILCDAEVALIIFSNRGKLYEFCSSSSMLKTLERYQKCSYGAMEVQKPAKELEESSYREYLKLKTRCESLQQTQRNLLGEDLGPLNTKELEQLERQLESSLKHVRSTKTQHMIDLLSDLQSKEHMLIEANRDLKTKLDEIDSRTQLRQTWEHGHDHQTMLYGTQHAQTQGLMFQPLDCNPTLQIGYNAVVSQEMPAATPAHAQPVNGFIPGWML

SEQ ID NO: 16011 - protein, 197 aa, Anemone nemorosa
TGIMKKAEELTILCDAQVSLLMFSTTGKLHEYISPSITQKEFYDKYQQISGVSLWDSQYEKMQDTLKKLKETNSKLRREIRQRHGEDLEGLQFQQLRGLEQNMEKSAERIRNKKFHVIGTQTETCKKKIKSHEETQNNLLRGFDMGDPTCHYGFIPHEDDYDHDNEGSQVFAFRLQPAQHSLQDAEAAYGSYGLTLA

SEQ ID NO: 16012 - protein, 257 aa, Silene latifolia
MGRGRVQLKRIENKINRQVTFSKRRTGLLKKAHEISVLCDADVGLIVFSTKGKLFEYATDSCMEKILERYERYSYAERQLTAPDPDSHVSWTLEHAKLKARLEILQKNHRHYMGEDLDTLSLKELQNFEHQLDTALKHIRSKKNQLMYESIHELQKKDKALQEHNNTLSKKVKEKEKEKEKEKAIADQQAQWVQQNQELNPSAFFSSQVLPALNIRGNYETGSSVIVNEVAQTQNRSNSSNNNSLVPSWMLNHLAEQ

SEQ ID NO: 16013 - protein, 242 aa, Panax ginseng
MSFYDDQSGNLSPQRKLGRGKIEIKRIENTTNRQVTFCKRRNGLLKKAYELSVLCDAEVALIVFSTRGRLYEYANNSVKGTIERYKKACTDSPNTSSVSEANAQFYQQEASKLRQEISSIQKNNRNMMGESLGSLTVRDLKGLETKLEKGISRIRSKKNELLFAEIEYMQKKEIDLHNNNQYLRAKIAENERAQQHMNLMPGSSDYELAPPQSFDGRNYIQLNGLQPNNHYSRQDQTALQLV

SEQ ID NO: 16014 - protein, 247 aa, Capsicum annuum
MGRGRVQLRRIENKINRQVTFSKRRSGLLKKAHEISVLCDAEVGLIVFSSKGKLFEYSTDSCMERILERYERYSYAERQLNATDVETPGSWTLEHAKLKARLEVLQRNQRHYAGEDLDSLSMKELQNLEQQLDSALKHIRSRKNQLMHESISELQKKDKALQEQNNNLSKQMKEREKQLAQQHTPWEQQNHDHLNSSSFGLPHPFNNNHLGEVYPTAGDNGEVEGSSRQQQQNAAVMPPWMLRHLNG

SEQ ID NO: 16015 - protein, 219 aa, Nicotiana tabacum
MVRGKTQMRRIENATSRQVTFSKRRNGLLKKAFELSVLCDAEVGLVIFSPRGKLYEFASSSMQEIIERYKRHTKDKVQPENQVGEQNLQHMQHAAASLMKKIELLEESKRKLLGEGLQSCSLVELQQIEKQLERSVSTIRARKIQVFKEQIERLKEKEKILASENAILREKFGGLQQRQGSSGEKEGEALCTESSEKSDVETELFIGPPECRIRRPLQN

SEQ ID NO: 16016 - protein, 253 aa, Rumex acetosa
MEFSNELSRDMEDGSPQRKMGRGKIEIKRIENVTNRQVTFCKRRNGLLKKAYELSVLCDAEVALIVFSSRGRLYEYANHSVKATIERYKKTCSDSTGVTSVEEANAQQEAAKLRNQIRTLQNQTRNTSRNLMGEGLTSMNMKDLKNLETRLEKGISRVRAKKNELLFGEIEFMQKKEIELHNNNQFLRAKIAESERSQQSMNLMPGSSSGEQHYELMPQSQAGPFDSRNFFQVSDLQPDERYSCQNQTPLQLV

SEQ ID NO: 16017 - protein, 125 aa, Argyroxiphium caliginis
TNRQVTYSKRRNGIFKKALELTVLCDAKVSLIMFSNTGKFHEYISPSTTTKKIYDMYQTTLRFDLWTSHYERMTETMKKLKESNNKLRREIRRRVLGEDLDGLDMNDLTILEQQTQDSLTVVRER

SEQ ID NO: 16018 - protein, 123 aa, Kyhosia bolanderi
RQVTYSKRRNGIFKKAHELTVLCDAKVSLIMFSNTGKFHEYISPSTTTKKIYDMYQTTLGFDLWSSHYERMTETMKKLKDSNNKLRREIRQRVLGEDLDCLDMNDLTILEQQMQDSLTVVRER

SEQ ID NO: 16019 - protein, 125 aa, Wilkesia gymnoxiphium
TNRQVTYSKRRNGIFKKAHELTVLCDAKVSLIMFSNTGKFHEYISPSTTTKKIYDMYHTTLGFDLWSSHYERMTETMKKLKDSNNKLRREIRQRVLGEDLDDLDMNDLTILEQQMQDSLTVVRER

SEQ ID NO: 16020 - protein, 199 aa, Platanus occidentalis
GGITKKAQELSVLCDAEVSLIMFSSTGKFHEYISPTTTTKEIFDRYQQTLRINLWQAHYEKMQDSLNRLKEINNNLRREIRHRIGEDLNDLSIEELRGLEQNMDNSMKIVRDQKYHKIQTQTDTYKKKLKSSEETHRNLLRQFEGRDDDPDYGLVDNEGDYESEMGVANGGSHSFAFRLQPIQPNLQEGVYGFHDLRLA

SEQ ID NO: 16021 - protein, 217 aa, Pimpinella brachycarpa
MVRGKTQMRRIENATSRQVTFSKRRNGLLKKAFELSVLCDAEVALIIFSPRGKLHEFASSSMHETIERYRKHTKDVQSNNTPVVQNMQHLKHETASLAKKIELLEVSKRKLLGEGLGTCSINELQQIEQQLEKSVCTVRARKMQVFKEQIEQLKEKEKTLAADNAILLAKYDVQPRQESPEDGGNLTSTTENSENSDVETELFIGPPEKRFKRIMEK

SEQ ID NO: 16022 - protein, 228 aa, Zea mays
MARERREIKRIESAAARQVTFSKRRRGLFKKAQELSVLCDADVALIVFSSTGKLSQFASSSMNEIIDKYNTHSKNLGKTEQPSLDLNLEHSKYANLNEQLAEASLRLRQMRGEELEGLNVEELQQLEKNLESGLHRVLQTKDSQFLEQINDLERKSTQLAEENMQLRNQVSQIPPAGKQAVADTENVIAEEGQSSESVMTALHSGSSQDNDGGSDVSLKLGLPCVAWK

SEQ ID NO: 16023 - protein, 228 aa, Zea mays; identical to SEQ ID NO: 379

SEQ ID NO: 16024 - protein, 351 aa, Zea mays
MPTCQLEQIPFPAPPPPPFLSLALLLSSPLLSFRITHHDSQPPCGALDPAGPGPFLPLPLRLSSLSLSSSPLLSSPSASHTTTPNRRLALLLRALPLPHPPSLLWVGGRVSASSTEIRDRRRGMARERREIKRIESAAARQVTFSKRRRGLFKKAEELSVLCDADVALIVFSSTGKLSQFASSSMNEIIDKYSTHSKNLGKAEQPSLDLNLEHSKYANLNEQLVEASLRLRQMRGEELEGLSVEELQQLEKNLESGLHRVLQTKDQQFLEQISDLEQKSTQLAEENRQLRNQVSHIPPVGKQSVADAENVIAEDGQSSESVMTALHSGSSQDNDDGSDVSLKLGLPCVAWK

SEQ ID NO: 16025 - protein, 228 aa, Zea mays
MARERREIKRIESAAARQVTFSKRRRGLFKKAEELSVLCDADVALIVFSSTGKLSQFASSSMNEIIDKYSTHSKNLGKAEQPSLDLNLEHSKYANLNEQLVEASLRLRQMRGEELEGLSVEELQQLEKNLESGLHRVLQTKDQQFLEQISDLEQKSTQLAEENRQLRNQVSHIPPVGKQSVADTENVIAEDGQSSESVMTALHSGSSQDNDDGSDVSLKLGLPCVAWK

SEQ ID NO: 16026 - protein, 228 aa, Zea mays; identical to SEQ ID NO: 16025

SEQ ID NO: 16027 - protein, 284 aa, Zea mays
LAAGRAFAQKSTLSLLPHTASGLLRTRASDLLQHLRSGGARGWRSRSRSGGAMVGTGKRERIAIRRIDNLAARQVTFSKRRRGLFKKAEELSILCDAEVGLVVFSATGKLFHFASSSMKQVIDRYDSHSKTLQKSEPQSSQLQSQDDGTCARLKEELAETSLKLRQMRGEELQRLSVQQLQELEKTLESGLGSVLKTKSQKILDEISGLERKRTQLIEENSRLKEQVTRMSRMETQLGADPEFVYEEGQSSESVTNTSYPRPSTDTDDCSDTSLRLGLPFFSSK

SEQ ID NO: 16028 - protein, 294 aa, Zea mays
LGFSFSPPSARLLLDGASSSLPASQSNHACCFISPFLPAVWLLAAAAAAPAGGGAGAGGAMVGTGKRERIAIRRIDNLAARQVTFSKRRRGLFKKAEELSILCDAEVGLVVFSATGKLFHFASSSMKQVIDRYDSHSKTLQRSEPQSSQLQSQDDGTCARLKEELAETSLKLRQMRGEELQRLSVEQLQELEKTLESGLGSVLKTKSQKILDEISGLERKRTQLIEENSRLKEQLQVTRMSRMETQLGADPEFVYEEGQSSESVTNTSYPRPSTDTDDCSDTSLRLGLPLFSSK

SEQ ID NO: 16029 - protein, 237 aa, Zea mays
  unsure (1)..(237): unsure at all Xaa locations
MARERREIRRIESAAARQVTFSKRRRGLFKKAEELAVLCDADVALVVFSATGRLSQFASSSVNDIVDKYSTHSKNLGKSHQQPSIDLNVEQSKYSGLNEQLAEETNGLRQMRGEDLEGLSVEELHRMERKLEAGLHRVISTKDQLFMQQIGELLQKGTQLEDENRRLKEQMPQVLTAGTMVVAAAAENILTEDGQSSESVMTALHSGSSLDCDDGSDISLKLSLPXKEGPSHRMLSA

SEQ ID NO: 16030 - protein, 237 aa, Zea mays; identical to SEQ ID NO: 16029
  unsure (1)..(237): unsure at all Xaa locations

SEQ ID NO: 16031 - protein, 237 aa, Zea mays; identical to SEQ ID NO: 16029
  unsure (1)..(237): unsure at all Xaa locations

SEQ ID NO: 16032 - protein, 225 aa, Zea mays; identical to SEQ ID NO: 666

SEQ ID NO: 16033 - protein, 218 aa, Zea mays
  unsure (1)..(218): unsure at all Xaa locations
MARERREIRRIESAAARQVTFSKRRRGLFKKAEELAVLCDADVALVVFSATGRLSQFASSSVNDIVDKYSTHSKNLGKSHQQPSIDLNVEQSKYSGLNEQLAEETNGLRQMRGEDLEGLSVEELHRMERKLEAGLHRVISTKDQLFMQQIGELLQKGTQLEDENRASKRTKNILTEDGQSSESVMTALHSGSSLDCDDGSDISXLKLSLPXKEDHRIA

SEQ ID NO: 16034 - protein, 235 aa, Zea mays
  unsure (1)..(235): unsure at all Xaa locations
MARERREIRRIESAAARQVTFSKRRRGLFKKAEELAVLCDADVALVVFSATGRLSQFASSSVNDIVDKYSTHSKNLGKSHQQPSIDLNVEQSKYSGLNEQLAEETNGLRQMRGEDLEGLSVEELHRMERKLEAGLHRVISTKLFMQQIGELLQKGTQLEDENRRLKEQMPQVLTAGTMVVAAAAENILTEDGQSSESVMTALHSGSSLDCDDGSDISLKLSLPXKEGPSHRMLSA

SEQ ID NO: 16035 - protein, 237 aa, Zea mays
  unsure (1)..(237): unsure at all Xaa locations
MARERREIRRIESAAARQVTFSKRRRGLFKKAEELAVLCDADVALVVFSATGRLSQFASSSVNDIVDKYSTHSKNLGKSHQQPSIDLNGEQSKYSGLNEQLAEETNGLRQMRGEDLEGLGGEELHRMERKLEAGLHRVISTKDQLFMQQIGELLQKGPQLEDETRRLKEQMPQVLTAGPMVVAAAAENILPEDGQSSESVMTALHSGSSLDCDDGSDISLKLSLPXKEGPSHRMLSA

SEQ ID NO: 16036 - protein, 272 aa, Zea mays
  unsure (1)..(272): unsure at all Xaa locations
LAAAPAGGGAGARRGRAMVGTGKRERIAIRRIDNLAPRQVTFSKRRRGLLKKAEALSILCDAEVGLVGFSATGKLCHFASSSMKQVIDRDDSHSKTLQRPEPQSSQLQSQDDGTCARLKEELAETSLKLRQMRGEELQRLSVEQLQELEKTLESGLGSVLKTKSXKKILDEISGLERXRTQLIEENSRLKERXVSSISXXMERHLGVHPXFVYEEGQSSESVRNTSYPRPSTDTEGCSYTSLRLGLPFFSSKWRRFGMSGNGAVPIACPFPL

SEQ ID NO: 16037 - protein, 160 aa, Zea mays
  unsure (1)..(160): unsure at all Xaa locations
MARERREIKRIESAAARQVTFSKRRRGLFKKAEELSVLCDADVALIVFSSTGKLSQFASSSMNEIIDKYSTHSKNLGKAEQPSLDLNLEHSKYANLNEQLVEASLRLRQMRGEELEGLSVEELQQLEKNLESGLHRVLQTKDQQFLEQISDLEQKVTNNX

SEQ ID NO: 16038 - protein, 205 aa, Zea mays
RNGLLKKAYELSVLCDAEVGLVVFSATGKLFHFASSSMKQVIDRYDSHSKTLQRSEPQSSQLQSHMDDGTCARLKEELAETSLKLRQMRGEELQRLSVEQLQELEKTLESGLGSVLKTKSQKILDEISGLERKRTQLIEENSRLKEQVTRMSRMETQLGADPEFVYEEGQSSESVTNTSYPRPSTDTDDCSDTSLRLGLPLFSSK

SEQ ID NO: 16039 - protein, 217 aa, Zea mays
PRVLLHLSLPSCRVVVGCRSGGARGWRSRSGGAMVGTGKRERIAIRRIDNLAARQVTFSKRRRGLFKKAEELSILCDAEVGLVVFSATGKLFHFASSRQMRGEELQRLSVEQLQELEKTLESGLGSVLKTKSQKILDEISGLERKRTQLIEENSRLKEQVTRMSRMETQLGADPEFVYEEGQSSESVTNTSYPRPSTDTDDCSDTSLRLGLPLFSSK

SEQ ID NO: 16040 - protein, 201 aa, Trollius laxus
AGILKKAKELTVLCDAEVSLLMFSSTGKLHEFVSPCTTTKKVYDRYQQTSGINLWQSHYERMQDNLNKLKEINRKLRREIRQRNGEDLDGLTFQQLCTLEQNMDKSSECVRNRKFHVIGTQTDTYKKKVKNHEETQNDLLREMQRREAEYHYAFGDQEGDYPSAVNGNAAHIFAFRLQPSQPNLHLQDDASGYGSYGLSLA

SEQ ID NO: 16041 - protein, 222 aa, Pinus resinosa
MGRGKIEIKRIENTTNRQVTFCKRRNGLLKKAYELSVLCDAEVALIVFSSRGRLYEFANHSVKRTIERYKKTCVDNNHGGAISESNSQYWQQEAGKLRQQIEILQNANRHLMGDGLTALNIKELKQLEVRLEKGISRVRSKKNEMLLEEIDIMQRREHILIQENEILRSKIAECQNSHNTNMLSAPEYDALPAFDSRNFLHANLIDAAHHYAHQEQTTLQLG

SEQ ID NO: 16042 - protein, 201 aa, Cimicifuga racemosa
AGITKKAQELTVLCDAQVSLIMISSTGKLFEYTSSSTTTKSIYDRYQQTTGLNLWQSHYEKMQENLNKLKETNSKLRREIRQRNGEDIDDLTFQQLRGLEQHMEKSVERVRHRKFHVIGTSTDTYKKKIKSLEETHNNLLRAFEERIEEDCHYALVDQEGDYQSAIGLANGGPHIFSIRLQPSQPNLRDDEGYASYGLRLA

SEQ ID NO: 16043 - protein, 516 aa, Drosophila melanogaster
MGRKKIQISRITDERNRQVTFNKRKFGVMKKAYELSVLCDCEIALIIFSSSNKLYQYASTDMDRVLLKYTEYNEPHESLTNKNIIEKENKNGVMSPDSPEAETDYTLTPRTEAKYNKIDEEFQNMMQRNQMAIGGAGAPRQLPNSSYTLPVSVPVPGSYGDNLLQASPQMSHTNISPRPSSSETDSVYPSGSMLEMSNGYPHSHSPLVGSPSPGPSPGIAHHLSIKQQSPGSQNGRASNLRVVIPPTIAPIPPNMSAPDDVGYADQRQSQTSLNTPVVTLQTPIPALTSYSFGAQDFSSSGVMNSADIMSLNTWHQGLVPHSSLSHLAVSNSTPPPATSPVSIKVKAEPQSPPRDLSASGHQQNSNGSTGSGGSSSSTSSNASGGAGGGGAVSAANVITHLNNVSVLAGGPSGQGGGGGGGGSNGNVEQATNLSVLSHAQQHHLGMPNSRPSSTGHITPTPDFIILNAGAPSSDQDVRLAAVAVQQQQQQPHQQQQLGDYDAPNHKRPRISGGWGT

SEQ ID NO: 16044 - protein, 509 aa, Drosophila melanogaster
MGRKKIQISRITDERNRQVTFNKRKFGVMKKAYELSVLCDCEIALIIFSSSNKLYQYASTDMDRVLLKYTEYNEPHESLTNKNIIEKENKNGVMSPDSPEAETDYTLTPRTEAKYNKIDEEFQNMMQRNQMAIGGAGAPRQLPNSSYTLPVSVPVPGSYGDNLLQASPQMSHTNISPRPSSSETDSVYPSGSMLEMSNGYPHSHSPLVGSPSPGPSPGIAHHLSIKQQSPGSQNGRASNLRVVIPPTIAPIPPNMSAPDDVGYADQRQSQTSLNTPVVTLQTPIPALTSYSFGAQDFSSSGVMNSADIMSLNTWHQGLVPHSSLSHLAVSNSTPPPATSPVSIKVKAEPQSPPRDLSASGHQQNSNGSTGSGGSSSSTSSNASGGAGGGGAVSAANVITHLNNVSVLAGGPSGQGGGGGGGGSNGNVEQATNLSVLSHAQQHHLGMPNSRPSSTGHITPTPGAPSSDQDVRLAAVAVQQQQQQPHQQQQLGDYDAPNHKRPRISGGWGT

SEQ ID NO: 16045 - protein, 515 aa, Drosophila melanogaster
MGRKKIQISRITDERNRQVTFNKRKFGVMKKAYELSVLCDCEIALIIFSSSNKLYQYASTDMDRVLLKYTEYNEPHESLTNKNIIEKENKNGVMSPDSPEAETDYTLTPRTEAKYNKIDEEFQNMMQRNQMAIGGAGAPRQLPNSSYTLPVSVPVPGSYGDNLLQASPQMSHTNISPRPSSSETDSGGMSLIIYPSGSMLEMSNGYPHSHSPLVGSPSPGPSPGIAHHLSIKQQSPGSQNGRASNLRVVIPPTIAPIPPNMSAPDDVGYADQRQSQTSLNTPVVTLQTPIPALTSYSFGAQDFSSSGVMNSADIMSLNTWHQGLVPHSSLSHLAVSNSTPPPATSPVSIKVKAEPQSPPRDLSPAVISRIAMVPRAGGGSSSSTSSNASGGAGGGGAVSAANVITHLNNVSVLAGGPSGQGGGGGGGGSNGNVEQATNLSVLSHAQQHHLGMPNSRPSSTGHITPTPGAPSSDQDVRLAAVAVQQQQQQPHQQQQLGDYDAPNHKRPRISGGWGT

SEQ ID NO: 16046 - protein, 515 aa, Drosophila melanogaster
MGRKKIQISRITDERNRQVTFNKRKFGVMKKAYELSVLCDCEIALIIFSSSNKLYQYASTDMDRVLLKYTEYNEPHESLTNKNIIEKENKNGVMSPESPEGETDYTLTPRTGGMYNKIDEEFQNMMQRNQMAIGGAGAPRQLPNSSYTLPVSVPVPGSYGDNLLQASPQMSHTNISPRPSSSETDSGGMSLIIYPSGSMLEMSNGYPHSHSPLVGSPSPGPSPGIAHHLSIKQQSPGSQNGRASNLRVVIPPTIAPIPPNMSAPDDVGYADQRQSQTSLNTPVVTLQTPIPALTSYSFGAQDFSSSGVMNSADIMSLNTWHQGLVPHSSLSHLAVSNSTPPPATSPVSIKVKAEPQSPPRDLSPAVISRIAMVPRAGGGSSSSTSSNASGGAGGGGAVSAANVITHLNNVSVLAGGPSGQGGGGGGGGTNGNVEQATNLSVLSHAQQHHLGMPNSRPSSTGHITPTPGAPSSDQDVRLAAVAVQQQQQQPHQQQQLGDYDAPNHKRPRISGGWGT

SEQ ID NO: 16047 - protein, 539 aa, Drosophila melanogaster
MGRKKIQISRITDERNRQVTFNKRKFGVMKKAYELSVLCDCEIALIIFSSSNKLYQYASTDMDRVLLKYTEYNEPHESLTNKNIIEKENKNGVMSPDSPEAETDYTLTPRTEAKYNKIDEEFQNMMQRNQMAIGGAGAPRQLPNSSYTLPVSVPVPGSYGDNLLQASPQMSHTNISPRPSSSETDSGGMSLIIYPSGSMLEMSNGYPHSHSPLVGSPSPGPSPGIAHHLSIKQQSPGSQNGRASNLRVVIPPTIAPIPPNMSAPDDVGYADQRQSQTSLNTPVVTLQTPIPALTSYSFGAQDFSSSGVMNSADIMSLNTWHQGLVPHSSLSHLAVSNSTPPPATSPVSIKVKAEPQSPPRDLSASGHQQNSNGSTGSGGSSSSTSSNASGGAGGGGAVSAANVITHLNNVSVLAGGPSGQGGGGGGGGSNGNVEQATNLSVLSHAQQHHLGMPNSRPSSTGHITPTPHDKYEGYPYRALMGHNPRWNLNFAGAPSSDQDVRLAAVAVQQQQQQPHQQQQLGDYDAPNHKRPRISGGWGT

SEQ ID NO: 16048 - protein, 515 aa, Drosophila melanogaster
MGRKKIQISRITDERNRQVTFNKRKFGVMKKAYELSVLCDCEIALIIFSSSNKLYQYASTDMDRVLLKYTEYNEPHESLTNKNIIEKENKNGVMSPDSPEAETDYTLTPRTEAKYNKIDEEFQNMMQRNQMAIGGAGAPRQLPNSSYTLPVSVPVPGSYGDNLLQASPQMSHTNISPRPSSSETDSGGMSLIIYPSGSMLEMSNGYPHSHSPLVGSPSPGPSPGIAHHLSIKQQSPGSQNGRASNLRVVIPPTIAPIPPNMSAPDDVGYADQRQSQTSLNTPVVTLQTPIPALTSYSFGAQDFSSSGVMNSADIMSLNTWHQGLVPHSSLSHLAVSNSTPPPATSPVSIKVKAEPQSPPRDLSASGHQQNSNGSTGSGGSSSSTSSNASGGAGGGGAVSAANVITHLNNVSVLAGGPSGQGGGGGGGGSNGNVEQATNLSVLSHAQQHHLGMPNSRPSSTGHITPTPGAPSSDQDVRLAAVAVQQQQQQPHQQQQLGDYDAPNHKRPRISGGWGT

SEQ ID NO: 16049 - protein, 540 aa, Drosophila melanogaster
MGRKKIQISRITDERNRQVTFNKRKFGVMKKAYELSVLCDCEIALIIFSSSNKLYQYASTDMDRVLLKYTEYNEPHESLTNKNIIEKENKNGVMSPDSPEAETDYTLTPRTEAKYNKIDEEFQNMMQRNQMAIGGAGAPRQLPNSSYTLPVSVPVPGSYGDNLLQASPQMSHTNISPRPSSSETDSGGMSLIIYPSGSMLEMSNGYPHSHSPLVGSPSPGPSPGIAHHLSIKQQSPGSQNGRASNLRVVIPPTIAPIPPNMSAPDDVGYADQRQSQTSLNTPVVTLQTPIPALTSYSFGAQDFSSSGVMNSADIMSLNTWHQGLVPHSSLSHLAVSNSTPPPATSPVSIKVKAEPQSPPRDLSASGHQQNSNGSTGSGGSSSSTSSNASGGAGGGGAVSAANVITHLNNVSVLAGGPSGQGGGGGGGGSNGNVEQATNLSVLSHAQQHHLGMPNSRPSSTGHITPTPGHDKYEGYPYRALMGHNPRWNLNFAGAPSSDQDVRLAAVAVQQQQQQPHQQQQLGDYDAPNHKRPRISGGWGT

SEQ ID NO: 16050 - protein, 193 aa, Drosophila melanogaster
MGRKKIQISRITDERNRQVTFNKRKFGVMKKAYELSVLCDCEIALIIFSSSNKLYQYASTDMDRVLLKYTEYNEPHESLTNKNIIEKENKNGVMSPDSPEAETDYTLTPRTEAKYNKIDEEFQNMMQRNQMAIGGAGAPRQLPNSSYTLPVSVPVPGSYGDNLLQASPQMSHTNISPRPSSSETDSGGMSLIS

SEQ ID NO: 16051 - protein, 515 aa, Drosophila melanogaster
MGRKKIQISRITDERNRQVTFNKRKFGVMKKAYELSVLCDCEIALIIFSSSNKLYQYASTDMDRVLLKYTEYNEPHESLTNKNIIEKENKNGVMSPDSPEAETDYTLTPRTEAKYNKIDEEFQNMMQRNQMAIGGAGAPRQLPNSSYTLPVSVPVPGSYGDNLLQASPQMSHTNISPRPSSSETDSGGMSLIIYPSGSMLEMSNGYPHSHSPLVGSPSPGPSPGIAHHLSIKQQSPGSQNGRASNLRVVIPPTIAPIPPNMSAPDDVGYADQRQSQTSLNTPVVTLQTPIPALTSYSFGAQDFSSSGVMNSADIMSLNTWHQGLVPHSSLSHLAVSNRTPPPATSPVSIKVKAEPQSPPRDLSASGHQQNSNGSTGSGGSSSSTSSNASGGAGGGGAVSAANVITHLNNVSVLAGGPSGQGGGGGGGGSNGNVEQATNLSVLSHAQQHHLGMPNSRPSSTGHITPTPGAPSSDQDVRLAAVAVQQQQQQPHQQQQLGDYDAPNHKRPRISGGWGT

SEQ ID NO: 16052 - protein, 249 aa, Rosa rugosa
MEFPKQITPADDPESSSQKKLGRGKIEIKRIENTTNRQVTFCKRRNGLLKKAYELSVLCDAEVALIVFSTRGRLYEYANNSVRATIERYKKACDSSNTGSVTETNVQFYQQEASKLRRQIREIQNSNRHILGEALSTLNVKELKNLEGRLEKGISRIRSKKNEMLFAEIEYMQKREIELQNHNNFLRAKIAENDRAQQQQANMMPGTLSAYDQSMPPPQSYDRSFLPVILESNHHYNRQGQNQTPLQLV

SEQ ID NO: 16053 - protein, 125 aa, Dubautia laevigata
TNRQVTYSKRRNGIFKKAHELTVLCDAKVSLIMFSNTGKFHEYISPSTTTKKIYDMYQTTLRFDLWSSHYERMTETMKKLKDSNNKLRREIRQRVLGEGLDGLDMNDLTILEQQMQDSLTVVRER

SEQ ID NO: 16054 - protein, 125 aa, Dubautia latifolia
TNRQVTYSKRRNGIFKEADELTVLCDAKVSLIMFSNTGKFHEYISPSTTTKKIYDMYQTTLGFDLWGSHYERMTETMKKLKDSNNKLRREIRQRVLGEDLDGLDMNDLTILEQQMQDSLTVVRER

SEQ ID NO: 16055 - protein, 125 aa, Dubautia scabra
TNRQVTYSKRRNGIFKKAHELTVLCDAKVSLIMFSNTGKFHEYISPSTTTKKIYDMYQTTHGFDLWSSHYERMTETMKKLKDSNNKLRREIRQRVLGEDLDGLDMNDLTILEQQMQDSLTVVRER

SEQ ID NO: 16056 - protein, 337 aa, Halocynthia roretzi
MGRKKIQISRIGDERNRQVTFTKRKFGLMKKAYELSVLCDCEIALIIFNSSNKLFQYASTDMDKVLLKYTEYNEPHESRTNADIIEMLNKKEHKNCDSPDPDSTGYILTPNTLKRYDTINQEFDDMMKNVRPSHAIPPHVHTAGGDFLPMPVTVPVSSIQNSQTVSPTMDRRCISSYSSTTVAWSNPNLLHPPNIHHGRHSTSPLPRSPLAQSPSRSPGPMYGSDMSIMSDASSPAGANGYSNIHRTSPSVVHMERTSPMPQKHSSGGGGPGGMQKHSPRQPSPPRKQLHISIPASRSGMQSMDGIDNQQAFNTDCQSSHAEFTAWKSLSTCYIFSI

SEQ ID NO: 16057 - protein, 239 aa, Phalaenopsis equestris
MDSSSMEPKEKMGRGKIEIKRIENTTNRQVTFCKRRNGLLKKAYELSVLCDAEVALIIFSTRGRLYEYANNSVKGTIERYKKASTDNSNTGSISEANSQYYQQEATKLRQQITNLQNSNRNLLGDALTTMSLRDLKQLETRLEKGINKIRAKKNELLHAEIDYMQKREMELQTDNMFLRNKISDNERAQQQHQHMSILPSTSTEYEVMPPFDSRSFLHVNLMDPNDRYSHQQQTALQLG

SEQ ID NO: 16058 - protein, 449 aa, Danio rerio
MGRKKIQIARIMDERNRQVTFTKRKFGLMKKAYELSVLCDCEIALIIFNSTNKLFQYASTDMDKVLLKYTEYNEPHESRTNSDIVETLRKKGLNGCDSPDIDAEDSGHSPESEDKYRKINEDIDLMISRQRLCAIPQSNYDMPVSIPVSNPNSLIYGHPGASMGNPNLLPLTHPSLQRNSMSPGVTHRPPSAGNTGNGYGNHRNSPGLLVSPGNMSKNLQAKSPPSMNMSLSRKPDLRVLIPPGAKNTMPSINQRISSSQSAQSLSTPVVSVATPTLPGEVMGGYPSAINTSYGTEYSLSSGDLSSLSAFNSSASLHLGSMTGWPQNMQHSGLGHLGNCSSAQLCQSSALSLPSNQNLHIKSEPVSPPRDRASGTPGLYGVPQQTPLRQDSGRSPVDSLSSCGSSYDGSDRDEHRANFHSPVGLMRAAENERQSPSVKRMRLSEAGWAS

SEQ ID NO: 16059 - protein, 529 aa, Danio rerio
MGRKKIQIQRITDERNRQVTFTKRKFGLMKKAYELSVLCDCEIALIIFNHSNKLFQYASTDMDKVLLKYTEYNEPHESRTNADIIEALNKKEHRDSESPDPEEPFSLTPRTEEKYKKIDEEFDKMMQSYRLSSTVPAPTFSMPVTVPVSNQSPLPFSNPSSLVTTSFVTSTLTDPRLLSPQQPQLQRNTVSPGLPQRPASAGALLGGDLNNSNGACPSPVANGYVSARASPGLLSVSNGNSMGKVVQAKSPPPPSTQMANSRKPDLRVITSQSSKGLMQLTDEELELVSENAQRLGTSQVTQPLTTPVVSVATPSLLTPFSMPTAYNTEYQLTSADLTALQAFTPSGALLPGNMTTWQQQQQPSVSQQPQQQPSVSQQQTQQQQQQQQQPQQLTLASLSNLVPVGTIPHGATLTVNTNPSISIKSEPVSPNRDRSTPSSTPGAVGGVSGLTVSQYPGTLRLEPTGRSPVDSISSNGSSYEGSDRDDSGQPRPPDFSSLGLLRATGDQPAQAEQQESANVKRMRLDTWVT

SEQ ID NO: 16060 - protein, 460 aa, Danio rerio
MGRKKIQITRIMDERNRQVTFTKRKFGLMKKAYELSVLCDCEIALIIFNSSNKLFQYASTDMDKVLLKYTEYNEPHESRTNSDIVEKLRNKGHNDCPSPDPDDCFGHSPLMDDRFGKLNEESDLMYKRCGPTALPPQNFSMHVAVPVTNPNAMSYNPGASLSSQSLSAAAAASLSDGAMLSPPQGSMHRSVVPPQRPPSTGSTGNGFVNPRGSPGLLGTPSGNGLGKVMPAKSPPPPGGNMGIGSRKPDLRVVIPPSSKGMMPPLNTQRISSSQSTQPLATPVVSVTTPSLAPQGLVYSGMPTAYNSEYSLSSAELSSLQGFGSPGLSIGSVSAWQQHQLGQAALSSLVGGGHLPQGSNLSINTSQNVNIKSEPISPPRERVTPSGFPPQQQQPPSGRPDMGRSPVDSLSSSCSSYDGSDREDHRPDFHSPLGLGRPPAGGADERESPSVKRMRMDTWVT

SEQ ID NO: 16061 - protein, 474 aa, Cyprinus carpio
MGRKKIQIARIMDERNRQVTFTKRKFGLMKKAYELSVLCDCEIALIIFNSTNKLFQYASTDMDKVLLKYTEYNEPHESRTNSDIVETLRKKGLNGCDSPDIDAEDSGHSPESGDKYCKINEDIDLMISRQRLCAIPQSNYDMPISIPVSNPNSLIYSHPGASLGNPNMLPLAHPSLQRNSMSPGVTHRPPSAGNTGGLMGPDLSSGVGTSAGNGYGNHRNSPGLLVSPGSMSKNMQAKSPPPMTMSMSNRKPDLRVLIPPGSKNTMPSINQRINNSQSAQSLSTPVVSVATPTLPGQGMGGYPSALSTSYGTEYSLSSGDLSSLTGFNSSASLHLGSMTGWPQNMQHSGLVHLGNCTSTPLCQSSTLSLPSNQSLHIKSEPVSPPRDRAGGTPGGYAQPPPQQQQPASQQGQLRQDAGRSPVDSLSSCGSSYEGSDREEHRIDFHSPMGLLRPSPDERQSPSVKRMRLSEGWAS

SEQ ID NO: 16062 - protein, 472 aa, Cyprinus carpio
MGRKKIQITRIMDERNRQVTFTKRKFGLMKKAYELSVLCDCEIALIIFNSSNKLFQYASTDMDKVLLKYTEYNEPHESRTNSDIVEKLRNKGHNDCASPDPDDCFGHSPLMDDRFSKLNEESDLMYKRCGPTALPPQNFSMHVAVPVTNPNAMSYNHGASLSSQSLSAATASLSDGAMLSPPQGSLHRNLVSAGPPQRPPSTGSAAGNGFVNSRGSPGLLGTPSGNGLGKVMPAKSPPPPGGNMGIGSRKPDLRVVIPPSSKGMMPPLQSEEEEMELNTHRISSSQSTQPLATPVVSITTPSLPPQGLVYSGMPTAYNSEYSLSSAELSSLQGFGSPGLSIGSMSAWQQHQLGQAALNSLVGGGHLPQGSNLSINTSQNVNIKSEPISPPRERITPSGFPPQQQQQPPSSRPDMGRSPVDSLSSSCSSYDGSDREDHRHDFHSPLGLGRPRPPGQREGDPTVKRMRMDTWVT

SEQ ID NO: 16063 - protein, 234 aa, Hyacinthus orientalis
MGRGKIEIKRIENTTNRQVTFCKRRNGLLKKAYELSVLCDAEVALIVFSTRGRLYEYSNNSIKSTIERDKKACADSSSSSAVIEVNTQRYYQQEASKLRQQIQILQNANRHLMGESLDPLNVKELKQLETRLERGITRVRSKKHELLFAELEYMQKREVELQTDNMYLRAKIGENERAHQASVVQAGTEFDALPTFDSRNYYQVHMLQAASHYSHHQDQTALHLGYETKADPSA

SEQ ID NO: 16064 - protein, 181 aa, Lilium regale
MGRGKIEIKRIENSTNRQVTFSKRRNGIIKKARELSVLCEAHVSVVIFSSSGKMSEYCSPSTSLPKILERYQLNSGKKIWDAKHEHLSAEIDRIKKENDNMQIELRHLKGEDLNSLQPKELIPIEEALENGVRGVREKQNDVLRMLKKNERILEEDNKRLAYILHHHQLTRGEYEGHGTCM

SEQ ID NO: 16065 - protein, 516 aa, Xenopus laevis
MGRKKIQITRIMDERNRQVTFTKRKFGLMKKAYELSVLCDCEIALIIFNSSNKLFQYASTDMDKVLLKYTEYNEPHESRTNSDIVETLRKKGLNGCESPDDQRYFEEETFSKLIEDSDFVFKRDPALNKKENRGCDSPDPDGSYVLTPHTEEKYKKINEEFDNMMRSHKISPGLPQQTFPMSVTVPVSNPNTLTYSSPGNTMVTASLAASASLTDARMLSPPPTTLHRNVVSPGLPQRPPSTGNAGVMLCSSDLSVPNGAGTSPVGNGFVNPRASPSHLGPTGGNVLGKVMPTKSPPPPGGNLVMNSRKPDLRVVIPPSSKGMMPPLNTQRVTSSQGTQPLATPIVSVATPSLAPQGLIYSAMPTAYNTDYPLTSADLSMLQGFNSPGILPLGQVSAWQQHHVGQAALSSFVATGQLSQGSNLSINTNQNINIKSEPISPPRDRITPSGFQSHQHHQHQPRPEMDSLSSSSSSYDGSDREDVRNDFHSPIGLGRPANNEDRDSPSVKRMRMDAWVT

SEQ ID NO: 16066 - protein, 498 aa, Xenopus laevis
MGRKKIQIQRITDERNRQVTFTKRKFGLMKKAYELSVLCDCEIALIIFNHSNKLFQYASTDMDKVLLKYTEYNEPHESRTNADIIETLRKKGFNGCDSPEPDGDDSIDQSPLMEDKYRKSSEDLDILFKRYGSAVPAPNFAMPVTVPVTNQNALHFSNPGGSLITQSLMTSSLTDPRLLSPPQPSLQRNTVSPGLPQRPASAGAMLGGELNNSNGTCPSPVGNGYISARASPGLLPVSNGNSLGKVIQAKSPPSPNQNSQLGANSRKPDLRVITSQGGKGLMHHLTEEQLEMSVQRLGGVSQATHSLTTPVVSVATPSLLSHHGLPFSAMSTAYNTDYQLTSADLASLSTFSSPGSLSLGNVTAWQHQQQQQQQHNQPQQLIPVSLSNLVSSSHLPHTATLTVNTNPINISIKREPASPNRERSTGTPLSCFSHQSRHEATGRSPVDSLSSNASSFEGNDREDPRGDYTSSLGLLRPSGDTESESQSVKRMRLDAWVT

SEQ ID NO: 16067 - protein, 516 aa, Xenopus laevis
MGRRKIQITRIMDDRNKQVTFTKRKFGLMKKAYELSVLCDCEIALIIFNSSNKLFQYASTDMDKVLLKYTEYNEPHESRTNSDIVETLRKKGLNGCESPDDQRYFEEETFSKLIEDSDFVFKRDPALNKKENRGCDSPDPDGSYVLTPHTEEKYKKINEEFDNMMRSHKISPGLPQQTFPMSVTVPVSNPNTLPYSSPGNTMVTASLAASASLTDARMLSPPPTTLHRNVFPQGYPSEPPSTGNAGVMLCSSDLSVPNGAGTSPVGNGFVNPRASPSHLGPTGGNVLGKVMPTKSPPPPGGNLVMNSRKPDLRVVIPPSSKGMMPPLNTQRVTSSQGTQPLATPIVSVATPSLAPQGLIYSAMPTAYNTDYPLTSADLSMLQGFNSPGILPLGQVSAWQQHHVGQAALSSFVATGQLSQGSNLSINTNQNINIKSEPISPPRDRITPSGFQSHQHHQHQPRPEMDSLSSSSSSYDGSDREDVRNDFHSPIGLGRPANNEDRDSPSVKRMRMDAWVT

SEQ ID NO: 16068 - protein, 516 aa, Xenopus laevis
MGRKKIQIIRIMDERNRQVIFTKRKFGLMKKAYELSVLCDCEIALIIFNSSNKLFQYASTDMDKVLLKYTEYNEPHESRTNSDIVETLRKKGLNGCESPDDQRYFEEETFSKLIEDSDFVFKRDPALNKKENRGCDSPDPDGSYVLTPHTEEKYKKINEEFDNMMRSHKISPGLPQQTFPMSVTVPVSNPNTLPYSSPGNTMVTASLAASASLTDARMLSPPPTTLHRNVVSPGLPQRPPSTGNAGVMLCSSDLSVPNGAGTSPVGNGFVNPRASPSHLGPTGGNVLGKVMPTKSPPPPGGNLVMNSRKPDLRVVIPPSSKGMMPPLNTQRVTSSQGTQPLATPIVSVATPSLAPQGLIYSAMPTAYNTDYPLTSADLSMLQGFNSPGILPLGQVSAWQQHHVGQAALSSFVATGQLSQGSNLSINTNQNINIKSEPISPPRDRITPSGFQSHQHHQHQPRPEMDSLSSSSSSYDGSDREDVRNDFHSPIGLGRPANNEDRDSPSVKRMRMDAWVT

SEQ ID NO: 16069 - protein, 259 aa, Poa annua
MGRGRVELKRIENKINRQVTFSKRRNGLLKKAYELSVLCDAEVALIIFSSRGKLYEFGSAGTTKTLERYQHCCYNAQDSNSALSETQSWYQEMSKLKAKFEALQRTQRHLLGEDLGPLSVKELQQLEKQLECSLSQARQRKTQLMVEQVEELRRKERQLGEINRQLKHKLDAEGSSSNNYRAMQQLTWAAGTVVDEGAAAYHMQHQQQQQPNHSAAMDCEPTLQIGYPHQFAAPEQAANNIPRSSGQGGENNFMLGWVL

SEQ ID NO: 16070 - protein, 522 aa, Coturnix japonica
MGRKKIQIQRITDERNRQVTFTKRKFGLMKKAYELSVLCDCEIALIIFNHSNKLFQYASTDMDKVLLKYTEYNEPHESRTNADIIETLRKKGFNGCEQPEPDGDDSIDQSPLMEDKYRKWPARLLVLFKRYGLQEFWNEESLRAERVVPTAKIRLVTSSTTPTSCSNMPAPIWTRGYPVSSDTVLQRNTVSPGLPQRPASAGAMFGGDLNNTNGACPSPVGNGYVSARASPGLLPVSNGSTLGKIIPAKSPPPPPHSTQLASNSRKPDLRVITSQSGKGLMHHLTEDHLALNTQGLGVSQATHSLTTPVVSVATPSLLTQACPSPPCRPHTTQIISESAELSSLPAFSSPGGLSLGNISAWQQQQQQQQQQQQQQQQQQQQQQQQQQQQQQQQQQQQQQQQQHLVPVSLGNLIQGSHLSHTTTLTVNTNPNISIKSEPVSPNRERNTATPLSTFPHQPRHEPTGRSPVDSLSSNTSSYEGSSERDDPSRTDFSSSLGLLRPGGEPEGESPSVKRMRLDTWVT

SEQ ID NO: 16071 - protein, 469 aa, Homo sapiens
MGRKKIQITRIMDERNRQVTFTKRKFGLMKKAYELSVLCDCEIALIIFNSTNKLFQYASTDMDKVLLKYTEYNEQHESRTNSDIVETLRKKGLNGCDSPDPDADDSVGHSPESEDKYRKINEDIDLMISRQRLCAVPPPNFEMPVSIPVSSHNSLVYSNPVSSLGNPNLLPLAHPSLQRNSMSPGVTHRPPSAGNTGGLMGGDLTSGAGTSAGNGYGNPRNSPGLLVSPGNLNKNMQAKSPPPMNLGMNNRKPDLRVLIPPGSKNTMPSVSEDVDLLLNQRINNSQSAQSLATPVVSVATPTLPGQGMGGYPSAISTTYGTEYSLSSADLSSLSGFNTASALHLGSVTGWQQQHLHNMQPSALSQLGACTSTHLSQSSNLSLPSTQSLNIKSEPVSPPRDRTTTPSRYPQHTRHEAGRSPVDSLSSCSSSYDGSDREDHRNEFHSPIGLTRPSPDERESPSVKRMRLSE

SEQ ID NO: 16072 - protein, 473 aa, Homo sapiens
MGRKKIQITRIMDERNRQVTFTKRKFGLMKKAYELSVLCDCEIALIIFNSTNKLFQYASTDMDKVLLKYTEYNEPHESRTNSDIVETLRKKGLNGCDSPDPDADDSVGHSPESEDKYRKINEDIDLMISRQRLCAVPPPNFEMPVSIPVSSHNSLVYSNPVSSLGNPNLLPLAHPSLQRNSMSPGVTHRPPSAGNTGGLMGGDLTSGAGTSAGNGYGNPRNSPGLLVSPGNLNKNMQAKSPPPMNLGMNNRKPDLRVLIPPGSKNTMPSVSEDVDLLLNQRINNSQSAQSLATPVVSVATPTLPGQGMGGYPSAISTTYGTEYSLSSADLSSLSGFNTASALHLGSVTGWQQQHLHNMPPSALSQLGACTSTHLSQSSNLSLPSTQSLNIKSEPVSPPRDRTTTPSRYPQHTRHEAGRSPVDSLSSCSSSYDGSDREDHRNEFHSPIGLTRPSPDERESPSVKRMRLSEGWAT

SEQ ID NO: 16073 - protein, 521 aa, Homo sapiens
MGRKKIQIQRITDERNRQVTFTKRKFGLMKKAYELSVLCDCEIALIIFNHSNKLFQYASTDMDKVLLKYTEYNEPHESRTNADIIETLRKKGFNGCDSPEPDGEDSLEQSPLLEDKYRRASEELDGLFRRYGSTVPAPNFAMPVTVPVSNQSSLQFSNPSGSLVTPSLVTSSLTDPRLLSPQQPALQRNSVSPGLPQRPASAGAMLGGDLNSANGACPSPVGNGYVSARASPGLLPVANGNSLNKVIPAKSPPPPTHSTQLGAPSRKPDLRVITSQAGKGLMHHLTEDHLDLNNAQRLGVSQSTHSLTTPVVSVATPSLLSQGLPFSSMPTAYNTDYQLTSAELSSLPAFSSPGGLSLGNVTAWQQPQQPQQPQQPQPPQQQPPQPQQPQPQQPQQPQQPPQQQSHLVPVSLSNLIPGSPLPHVGAALTVTTHPHISIKSEPVSPSRERSPAPPPPAVFPAARPEPGDGLSSPAGGSYETGDRDDGRGDFGPTLGLLRPAPEPEAEGSAVKRMRLDTWTLK

SEQ ID NO: 16074 - protein, 514 aa, Homo sapiens
MGRKKIQIQRITDERNRQVTFTKRKFGLMKKAYELSVLCDCEIALIIFNHSNKLFQYASTDMDKVLLKYTEYNEPHESRTNADIIETLRKKGFNGCDSPEPDGEDSLEQSPLLEDKYRRASEELDGLFRRYGSTVPAPNFAMPVTVPVSNQSSLQFSNPSGSLVTPSLVTSSLTDPRLLSPQQPALQRNSVSPGLPQRPASAGAMLGGDLNSANGACPSPVGNGYVSARASPGLLPVANGNSLNKVIPAKSPPPPTHSTQLGAPSRKPDLRVITSQAGKGLMHHLNNAQRLGVSQSTHSLTTPVVSVATPSLLSQGLPFSSMPTAYNTDYQLTSAELSSLPAFSSPGGLSLGNVTAWQQPQQPQQPQQPQPPQQQPPQPQQPQPQQPQQPQQPPQQQSHLVPVSLSNLIPGSPLPHVGAALTVTTHPHISIKSEPVSPSRERSPAPPPPAVFPAARPEPGDGLSSPAGGSYETGDRDDGRGDFGPTLGLLRPAPEPEAEGSAVKRMRLDTWTLK

SEQ ID NO: 16075 - protein, 486 aa, Homo sapiens [sequence omitted]

SEQ ID NO: 16076 - protein, 506 aa, Homo sapiens
MGRKKIQITRIMDERNRQVTFTKRKFGLMKKAYELSVLCDCEIALIIFNSSNKLFQYASTDMDKVLLKYTEYNEPHESRTNSDIVEALNKKEHRGCDSPDPDTSYVLTPHTEEKYKKINEEFDNMMRNHKIAPGLPPQNFSMSVTVPVTSPNALSYTNPGSSLVSPSLAASSTLTDSSMLSPPQTTLHRNVSPGAPQRPPSTGNAGGMLSTTDLTVPNGAGSSPVGNGFVNSRASPNLIGATGANSLGKVMPTKSPPPPGGGNLGMNSRKPDLRVVIPPSSKGMMPPLSEEEELELNTQRISSSQATQPLATPVVSVTTPSLPPQGLVYSAMPTAYNTDYSLTSADLSALQGFNSPGMLSLGQVSAWQQHHLGQAALSSLVAGGQLSQGSNLSINTNQNISIKSEPISPPRDRMTPSGFQQQQQQQQQQPPPPPQPQPQPPQPQPRQEMGRSPVDSLSSSSSSYDGSDREDPRGDFHSPIVLGRPPNTEDRESPSVKRMRMDAWVT

SEQ ID NO: 16077 - protein, 497 aa, Homo sapiens
MGRKKIQITRIMDERNRQVTFTKRKFGLMKKAYELSVLCDCEIALIIFNSSNKLFQYASTDMDKVLLKYTEYNEPHESRTNSDIVEALNKKEHRGCDSPDPDTSYVLTPHTEEKYKKINEEFDNMMRNHKIAPGLPPQNFSMSVTVPVTSPNALSYTNPGSSLVSPSLAASSTLTDSSMLSPPQTTLHRNVSPGAPQRPPSTGNAGGMLSTTDLTVPNGAGSSPVGNGFVNSRASPNLIGATGANSLGKVMPTKSPPPPGGGNLGMNSRKPDLRVVIPPSSKGMMPPLNTQRISSSQATQPLATPVVSVTTPSLPPQGLVYSAMPTAYNTDYSLTSADLSALQGFNSPGMLSLGQVSAWQQHHLGQAALSSLVAGGQLSQGSNLSINTNQNISIKSEPISPPRDRMTPSGFQQQQQQQQQPPPPPQPQPQPPQPQPRQEMGRSPVDSLSSSSSSYDGSDREDPRGDFHSPIVLGRPPNTEDRESPSVKRMRMDAWVT

SEQ ID NO: 16078 - protein, 486 aa, Homo sapiens [sequence omitted]

SEQ ID NO: 16079 - protein, 499 aa, Homo sapiens
MGRKKIQITRIMDERNRQVTFTKRKFGLMKKAYELSVLCDCEIALIIFNSSNKLFQYASTDMDKVLLKYTEYNEPHESRTNSDIVEALNKKEHRGCDSPDPDTSYVLTPHTEEKYKKINEEFDNMMRNHKIAPGLPPQNFSMSVTVPVTSPNALSYTNPGSSLVSPSLAASSTLTDSSMLSPPQTTLHRNVSPGAPQRPPSTGNAGGMLSTTDLTVPNGAGSSPVGNGFVNSRASPNLIGATGANSLGKVMPTKSPPPPGGGNLGMNSRKPDLRVVIPPSSKGMMPPLNTQRISSSQATQPLATPVVSVTTPSLPPQGLVYSAMPTAYNTDYSLTSADLSALQGFNSPGMLSLGQVSAWQQHHLGQAALSSLVAGGQLSQGSNLSINTNQNISIKSEPISPPRDRMTPSGFQQQQQQQQQQQPPPPPQPQPQPPQPQPRQEMGRSPVDSLSSSSSSYDGSDREDPRGDFHSPIVLGRPPNTEDRESPSVKRMRMDAWVT

SEQ ID NO: 16080 - protein, 507 aa, Homo sapiens
MGRKKIQITRIMDERNRQVTFTKRKFGLMKKAYELSVLCDCEIALIIFNSSNKLFQYASTDMDKVLLKYTEYNEPHESRTNSDIVEALNKKEHRGCDSPDPDTSYVLTPHTEEKYKKINEEFDNMMRNHKIAPGLPPQNFSMSVTVPVTSPNALSYTNPGSSLVSPSLAASSTLTDSSMLSPPQTTLHRNVSPGAPQRPPSTGNAGGMLSTTDLTVPNGAGSSPVGNGFVNSRASPNLIGATGANSLGKVMPTKSPPPPGGGNLGMNSRKPDLRVVIPPSSKGMMPPLSEEEELELNTQRISSSQATQPLATPVVSVTTPSLPPQGLVYSAMPTAYNTDYSLTSADLSALQGFNSPGMLSLGQVSAWQQHHLGQAALSSLVAGGQLSQGSNLSINTNQNISIKSEPISPPRDRMTPSGFQQQQQQQQQQQPPPPPQPQPQPPQPQPRQEMGRSPVDSLSSSSSSYDGSDREDPRGDFHSPIVLGRPPNTEDRESPSVKRMRMDAWVT

SEQ ID NO: 16081 - protein, 365 aa, Homo sapiens
MGRKKIQISRILDQRNRQVTFTKRKFGLMKKAYELSVLCDCEIALIIFNSANRLFQYASTDMDRVLLKYTEYSEPHESRTNTDILETLKRRGIGLDGPELEPDEGPEEPGEKFRRLAGEGGDPALPRPRLYPAAPAMPSPDVVYGALPPPGCDPSGLGEALPAQSRPSPFRPAAPKAGPPGLVHPLFSPSHLTSKTPPPLYLPTEGRRSDLPGGLAGPRGGLNTSRSLYSGLQNPCSTATPGPPLGSFPFLPGGPPVGAEAWARRVPQPAAPPRRPPQSASSLSASLRPPGAPATFLRPSPIPCSSPGPWQSLCGLGPPCAGCPWPTAGPGRRSPGGTSPERSPGTARARGDPTSLQASSEKTQQ

SEQ ID NO: 16082 - protein, 77 aa, Homo sapiens
GRKKIQITRIMDERNRQVTFTKRKFGLMKKAYELSVLCDCEIALIIFNSSNKLFQYASTDMDKVLLKYTEYNEPHES

SEQ ID NO: 16083 - protein, 197 aa, Clematis integrifolia
TGIMKKAEELTVLCDAQVSLLMFSTTNKLHEYISPSITQKEFYDKYQRSSGVNLWDSQYEKMQENLKKLKETNNRLRKEIRQRHGEDLEGLQLQQLCGLEQNMLKSAERIRHKKFHVLGTQTETCKKKIKSHLEAHNNLLRGFEEGDTSCHYGFIPHGDDYDDDNGGSQVFAFRLQPTQPSLQDAQAAYGSYGLTLA

SEQ ID NO: 16084 - protein, 223 aa, Vitis vinifera
MGRGKIEIKRIENTTNRQVTFCKRRNGLLKKAYELSVLCDAEVALIVFSSRGRVYEYSNNNIKSTIDRYKKASSDSTNGGFTMEINAQYYQQESAKLRQQIQMLQNSNRHLMGDSLASLTVKELKQLENRLERGITRIRSKKHELLLAEIEYLQKREIELENESVYLRTKIAEVERLQQANMVSTHEFNAIQALVSRNFFQPNMIEGGSTGYPLHDKKVLHLG

SEQ ID NO: 16085 - protein, 203 aa, Picea abies
MECFEEKGKGVQKTRMVRGKTQMKRIENDTSRQVTFSKRRNGLLKKAYELSVLCDAEVALIVFSPRGKLYEFANPSMQKMLERYDKCSEGSNTTNTTKERDIQYLKREIANREERIKILESRQRKMVGEELASCALSDLNLLESQVERGLRHIRARKTQILVAEIEELKRKERISSEENAFHRKSLSILCMRMVPFWQLLQVH

SEQ ID NO: 16086 - protein, 206 aa, Cryptomeria japonica
MGRGKIEIKRIESTTNRQVTFSKRRSGLFKKAKEISILCASDVAVIVFNSTGRLFDFASSSMKRILERYRNASGRGVWNNEYEQMLSQFRNLKKENEELQKELSCVTGENVETLAPKQLDYLEENLVLAAKKVRERKTEVLKYERRKTESKVIGLQQKQSILMELLAHAENHEEYGFTVSNSEGQTTPPPAFRVQPSQPNLQGSGH

SEQ ID NO: 16087 - protein, 194 aa, Cryptomeria japonica
MGKGKIEIKRIEIKKNRQVTFSKRRSGLFKKAKEISILCAADVAVIVFNSTGRLFDFASSRNASGGKAWNNEYEQMLSQFRNLKNENEELQKELSCVRGEDVEKLARNQLDCLEGNLVLAAKKVQERKTEVLKYEGRKTESKKCSIPKDSLPHSPPLMETQFNEALEALHSLKDYGDDDAQDQNAGDGHRMRKP

SEQ ID NO: 16088 - protein, 184 aa, Anemone nemorosa
QGILKKAKEITVLCEAKVSLVIFSNTNKMFEYNSDPVQDILAKYQTTSGKKLWDAKHEYLSKEMDRIKKENDSMQIELRHLKGEDLTSLQPRELIPIEEALLDGLIKVRDKKMDYVMRKQIEMKKMEEENEQLNWTVNQQEIKMNGNSRSMQVNGFHQNGTDYPSEVPFTFLVHSTKPNLQEKK

SEQ ID NO: 16089 - protein, 248 aa, Silene latifolia
MEFSSQITREEGSPSSQRKLGRGKIEIKRIENTTNRQVTFCKRRNGLLKKAYELSVLCDAEVALIVFSSRGRLYEYANHSVKGTIDRYKKASSDNSGASSAAEANAQYYQQEAAKLRNQIRTVTENNRHLMGEGLSSLNMKDLKSLENKLERGISRIRSKKNELLFAEIEFMQKREVELHNNNQYLRAKIAENERAQQSMSLMPGGSSEYELAPPPQSFDSRNYFQVNALQPNNTHYSRPDQTTLQLN

SEQ ID NO: 16090 - protein, 248 aa, Nicotiana tabacum
MDFQSDLTREISPQRKLGRGKIEIKRIENTTNRQVTFCKRRNGLLKKAYELSVLCDAEVALIVFSSRGRLYEYANNSVKATIERYKKACSDSSNTGSISEANAQYYQQEASKLRAQIGNLQNQNRNMLGESLAALSLRDLKNLEQKIEKGISKIRSKKNELLFAEIEYMQKREIDLHNNNQYLRAKIAETERAQQQQQQQQMNLMPGSSSYELVPPPHQFDTRNYLQVNGLQTNNHYTRQDQPSLQLV

SEQ ID NO: 16091 - protein, 626 aa, Neurospora crassa
MGRRKIEIKAIKDDRNRSVTFLKRKGGLFKKAHELSVLCSVDVAVIIFGNNKKLYEYSSSNIRDILQRYTYHGGPNEHKGPSDFNGGADDDDDDDENGTNSQGEQHMMYQPNPPVSYPFLRHTSLSDSPPVPNGAFGPQPGHQMSRAHTPQPPFVARPPSVNDIRRLRPGQPVRPAGVAQELQNRSAFVPSPPIYNSQPPASMAPTHGLPTQLHPQYPFQPSQPPAHSMQQFEDQRRSPLPPTFVSQPPPHPAHRHSTSPPELLQPQIPQQQVHRHSASPQVHQAQLPQQPQRLPSANMSPPPPQPAQPPQQQQQQHRHQQQQPQSMPNQNLQPPAPPKPESMERPRRLIPALNTSVKNPGQGSVFTPIEPENKSILSQHFAAFRPEIKSESPNNRSQSVDGGNVSKPNTSTPSIQLSSAHGQGSAQRTNSLTVISQSTLPPPSRPQHLRVGGGPLRPRLKVQIPDDSDSGSAAGSASSPRVTTTTDSAPQPLKTGSVLPPPSPSASNLPSAGATGPPNPFAPRSTIQHNNNMNIDTPVSALPSRFLGDLLPSPSRFYPEWGYGISAESNTLPSPLNFATPVNGTGPSFLRDDPTPLKRKSPETKSTGPENDTGNNQDAKRMRLES

SEQ ID NO: 16092 - protein, 208 aa, Eucalyptus grandis
MGRGKIEIKRIENSNNRQVTYSKRRNGLIKKAKEISVLCDAQVSVIIFGSSGKMHEYCSSNTSLVDILDQYHTQCGKRLWDAKQENLSNELDRIKKENDNLQIQLRHLKGEDITSLNHRELIILEDTLENGVGCVRDQKDEVLMTHRRNQKQLEEDAKELHFYAQQKDMMMAETGRAGNDGYHQRMKADFGPSTYHVQPIQPNLQRRF

SEQ ID NO: 16093 - protein, 231 aa, Papaver nudicaule
MGRGKIEIKRIENSTNRQVTYSKRKNGILKKAKEITILCDAHVSLVIFSSTGKMNEYCSSPLIKQLDRYQKASGNKLWDAKHEYLSAEVDRVKKENDNMQIELRHLKGEDLTPLNPRELIPIESALDDGIVGVKAKIKEHYRALKKRTRMLEEDNKRLLTRLSQQQMEIHGRVEMDTMENTGYNNNNQKADGTRDYPAHNDNHHQVPFGFQVPPMQPNLTTVTTTTTTNNK

SEQ ID NO: 16094 - protein, 232 aa, Hordeum vulgare subsp. vulgare
MGRGRIEIKRIENTTNRQLTFCKRRNGLLKKAYELSVLCDAEVALVVFSSRGRLYEYSNNSVKATIERYKKATSDTSSAGTVAEINAQHYQQESAKLRQQITTLQNSNRTLIGDTMATMSHRDLKQLEGRLDKGLGKIRARKNELLSAEIEYMQRREMELQNNNFYLREKVAETERGQQQTLNMMGAASTSNEYDQNMIQCDPRTFLQFNIMQQPQYYTQQEDRKTLNSVER

SEQ ID NO: 16095 - protein, 234 aa, Hordeum vulgare subsp. vulgare
MGRGRIEIKRIENTTNRQVTFCKRRNGLLKKAYELSVLCDAEVALVVFSSRGRLYEYSNNSVKATIERYKKANSDTSNSGTVAEVNAQYYQQESSKLRQQISSLQNSNSRSLVRDSVSTMTLRDLKQLEGRLEKGIAKIRARKNELMYAEVEYMQKREMELHNDNIYLRSKVSENERGQQPMNMMASGSTSSEYDHMVAPYDSRNFLQVNMQQQQHYSQQLQPTALQLGQQYFN

SEQ ID NO: 16096 - protein, 276 aa, Hordeum vulgare subsp. vulgare
MGRGKVQLKRIENKINRQVTFSKRRNGLLKKAHEISVLCDAEVAVIVFSPKGKLYEYATDSSMDKILERYERYSYAEKALISAESESEGNWCHEYRKLKAKIETIQKCHKHLMGEDLDSLNLKELQQLEQQLESSLKHIRSRKSHLMMESISELQKKERSLQEENKALQKELVERQKAASRQQQLQQQQQQQQMQWEHQAQTQTHTHTQNQPQAQTSSSSSSFMMRDQQAHAPQQNICSYPPVTMGGEATAAAAAPEQQAQLRICLPPWMLSHLNA

SEQ ID NO: 16097 - protein, 244 aa, Hordeum vulgare subsp. vulgare
MGRRKVQLKRIENKINRQVTFSKRRSGLLKKAHEISVLYDAEVGLIIFSTKGKLYEFSTESCMDKILERYERYSYAEKVLVSSESEIQGNWCHEYRKLKAKVETIQKCQKHLMGEDLESLNLKELQQLEQQLESSLKHIRARKNQLMHESISELQKKERSLQEENKVLQKELVEKQKAQAAQQDQTQPQTSSSSSSFMMRDAPPVADTSNHPAAAGERAEDVAVQPQVPLRTALPLWMVSHING

SEQ ID NO: 16098 - protein, 246 aa, Hordeum vulgare subsp. vulgare
MGRGRVELKRIENKINRQVTFAKRRNGLLKKAYELSVLCDAEVALIVFSNRGKLYEFCSTQSMTKTLDKYQKCSYAGPETTVQNRENEQLKNSRNEYLKLKTRVDNLQRTQRNLLGEDLDSLGIKELESLEKQLDSSLKHIRTTRTQHMVDQLTELQRREQMFSEANKCLRIKLEESNQVHGQQLWEHNNNVLSYERQPEVQPQMHGGNGFFHPLDAAGEPTLHIGYPPESLNSSCMTTFMPPWLP

SEQ ID NO: 16099 - protein, 250 aa, Hordeum vulgare subsp. vulgare
MGRGKVEMRRIENKISRQVTFAKRRNGLLKKAYELSLLCDAEVALIIFSGRGRLFEFSSSSCMYKTLERYRTCNSNSQEATPQVENEINYQEYLKLKTRVEFLQSSQRNILGEDLGPLSMKELDQIENQIDASLQHIRSKKNQVLLDQLFELKSKEQELQDENKDLRKKLQDTTTTSCGENAVHMSWQDGGQSSSRRHATEPYPGVLQHPEHDTSMQIGYPQAYMDQLNNRDHMASQRPGGHPGSSAGWI

SEQ ID NO: 16100 - protein, 265 aa, Hordeum vulgare subsp. vulgare
MGRGPVQLRRIENKINRQVTFSKRRSGLLKKAHEISVLCDAEVALIVFSTKGKLYEYSSQDSSMDVILERYQRYSFEERAVLDPSTGDQANWGDEYGSLKIKLDALQKSQRQLLGEQLDPLTTKELQQLEQQLDSSLKHIRSRKNQLLFESISELQKKEKSLKDQNGVLQKHLVETEKEKNNVLSNIHHREQLNEATNIHHQEQLSGATTSSPSPTPPTAQDSMAPPNIGPYQSRGGGDPEPQPSPAQANNSNLPPWMLRTIGNR

SEQ ID NO: 16101 - protein, 238 aa, Populus tomentosa
MGRGKIEIEKIENPTNRQVTYSKRRNGIFKKAQELTVLCDAKVSLIMFSNTNKLNEYISPSTSTKKIYDQYQNTLGIDLWGTQYEKMQEHLRKLNDINHKLRKEIRQTRGEGLNDLSIDHLRGLEQHMTEALNGVRGRKFHVIKTQNETYRKKVKNLEERHGNLLMEYEAKLEDLQGGLVDNEAAVALVDGASDNEAAVALADGASNLYAIRLHHGHNHHHPNLHLEDGFGAHELRLP

SEQ ID NO: 16102 - protein, 203 aa, Akebia quinata
VGIIKKARELSVLCDAQVSLIMFSATEKLSEYISPTVTTKKVFDRYQQTAGINLWSTHYERMQENLNKQKEINRRLRKEIRQRMGEDLNELSIDVLRGLEQNMEHSLNIVRERKLKVIRTQSGTYRKKVTNLEQVHKKLMRELEGRNEDPHYVFANHNGDGDYQSALELANNGGSHIFALRLQPSQPILREGGGYGSHDLRLA

SEQ ID NO: 16103 - protein, 234 aa, Lycopodium annotinum
MGRGKIEIKRIENSTSRQVTFSKRRGGLLKKAHELAVLCDAQVALIIFSNTGKLFEYASTSMKEILDRYRKYPDGIQTGRVMEYDNDVMVQHWSREVMRMKQQIERSYQTQRHMMGEDLGLLPLKELQHLEQQLDTGLNRVRARKDQVLREQIDSLRIKELQWHEENEILRRKIAGAHGMTEVAVRSFSSQNIVNPLETREPPSIGQVSVPFSLHVNQKNLRENQNLQTSLQLG

SEQ ID NO: 16104 - protein, 127 aa, Lycopodium annotinum
MGRGKVEIKRIENATCRQATFSKRRSGLLKKAHELSVLCDAQLVAVIFSSTGKLFHYASSSMKEMLARYEQYSLDVQIGPIFHRDLEYQSHQAKKIKEELYQCTQRIRYKLVLMAFYRSYQFRRPAS

SEQ ID NO: 16105 - protein, 281 aa, Physcomitrella patens subsp. patens
MGRGKIEIKKIENTTSRQVTFSKRRGGLLKKAHELAVLCDAEVALVIFSSTGKHFEFASSGSMRDIIERYRKSSDGAVKRGTNTDLLGREVIKLKQQVERLESSQRHMLGEDLSALKVSDLLELEQQLDQGASRVRARKNQLILEEIEDLRRKEHELMIANEALRKKIADAEGAAEAAARANFPDARLESPKPFASDFSRDMSVSSQLAASVYPHPNLLQAQRSQTSLQLGWLSEQQIPSTEEGCAGESSLKWDHPHFHIQNRLHANISPSVRTYKLHVDR

SEQ ID NO: 16106 - protein, 320 aa, Physcomitrella patens subsp. patens
MGRVKLEIKKIENPTNRQVTFSKRRNGLIKKAYELSVLCDIDLALIMFSPSGKLTQYCNCSIEEVIARFANLPMHERNKSFEDMLARFSNNHMHHDRSKYNRKVENLEQLQRALKKLAEEHGLAASQDHLSGSKSTYEIELLQQELKKAQQEKELVQQRARLYLADEQLLQGVTSVPQLANMESELEQALERVRARKNYVSSAYQNVIQRQQHEFLGNSLQMMALRQQQSQQAQQQQAGMTPSQVPYMHWTMQQERPEPTPQDFMDSKRIQLLHSGMHRSTESQEVTVNQIQVWDISHLDHNHRTWKHCGKLGWGVSVED

SEQ ID NO: 16107 - protein, 306 aa, Physcomitrella patens subsp. patens
MGRVKLEIKKIENPTNRQVTYSKRRNGLIKKAYELSVLCDIDLALIMFSPSGKLTQYCNCSIEEVIARFANLPMHERNKSFEDMLTRFANNQMHHDRSKYTRKIENLEYLHKALKKLAGEKDLVSNQQLLSGSKSSSYEAEVLQQELKKAQQEKELVQQRARLYLADEQLLQGVTSVQQLANMETELEQALERVRARKNYVSSAYQTANALQRQQHEFLGNSLQMMALRQQQQQQQQQAGMGGTPSFLHWTMQPSVQSPPRISWSSKQTPRRHSCLHRSVFGNQGTTGEQIQQRRLISPLDRNREH

SEQ ID NO: 16108 - protein, 184 aa, Helleborus orientalis
QGLLKKAKEITVLCGAKLSLVIFSSAGKMSDYNSSNSSLLEILERYQNASGKRLWDAKHEYLHKEVDRIKKENDSMQIELRHLKGEDITSLGPRELIPIEEALEHGLSRVRDKMGEMWRRLKKNGRKLEEENAQLNCIRRHKQEQRGVDGNENGYHQQAIMEYPSQRPFSFRVQPMQPNLHETN

SEQ ID NO: 16109 - protein, 193 aa, Helleborus orientalis
AGIMKKAQELHVLCDAEVALIMLSSTGKVIHYISPNTTDKAIYDKYQQSLGHSIWEPQYQQMQETLRKLKDINSKLRREIRQRVGEDLDDLTFNQLRGLEQHLNESAEIVRQRKFHQIKTQIETTKKKITHHEQTHNNLVHDYHEKLEDAFALVTHESVSLELSNGDGAHVFAFRNPYEADKAGYDLSDLRSG

SEQ ID NO: 16110 - protein, 210 aa, Agapanthus praecox
MGRGKIEIKRIENSTNRQVTFSKRRNGIIKKAREISVLCESQVSVVIFSSCGKMSEYCSPNTSFPRILERYQHNCGKKLWDAKHENLNAQIDRVKKENDNMQIELRHLKGEDLNSLNPKELIPIEEALENGLNGVRAKQMEYLKMLKKNERLLEEENKRLTYILRHQQLAMEGNVRQLDLGYHQREREFAAQMPMAFRVQPIHPNLQQNK

SEQ ID NO: 16111 - protein, 247 aa, Petunia integrifolia subsp. inflata
MVFPNQEFESSSSQRKSGRGKIEIKRIENTTNRQVTFCKRRNGLLKKAYELSVLCDAEVALIVFSSRGRLYEYANNSVRATIDRYKKHHADSTSTGSVSEANTQYYQQEAAKLRRQIRDIQTYNRQIVGEALSSLSPRDLKNLEGKLEKAIGRVRSKKNELLFSEIELMQKREIEMQNANMYLRAKIAEVERATQQMNLMPGGGSEYQQQPMSSTSQPYDARNFLPVNLLEPNPHYSRQDQTALQLV

SEQ ID NO: 16112 - protein, 201 aa, Aquilegia alpina
AGIVKKAKELTVLCDAEVSLLMVSSTGKMHEYISPSCTHKNLYDRYQQASGSNLWQPHYERMQDTLQKLKEVNNKLRKEIRQRNGEDLDELSFQQLRGLEQNMEKSVECVRNRKFHQISTSTDTYKKKIKNHEETHNSLLREFEERDADFSFPALDFEGDYQSTIGFATGNPQIFAFRLQPKLQSDLQDEEAYGSYGLSLA

SEQ ID NO: 16113 - protein, 202 aa, Clematis integrifolia
NGIIKKAQELSVLCDAEVSLIMFSSTGKCTSFISPTISPKEFYDRYQQAAGTDLWQSQYQEMHNNLRKLMEINSKLRREIRIRVGEDDLTELDFDELHRLEQHLENSSKIVRQRKFSQIATHTETARKKIRSQEQIHTNLMQDNYEQIEKQYALANHQSISSLELATDGAGGSHIFAFRLHPGQPHVHGDEGDYDFHQLRLA

SEQ ID NO: 16114 - protein, 193 aa, Berberis gilgiana
TGIMKKAKELTVLCDAEVSLIMFSSTRKLSEFISPSTSVKKIFDRYQQVTGKQLWQHHYEKMQETLNKLKDVNNNLRREIRQRKGDDDLDDLNIQELRDLEQNMEKSVKAVRDRKFHVIGTQTNTSKKKIKNLQETHKFLLCELDQIELASHFESSSFGLANRSSHEFAFRLQPSTPNLQDGRGYGSYDFHLA

SEQ ID NO: 16115 - protein, 193 aa, Berberis gilgiana
TGIMKKAKELTVLCDAEVSLIMFSSTRKLSEFISPSTSVKKIFDRYQQVTGKQLWQHHYEKMQETLNKLKDVNNNLRREIRQRKGDDDLDDLNIQELRDLEQNMEKSVKAVRDRKFHVICTQTDTSKKKIKNHQETHKFLLSELDQIEQASHFESSSFGLANRSSHEFAFGLQPSTPNLQDGRGYGSYDFHLD

SEQ ID NO: 16116 - protein, 197 aa, Gerbera hybrid cv. 'Terra Regina'
MGRGKIEIKRIENTSNRQVTYSKRKNGIIKKAKEITVLCDANVSLVIYGSSGKMYEYCSPKTNLIDMLDRYQRLSGNKLWDAKHENLQNEIDRIKKENESMQIELRHLKGEDITSLNYEELIAYEDALENGLTNIREKKDEIPKIMRKHEQVLEEENKHLMYLVQQSEMAAMGDYQAAHEPFSFRVQPMQPNLHERM

SEQ ID NO: 16117 - protein, 228 aa, Gerbera hybrid cv. 'Terra Regina'
MARGKIQIKKIENSTNRQVTYSKRRNGLFKKASELTVLCDAKVSIIMVSCTDKLHEYISPSITTKQFFDQYQKASGIDLWNSHYEKMQEELRQLKEVNRNLRRQIRQRLGDCLEDLGFEEFLDLEKESQEAVYIIRERKLKVIGNKLETSKKKVRSAQDVYKKLMHEFDIRGEDPQYGMIEDGVEYEALYGYPPHISAPRILTLRLQPNHPDNLHAAASDLTTYALLG

SEQ ID NO: 16118 - protein, 226 aa, Gerbera hybrid cv. 'Terra Regina'
MGRGKIEIKKIENNTNRQVTYSKRRNGIFKKAHELTVLCDAKVSLIMFSNTGKFHEYISPSTTTKKMYDQYQSTVGFDLWSSHYERMKETMKKLKDTNNKLRREIRQRVLGEDFDGLDMNDLTSLEQHMQDSLTLVRERKYHVIKTQTDTCRKRVRNLEQRNGNLRLDYETIHQLDKKYDTGENEGDYESVVAYSNGVSNLYAFCVHPNNIPHGAGYELHDHQHTN

SEQ ID NO: 16119 - protein, 264 aa, Gerbera hybrid cv. 'Terra Regina'
MENSDVLELDFSCVDRSMSFPDDTGDMSPQRKMGKGKIEIKRIENTTNRQVTFCKRRNGLLKKAYELSVLCDAEVALIVFSSRGRLYEYANNSVKGTIDKYKKACLDPPTSGTVAEANTQYYQQEAAKLRQQIANLQNQNRQFYRNIMGESLGDMPVKDLKNLEGKLEKAISRIRAKKNELLFAEIEYMQKRELELHNSNQFLRAKIVENERAQQHHMSLMPGSSDYELVTPHQPFDGRNYLQTNDLQPNNDYSCQDQTPLQLV

SEQ ID NO: 16120 - protein, 246 aa, Gerbera hybrid cv. 'Terra Regina'
MSFPNDSGEMSPQRKLGRGKIEIKRIENTTNRQVTFCKRRNGLLKKAYELSVLCDAEVALIVFSSRGRLYEYANNSVKGTIDRYKKACLDPPSSGSVAEANAQFYQQEAAKLRQQIANLQNQNRQFYRNIMGESLGNMPAKDLKNLESKLEKGIGKIRSKKNEILFAEIEYMQKRENELHNSNQFLRSKIAENERAQQHMSLMPGSSDYELVAPHQPFDGRNYLQVNDLQPNNNYSCQDQTPLQLV

SEQ ID NO: 16121 - protein, 202 aa, Hydrangea macrophylla
NGLFKKANELTVLCDAKVSIIMFSTTNKLHEYISPSISTKELFDLYQTTMGIDLWSSHYERMQENLKKLKDVNRNLRMEIRQRMGESLNDLSWKDLRGLEQEMDSSVKIIRERKYRVLGNQIDTHRKKVRNAEEIHRYIIHEFEVKEEDPHYGLVDNGGNYDSVLGFPNDGPPRIVAFRLQTNQHSLCTGGGSDLTTYALLD

SEQ ID NO: 16122 - protein, 244 aa, Vitis vinifera
MGRGRVELKRIENKINRQVTFAKRRNGLLKKAYELSVLCDAEVALIIFSTRGKLYEFCSSSSMLKTLERYQKCSYGAVEVSRPSKELEQSSYREYLKLKSKFEALQRTQRNLLGEDLGPLNTKELEQLERQLETSLKQVRSTKTQFMLDQLSDLQNKEQVLVESNKALTRKLDEISVKNHLQLSWESGEQSMPYGHQQAQSQGFFQPLECNPTLQIGYNPAGSSQLSAPSNAQNVNGFIPGWML

SEQ ID NO: 16123 - protein, 244 aa, Vitis vinifera
MGRGRVELKRIENKINRQVTFSKRRNGLLKKAYELSVLCDAEVALIIFSSRGKLYEFGSAGTTKTLERYQRVCYTPQDNNMECETQSWYQEVSKLKAKYESLQRTQRHLLGEDLGPLSVKELQNLEKQLEGALAQARQRKTQMMIEQMEDLRRKERQLGDLNKQLKLKLEAEGQSLKAIQGSWNPSTATAGNSSFPVHPSQSNPMDCEPEPILQIGYHHYVPAEGPSVSKSMAGESNFIQGWVL

SEQ ID NO: 16124 - protein, 225 aa, Vitis vinifera
MGRGKIEIKRIENTTNRQVTFCKRRNGLLKKAYELSVLCDAEVALIVFSSRGRLYEYANNSVRTTIERYKKVCSDSSNTGSVSEANAQFYQQEASKLRRQIRDIQNLNRHILGEALSSLNFKELKNLETRLEKGISRIRSKKNELLFAEIEYMQKREIELQNSNLFLRAQIAENERAQQQMNLMPGSQYESVPQQPYDSQNLLPVNLLDPNHHYSRHDQTALQLV

SEQ ID NO: 16125 - protein, 242 aa, Vitis vinifera
MGRGRVELKRIENKINRQVTFAKRRNGLLKKAYELSVLCDAEVALIIFSNRGKLYEFCSSSSMLKTLERYQKCNYGAPETNVSTREALELSSQQEYLKLKARYEALQLSQRNLLGEDLGPLSTKELESLERQLDVSLKQIRSTRTQYMLDQLTDLQRKEHMLNEANKTLKQRLLEGTQVNQLQWNPNAQDVGYGRQQAQPQGDGFFHPLECEPTLQIGYQPDPITVAAAGPSVNNYMPGWLP

SEQ ID NO: 16126 - protein, 372 aa, Physcomitrella patens
MGRVKLEIKKIENSANRQVTYSKRRNGLTKKAYELSVLCDIDLALIMFSPSGKLTQYSNCSIEDIIDRFANLPTQERNKRKIENLEYLQKALRKLTGEKEWVPNQIISGSKSEEVELLQEELKKTQHEKELIQQRIRLYLADEQLLQSVTSVQQLANMETELEQALERVRTRKAYVTSAYQAVSVMQRQMLALQAQQQKQQRDTLGQQPLPLQWNNPECGHSMLQEFMDQHANPQAIVPVQHMNREMGSNSEASPSSFFSQSGSQSNLHNLAGQLNLVGANRGLNIHDMALERSGSGQYDEQKKSKGGANAGFASSSSSGAAAEGSAETFTGQSEPNASNWQLSHQAHHHMHAYSSAQYPTGFSNQNEEAWK

SEQ ID NO: 16127 - protein, 380 aa, Physcomitrella patens
MGRVKLEIKKIENPTNRQVTYSKRRNGLVKKAYELSVLCDIDLALIMFSPSGKLTQYSNCSIEDIIGRFANLPMHERNKRKLENLEYLHKALKKLAGDKELVSNQLISGSKSYEVGLLQEELKKSQQEKELVQQRARLYLADQQLLQSVTSVQQLANMETELEQAIERVRARKAYVSSAYEAASVMQRQVMALQVRAQQQQQQQGLSGSTHPPFLQWNNPERGEAILQDFMEQQTNSQSIVPVQMNREIGSSNEAGPSTFFPQTGSQSNLHSLAGQMSLVGVNRGLSIHDMALERSRGQYEDRKKSKGESNTGFGASSSSSGAAADQGTGETFTGQSEPAHGSAPSASNWQLSHQAHHAQAYSAAHYPTGYFNQNTDTWK

SEQ ID NO: 16128 - protein, 372 aa, Physcomitrella patens
  unsure (1)..(372): unsure at all Xaa locations
MGRVKLEIKKIENSXXRQVTYSKRRNGLTKKAYELSVLCDIDLALIMFSPSGKLTQYSNCSIEDIIDRFANLPTQERNKRKIENLEYLQKALRKLTGEKEWVPNQIISGSKSEEVELLQEELKKTQHEKELIQQRIRLYLADEQLLQSVTSVQQLANMETELEQALERVRTRKAYVTSAYQAVSVMQRQMLALQAQQQKQQRDTLGQQPLPLQWNNPECGHSMLQEFMDQHANPQAIVPVQHMNREMGSNSEASPSSFFSQSGSQSNLHNLAGQLNLVGANRGLNIHDMALERSGSGQYDEQKKSKGGANAGFASSSSSGAAAEGSAETFTGQSEPNASNWQLSHQAHHHMHAYSSAQYPTGFSNQNEEAWK

SEQ ID NO: 16129 - protein, 380 aa, Physcomitrella patens
  unsure (1)..(380): unsure at all Xaa locations
MGRVKLEIKKIENPTNRQVTYSKRRNGLVKKAYELSVLCDIDLALIMFSPSGKLTQYSNCSIEDIIGRFANLPMHERNKRXLENLEYLHKALKKLAGDKELVSNQLISGSKSYEVGLLQEELKKSQQEKELVQQRARLYLADQQLLQSVTSVQQLANMETELEQAIERVRARKAYVSSAYEAASVMQRQVMALQVRAQQQQQQQGLSGSTHPPFLQXNNPERGEAILQDFMEQQTNSQSIVPVQMNREIGSSNEAGPSTXFPXTGSQSNLHSLAGXMSLVGVNRGLSIHDMALERSRGQYEDRKKSKGESNTGFGASSSSSGAAADQGTGETFTGQSEPAHGSAPSAPNWQLSHQAHHAQAYSAAHYPTGYXNQNTDTWK

SEQ ID NO: 16130 - protein, 252 aa, Gnetum parvifolium
MGRGRVQLRRIENKINRQVTFSKRRNGLLKKAYELSVLCDAEVALIIFSTRGKLYEFASSSMSKTLERYEKCSYSMQENASTDRDAQNWHHEVTKLKAKLESLHKAQRNLMGEDLGPLNIKELQSLEQQLEVALGHVRNRKTQLLIQTIDELRDKERTLQEVNKSLQKKLSETEGRNVIPALPHATTGSGEWESSTLTTTYALQTQQPSGIHHVDCEPTLHIGPYHQAVHHEAIPGPPATHSEPHNQYIWWV

SEQ ID NO: 16131 - protein, 266 aa, Gnetum parvifolium
MGRGKIEMKKIECTSSRQVTFSKRRSGLLKKAHELSVLCDAEVAVIIFSNTGKLYEYASSSMRKTIERYQKFEENSTNSTKSFKTKSEQGSSADVGSLLLEMKAMENKHRNSMGEELSSLSVPELKRLEQELEVGINRVRARQNELFEAEICGLKRKEHDLIEENMMLHKLLSETGSSSEMAASAPAHSFGDESAMMACQYRQQVCMGESSSSRNQTRHHIYGVSDVARHLALQISCPNQSRNDYNLVLDGWEYMPEYAPPLVSMD

SEQ ID NO: 16132 - protein, 218 aa, Gnetum parvifolium
MTKTKLQLSRIESSTRRKVTFSKRRNGLLKKAFELSVLCDADIALLVFSESGKLHQFSNPEMNMIITRYKSFIQRHGDSKNNEQHQTPGWKLQKLHGRIERLHKMKKNIGGEDLDSLSFKALDRLQRQLEVAKKRVFNRKIKILSQTVKLLTEEVNVKGRENKTLKSNVETLGNETNSSDGASILHQSMEEGPTAETDLQLRLPEISNVGDCNVFFAD

SEQ ID NO: 16133 - protein, 215 aa, Picea abies
MGRGKIEIKMIENPTNRQVTFSKRRGGLTKKAQELSVLCNAEVALIVFSNTGKLHQWSSSSMKKVLERYQKSEQGLGLMDYQHQQLLFEMRRITKENESLQARLRHMRGEDINSLKLPELFNLEEQLELAGTQVRRRKDHVLDNEKTKRQNKERRLQQENMILQEMVDQHHGHMEEDNGEINFVLCQPLKRLSTAFPAPLLRLQPNQPNLQDIGY

SEQ ID NO: 16134 - protein, 261 aa, Picea abies
MGRGRVQLRRIENKINRQVTFSKRRNGLLKKAYELSVLCDAEVALIIFSTRGKLYEFASSSMNKTLERYEKCSYAMQDTTGVSDREAQNWHQEVTKLKGKVELLQRSQRHLLGEDLGPLNVKELQQLERQLEVALAHLRSRKTQVMLDQIEELRQRERLLHEVNKSLQKKLSETEGRDVITGIEQTSNTNTGTNGPWDSSITNTAYALSHPQQNSNASLHHVDCEPTLQIGYQPVPPESIGPPHQPQHNQTQNQYMQGWWV

SEQ ID NO: 16135 - protein, 219 aa, Picea abies
MGRGKIEIKMIENPTNRQVTFSKRRGGLTKKAQELSVLCNAEVALIVFSNTGKLHQWSSSSMKKVLERYQKSEQGLGLMDYQHQQLLFEMRRITKENESLQARLRILYRHMRGEDINSLKLPELFNLEKQPELAGTQVRRRKDHVLDNEKIKGKNKERRLQQENMILQEMVDQHHGHMEEDNGEINFVLCQPLKRLSAAFPAPLLRLQPNQPNLQDIGY

SEQ ID NO: 16136 - protein, 222 aa, Picea abies
MGRGKIEIKRIENTTNRQVTFCKRRNGLLKKAYELSVLCDAEVALIVFSSRGRLYEFANHSVKRTIERYKKTCVDNNHGGVISESNSQYWQQEAGKLRQQIEILQNANRHLMGDGLTALNIKELKQLEVRLEKGIGRVRSKKNEMLLEEIDIMQRREHILIQENEILRSKIAECQNSHNTNMLSAPEYDALPAFDSRNFLHANLIDAAHHYAHQEQTTLQLG

SEQ ID NO: 16137 - protein, 220 aa, Picea abies
MGRGKIEIKMIENESNRKVTFSKRRGGLFKKARELSVLCEAEVALIVFSSTGNHQEFASSSMKNILERYKASTGIGLLDYQDQMLSDMAQIKRENEILHAELRYMMGEDLDSSDIKDMMSLEDHLDKVSGLVRKRKDKLMDNRLELQKKKTGLEWQIHNQLNENIACYHRARMEEQDKHDLYSNYGFYQLERPSTPLHALPPDPELRLQPNQPNLKDSGY

SEQ ID NO: 16138 - protein, 220 aa, Picea abies
MGRGKIEIKMIENESNRKVTFSKRRGGLFKKARELSVLCEAEVALIVFSSTGNHQEFASSSMKNILERYKASTGIGLLDYQDQMLSDMARIKRENEILHADLRYMMGEDLDSSDIKDMMSLEDHLDKVSGLVRKRKDKLMDNRLELQKKKTGLEWQIHNQLNENIACYHRARMEEQDKHDLYSNYGFYQLERPSTPLHALPPDPELRLQPNQPNLKDSGY

SEQ ID NO: 16139 - protein, 238 aa, Picea abies
MGRGKIEIKKIENLTNRQVTFSKRKAGLQKKAKELSILCSAEVALIIFSSSGKHYEYSSPCSSVEQIVEKYMNVSGSKLGEDQINTLIDGCVVKGDIEIVGLRRVIRHLTGGDLESLSVNELQKLEDQLEIVTSRVRKKRFQRMQEQLEAMTQELEESKRRLRYNEGFTQKKNDLYMFSDCRRSLGETVDDYPFCQLEDKNPIYVTPSAPVFCVQPGQPHLHETDYRYLDLKLGYNRN

SEQ ID NO: 16140 - protein, 236 aa, Picea abies
MGRGKIEIKKIENLTNRQVTFSKRKAGLQKKAKELSILCSAEVALIIFSSSGKHYEYSSPCSSVEQIVEKYMNVSGSKLGEDQINTLIDGCVVKGDIEIVGLRRVIRHLTGGDLESLSVNELQKLEDQLEIVTSRVRKKRFQRMQEQLEAMTQELEESKRRLRYNEGFTQKKNDLYMFSDCRGSLGETVDDYPFCQDKNPIYVTPSAPVFCVQPGQPHLHETDYRYLDLKLGYNRN

SEQ ID NO: 16141 - protein, 220 aa, Pinus radiata
MGRGKIEIKMIENATNRQVTFSKRRGGLKKKAQELSVLCNAEVALIIFSSTGKLHEWSSSSSFFMLQKSMKKILERYQKSEQGLGLMDYQHQQLLCEMRRITKENESLQERLRHMNGEEVNSLKLPELFKLEEQLDKAATQVRRRKDHVLENERIKQRNKMRRMEEENIILHGMNQGHMEEDNGQFNFVLYQPVKKMRTAFPAPLLRLQPNQPNLQDIGY

SEQ ID NO: 16142 - protein, 261 aa, Pinus radiata
MGRGRVQLRRIENKINRQVTFSKRRNGLLKKAYELSVLCDAEVALIIFSTRGKLYEFASSSMNKTLERYEKCSYAMQDTTGVSDREAQNWHQEVTKLKGKVELLQRSQRHLLGEDLGPLNVKELQQLERQLEVALTHLRSRKTQVMLDQIEELRQRERLLHEVNKSLQKKLSETEGRDVITGIEQTSNTNTGTNGPWDSSITNTAYALSHPQQDSNSSLHHVDCEPTLQIGYQPVAPESIVPPHQPPHNQTPNQYMQGWWV

SEQ ID NO: 16143 - protein, 222 aa, Pinus radiata
MGRGKIEIKRIENTTNRQVTFCKRRNGLLKKAYELSVLCDAEVALIVFSSRGRLYEFANHSVKRTIERYKKTCVDNNHGGAISESNSQYWQQEAGKLRQQIDILQNANRHLMGDGLTALNIKELKQLEVRLEKGISRVRSKKNEMLLEEIDIMQRREHILIQENEILRSKIAECQNSHNTNMLSAPEYDALPAFDSRNFLHANLIDAAHHYAHQEQTTLQLG

SEQ ID NO: 16144 - protein, 242 aa, Pinus radiata
MGRGRVELKRIENKINRQVTFSKRRNGLLKKAYELSVLCDAEVALIIFSSRGKLYEFGSAGMLKTLERYQKCSYVLQDATVSDREAQNWHQEVGKLKARVELLQRSQRHLLGEDLGPLSIKELQQLERQLEVALTHVRSRKTQVMLEMMDELRRKERILQEVNKSLRKKLQEAEGQAFNAMQPPPHAWDSHAVANNAYAMQHPSNAVDCEPTLQIGYQYAPPESSMPRHEQAQNNYMQGWMV

SEQ ID NO: 16145 - protein, 245 aa, Pinus radiata
MGRGKVELKRIENKINRQVTFAKRRNGLLKKAYELSVLCDAEVALIIFSNRGKLYEFCSSSSMMKTIEKYQKCSYGSLETNCSINEMQNSYQDYLELKARVEVLQRSQRNLLGEELGPLNSKELEQLEHQLENSLKQIRSAKTQFMFDQLAHLQHKEQMLVEANRELRKKLEESNTRIPLRLGWEAEDHNNISYRRLPTQSQGLIFQPLGGYPNMQIGYNPAGSNELNVSPADQHPNGFIPGWML

SEQ ID NO: 16146 - protein, 223 aa, Pinus radiata
MVRGKTQMKRIENATSRQVTLSKRRNGLLKKAYELSVLCDAEVGLIVFSPSGKLYEFASTSMQKLLEKYEICSQECGTSESNKKQDPQCLKQEIENMEKRVRILQSTQRKMLGEGLALCSIKELNQLEGQVERGLNHVRATKTKVLLDEIEKLKQKEHVFREEKALLHKKSVNLRGANGCTIPSIGLTSIERVEVQTQLVMRPPHATEMDDNFMDVDNVPLSG

SEQ ID NO: 16147 - protein, 214 aa, Pinus radiata
MARGKTQMRKIESATSRQVTFSKRRNGLLKKAYEMSVLCDAQLGLIVFSPRGKVYEFSSTCMQKMLARYENFSEGSKATSTAKEQDVQGLKRQIANMEERIEILESMHRKMLGDELASCALKDLNELESQVERGLRNVRARKTEILVTEIEQLQRKEWILSEENAFLGKKFVHPHSVSKTPGSESGSIQNSEVETQLVMRPPCTNAHFLINSSH

SEQ ID NO: 16148 - protein, 199 aa, Pinus radiata
  unsure (1)..(199): unsure at all Xaa locations
MARGKTQMRKIESATSRQVTFSKRRNGLMKKAYELSVLCDAQLGLIVFSPRGKVYEFSSTCMQKMLARYEKCSEGSDTSTSKEQDVQCLKRESANMEERIEILESMQRKMLGEELASCALKDLNQLESQVERXLRNVRARKERILSEENAFLSKKFVDPQSFSTTPGSESGSIQNSEVETQLVMRPPCTNAHFLINSSH

SEQ ID NO: 16149 - protein, 214 aa, Pinus radiata
MGRGRIRLRKIESATSRQVTFSKRKNGLLKKAYELSVLCDVELGLIVLSPRGKVHEFSSTCMQKMLERYEKCSEGSKTTSIAKEEDPKALKREIANMEERIEILERTQRKMLGEELASCALKDLNQLESQVERGLRNIRARKSEILVTQIEQLQRKERMFSEENNFLRKRIVDPHSVLTTPASGSGSLQRSEVETQLVMRPPSSNADFLFNSSH

SEQ ID NO: 16150 - protein, 163 aa, Pinus radiata
MDLMESFEAKGKGEKRRTVRGKTQLKRIENGTSRQVTFCKRRNGLLKKAYELSVLCDAEVALIVFSPRGKRYEFANPSMQKMLARYENFSEGSKATSTAKEQDVQEWILSEENAFLGKKFVDPHSVSKTPGSESGSIQNSEVETQLVMRPPCTNAHFLINSSH

SEQ ID NO: 16151 - protein, 237 aa, Gnetum gnemon
MGRGKIEIKRIENTTNRQVTFSKRRGGLLKKAHELSVLCDAELGLIIFSSSGKLFEYSSASSSMKKIIERYQKVSGARITEYDNQHLYCEMTRMKNENEKLQTNIRRMMGEDLTSLTMTELHHLGQQLESASSRVRSRKNQLMLQQLENLRRKERILEDQNSHLCRLLAEQQAAVEGVQEPLLEFGVFCPPPDNKTAAAANAGPLHLGHHLPAFRLQPTQPNLQESSIVPNRPVLQL

SEQ ID NO: 16152 - protein, 225 aa, Gnetum gnemon
MGRGKLEIKRIENLTNRQTTFAKRKNGLMKKAKELSILCDAQVALIVFSPTGKQFIEAHGNNAECTIESVRDVIERYKQQSKEKLLDSEDENLANELEKQKKQSADLQTKLKHLTGQDINLLSPDALGDLEHILQEALTRVRQKKIQRWLSKKIEMERRVAKLNEYKNALNGMYSQAQGYQHYNHAHHGIMAASVSAAYHRVQPYPGNLDDVCYQPQPNLQLRFL

SEQ ID NO: 16153 - protein, 247 aa, Gnetum gnemon
MGRGKIEIKRIENTTNRQVTFCKRRNGLLKKAYELSVLCDAEVALIVFSSRGRLYEFANNSVKRTIERYRKTCADNNQGGAIAESNAQYWQQEAVKLKQQIDVLNNQIRHYMGECLQSMTIKELKQLEGKLEKGLGRVRSKRNEKLLEDIDTLQRREDNLIRENEYIRNKIAECQSHQHANMLTAAAVEYDAIPAAYDSRNFMHANLIEAAAAHHHYAQQEQTALHLGSEHKYSVHYPDPQAHKFQT

SEQ ID NO: 16154 - protein, 207 aa, Gnetum gnemon
MGRGKIEIKRIENYTSRQATFSKRRGGLLKKARELAVLCDAEIALIIFSSSGRLFQFASSSMNATLARYCRRCEETKNPAANHGLENEDNKTGNADPDESKSLQKVPDLSLSRTPLVNEGLESLKLQKEQLQRSVKRLMGEQIEDMRLDELAQLERDVEAAMRRLRASKESKMIGRIEEARVCKERDLAEQNRELRLQLDLFRNTTV

SEQ ID NO: 16155 - protein, 254 aa, Gnetum gnemon
MGRGRVELKRIENKINRQVTFSKRRNGLLKKAYELSVLCDAEVALIIFSSRGKLYEFGSAGTLKTLERYQKCSYALQESNNSDRDAQTWHHEVSKLKTKVEILQRSQRHLLGEDLGPLSIRELQTLERQIEVALTQVRARKTQVMMDMMDDLKKKERLLQEVNKSLRKKLDETEGQVYSNAQLQAAPPPEWDSNAIANPVYALPPTPQNAVDCEPTCKLGIMLLLSQAFPGMIILRTTTYRGGWSNLIPDANNQ

SEQ ID NO: 16156 - protein, 193 aa, Gnetum gnemon
KINRQVSFSKRRNGLMKKAYELSVLCDAQLALIVFSNHGKLYQYSSTSINSILERYKKCSALHFENDTQESQQVKLSKHHAKVMILEKSIRNLRGEDIHDLNVKELQSLEHTLEQTLKQVRSYKVDAIRGIIHELERKEQVLEDANMALRMKIAYANARRNSRTQLHFDGSPWTLTQQITSAPAAVNSACTHF

SEQ ID NO: 16157 - protein, 211 aa, Gnetum gnemon
MGRGKIEIKKIENPSSRQVTFSKRRGGLIKKARELAVLCDAEIALIIFSSTGKLTDWCSHNMKDTLKKFERIAGSSSAEYERHQLRLDIETRKRQNEELQNLINYKLGVGIDHLSCEELECLEEDLENIVRNVKRTKDKQEERLTDRLRRRVGFQQQHLRRFMGEIRYHDTYVEKELWEVCCQLAQEKITAREEKHHGDHHDCALLHFRHE

SEQ ID NO: 16158 - protein, 216 aa, Gnetum gnemon
MGRGKIEIKKIENSVHRQVTFCKRRGGLMKKAYELSVLCDAEVALIIFSSRGKLYELATSNKSMMSTLERYQRSSATGKQLNLYPGSSNEKLDLEVKFLRNQVEQLKATNRYLMGEELATMSLDELNELEAQLQKGINQVRAKKTDLMLEEIKALQNKEHILRMSNIMLQGKLDECTNCKDSRFHGFITTSSTSHAPAYTCGFNLNNQSLSSTIEM

SEQ ID NO: 16159 - protein, 243 aa, Gnetum gnemon
MGRGKLAMKYIEQKNSRQVTFSKRKNGLKKKVTELSILCGAEIALVIFSNTGKLYSHVGKHGSLNQIIHRYLQNPHAQLRYDQIFQTTLTYAKEDKKFDLCRFFSDLRELMQELESVPNLELQSLEDELQLATYKVRKKKEEAAAKEYDSLQMDLELMLKQNSELQKELRRKELLEDRHRALQWQFQQLMGVDDPGSISQTMESSCVYSSVDDRTSFLALQVSSPAVSSFRSVKPQKTLLNLI

SEQ ID NO: 16160 - protein, 261 aa, Lolium temulentum
MGRGKVQLKRIENKINRQVTFSKRRNGLLKKAHEISVLCDAEVAVVVFSPKGKLYEYATDSSMDKILERYERYSYAEKALISAESESEGNWCHEYRKLKAKIETIQKCHKHLMGEDLECLNLKELQQLEQQLESSLKHIRSRKSHLMMESISELQKKERSLQEENKALQKELVERQKAARQQQQEQWDRQTQTQQAQNQPQAQTSSSSSSFMMRDQQAHAQQNICYPLVTMGGEAVAAAPGQQGQLRIGGLPPWMLSHLNA

SEQ ID NO: 16161 - protein, 245 aa, Lolium temulentum
MGRGKVQLKRIENKINRQVTFSKRRSGLLKKAHEISVLCDAEVGLIIFSTKGKLYEFATDSCMDKILERYERYSYAEKVLISTESEIQGNWCHEYRKLKAKVETIQRCQKHLMGEDLESLNLKELQQLEQQLESSLKHIRSRKSQLMHESISELQKKERSLQEENKILQKELIEKQKAHTQQAQLEQTQPQTSSSSSSFMMGEATPATNRSNPPAAASDRAEDATGQPPARTVLPPWMVSHLNNG

SEQ ID NO: 16162 - protein, 242 aa, Betula pendula
MEFQNQSMSVSPQRKLGRGKIEIKRIENTTNRQVTFCKRRNGLLKKAYELSVLCDAEIALIVFSSRGRLYEYANNSSVKTTIERYKKACAESSNSGSVSEANTQFYQQEAAKLRGQIRSVQNSNRHLLGEALSELNFKELKNLEIKLEKGINKIRSKKNELLFAEIEYMQKREAELHNNNQILRAKIAENERNQQNLNVMPGGGNYELMQSQSYDSRTYFQVDALQPNHHYPRQDQIPLQLV

SEQ ID NO: 16163 - protein, 211 aa, Betula pendula
MGRGKIEIKRIENSSNRQVTYSKRMKGIIKKAKEISILCDAKVPLVIFDSSGKMKEYCSPSTTLINILDMYHKRSEKRLWDAKHENLSNEIARIKKENDNMQIELRHMKGEDITSLNHRELMILEEALQNGHSSIRERQMDLLMRARKKDKILEEENKCLNFTLHQQQMAMEAASCRDVEDDYEQRVRDYNSQMPFAFRVQPIQPNLQDRM

SEQ ID NO: 16164 - protein, 251 aa, Betula pendula
MGRGRVELKRIENKINRQVTFAKRRNGLLKKAHELSVLCDAEVALIIFSNRGKLCEFCSSPSMLKTLERYQKCNFGAPEPNVSAREALELSSQQEYLKLKARYEALQRTQRNLMGEDLGPLSSKELELLERQLNMSLKQIRSIRTQCMLDQLTDLQRKEHMLNEANRTLKQRLVDGYHIDTVLQLDQSANDVGYGRQPAQTQDDCFFHPLCEPTLQIGYQHDHPMTVVTAGSGSVVTAGPSVNNYMSGWMP

SEQ ID NO: 16165 - protein, 214 aa, Dianthus caryophyllus
MGRGKLEIRKIENKTNRQVTFSKRRNGIMKKAQELTVLCDAKVSLLMISSTHKLHHYLSPGVSLKKMYDEYQKIEGVDLWRKQWERMQEQHRKVLELNSLLRREISRRMGGDLEGLTLVELSALQQEMEEAIIQIRNKKYHTIKNQTGTTRKKIKNLEERHTDLVMELEAKFRGPQFAIGEDDPRNYEAAAAAAVYGNDVAAANLFALSRHPIT

SEQ ID NO: 16166 - protein, 57 aa, Ipomoea nil
MGRGRVQLKRIENKINRQVTFSKRRSGLLKKANEISVLCDADVGVIVFSTKGKLFEY

SEQ ID NO: 16167 - protein, 244 aa, Gossypium hirsutum
MVYPNESLEDSPQKKMGRGKIEIKRIENTTNRQVTFCKRRNGLLKKAYELSVLCDAEVALVAFSSRGRLYEYANNSVKATIERYKKASDSSNTGSVAEVNAQFYQQEADKLRNQIRNLQNANRHMLGESIGGLPMKELKSLESRLEKGISRIRSKKNELLFAEIEYMQKREIDLHNNNQLLRAKIAENERKQQSMNLMPGGSSANFEALHSQPYDSRNYFQVDALQPATNYYNPQLQQDQIALH

SEQ ID NO: 16168 - protein, 223 aa, Gossypium hirsutum
MGRGKIEIKRIENTTNRQVTFCKRRNGLLKKAYELSVLCDAEVALIVFSSRGRLYEYSNNNIRSTIDRYKKACSDTSNTNTVTEINAQYYQQESAKLRQQIQMLQNSNRHLMGDSLSSLTVKELKQVENRLERGITRIRSKKHEMLLAEIEFLQKREIELENESVCLRTKIAEIERLQQANMVTGPELNAIQALASRNFFSPNVIEHPSAYSHPSDKKILHLG

SEQ ID NO: 16169 - protein, 211 aa, Cucumis sativus
MGRGKIEIKRIENSSNRQVTYSKRRNGIIKKAKEITVLCDAQVSLVIFASSGKMHEYCSPSTPLVDILDKYHKQSGKRLWDAKHENLSNEMDRVKKENDNMQIELRHLRGEDITSLNYKELMALEEALENGLTGVREKQSEFMKMMRTNERMMEEENKRLNYELYQKEMVAMGDSVREMDIGYNQRMRDFNSQMPFAFRVQPIQPNLQERE

SEQ ID NO: 16170 - protein, 221 aa, Cucumis sativus
MGRGKIEIKRIENTTNRQVTFCKRRNGLLKKAYELSVLCDAEVVLIVFSSRGRLYEYANNSVKATIDRYKKASSDSSNTGSTSEDNTQFYQQEAAKLRVQIGNLQNSNRNMLGESLSSLTAKDLKGLETKLEKGISRIRSKKNELLFAEIEYMRKREIDLHNNNQMLRAKIAVSERNVSMMGGEFELMQSHPYDPRDFFQVNGLQHNHQYPRQDNMALQLV

SEQ ID NO: 16171 - protein, 237 aa, Cucumis sativus
MFQNQEEKMSDSPQRKMGRGKIEIKRIENTTNRQVTFCKRRNGLLKKAYELSVLCDAEVALIVFSSRGRLYEYANNSVKATIDRYKKASSDSSNTGSTSEANTQFYQQEAAKLRVQIGNLQNSNRNMLGESLSSLTAKDLKGLETKLEKGISRIRSKKNELLFAEIEYMRKREIDLHNNNQMLRAKIAESERNVNMMGGEFELMQSHPYDPRDFFQVNGLQHNHQYPRQDNMALQLV

SEQ ID NO: 16172 - protein, 262 aa, Cucumis sativus
MSKHYQSPLTRMIKEEGKGKLQIKGMFQNQEEKMSDSPQRKMGRGKIEIKRIENTTNRQVTFCKRRNGLLKKAYELSVLCDAEVALIVFSSRGRLYEYANNSVKATIDRYKKASSDSSNTGSTSEANTQFYQQEAAKLRVQIGNLQNSNRNMLGESLSSLTAKDLKGLETKLEKGISRIRSKKNELLFAEIEYMRKREIDLHNNNQMLRAKIAESERNVNMMGGEFELMQSHPYDPRDFFQVNGLQHNHQYPRQDNMALQLV

SEQ ID NO: 16173 - protein, 254 aa, Cucumis sativus
  unsure (1)..(254): unsure at all Xaa locations
MSCYEEEDEESGVVGLRRSSSSSRTGRGKIEIKRIENTTNRQVTFCKRRNGLLKKAYELSVLCDAEVALIVFSSRGRLYEYANNSVRATISRYKKAYSDPSTAMTVSEANTQFYQQESAKLRAQIGNLQNLNRHLLGESISSLSVKDLKSLEVKLEKGISRIRSRKNELLFSEIEYMQKREIELHTNNQLIRAKIAETERSXQNTNASNNNGIATRRGEEGSMGTNLEDNNHHQYDSTNYFDPHHNHPISLQLV

SEQ ID NO: 16174 - protein, 254 aa, Cucumis sativus
MSCYEEEDEESGVVGLRRSSSSSRTGRGKIEIKRIENTTNRQVTFCKRRNGLLKKAYELSVLCDAEVALIVFSSRGRLYEYANNSVRATISRYKKAYSDPSTAMTVSEANTQFYQQESAKLRAQIGNLQNLNRHLLGESISSLSVKDLKSLEVKLEKGISRIRSRKNELLFSEIEYMQKREIELHTNNQLIRAKIAETERSQQNTNASNNNGIATRRGEEGSMGTNLEDNNHHQYDSTNYFDPHHNHPISLQLV

SEQ ID NO: 16175 - protein, 236 aa, Cucumis sativus
MGRGKIEIKRIENTTNRQVTFCKRRNGLLKKAYELSVLCDAEVALIVFSTRGRLYEYANNSVRGTIERYKKAFADSSNSGLSVAEANVQFYQQEATKLKRQIREIQNSNRHILGEALSSLPLKELKSLEGRLERGISKVRAKKNETLFAEMEFMQKREMELQSHNNYLRAQIAEHERIQQQQQQQQQTNMMQRATYESVGGQYDDENRSTYGAVGALMDSDSHYAPQDHLTALQLV

SEQ ID NO: 16176 - protein, 246 aa, Cucumis sativus
MGRGRVELKRIENKINRQVTFAKRRNGLLKKAYELSVLCDAEVALIIFSNRGKLYEFCSTSNMLKTLERYQKCSYGAVEVTKPAKELESSYREYLKLKSRFESLQRTQRNLLGEDLGPLNSKELEQLERQLVSSLKQVRSTKTQYMLDQLSDLQNKEQMLIETNRALQIKLEEISSRNNIRLTWDGGDQSMSYGPQNAQTQGFFQPLECNPTLQIGYTSAVSDQITSTTTPTHAQQVNGFLPGWML

SEQ ID NO: 16177 - protein, 215 aa, Cucumis sativus
EIKRIENTTNRQVTFCKRRNGLLKKAYELSVLCDAEVALIVFSSRGRLYEYANNSVKATIDRYKKASSDSSNTGSTSEANTQFYQQEAAKLRVQIGNLQNPNRNMLGESLSSLTAKDLKGLETKLEKGISRIRSKKNELLFAEIEYMRKREIDLHNNNQMLRAKIAESERNVNMMGGEFELMQSHPYDPRDFFQVNGLQHNHQYPRQDNMALQLV

SEQ ID NO: 16178 - protein, 227 aa, Populus balsamifera subsp. trichocarpa
MGRGKIEIKKIENPTNRQVTYSKRRNGIFKKAQELTVLCDAKVSLIMFSNTNKLNEYISPSTSTKKIYDQYQNALGIDLWGTQYEKMQEHLRKLNDINHKLRQEIRQRRGEGLNDLSIDHLRGLEQHMTEALNGVRGRKYHVIKTQNETYRKKVKNLEERHGNLLMEYEAKLEDRQYGLVDNEAAVALANGASNLYAFRLHHGHNHHHHLPNLHLGDGFGAHELRLP

SEQ ID NO: 16179 - protein, 242 aa, Arabidopsis thaliana
MGRGRVQLKRIENKINRQVTFSKRRSGLLKKAHEISVLCDAEVALIVFSSKGKLFEYSTDSCMERILERYDRYLYSDKQLVGRDVSQSENWVLEHAKLKARVEVLEKNKRNFMGEDLDSLSLKELQSLEHQLDAAIKSIRSRKNQAMFESISALQKKDKALQDHNNSLLKKIKEREKKTGQQEGQLVQCSNSSSVLLPQYCVTSSRDGFVERVGGENGGASSLTEPNSLLPAWMLRPTTTNE

SEQ ID NO: 16180 - protein, 208 aa, Arabidopsis thaliana
MGRGKIEIKRIENANNRVVTFSKRRNGLVKKAKEITVLCDAKVALIIFASNGKMIDYCCPSMDLGAMLDQYQKLSGKKLWDAKHENLSNEIDRIKKENDSLQLELRHLKGEDIQSLNLKNLMAVEHAIEHGLDKVRDHQMEILISKRRNEKMMAEEQRQLTFQLQQQEMAIASNARGMMMRDHDGQFGYRVQPIQPNLQEKIMSLVID

SEQ ID NO: 16181 - protein, 208 aa, Arabidopsis thaliana
MGRGKIEIKRIENANNRVVTFSKRRNGLVKKAKEITVLCDAKVALIIFASNGKMIDYCCPSMDLGAMLDQYQKLSGKKLWDAKHENLSNEIDRIKKENDSLQLELRHLKGEDIQSLNLKNLMAVEHAIEHGLDKVRDHQMEVLISKRRNEKMMAEEQRQITFQLQQQEMAIASNARGMMMRDHDGQFGYRVQPIQPNLQEKIMSLVID

SEQ ID NO: 16182 - protein, 208 aa, Arabidopsis thaliana
MGRGKIEIKRIENANNRVVTFSKRRNGLVKKAKEITVLCDAKVALIIFASNGKMIDYCCPSMDLGAMLDQYQKLSGKKLWDAKHENLSNEIDRIKKENDSLQLELRHLKGEDIQSLNLKNLMAVEHAIEHGLDKVRDHQIEILISKRRNEKMMAEEQRQLTFQLQQQEMAIASNARGMMMRDHDGQFGYRVQPIQPNLQEKIMSLVID

SEQ ID NO: 16183 - protein, 208 aa, Arabidopsis thaliana
MGRGKIEIKRIENANNRVVTFSKRRNGLAKKAKEITVLCDAKVALIIFASNGKMIDYCCPSMDLGAMLDQYQKLSGKKLWDAKHENLSNEIDRIKKENDSLQLELRHLKGEDIQSLNLKNLMAVEHAIEHGLDKVRDHQMEILISKRRNEKMMAEEQRQLTFQLQQQEMAIASNARGMMMRDHDGQFGYRVQPIQPNLQEKITSLVID

SEQ ID NO: 16184 - protein, 208 aa, Arabidopsis thaliana
MGRGKIEIKRIENANNRVVTFSKRRNGLVKKAKEITVLCDAKVALIIFASNGKMIDYCCPSMDLGAMLDQYQKLPGKKLWDAKHENLSNEIDRIKKENDSLQLELRHLKGEDIQSLNLKNLMAVEHAIEHGLDKVRDHQMEILISKRRNEKMMAEEQRQLTFQLQQQEMAIASNARGMMMRDHDGQFGYRVQPIQPNLQEKIMSLVID

SEQ ID NO: 16185 - protein, 251 aa, Arabidopsis thaliana
MGRGRVQLRRIENKIRRQVTFSKRRTGLVKKAQEISVLCDAEVALIVFSPKGKLFEYSAGSSMERILDRYERSAYAGQDIPTPNLDSQGECSTECSKLLRMIDVLQRSLRHLRGEEVDGLSIRDLQGVEMQLDTALKKTRSRKNQLMVESIAQLQKKEKELKELKKQLTKKVKAGEREDFQTQNLSHDLASLATPPFESPHELRRTISPPPPPLSSGDTSQRDGVGEVAAGTLIRRTNATLPHWMPQLTGE

SEQ ID NO: 16186 - protein, 216 aa, Arabidopsis thaliana
MGRGKIEIKRIENSTNRQVTFCKRRNGLLKKAYELSVLCDAEVALIVFSTRGRLYEYANNNIRSTIERYKKACSDSTNTSTVQEINAAYYQQESAKLRQQIQTIQNSNRNLMGDSLSSLSVKELKQVENRLEKAISRIRSKKEIELDNENIYLRTKVAEVERYQQHHHQMVSGSEINAIEALASRNYFAHSIMTAGSGSGNGGSYSDPDKKILHLG

SEQ ID NO: 16187 - protein, 255 aa, Arabidopsis thaliana
MGRGRVELKRIENKINRQVTFSKRRTGLLKKAQEISVLCDAEVSLIVFSHKGKLFEYSSESCMEKVLERYERYSYAERQLIAPDSHVNAQTNWSMEYSRLKAKIELLERNQRHYLGEELEPMSLKDLQNLEQQLETALKHIRSRKNQLMNESLNHLQRKEKEIQEENSMLTKQIKERENILKTKQTQCEQLNRSVDDVPQPQPFQHPHLYMIAHQTSPFLNMGGLYQGEDQTAMRRNNLDLTLEPIYNYLGCYAA

SEQ ID NO: 16188 - protein, 239 aa, Arabidopsis thaliana
MGRGKIAIKRINNSTSRQVTFSKRRNGLLKKAKELAILCDAEVGVIIFSSTGRLYDFSSSSMKSVIERYSDAKGETSSENDPASEIQEMYIVTLEKYAYSEELVLDRQMMGEELSGLSVEALQNLENQLELSLRGVRMKKDQMLIEEIQVLNREGNLVHQENLDLHKKVNLMHQQNMELHEKVSEVEGVKIANKNSLLTNGLDMRDTSNEHVHLQLSQPQHDHETHSKAIQLNYFSFIA

SEQ ID NO: 16189 - protein, 208 aa, Arabidopsis thaliana
MGRGKIEIKRIENANNRVVTFSKRRNGLVKKAKEITVPCDAKVALIIFASNGKMIDYCCPSMDLGAMLDQYQMLSGKKLWDAKHENLSNEIDRIKKENDSLQLELRHLKGEDIQSLNLKNLMAVEHAIEHGLDKVRDHQMEILISKRRNEKMMAEEQRQLTFQLQQQEMAIASNARGMMMRDHDGQFGYRVQPIQPNLQEKIMSLVID

SEQ ID NO: 16190 - protein, 255 aa, Arabidopsis thaliana
MGRGRVELKRIENKINRQVTFSKRRTGLLKKAQEISVLCDAEVSLIVFSHKGKLFEYSSESCMEKVLERYERYSYAERQLIAPDSHVNAQTNWSMEYSRLKAKIELLERNQRHYLGEELEPMSLKDLQNLEQQLETALKHIRSRKNQLMNESLNHLQRKEKEIQEENSMLTKQIKERENILRTKQTQCEQLNRSVDDVPQPQPFQHPHLYMIAHQTSPFLNMGGLYQEEDQTAMRRNNLDLTLEPIYNYLGCYAA

SEQ ID NO: 16191 - protein, 208 aa, Arabidopsis thaliana
MGRGKIEIKRIENANNRVVTFSKRRNGLVKKAKEITVLCDAKVALIIFASDGKMIDYCCPSMDLGAMLDQYQKLSGKKLWDAKHENLSNEIDRIKKENDSLQLELRHLKGEGIQSLNLKNLMAVEHAIEHGLDKVRDHQMEILISKRRNEKMMAEEQRQLTFQLQQQEMAIASNARGMMMRDHDGQFGYRVQPIQPNLQEKIMSLVID

SEQ ID NO: 16192 - protein, 208 aa, Arabidopsis thaliana
MGRGKIEIKRIENANNRVVTFSKRRNGLVKKAKEITVLCDAKVALIIFASNGKMIDYCCPSMDLGAMLDQYQKLSGKKLWDAKHENLSDEIDRIKKENDSLQLELRHLKGEDIQSLNLKNLMAVGHAIEHGLDKVRDHQMEILISKRRNEKMMAEEQRQLTFQLQQQEMAIASNARGMMMRDHDGQFGYRVQPIQPNLQEKIMSLVID

SEQ ID NO: 16193 - protein, 221 aa, Arabidopsis thaliana
MVRGKTEMKRIENATSRQVTFSKRRNGLLKKAFELSVLCDAEVALIIFSPRGKLYEFSSSSSIPKTVERYQKRIQDLGSNHKRNDNSQQSKDETYGLARKIEHLEISTRKMMGEGLDASSIEELQQLENQLDRSLMKIRAKKYQLLREETEKLKEKERNLIAENKMLMEKCEMQGRGIIGRISSSSSTSELDIDDNEMEVVTDLFIGPPETRHFKKFPPSN

SEQ ID NO: 16194 - protein, 232 aa, Arabidopsis thaliana
MARGKIQIKRIENQTNRQVTYSKRRNGLFKKAHELTVLCDARVSIIMFSSSNKLHEYISPNTTTKEIVDLYQTISDVDVWATQYERMQETKRKLLETNRNLRTQIKQRLGECLDELDIQELRRLEDEMENTFKLVRERKFKSLGNQIETTMKKNKSQQGIQKNLIHELELRAEDPHYGLVDNGGDYDSVLGYQIEGSRAYALRFHQNHHHYYPNHGLHAPSASDIITFHLLE

SEQ ID NO: 16195 - protein, 232 aa, Arabidopsis thaliana
MARGKIQIKRIENQTNRQVTYSKRRNGLFKKAHELTVLCDARVSIIMFSSSNKLHEYISPNTTTKEIVDLYQTISDVDVWATQYERMQETKRKLLETNRNLRTQIKQRLGECLDKLDIQELRRLEDEMENTFKLVRERKFKSLGNQIETTKKKNKSQQDIQKNLIHELELRAEDPHYGLVDNGGDYDSVLGYQIEGSRAYALRFHQNHHHYYPNHGLHAPSASDIITFHLLE

SEQ ID NO: 16196 - protein, 232 aa, Arabidopsis thaliana
MARGKIQIKRIENQTNRQVTYSKRRNGLFKKAHELTVLCDARVSIIMFSSSNKLHEYISPNTTTKEIVDLYQTISDVDVWATQYERMQETKRKLLETNRNLRTQIKQRVGECLDELDIQELRRLEDEMENTFKLVRERKFKSLGNQIETTKKKSKSQQDIQKNLIHELELRAEDPHYGLVDNGGDYDSVLGYQIEGSRAYALRFHQNHHHYYPNHGLHAPSASDIITFHLLE

SEQ ID NO: 16197 - protein, 232 aa, Arabidopsis thaliana
MARGKIQIKRIENQTNRQVTYSKRRNGLFKKAHELTVLCDARVSIIMFSSSNKLHEYISPNTTTKEIVDLYQSISDVDVWATQYERMQETKRKLLETNRNLRTQIKQRLGECLDELDIQELRRLEDEMENTFKLVRERKFKSLGNQIETTKKKNKSQQNIQKDLIHELELRAEDPHYGLVDNGGDYDSVLGYQIEGSRAYALRFHQNHHHYCPNHGLHAPSASDIITFHLLE

SEQ ID NO: 16198 - protein, 232 aa, Arabidopsis thaliana
MARGKIQIKRIENQTNRQVTYSKRRNGLFKKAHELTVLCDARVSIIMFSSSNKLHEYISPNTTTKEIVDLYQTISDVDVWATQYERMQETKRKLLETNRNLRTQIKQRLGECLDELDIQELRRLEDEMENTFKLVRERKFKSLGNQIETTKKKNKSQQDIQKNLIHELELRAEDPHYGLVDNGGDYDSVLGYQIEGSRAYALRFHQNHHHYYPNHGLHAPSASDIITFHLLE

SEQ ID NO: 16199 - protein, 232 aa, Arabidopsis thaliana
MARGKIQIKRIENQTNRQVTYSKRRNGLFKKAHELTVLCDARVSIIMFSSSNKLHEYISPNTTTKEIVDLYQTISDVDVWATQYERMQETKRKLLETNRNLRTQIKQRLGECLDELDIQELRRLEDEMENTFKLVRERKFKSLGNQIETTKKKNKSQQDIQKNLIHELELRAEDPHYGLVDNGGDYDSVLGYQIEGSRRYALRFHQNHHHYYPNHGLHAPSASDIITFHLLE

SEQ ID NO: 16200 - protein, 232 aa, Arabidopsis thaliana
MARGKIQIKRIENQTNRQVTYSKRRNGLFKKAHELTVLCDARVSIIMFSSSNKLHEYISPNTTTKEIVDLYQTISDVDVWATQYERMQETKRKLLETNRNLRTQIKQRLGECLDELDIQELRRLEDEMENTFKLVRERKFKSLGSQIETTKKKNKSQQDIQKNLIHELELRAEDPHYGLVDNGGDYDSVLGYQIEGSRAYALRFHQNHHHYYPNHGLHAPSASDIITFHLLE

SEQ ID NO: 16201 - protein, 232 aa, Arabidopsis thaliana
MARGKIQIKRIENQTNRQVTYSKRRNGLFKKAHELTVLCDARVSIIMFSSSNKLHEYISPNTTTKEIVDLYQTISDVDVWATQYERMQETKRKLLETNRNLRTQIKQRLGECLNKLDIQELRRLEDEMENTFKLVRERKFKSLGNQIETTKKKNKSQQDIQKNLIHELELRAEDPHYGLVDNGGDYDSVLGYQIEGSRAYALRFHQNHHHYYPNHGLHAPSASDIITFHLLE

SEQ ID NO: 16202 - protein, 232 aa, Arabidopsis thaliana
MARGKIQIKRIENQTNRQVTYSKRRNGLFKKAHELTVLCDARVSIIMFSSSNKLHEYISPDTTTKEIVDLYQTISDVDVWATQYERMQETKRKLLETNRNLRTQIKQRLGECLDELDIQELRRLEDEMENTFKLVRERKFKSLGNQIETTKKKNKSQQDIQKNLIHELELRAEDPHYGLVDNGGDYDSVLGYQIEGSRAYALRFHQNHHHYYPNHGLHAPSASDIITFHLLE

SEQ ID NO: 16203 - protein, 232 aa, Arabidopsis thaliana
MARGKIQIKRIENQTNRQVTYSKRRNGLFKKAHELTVLCDARVSIIMFSSSNKLHEYISPNTTTKEIVDLYQTISDVDVWATQYERMQETKRKLLETNRNLRTQIKQRLGECLDELDIQELRRLEDEMENTFKLVRARKFESLGNQIETTKKKNKSQQDIQKNLIHELELRAEDPHYGLVDNGGDYDSVLGYQIEGSRAYALRFHQNHHHYYPNHGLHAPSASDIITFHLLE

SEQ ID NO: 16204 - protein, 232 aa, Arabidopsis thaliana
MARGKIQIKRIENQTNRQVTYSKRRNGLFKKAHELTVLCDARVSIITFSSSNKLHEYISPNTTTKEIVDLYQTISDVDVWATQYERMQETKRKLLETNRNLRTQIKQRLGECLDELDIQELRRLEDEMENTFKLVRERKFKSLGNQIETTKKKNKSQQDIQKNLIHELELRAEDPHYGLVDNGGDYDSVLGYQIEGSRAYALRFHQNHHHYYPNHGLHAPSASDIITFHLLE

SEQ ID NO: 16205 - protein, 232 aa, Arabidopsis thaliana
MARGKIQIKRIENQTNRQVTYSKRRNGLFKRAHELTVLCDARVSIIMFSSSNKLHEYISPNTTTKEIVDLYQTISDVDVWATQYERMQETKRKLLETNRNLRTQIKQRLGECLDELDIQELRRLEDEMENTFKLVRERKFKSLGNQIETTKKKNKSQQDIQKNLIHELELRAEDPHYGLVDNGGDYDSVLGYQIEGSRAYALRFHQNHHHYYPNHGLHAPSASDIITFHLLE

SEQ ID NO: 16206 - protein, 251 aa, Arabidopsis thaliana
MGRGRVQLKRIENKINRQVTFSKRRAGLLKKAHEISVLCDAEVALVVFSHKGKLFEYSTDSCMEKILERYERYSYAERQLIAPESDVNTNWSMEYNRLKAKIELLERNQRHYLGEDLQAMSPKELQNLEQQLDTALKHIRTRKNQLMYESINELQKKEKAIQEQNSMLSKQIKEREKILRAQQGQWDQQNQGHNMPPPLPPQQHQIQHPYMLSHQPSPFLNMGGLYQEDDPMAMRRNDLELTLEPVYNCNL

SEQ ID NO: 16207 - protein, 252 aa, Arabidopsis thaliana
MGRGRVEMKRIENKINRQVTFSKRRNGLLKKAYELSVLCDAEVALIIFSSRGKLYEFGSVGIESTIERYNRCYNCSLSNNKPEETTQSWCQEVTKLKSKYESLVRTNRNLLGEDLGEMGVKELQALERQLEAALTATRQRKTQVMMEEMEDLRKKERQLGDINKQLKIKFETEGHAFKTFQDLWANSAASVAGDPNNSEFPVEPSHPNVLDCNTEPFLQIGFQQHYYVQGEGSSVSKSNVAGETNFVQGWVL

SEQ ID NO: 16208 - protein, 232 aa, Arabidopsis thaliana
MARGKIQIKRIENQTNRQVTYSKRRNGLFKKAHELTVLCDARVSIIMFSSSNKLHEYISPNTTTKEIVDLYQTISDVDVWATQYERMQETKRKLLETNRNLRTQIKQRLGECLDELDIQELRRLEDEKENTFKLVRERKFKSLGNQIETTKKKNKSQQDIQKNLIHELELRAEDPHYGLVDNGGDYDSVLGYQIEGSRAYALRFHQNHHHYYPNHGLHTPSASDIITFHLLE

SEQ ID NO: 16209 - protein, 207 aa, Arabidopsis thaliana
MVRGKIEIKKIENVTSRQVTFSKRRSGLFKKAHELSVLCDAQVAAIVFSQSGRLHEYSSSQMEKIIDRYGKFSNAFYVAERPQVERYLQELKMEIDRMVKKIDLLEVHHRKLLGQGLDSCSVTELQEIDTQIEKSLRIVRSRKAELYADQLKKLKEKERELLNERKRLLEEVNMHHSSKGNTEGGHRTKHSSEVETDLFIGLPVTRL

SEQ ID NO: 16210 - protein, 251 aa, Arabidopsis thaliana
MGRGRVQLKRIENKINRQVTFSKRRAGLLKKAHEISVLCDAEVALVVFSHKGKLFEYSTDSCMEKILERYERYSYAERQLIAPESDVNTNWSMEYNRLKAKIELLERNQRHYLGEDLQAVSPKELQNLEQQLDTALKHIRTRKNQLMYESINELQKKEKAIQEQNGMLSKQIKEREKILRAQQEQWDQQNQGHNMPPPLPPQQHQIQHPYMLSHQPSPFLNMGGLYQEDDPMAMRRNDLELTLEPVYNCNL

SEQ ID NO: 16211 - protein, 251 aa, Arabidopsis thaliana
MGRGRVQLKRIENKINRQVTFSKRRAGLLKKAHEISVLCDAEVALVVFSHKGKLFEYSTDSCMEKILERYERYSYAERQLIAPESDVNTNWSMEYNRLKAKIELLERNQRHYLGEDLQAMSPKELQNLEQQLDTALKHIRTRKNQLMYESINELQKKEKAIQEQNSMLSKQIKEREKILRAQQEQWDQQNQGHNMPPPLPPQQHQIQHPYMLSHQPSPFLNMGGLYQEDDPMAMRRNDLELTLEPVYNCNL

SEQ ID NO: 16212 - protein, 248 aa, Arabidopsis thaliana
MEEGGSSHDAESSKKLGRGKIEIKRIENTTNRQVTFCKRRNGLLKKAYELSVLCDAEVALVIFSTRGRLYEYANNSVRGTIERYKKACSDAVNPPSVTEANTQYYQQEASKLRRQIRDIQNSNRHIVGESLGSLNFKELKNLEGRLEKGISRVRSKKNELLVAEIEYMQKREMELQHNNMYLRAKIAEGARLNPDQQESSVIQGTTVYESGVSSHDQSQHYNRNYIPVNLLEPNQQFSGQDQPPLQLV

SEQ ID NO: 16213 - protein, 285 aa, Arabidopsis thaliana
HFLQLLQISYFPENHFPKKNKTFPFVLLPPTAITAYQSELGGDSSPLRKSGRGKIEIKRIENTTNRQVTFCKRRNGLLKKAYELSVLCDAEVALIVFSSRGRLYEYSNNSVKGTIERYKKAISDNSNTGSVAEINAQYYQQESAKLRQQIISIQNSNRQLMGETIGSMSPKELRNLEGRLERSITRIRSKKNELLFSEIDYMQKREVDLHNDNQILRAKIAENERNNPSISLMPGGSNYEQLMPPPQTQSQPFDSRNYFQVAALQPNNHHYSSAGRQDQTALQLV

SEQ ID NO: 16214 - protein, 256 aa, Arabidopsis thaliana
MGRGRVQLKRIENKINRQVTFSKRRAGLLKKAHEISVLCDAEVALVVFSHKGKLFEYSTDSCMEKILERYERYSYAERQLIAPESDVNTNWSMEYNRLKAKIELLERNQRHYLGEDLQAMSPKELQNLEQQLDTALKHIRTRKNQLMYESINELQKKEKAIQEQNSMLSKQIKEREKILRAQQEQWDQHNQGHNMPPPLPPQQHQIQHPYMLSHQPSPFLNMGGLYQEDDPMAMRRNDLELTLEPVYNCNLGCFAA

SEQ ID NO: 16215 - protein, 251 aa, Arabidopsis thaliana
MGRGRVQLKRIENKINRQVTFSKRRAGLLKKAHEISVLCDAEVALVVFSHKGKLFEYSTDSCMEKILERYERYSYAERQLIAPESDVNTNWSMEYNRLKAKIELLERNQRHYLGEDLQAMSPKELQNLEQQLDTALKHIRTRKNQLMYESINELQKKEKAIQEQNSMLSKQIKEREKILRAQQEQWDQQNQGHNMPPPLPPQQHQIQHPYMLSHQPSPFLNMGGLYQEDDPMVMRRNDLELTLEPVYNCNL

SEQ ID NO: 16216 - protein, 284 aa, Arabidopsis thaliana
FLQLLQISYFPENHFPKKNKTFPFVLLPPTAITAYQSELGGDSSPLRKSGRGKIEIKRIENTTNRQVTFCKRRNGLLKKAYELSVLCDAEVALIVFSSRGRLYEYSNNSVKGTIERYKKAISDNSNTGSVAEINAQYYQQESAKLRQQIISIQNSNRQLMGETIGSMSPKELRNLEGRLERSITRIRSKKNELLFSEIDYMQKREVDLHNDNQILRAKIAENERNNPSISLMPGGSNYEQLMPPPQTQSQPFDSRNYFQVAALQPNNHHYSSAGRQDQTALQLV

SEQ ID NO: 16217 - protein, 251 aa, Arabidopsis thaliana
MGRGRVQLKRIENKINRQVTFSKRRAGLLKKAHEISVLCDAEVALVVFSHKGKLFEYSTDSCMEKILERYERYSYAERQLIAPESDVNTNWSMEYNRLKTKIELLERNQRHYLGEDLQAMSPKELQNLEQQLDTALKHIRTRKNQLMYESINELQKKEKAIQEQNSMLSKQIKEREKILRAQQEQWDQQNQGHNMPPPLPPQQHQIQHPYMLSHQPSPFLNMGGLYQEDDPMAMRRNDLELTLEPVYNCNL

SEQ ID NO: 16218 - protein, 310 aa, Arabidopsis thaliana
RKLKRKKIFLYKCIYPSLHQHNLTFHFLQLLQISYFPENHFPKKNKTFPFVLLPPTAITAYQSELGGDSSPLRKSGRGKIEIKRIENTTNRQVTFCKRRNGLLKKAYELSVLCDAEVALIVFSSRGRLYEYSNNSVKGTIERYKKAISDNSNTGSVAEINAQYYQQESAKLRQQIISIQNSNRQLMGETIGSMSPKELRNLEGRLERSITRIRSKKNELLFSEIDYMQKREVDLHNDNQILRAKIAENERNNPSISLMPGGSNYEQLMPPPQTQSQPFDSRNYFQVAALQPNNHHYSSAGRQDQTALQLV

SEQ ID NO: 16219 - protein, 255 aa, Arabidopsis thaliana
MGRGRVQLKRIENKINRQVTFSKRRAGLLKKAHEISVLCDAEVALVVFSHKGKLFEYSTDSCMEKILERYERYSYAERQLIAPESDVNTNWSMEYNRLKAKIELLERNQRHYLGEDLQAMSPKELQNLEQQLDTALKHIRTRKNQLMYESINELQKKEKAIQEQNSMLSKQIKEREKILRAQQEQWDQQNQGHNMPPPLPPQQHQIQHPYMLSHQPSPFLNMGGLYQEDDPMAMRNDLELTLEPVYNCNLGCFAA

SEQ ID NO: 16220 - protein, 252 aa, Arabidopsis thaliana
MAYQSELGGDSSPLRKSGRGKIEIKRIENTTNRQVTFCKRRNGLLKKAYELSVLCDAEVALIVFSSRGRLYEYSNNSVKGTIERYKKAISDNSNTGSVAEINAQYYQQESAKLRQQIISIQNSNRQLMGETIGSMSPKELRNLEGRLERSITRIRSKKNELLFSEIDYMQKREVDLHNDNQILRAKIAENERNNPSISLMPGGSNYEQLMPPPQTQSQPFDSRNYFQVAALQPNNHHYSSAGRQDQTALQLV

SEQ ID NO: 16221 - protein, 230 aa, Arabidopsis thaliana
MGRGKIEIKRIENSTNRQVTFCKRRNGLLKKAYELSVLCDAEVALIVFSTRGRLYEYANNNIRSTIERYKKACSDSTNTSTVQEINAAYYQQESAKLRQQIQTIQNSNRNLMGDSLSSLSVKELKQVENRLEKAISRIRSKKHELLLVEIENAQKREIELDNENIYLRTKVAEVERYQQHHHQMVSGSEINAIEALASRNYFAHSIMTAGSGSGNGGSYSDPDKKILHLG

SEQ ID NO: 16222 - protein, 256 aa, Arabidopsis thaliana
MGRGRVQLKRIENKINRQVTFSKRRAGLLKKAHEISVLCDAEVALVVFSHKGKLFEYSTDSCMEKILERYERYSYAERQLIAPESDVNTNWSMEYNRLKAKIELLERNQRHYLGEDLQAMSPKELQNLEQQLDTALKHIRTRKNQLMYESINELQKKEKAIQEQNSMLSKQIKEREKILRAQQEQWDQQNQGHNMPPPLPPQQHQIQHPYMLSHQPSPFLNMGGLYQEDDPMAMRRNDLELTLEPVYNCNLGCFAA

SEQ ID NO: 16223 - protein, 215 aa, Arabidopsis thaliana
EMKRIENATSRQVTFSKRRNGLLKKAFELSVLCDAEVALIIFSPRGKLYEFSSSSSIPKTVERYQKRIQDLGSNHKRNDNSQQSKDETYGLARKIEDLEISTRKMMGEGLDASSIEELQQLENQLDRSLMKIRAKKYQLLREETEKLKEKERNLIAENKMLMEKCEMQGRGIIGRISSSSTSSELDIDDNEMEVVTDLFIGPPETRHFKKFPPSN

SEQ ID NO: 16224 - protein, 246 aa, Arabidopsis thaliana
MEGGASNEVAESSKKIGRGKIEIKRIENTTNRQVTFCKRRNGLLKKAYELSVLCDAEVALVIFSTRGRLYEYANNSVRGTIERYKKACSDAVNPPTITEANTQYYQQEASKLRRQIRDIQNLNRHILGESLGSLNFKELKNLESRLEKGISRVRSKKHEMLVAEIEYMQKREIELQNDNMYLRSKITERTGLQQQESSVIHQGTVYESGVTSSHQSGQYNRNYIAVNLLEPNQNSSNQDQPPLQLV

SEQ ID NO: 16225 - protein, 258 aa, Arabidopsis thaliana
MEGGASNEVAESSKKIGRGKIEIKRIENTTNRQVTFCKRRNGLLKKAYELSVLCDAEVALVIFSTRGRLYEYANNSVRGTIERYKKACSDAVNPPTITEANTQYYQQEASKLRRQIRDIQNLNRHILGESLGSLNFKELKNLESRLEKGISRVRSKKHEMLVAEIEYMQKREIELQNDNMYLRSKITERTGLQQQESSVIHQGTVYESGVTSSHQSGQYNRNYIAVNLLEPNQNSSNQDQPPLQLRDLIIYIYLDYVS

SEQ ID NO: 16226 - protein, 219 aa, Arabidopsis thaliana
MVRGKTEMKRIENATSRQVTFSKRRNGLLKKAFELSVLCDAEVALVIFSPRSKLYEFSSSSIAATIERYQRRIKEIGNNHKRNDNSQQARDETSGLTKKIEQLEISKRKLLGEGIDACSIEELQQLENQLDRSLSRIRAKKYQLLREEIEKLKAEERNLVKENKDLKEKWLGMGTATIASSQSTLSSSEVNIDDNMEVETGLFIGPPETRQSKKFPPQN

SEQ ID NO: 16227 - protein, 256 aa, Arabidopsis thaliana
MGRGRIEIKKIENINSRQVTFSKRRNGLIKKAKELSILCDAEVALIIFSSTGKIYDFSSVCMEQILSRYGYTTASTEHKQQREHQLLICASHGNEAVLRNDDSMKGELERLQLAIERLKGKELEGMSFPDLISLENQLNESLHSVKDQKTQILLNQIERSRIQEKKALEENQILRKQVEMLGRGSGPKVLNERPQDSSPEADPESSSSEEDENDNEEHHSDTSLQLGLSSTGYCTKRKKPKIELVCDNSGSQVASD

SEQ ID NO: 16228 - protein, 251 aa, Arabidopsis thaliana
MGRGRVQLKRIENKINRQVTFSKRRAGLLKKAHEISVLCDAEVALVVFSHKGKLFEYSTDSCMEKILERYERYSYAERQLIAPEPDVNTNWSMEYNRLRAKIELLERNQRHYLGEDLQAMSPKELQNLEQQLDTALKHIRTRKNQLMYESINELQKKEKAIQEQNSMLSKQIKEREKILRAQQEQWDQQNQGHNMPPPLPPQQHQIQHPYMPSHQPSPFLNMGGLYQEDDPMAMRRNDLELTLEPVYNCNL

SEQ ID NO: 16229 - protein, 228 aa, Arabidopsis thaliana
MGRGKVEVKRIENKITRQVTFSKRKSGLLKKAYELSVLCDAEVSLIIFSTGGKLYEFSNVGVGRTIERYYRCKDNLLDNDTLEDTQGLRQEVTKLKCKYESLLRTHRNLVGEDLEGMSIKELQTLERQLEGALSATRKQKTQVMMEQMEELRRKERELGDINNKLKLETEDHDFKGFQDLLLNPVLTAGCSTDFSLQSTHQNYISDCNLGYFYRLGFNNTMSKVKDLR

SEQ ID NO: 16230 - protein, 244 aa, Arabidopsis thaliana
MGRGKVEVKRIENKITRQVTFSKRKSGLLKKAYELSVLCDAEVSLIIFSTGGKLYEFSNVGVGRTIERYYRCKDNLLDNDTLEDTQGLRQEVTKLKCKYESLLRTHRNLVGEDLEGMSIKELQTLERQLEGALSATRKQKTQVMMEQMEELRRKERELGDINNKLKLETEDHDFKGFQDLLLNPVLTAGCSTDFSLQSTHQNYISDCNLGYFLQIGFQQHYEQGEGSSVTKSNARSDAETNFVQ

SEQ ID NO: 16231 - protein, 258 aa, Arabidopsis thaliana
MGRGKVELKRIENKINRQVTFAKRRNGLLKKAYELSVLCDAEIALLIFSNRGKLYEFCSSPSGMARTVDKYRKHSYATMDPNQSAKDLQDKYQDYLKLKSRVEILQHSQRHLLGEELSEMDVNELEHLERQVDASLRQIRSTKARSMLDQLSDLKTKEEMLLETNRDLRRKLEDSDAALTQSFWGSSAAEQQQQHQQQQQGMSSYQSNPPIQEAGFFKPLQGNVALQMSSHYNHNPANATNSATTSQNVNGFFPGWMV

SEQ ID NO: 16232 - protein, 257 aa, Arabidopsis thaliana
MGRGKVELKRIENKINRQVTFAKRRNGLLKKAYELSVLCDAEIALLIFSNRGKLYEFCSSPSGMARTVDKYRKHSYATMDPNQSAKDLQDKYQDYLKLKSRVEILQHSQRHLLGEELSEMDVNELEHLERQVDASLRQIRSTKARSMLDQLSDLKTKEEMLLETNRDLRRKLEDSDAALTQSFWGSSAAEQQQQHQQQQQGMSSYQSNPPIQEAGFFKPLQGNVALQMSHYNHNPANATNSATTSQNVNGFFPGWMV

SEQ ID NO: 16233 - protein, 251 aa, Arabidopsis thaliana
MGRGRVQLKRIENKINRQVTFSKRRAGLLKKAHEISVLCDAEVALVVFSHKGKLFEYSTDSCMEKILERYERYSYAERQLIAPESDVNTNWSTEYNRLKAKIELLERNQRHYLGEDLQAMSPKEPQNLEQQLDTALKHIRTRKNQLMYESINELQKKEKAIQEQNSMLSKQIKEREKILRAQQEQWDQQNQGHNMPPPLPPQQHQIQHPYMLSHQPSPFLNMGGLYQEDDPMAMRRNDLELTLEPVYNCNL

SEQ ID NO: 16234 - protein, 196 aa, Arabidopsis thaliana
MGRKKVEIKRIENKSSRQVTFSKRRNGLIEKARQLSILCESSIAVLVVSGSGKLYKSASGDNMSKIIDRYEIHHADELEALDLAEKTRNYLPLKELLEIVQSKLEESNVDNASVDTLISLEEQLETALSVTRARKTELMMGEVKSLQKTENLLREENQTLASQVGKKTFLVIEGDRGMSWENGSGNKVRETLPLLK

SEQ ID NO: 16235 - protein, 178 aa, Arabidopsis thaliana
MGRKKVEIKRIENKSSRQVTFSKRRNGLIEKARQLSILCESSIAVLVVSGSGKLYKSASGDNMSKIIDRYEIHHADELEALDLAEKTRNYLPLKELLEIVQSKLEESNVDNASVDTLISLEEQLETALSVTRARKTELMMGEVKSLQKTENLLREENQTLASQVTKTSLEANSSVDTQ

SEQ ID NO: 16236 - protein, 256 aa, Arabidopsis thaliana
MGRGRIEIKKIENINSRQVTFSKRRNGLIKKAKELSILCDAEVALIIFSSTGKIYDFSSVCMEQILSRYGYTTASTEHKQQREHQLLICASHGNEAVLRNDDSMKVELERLQLAIERLKGKELEGMSFPDLISFENQLNESLHSVKDQKTQILLNQIERSRIQEKKALEENQILRKQVEMLGRGSGPKVLNERPQDSSPEADPESSSSEEDENDNEEHHSDTSLQLGLSSTGYCTKRKKPKIELVCDNSGSQVASD

SEQ ID NO: 16237 - protein, 248 aa, Arabidopsis thaliana
MGRGRVELKRIENKINRQVTFAKRRNGLLKKAYELSVLCDAEVALIIFSNRGKLYEFCSSSNMLKTLDRYQKCSYGSIEVNNKPAKELENSYREYLKLKGRYENLQRQQRNLLGEDLGPLNSKELEQLERQLDGSLKQVRSIKTQYMLDQLSDLQNKEQMLLETNRALAMKLDDMIGVRSHHMGGWEGGEQNVTYAHHQAQSQGLYQPLECNPTLQMGYDNPVCSEQITATTQAQAQPGNGYIPGWML

SEQ ID NO: 16238 - protein, 251 aa, Arabidopsis thaliana
MGRGRVELKRIENKINRQVTFAKRRNGLLKKAYELSVLCDAEVALIIFSNRGKLYEFCSSSNMLKTLDRYQKCSYGSIEVNNKPAKELENSYREYLKLKGRYENLQRQQRNLLGEDLGPLNSKELEQLERQLDGSLKQVRSIKTQYMLDQLSDLQNKEQMLLETNRALAMKLDDMIGVRSHHMGGGGGWEGGEQNVTYAHHQAQSQGLYQPLECNPTLQMGYDNPVCSEQITATTQAQAQQGNGYIPGWML

SEQ ID NO: 16239 - protein, 262 aa, Arabidopsis thaliana
MGRGRVELKRIENKINRQVTFAKRRNGLLKKAYELSVLCDAEVALIIFSNRGKLYEFCSSSNMLKTLDRYQKCSYGSIEVNNKPAKELENSYREYLKLKGRYENLQRQQRNLLGEDLGPLNSKELEQLERQLDGSLKQVRSIKTQYMLDQLSDLQNKEQMLLETNRALAMKLDDMIGVRSHHMGGGGGWEGGEQNVTYAHHQAQSQGLYQPLECNPTLQMGCCFGDDDDDDRYDNPVCSEQITATTQAQAQQGNGYIPGWML

SEQ ID NO: 16240 - protein, 214 aa, Arabidopsis thaliana
MVRGKTQMKRIENATSRQVTFSKRRNGLLKKAFELSVLCDAEVSLIIFSPKGKLYEFASSNMQDTIDRYLRHTKDRVSTKPVSEENMQHLKYEAANMMKKIEQLEASKRKLLGEGIGTCSIEELQQIEQQLEKSVKCIRARKTQVFKEQIEQLKQKEKALAAENEKLSEKWGSHESEVWSNKNQESTGRGDEESSPSSEVETQLFIGLPCSSRK

SEQ ID NO: 16241 - protein, 228 aa, Arabidopsis thaliana
MGRGKIVIQRIDDSTSRQVTFSKRRKGLIKKAKELAILCDAEVGLIIFSSTGKLYDFASSSMKSVIDRYNKSKIEQQQLLNPASEVKFWQREAAVLRQELHALQENHRQMMGEQLNGLSVNELNSLENQIEISLRGIRMRKEQLLTQEIQELSQKRNLIHQENLDLSRKVQRIHQENVELYKKAYMANTNGFTHREVAVADDESHTQIRLQLSQPEHSDYDTPPRANE

SEQ ID NO: 16242 - protein, 211 aa, Arabidopsis thaliana
MVRGKIEIKKIENVTSRQVTFSKRRSGLFKKAHELSVLCDAQVAAMIFSQKGRLYEFASSDIRNTIKRYAEYKREYFVAETHPIEQYVQGLKKEMVTMVKKIEVLEVHNRKMMGQSLDSCSVKELSEIATQIEKSLHMVRLRKAKLYEDELQKLKAKERELKDERVRLSLKKTIYTHLCQVGERPMGMPSGSKEKEDVETDLFIGFLKNRP

SEQ ID NO: 16243 - protein, 268 aa, Arabidopsis thaliana
MGRGKIEIKRIENANSRQVTFSKRRSGLLKKARELSVLCDAEVAVIVFSKSGKLFEYSSTGMKQTLSRYGNHQSSSASKAEEDCAEVDILKDQLSKLQEKHLQLQGKGLNPLTFKELQSLEQQLYHALITVRERKERLLTNQLEESRLKEQRAELENETLRRQVQELRSFLPSFTHYVPSYIKCFAIDPKNALINHDSKCSLQNTDSDTTLQLGLPGEAHDRRTNEGERESPSSDSVTTNTSSETAERGDQSSLANSPPEAKRQRFSV

SEQ ID NO: 16244 - protein, 234 aa, Arabidopsis thaliana
MGRGKIVIRRIDNSTSRQVTFSKRRSGLLKKAKELSILCDAEVGVIIFSSTGKLYDYASNSSMKTIIERYNRVKEEQHQLLNHASEIKFWQREVASLQQQLQYLQECHRKLVGEELSGMNANDLQNLEDQLVTSLKGVRLKKDQLMTNEIRELNRKGQIIQKENHELQNIVDIMRKENIKLQKKVHGRTNAIEGNSSVDPISNGTTTYAPPQLQLIQLQPAPREKSIRLGLQLS

SEQ ID NO: 16245 - protein, 251 aa, Arabidopsis thaliana
MGRGRVELKRIENKINRQVTFAKRRNGLLKKAYELSVLCDAEVALIIFSNRGKLYEFCSSSSMLRTLERYQKCNYGAPEPNVPSREALAVELSSQQEYLKLKERYDALQRTQRNLLGEDLGPLSTKELESLERQLDSSLKQIRALRTQFMLDQLNDLQSKERMLTETNKTLRLRLADGYQMPLQLNPNQEEVDHYGRHHHQQQQHSQAFFQPLECEPILQIGYQGQQDGMGAGPSVNNYMLGWLPYDTNSI

SEQ ID NO: 16246 - protein, 227 aa, Arabidopsis thaliana
MGRGKIVIQKIDDSTSRQVTFSKRRKGLIKKAKELAILCDAEVCLIIFSNTDKLYDFASSSVKSTIERFNTAKMEEQELMNPASEVKFWQREAETLRQELHSLQENYRQLTGVELNGLSVKELQNIESQLEMSLRGIRMKREQILTNEIKELTRKRNLVHHENLELSRKVQRIHQENVELYKKAYGTSNTNGLGHHELVDAVYESHAQVRLQLSQPEQSHYKTSSNS

SEQ ID NO: 16247 - protein, 250 aa, Arabidopsis thaliana
MGRGRVELKRIENKINRQVTFAKRRNGLLKKAYELSVLCDAEVALIIFSNRGKLYEFCSSSSMLRTLERYQKCNYGAPEPNVPSREALAELSSQQEYLKLKERYDALQRTQRNLLGEDLGPLSTKELESLERQLDSSLKQIRALRTQFMLDQLNDLQSKERMLTETNKTLRLRLADGYQMPLQLNPNQEEVDHYGRHHHQQQQHSQAFFQPLECEPILQIGYQGQQDGMGAGPSVNNYMLGWLPYDTNSI

SEQ ID NO: 16248 - protein, 234 aa, Arabidopsis thaliana
MGRGKIVIRRIDNSTSRQVTFSKRRSGLLKKAKELSILCDAEVGVIIFSSTGKLYDYASNSSMKTIIERYNRVKEEQHQLLNHASEIKFWQREVASLQQQLQHLQECHRKLVGEELSGMNANDLQNLEDQLVTSLKGVRLKKDQLMTNEIRELNRKGQIIQKENHELQNIVDIMRKENIKLQKKVHGRTNVIEGNSSVDPISNGTTTYAPPQLQLIQLQPAPREKSIRLGLQLS

SEQ ID NO: 16249 - protein, 250 aa, Arabidopsis thaliana
MGRGRVELKRIENKINRQVTFAKRRNGLLKKAYELSVLCDAEVSLIVFSNRGKLYEFCSTSNMLKTLERYQKCSYGSIEVNNKPAKELENSYREYLKLKGRYENLQRQQRNLLGEDLGPLNSKELEQLERQLDGSLKQVRCIKTQYMLDQLSDLQGKEHILLDANRALSMKLEDMIGVRHHHVGGGWEGGDQQNIAYGHPQAHSQGLYQSLECDPTLQIGYSHPVCSEQMAVTVQGQSQQGNGYIPGWML

SEQ ID NO: 16250 - protein, 250 aa, Arabidopsis thaliana
MGRGRVELKRIENKINRQVTFAKRRNGLLKKAYELSVLCDAEVSLIVFSNRGKLYEFCSTSNMLKTLERYQKCSYGSIEVNNKPAKELENSYREYLKLKGRYENLQRQQRNLLGEDLGPLNSKELEQLERQLDGSLKQVRCIKTQYMLDQLSDLQGKEHILLDANRALSMKLEDMIGVRHHHIGGGWEGGDQQNIAYGHPQAHSQGLYQSLECDPTLQIGYSHPVCSEQMAVTVQGQSQQGNGYIPGWML

SEQ ID NO: 16251 - protein, 252 aa, Arabidopsis thaliana
MGRGKIEIKKIENQTARQVTFSKRRTGLIKKTRELSILCDAHIGLIVFSATGKLSEFCSEQNRMPQLIDRYLHTNGLRLPDHHDDQEQLHHEMELLRRETCNLELRLRPFHGHDLASIPPNELDGLERQLEHSVLKVRERKNELMQQQLENLSRKRRMLEEDNNNMYRWLHEHRAAMEFQQAGIDTKPGEYQQFIEQLQCYKPGEYQQFLEQQQQQPNSVLQLATLPSEIDPTYNLQLAQPNLQNDPTAQND

SEQ ID NO: 16252 - protein, 238 aa, Arabidopsis thaliana
MGRGKIEIKKIENQTARQVTFSKRRTGLIKKTRELSILCDAHIGLIVFSATGKLSEFCSEQNRMPQLIDRYLHTNGLRLPDHHDDQEQLHHEMELLRRETCNLELRLRPFHGHDLASIPPNELDGLERQLEHSVLKVRERKRRMLEEDNNNMYRWLHEHRAAMEFQQAGIDTKPGEYQQFIEQLQCYKPGEYQQFLEQQQQQPNSVLQLATLPSEIDPTYNLQLAQPNLQNDPTAQND

SEQ ID NO: 16253 - protein, 210 aa, Arabidopsis thaliana
MVRGKIEMKKIENATSRQVTFSKRRNGLLKKAYELSVLCDAQLSLIIFSQRGRLYEFSSSDMQKTIERYRKYTKDHETSNHDSQIHLQQLKQEASHMITKIELLEFHKRKLLGQGIASCSLEELQEIDSQLQRSLGKVRERKAQLFKEQLEKLKAKEKQLLEENVKLHQKNVINPWRGSSTDQQQEKYKVIDLNLEVETDLFIGLPNRNC

SEQ ID NO: 16254 - protein, 196 aa, Arabidopsis thaliana
MGRRKVEIKRIENKSSRQVTFSKRRKGLIEKARQLSILCESSIAVVAVSGSGKLYDSASGDNMSKIIDRYEIHHADELKALDLAEKIRNYLPHKELLEIVQSKLEESNVDNVSVDSLISMEEQLETALSVIRAKKTELMMEDMKSLQEREKLLIEENQILASQVGKKTFLVIEGDRGMSRENGSGNKVPETLSLLK

SEQ ID NO: 16255 - protein, 173 aa, Arabidopsis thaliana
MGRRKIEIKRIENKSSRQVTFSKRRNGLIDKARQLSILCESSVAVVVVSASGKLYDSSSGDDISKIIDRYEIQHADELRALDLEEKIQNYLPHKELLETVQSKLEEPNVDNVSVDSLISLEEQLETALSVSRARKAELMMEYIESLKEKEKLLREENQVLASQLSEKKGMSHR

SEQ ID NO: 16256 - protein, 196 aa, Arabidopsis thaliana
MGRRKIEIKRIENKSSRQVTFSKRRNGLIDKARQLSILCESSVAVVVVSASGKLYDSSSGDDISKIIDRYEIQHADELRALDLEEKIQNYLPHKELLETVQSKLEEPNVDNVSVDSLISLEEQLETALSVSRARKAELMMEYIESLKEKEKLLREENQVLASQMGKNTLLATDDERGMFPGSSSGNKIPETLPLLN

SEQ ID NO: 16257 - protein, 196 aa, Arabidopsis thaliana
MGRKKLEIKRIENKSSRQVTFSKRRNGLIEKARQLSVLCDASVALLVVSASGKLYSFSSGDNLVKILDRYGKQHADDLKALDHQSKALNYGSHYELLELVDSKLVGSNVKNVSIDALVQLEEHLETALSVTRAKKTELMLKLVENLKEKEKMLKEENQVLASQMENNHHVGAEAEMEMSPAGQISDNLPVTLPLLN

SEQ ID NO: 16258 - protein, 262 aa, Arabidopsis thaliana
EIKRIENANSRQVTFSKRRSGLLKKARELSVLCDAEVAVIVFSKSGKLFEYSSTGMKQTLSRYGNHQSSSASKAEEDCAEVDILKDQLSKLQEKHLQLQGKGLNPLTFKELQSLEQQLYHALITVRERKERLLTNQLEESRLKEQRAELENETLRRQVQELRSFLPSFTHYVPSYIKCFAIDPKNALINHDSKCSLQNTDSDTTLQLGLPGEAHDRRTNEGERESPSSDSVTTNTSSETAERGDQSSLANSPPEAKRQRFSV

SEQ ID NO: 16259 - protein, 205 aa, Arabidopsis thaliana
IQKIDDSTSRQVTFSKRRKGLIKKAKELAILCDAEVCLIIFSNTDKLYDFASSSVKSTIERFNTAKMEEQELMNPASEVKFWQREAETLRQELHSLQENYRQLTGVELNGLSVKELQNIESQLEMSLRGIRMKREQILTNEIKELTRKRNLVHHENLELSRKVQRIHQENVELYKKAYGTSNTNGLGHHELVDQFMNPMHRLGCS

SEQ ID NO: 16260 - protein, 211 aa, Arabidopsis thaliana
MARGKIQLKRIENPVHRQVTFCKRRTGLLKKAKELSVLCDAEIGVVIFSPQGKLFELATKGTMEGMIDKYMKCTGGGRGSSSATFTAQEQLQPPNLDPKDEINVLKQEIEMLQKGISYMFGGGDGAMNLEELLLLEKHLEYWISQIRSAKMDVMLQEIQSLRNKEGVLKNTNKYLLEKIEENNNSILDANFAVMETNYSYPLTMPSEIFQF

SEQ ID NO: 16261 - protein, 211 aa, Arabidopsis thaliana
MARGKIQLKRIENPVHRQVTFCKRRTGLLKKAKELSVLCDAEIGVVIFSPQGKLFELATKGTMEGMIDKYMKCTGGGRGSSSATFTAQEQLQPPNLDPKDEINVLKQEIEMLQKGISYMFGGGDGAMNLEELLLLEKHLEYWISQIRSAKMDVMLQEIQSLRNKEGVLKNTNKYLLDKIEENNNSILDANFAVMETNYSYPLTMPSEIFQF

SEQ ID NO: 16262 - protein, 198 aa, Arabidopsis thaliana
MGRRRVEIKRIENKSSRQVTFCKRRNGLMEKARQLSILCGSSVALFIVSSTGKLYNSSSGDSMAKIISRFKIQQADDPETLDLEDKTQDYLSHKELLEIVQRKIEEAKGDNVSIESLISMEEQLKSALSVIRARKTELLMELVKNLQDKEKLLKEKNKVLASEVGKLKKILETGDERAVMSPENSSGHSPPETLPLLK

SEQ ID NO: 16263 - protein, 184 aa, Arabidopsis thaliana
MGRRRVEIKRIENKSSRQVTFCKRRNGLMEKARQLSILCGSSVALFIVSSTGKLYNSSSGDSMAKIISRFKIQQADDPETLDLEDKTQDYLSHKELLEIVQRKIEEAKGDNVSIESLISMEEQLKSALSVIRARKTELLMELVKNLQDKVGKLKKILETGDERAVMSPENSSGHSPPETLPLLK

SEQ ID NO: 16264 - protein, 185 aa, Arabidopsis thaliana
MGRRKVEIKRIENKSSRQVTFSKRRKGLIEKARQLSILCESSIAVVAVSGSGKLYDSASGDNMSKIIDRYEIHHADELKALDLAEKIRNYLPHKELLEIVQSVDSLISMEEQLETALSVIRAKKTELMMEDMKSLQEREKLLIEENQILASQVGKKTFLVIEGDRGMSRENGSGNKVPETLSLLK

SEQ ID NO: 16265 - protein, 85 aa, Arabidopsis thaliana
MGRGRVELKRIENKINRQVTFSKRRTGLLKKAQEISVLCDAEVSLIVFSHKGKLFEYSSESCIPIILIKFRKKLFIFSHLIMVYS

SEQ ID NO: 16266 - protein, 136 aa, Arabidopsis thaliana
MGRRKVEIKRIENKSSRQVTFCKRRNGLMEKARQLSILCESSVALIIISATGRLYSFSSGDSMAKILSRYELEQADDLKTLDLEEKTLNYLSHKELLETIQCKIEEAKSDNVSIDCLKSLEEQLKTALSVTRARKN

SEQ ID NO: 16267 - protein, 200 aa, Arabidopsis thaliana
MGRRKVEIKRIENKSSRQVTFCKRRNGLMEKARQLSILCESSVALIIISATGRLYSFSSGDSMAKILSRYELEQADDLKTLDLEEKTLNYLSHKELLETIQCKIEEAKSDNVSIDCLKSLEEQLKTALSVTRARKTELMMELVKTHQEKEKLLREENQSLTNQLIKMGKMKKSVEAEDARAMSPESSSDNKPPETLLLLK

SEQ ID NO: 16268 - protein, 68 aa, Arabidopsis thaliana
MGRGRVQLRRIENKIRRQVTFSKRRTGLVKKAQEISVLCDAEVALIVFSPKGKLFEYSAGSRFESFLS

SEQ ID NO: 16269 - protein, 192 aa, Arabidopsis thaliana
MGRRKIEIKRIENKSSRQVTFSKRRNGLIDKARQLSILCESSVAVVVVSASGKLYDSSSGDEIEALFKPEKPQCFELDLEEKIQNYLPHKELLETVQSKLEEPNVDNVSVDSLISLEEQLETALSVSRARKAELMMEYIESLKEKEKLLREENQVLASQMGKNTLLATDDERGMFPGSSSGNKIPETLPLLN

SEQ ID NO: 16270 - protein, 197 aa, Arabidopsis thaliana
MGRRKIEIKRIENKSSRQVTFSKRRNGLIDKARQLSILCESSVAVVVVSASGKLYDSSSVIVSTGKYKNFTIFLTIPFLHVQDLEEKIQNYLPHKELLETVQSKLEEPNVDNVSVDSLISLEEQLETALSVSRARKAELMMEYIESLKEKEKLLREENQVLASQMGKNTLLATDDERGMFPGSSSGNKIPETLPLLN

SEQ ID NO: 16271 - protein, 231 aa, Arabidopsis thaliana
MGRRKVEIKRIENKSSRQVTFCKRRNGLMEKARQLSILCESSVALIIISATGRLYSFSSGDSMAKILSRYELEQADDLKTLCLNIVERDQHRITLFFTVGIALESPRRGSKLDLEEKTLNYLSHKELLETIQCKIEEAKSDNVSIDCLKSLEEQLKTALSVTRARKTELMMELVKTHQEKEKLLREENQSLTNQLIKMGKMKKSVEAEDARAMSPESSSDNKPPETLLLLK

SEQ ID NO: 16272 - protein, 204 aa, Arabidopsis thaliana
MCRKSEAMGRRRVEIKRIENKSSRQVTFCKRRNGLMEKARQLSILCGSSVALFIVSSTGKLYNSSSGDRVVYVSWKRKNFTIFLSWQDLEDKTQDYLSHKELLEIVQRKIEEAKGDNVSIESLISMEEQLKSALSVIRARKTELLMELVKNLQDKEKLLKEKNKVLASEVGKLKKILETGDERAVMSPENSSGHSPPETLPLLK

SEQ ID NO: 16273 - protein, 217 aa, Arabidopsis thaliana
RRNGLLKKAKELAILCDAEVGVIIFSSTGRLYDFSSSSMKSVIERYSDAKGETSSENDPASEIQFWQKEAAILKRQLHNLQENHRQMMGEELSGLSVEALQNLENQLELSLRGVRMKKDQMLIEEIQVLNREGNLVHQENLDLHKKVNLMHQQNMELHEKVSEVEGVKIANKNSLLTNGLDMRDTSNEHVHLQLSQPQHDHETHSKAIQLNYFSFIA

SEQ ID NO: 16274 - protein, 335 aa, Arabidopsis thaliana
MGRVKLEIKRIENTTNRQVTFSKRRNGLIKKAYELSILCDIDIALIMFSPSDRLSLFSGKTRIEDVFSRFINLPKQERESALYFPDQNRRPDIQNKECLLRILQQLKTENDIALQVTNPAAINSDVEELEHEVCRLQQQLQMAEEELRRYEPDPIRFTTMEEYEVSEKQLLDTLTHVVQRRDHLMSNHLSSYEASTMQPNIGGPFVNDVVEGWLPENGTNQTHLFDASAHSNQLRELSSAMYEPLLQGSSSSSNQNNMSECHVTNHNGEMFPEWAQAYSSSALFASMQQQHEGVGPSIEEMMPAQQSDIPGVTAETQVDHEVSDYETKVPQLSSQ

SEQ ID NO: 16275 - protein, 127 aa, Arabidopsis thaliana
MGRKKVEIKRIENKSSRQVTFSKRRNGLIEKARQLSILCESSIAVLVVSGSGKLYKSASGDNMSKIIDRYEIHHADELEALDLAEKTRNYLPLKELLEIVQRLAQRHFYLPLLLMKNTFFFFSFGEL

SEQ ID NO: 16276 - protein, 223 aa, Arabidopsis thaliana
MGRRKIEIKRIENKSSRQVTFSKRRNGLIDKARQLSILCESSVAVVVVSASGKLYDSSSGDDISKIIDRYEIQHADELRALDLEEKIQNYLPHKELLETVQRLAVRHIFLPSSSDKKNVFFLLSTCEYSKLEEPNVDNVSVDSLISLEEQLETALSVSRARKAELMMEYIESLKEKEKLLREENQVLASQMGKNTLLATDDERGMFPGSSSGNKIPETLPLLN

SEQ ID NO: 16277 - protein, 145 aa, Arabidopsis thaliana
MGRKKVEIKRIENKSSRQVTFSKRRNGLIEKARQLSILCESSIAVLVVSGSGKLYKSASGDNMSKIIDRYEIHHADELEALDLAEKTRNYLPLKELLEIVQRLAQRHFYLPLLLMKNTFFFLFFWRIMNTASLKNQMSIMQVWIL

SEQ ID NO: 16278 - protein, 224 aa, Brassica napus
MARGKIQIKRIENQTNRQVTYSKRRNGLFKKAHELTVLCDARVSIIMFSSSNKLHEFISPNTTTKEIIDLYQTVSDVDVWSAHYERMQETKRKLLETNRNLRTQIKQRLGECLDELDIQELRSLEEEMENTFKLVRERKFKSLGNQIETTKKKNKSQQDIQKNLIHELELRAEDPHYGLVDNGGDYDSVLGYQLRFHQNHHHHYPNHALHAASASDIITFHLLE

SEQ ID NO: 16279 - protein, 252 aa, Brassica napus
MAYQMELGGESSPQRKAGRGKIEIKRIENTTNRQVTFCKRRNGLLKKAYELSVLCDAEVALIVFSSRGRLYEYSNNSVKGTIERYKKAISDNSNTGSVAEINAQYYQQESAKLRQQIISIQNSNRQLMGETIGSMSPKELRNLEGRLDRSVNRIRSKKNELLFAEIDYMQKREVDLHNDNQLLRAKIAENERNNPSMSLMPGGSNYEQIMPPPQTQPQPFDSRNYFQVAALQPNNHHYSSAGREDQTALQLV

SEQ ID NO: 16280 - protein, 249 aa, Brassica napus
MDEGGSSHDAESSKKIGRGKIEIKRIENTTNRQVTFCKRRNGLLKKAYELSVLCDAEVALVIFSTRGLLYEYASNSVKGTIERYKKACSDAVNPPTVTEANTKHYQQEASKLRRQIRDIQNSNRHIVGESLGSLNFKELKNLEGRLEKGISRVRSKKSELLVAEIEYMQKREMELQHVNMYLRAKIEQGARLNPEQHGSGVIQGTAVYESGLSSSHDQSQHYNRNYIPVNLLEPNQQFSGQDQPPLQLV

SEQ ID NO: 16281 - protein, 197 aa, Brassica napus
MGRKKLEIKRIENKSSRQVTFSKRRNGLIEKARQLSVLCDASVALLVVSASGKLYSFSSGDNLVKILDRYGKQHDDDLKALDRQSKALDCGSHHELLELVESKLEESNVDNVSVGSLVQLEEHLENALSVTRARKTELMLKLVENLKEKEKLLEEENHVLASQMEKSNLVRAEADNMDVSPGQISDINLPVTLPLLN

SEQ ID NO: 16282 - protein, 196 aa, Brassica napus
MGRKKLEIKRIENKSSRQVTFSKRRNGLIEKARQLSVLCDASVALLVVSASGKLYNFSAGDNLVKILDRYGKQHADDLKALDLQSKAPKYGSHHELLELVESKLVESNSDVSVDSLVQLEDHLETALSVTRARKTELMLKLVDSLKEKEKLLKEENQGLASQMEKNNLAGAEADKMEMSPGQISDINRPVTLRLLY

SEQ ID NO: 16283 - protein, 196 aa, Brassica napus
MGRKKLEIKRIENKSSRQVTFSKRRNGLIEKARQLSVLCDASVALLVVSASGKLYNFSAGDDLVKIVDRYGKQHADDRKALDLQSEAPKYGSHHELLELVESKLVESNSDVSVDSLVQLENHLETALSVTRARKTELLLKLVDSLKEKEKLLKEENQGLASQMEKNNLAGAEADKMEVSPGQISDINCPVTLPLLY

SEQ ID NO: 16284 - protein, 196 aa, Brassica napus
MGRKKLEIKRIEKNSSRQVTFCKRRNGLIEKARQLSVLCEASVGLLVVSASDKLYSFSSGDRLEKILDRYGKKHADDLNALDLQSKSLNYSSHHELLELVESKLVESIDDVSVDSLVELEDHLETALSVTRARKAELMLKLVESLKEKENLLKEENQVLASQIEKKNLEGAEADNIEMSSGQISDINLPVTLPLLN

SEQ ID NO: 16285 - protein, 197 aa, Brassica napus
MGRKKLEIKRIENKSSRQVTFSKRRSGLIEKARQLSVLCDASVALLVVSSSGKLYSFSAGDNLVRILDRYGKQHADDLKALNLQSKALSYGSHNELLELVDSKLVESNVGGVSVDTLVQLEGVLENALSLTRARKTELMLKLVDSLKEKEKLLKEENQALAGQKEKKNLAGAEADNMEMSPGQISDINLPVTLPLLN

SEQ ID NO: 16286 - protein, 256 aa, Brassica oleracea
MGRGRVQLKRIENKINRQVTFSKRRAGLFKKAHEISVLCDAEVALVVFSHKGKLFEYSTDPCMEKILERYERYSYAERQLIAPESDVNTNWSMEYNRLKAKIELLERNQRHYLGEDLQAMSPKELQNLEQQLDTALKHIRSRKNQLMYESINELQRKEKAIQEQNSMLSKQIKERENVLRAQQEQWDEQNHGHNMPPPPPPQQHQIQHPYMLSHQPSPFLNMGGLYQEEDQMAMRRNDLDLSLEPVYNCNLGSFAA

SEQ ID NO: 16287 - protein, 256 aa, Brassica oleracea
MGRGRVQLKRIENKINRQVTFSKRRAGLFKKAHEISVLCDAEVALVVFSHKGKLFEYSTDSCMEKILERYERYSYAERQLIAPESDVNTNWSMEYNRLKAKIELLERNQRHYLGEDLQAMSPKELQNLEQQLDTALKHIRSRKNQLMYDSVNELQRKEKAIQEQNSMLSKQIKEREKVLMAQQEQWDQQNHGQNMPSPPPPQQHQIQHPYMLSHQPSPFLNMGGLYQEEDPMAMRRNDLDLSLEPVYNCNLGCFAA

SEQ ID NO: 16288 - protein, 232 aa, Brassica oleracea
MARGKIQIKRIENQTNRQVTYSKRRNGLFKKAHELTVLCDARVSIIMFSSSNKLHEFISPNTTTKEIIDLYQTVSDVDVWSAHYERMQETKRKLLETNRKLRTQIKQRLGECLDELDIQELRSLEEEMENTFKLVRERKFKSLGNQIETTKKKNKSQQDIQKNLIHELELRAEDPHYGLVDNGGDYDSVLGYQIEGSRAYALRYHQNHHHHYPNHALHAPSASDIITFHLLE

SEQ ID NO: 16289 - protein, 251 aa, Brassica oleracea
MGRGRVEMKRIENKINRQVTFSKRRAGLLKKAHEISILCDAEVSLIVFSHKGKLFEYSSESCMEKVLEHYERYSYAEKQLKVPDSHVNAQTNWSVEYSRLKAKIELLERNQRHYLGEDLESISIKELQNLEQQLDTSLKHIRSRKNQLMHESLNHLQRKEKEILEENSMLAKQIRERESILRTHQNQSEQQNRSHHVAPQPQPQLNPYMASSPFLNMGGMYQGEYPTAVRRNRLDLTLEPIYNCNLGYFAA

SEQ ID NO: 16290 - protein, 256 aa, Brassica oleracea
MGRGRVQLKRIENKINRQVTFSKRRAGLMKKAHEISVLCDAEVALVVFSHKGKLFEYSTDSCMEKILERYERYSYAERQLIAPESDSNTNWSMEYNRLKAKIELLERNQRHYLGEDLQAMSPKELQNLEQQLDTALKHIRSRKNQLMYDSINELQRKEKAIQEQNSMLSKQIKERENVLRAQQEQWDEQNHGHNMPPPPPPQQHQIQHPYMLSHQPSPFLNMGGLYQEEDQMAMRRNDLDLSLEPVYNCNLGCFAA

SEQ ID NO: 16291 - protein, 241 aa, Brassica oleracea var. botrytis
MGRGRVQLKRIENKINRQVTFSKRRSGLLKKAHEISVLCDAEVALVIFSSKGKLFEYSTDSCMERILERYDRYLYSDKQLVGREISQSENWVLEHAKLKARVEVLEKNKRNFMGEDLDSLSLKELQSLEHQLHAAIKSIRSRKNQAMFESISALQKKDKALQDHNNALLKKIKEREKNTVQQGGQLIQCSNNASILQPQYCLTSSRDGFVGRVGEENGVASLLAEPNSLLPAWMLRPTTKE

SEQ ID NO: 16292 - protein, 242 aa, Brassica oleracea var. botrytis
MGRGRVQLKRIENKINRQVTFSKRRSGLLKKAHEISVLCDAEVALVVFSSKGKLFEYSTDSSMERILERYDRYLYSDKQLVGRDISQSENWVLEHAKLKARVEVLEKNKRNFMGEDLDSLSLKELQSLEHQLDAAIKSIRSRKNQAMFESISALQKKDKALQDHNNTLLKKIKEKEKEKNTGQQEGQLIQCSNNSSVLQPQYCVTSSRDGLVERVGGENGGTSSLIEPNSLLPAWMLRPTTK

SEQ ID NO: 16293 - protein, 243 aa, Brassica oleracea var. botrytis
MGRGRVQLKRIENKINRQVTFSKRRSGLLKKAHEISVLCDAEVALVVFSSKDKLFEYSTDSSMERILERYDRYLYSDKQLVGRDISQSENWVLEHAKLKARVEVLEKNKRNFMGEDLDSLSLKELQSLEHQLDAAIKSIRSRKNQAMFESISALQKKDKALQDHNNTLLKKIKEKEKEKNTGQQEGQLIQCSNNSSVLQPQYCVTSSRDGLVERVGGENGGASSLIGPNSLLPAWMLRPATNE

SEQ ID NO: 16294 - protein, 239 aa, Brassica oleracea var. botrytis
RGRVQLKRIENKINRQVTFSKRRSGLLKKAHEISVLCDAEVALIVFSSKGKLFEYSTDSCMESILERYDRYLYSDKQLVGRDISQIENWVLEHAKLKARVEVLEKNKRNFMGEELESLSLKDLQSLEHQLDAAIKSIRSRKNQAMFESISALQKKDKALQDHNNTLLKKIKEREKKTGHQEGQLNHCSNNSSIVQPQYCLTSSRDGFVGRVGGENGGASSLTEPNSLLPAWMLRPTTNE

SEQ ID NO: 16295 - protein, 224 aa, Brassica oleracea var. botrytis
MARGKIQIKRIENQTNRQVTYSKRRNGLFKKAHELTVLCDARVSIIMFSSSNKLHEFISPNTTTKEILDLYQTVSDVDVWSAHYERMQETKRKLLETNRNLRTQIKQRLGECLDEFDIQELLSLEEEMENTFKLVRERKFKSLGNQIETTKKKNKSQQDIQKNLIHELELRAEDPHYGLVDNGGDYDSVLGYQLRFHQNHHHHYPNHALHEASASDIITFHLLE

SEQ ID NO: 16296 - protein, 252 aa, Brassica oleracea var. botrytis
MGRGRVEMKRIENKINRQVTFSKRRNGLLKKAYELSVLCDAEVALIVFSSRGKLYEFGSVGVERTIERYHRCYNCSVTNNRPEESKQNWCQEVAKLKAKYESLVRTNRHLLGEDIGEMGVKQLQALERQLEAALTATRQRKTQVMMEEMEDLRKKERQLGDINKQLKIKFEAGGHAFKSFQDFWPNSAASMAGDPNNSKFPVQPSHPDSVDCNTEPFLQIGFQQHYYVQGEGSSVPKSNVACETNFVQDWFL

SEQ ID NO: 16297 - protein, 259 aa, Brassica oleracea var. botrytis
MGRGRVEMKRIENKINRQVTFSKRRNGLLKKAYELSVLCDAEVALIVFSSRGKLYEFGSVGVERTIERYHRCYNCSVTNNRPEESKQNWCQEVAKLKAKYESLVRTNRHLLGEDIGEMGVKQLQALERQLEAALTATRQRKTQVMMEEMEDLRKKERQLGDINKQLKIKFEAGGHAFKSFQDFWPNSAASMAGDPNNSKFPVQPSHPDSVDCNTEPFLQIGLVLVYIRFQQHYYVQGEGSSVPKSNVACETNFVQDWFL

SEQ ID NO: 16298 - protein, 224 aa, Brassica oleracea var. botrytis
MARGKIQIKRIENQTTGQVTYSKRRNGLFKKAHELTVLCDARVSIIMFSSSNKLHEFISPNTTTKEILDLYQTVSDVDVWNAHYERMQETKRKLLETNRNLRTQIKQRLGECLDEFDIQELCSLEEEMENTFKLVRERKFKSLGNQIETTKKKTRASKTYKKNLIHELELRAEDPHYGLVDNGGDYDSVLGYQLRFHQNHHHHYPNHALHEASASDIITFHLLE

SEQ ID NO: 16299 - protein, 256 aa, Brassica oleracea var. botrytis
MGRGKVELKRIENKINRQVTFAKRRNGLLKKAYELSVLCDAEIALLIFSNRGKLYEFCSNPSGMAKMVEKYRKHSYATMDPNQSAKDLQERYQDYLNLKSRVEVLQHSQRHLLGEEIAGIGVDELEQLECQVDTSLRQIRSTKARSMLDQLSDLKSKEEMLLETNRDLKRKLEESDAALNQTLWGASSSAEHSQQQQEGMTSYHANPLSQEVGFFRPLQGNVALQMSHYNPGVPNASNSATTSQNVINGFFPGWMV

SEQ ID NO: 16300 - protein, 250 aa, Brassica oleracea var. botrytis
MGRGRVELKRIENKINRQVTFAKRRNGLLKKAYELSVLCDAEVALIIFSNRGKLYEFCSSSNMIKTLERYQKCSYGSIEVNNKPAKELENSYREYLKLKGRYEGLQRQQRNLLGEDLGPLNSKELEQIERQLDGSLKQVRSIKTQYMLDQLSDLQTKEQMLLETNRALAMKLDDMIGVRSHHMGGGGGGWEGNEHNVSYAHHQAQSQGLFQPLECNPTLQMGYDNPVCSEQITATTQAQAQPGYIPDWML

SEQ ID NO: 16301 - protein, 150 aa, Brassica oleracea var. botrytis
MGRGRVEMKRIENKINRQVTFSKRRAGLLKKAHEISILCDAEVSLIVFSHKGKLFEYSSESCMEKVLERYERYSYAEKQLKAPDSHVNAQTNWSMEYSRLKAKIELWERNQRHYLGEDLESISIKELQNLEQQLDTSLKHIRSRKNQLMH

SEQ ID NO: 16302 - protein, 241 aa, Sinapis alba
MGRGRVQLKRIENKINRQVTFSKRRSGLLKKAHEISVLCDAEVALVIFSSKGKLFEYSTDSCMEKILERYDRYLYSDKQLVGRDISQSENWVLEHAKLKARVEVLEKNKRNFMGEDLDSLSLKELQSLEHQLHAAIKSIRSRKNQAMFESISALQKKDKVLQDHNNALLKKIKEREKNTVHQEVQLIQCSNNSSILQPQYCLTSSRDGFVGRVEGENEGASSLAEPNSLLPAWMLRPTTNE

SEQ ID NO: 16303 - protein, 254 aa, Sinapis alba
MGRGRVQLKRIENKINRQVTFSKRRAGLLKKAHEISVLCDAEVALVVFSHKGKLFEYSTDSCMEKILERYERYSYAERQLIAPESDVNTNWSMEYNRLKAKIELLERNQRHYLGEDLQAMSSKELQNLEQQLDTALKHIRSRKNQLMHDSINELQRKEKAIQEQNSMLSKQIKEREKILRAQQEQWDQQNHGHNMPPPPPPQQIQHPYMLSHQPSPFLNMGGLYQEEDPMEMRRNDLDLSLEPVYNCNLGCFAA

SEQ ID NO: 16304 - protein, 254 aa, Sinapis alba
MGRGRVQLKRIENKINRQVTFSKRRAGLMKKAHEISVLCDAEVALVVFSHKGKLFEYSTDSCMEKILERYERYSYAERQLIAPESDSNTNWSMEYNRLKAKIELLERNQRHYLGEDLQAMSPKELQNLEQQLDTALKHIRSRKNQLMYDSINELQRKEKAIQEQNSMLSKQIKEREKVLRAQQEQWDEQNHGHNMPPPPPLQQQIQHPYMLSHQPSPFLNMGGLYQEDQIAMRRNDLDLSLEPVYNCNLGCFAA

SEQ ID NO: 16305 - protein, 213 aa, Sinapis alba
MVRGKTQMKRIENATSRQVTFSKRRNGLLKKAFELSVLCDAEVSLIIFSPKGKLYEFASSNMQDTVDRYLRHTKDRVSSKPVSEENMQHFKHEAANMMKKIEQLEASKRKLLGEGIGSCSIEELQQIEQQLEKSVKCVRARKTQVFKEQIEQLKQKEKALAAENEKLAEKWGSHEIEVWSNKKQESGRGDEESSPSSEVETQLFIGLPCSSRK

SEQ ID NO: 16306 - protein, 254 aa, Sinapis alba
MGRGRVELKRIENKINRQVTFAKRRNGLLKKAYELSVLCDAEVALIIFSNRGKLYEFCSSSSMIRTLERYQKCNYGPPEPNVPSREALAVELSSQQEYLKLKERYDALQRTQRNLLGEDLGPLSTKELELLERQLDSSLKQIRALRTQFMLDQLNDLQSKERMLNETNKTLRLRLADGYQMPLQLNPNQEDHHVDYGRHDQQQQQNSHHAFFQPLECEPILQMGYQGQQDHGMEAGPSENNYMLGWLPYDTNSI

SEQ ID NO: 16307 - protein, 249 aa, Fragaria x ananassa
MAYENKPNTDLDADAQRRLGRGKIEIKRIENTTNRQVTFCKRRNGLLKKAYELSVLCDAEVALIVFSNRGRLYEYSNNSSVRETIERYKKACADTSTNGSASEATTQYYQQEAAKLHNQINALQNINRGYMAEGLSNKNIKELKGMERKLERAITRIRSKKNELLFAEIEYMQKRELDLHNNNQLLRAKIAENERQQQSIIAITGGHGSYEIVQPTQPFHEARNYFQVNALQPNIHQYSCHDQVSLQLV

SEQ ID NO: 16308 - protein, 245 aa, Malus x domestica
MAYESKSLSLDSPQRKLGRGKIEIKRIENTTNRQVTFCKRRNGLLKKAYELSVLCDAEVALIVFSNRGRLYEYANNSVKGTIERYKKASADSSNTGSVSEASTQYYQQEAAKLRARIVKLQNDNRNMMGDALNSMSVKDLKSLENKLEKAISRIRSKKNELLFAEIEYMQKRELDLHNNNQLLRAKIAENERASRTLNVMAGGGTSSYDILQSQPYDSRNYFQVNALQPNHQYNPRHDQISLQLV

SEQ ID NO: 16309 - protein, 215 aa, Malus x domestica
MGRGKVEIKRIENSSNRQVTYSKRRNGIIKKAKEITVLCDAKVSLIIYSSSGKMVEYCSPSTTLTEILDKYHGQSGKKLWDAKHENLSNEVDRVKKDNDSMQVELRHLKGEDITSLNHVELMALEEALENGLTSIRDKQSKFVDMMRDNGKALEDENKRLTYELQKQQEMKIKENVRNMENGYHQRQLGNYNNNQQQIPFAFRVQPIQPNLQERI

SEQ ID NO: 16310 - protein, 215 aa, Malus x domestica
MGRGKVEIKRIENSSNRQVTYSKRRNGIIKKAKEITVLCDAKVSLIIYSSSGKMVEYCSPSTTLTEILDKYHGQSGKKLWDAKHENLSNEVDRVKKDNDSMQVELRHLKGEDITSLNHVELMALEEALENGLTSIRDKQSKFVDMMRDNGKALEDENKRLTYELQKQQEMKIEENVRNMENGYHQRQLGNYNNNQQQIPFAFRVQPIQPNLQERI

SEQ ID NO: 16311 - protein, 235 aa, Malus x domestica
MGRGKVELKRIENKINRQVTFAKRRNGLLKKAYELSVLCDAEVALIVFSTSGKLYEFCSGPSIAKTLERHQRCTYGELGASQSAEDEQSRYQEYLKLKTKVEALQRTQRHLLGEDLVHLGTKELQQLENQLDVSMKKIRSTKTQFMHVQISELQRKEEMLLEANTGLRRKLEEITAGHQRSWNGNHQAAQLEGFPEHLQYNNALQIGTPVVTNDEANVATSSAQNGTGFFPGWML

SEQ ID NO: 16312 - protein, 248 aa, Malus x domestica
MGRGRVELKRIENKINRQVTFAKRRNGLLKKAYELSVLCDAEVALIIFSSRGKLYEFCSSFSMMKTLEKYQSCSYGSLEANLPANETQNSYQDYLMLKARVEVLQQSQRNLLGEDLSHLNTKELEHLEHQLETSLKQIRSRKTQFILDQLSDLQNREQMLVEANKALKRKLEETSVHAPEGMAWEAAGHGPNNIQQTRLPSHSEAFFHPLEGNNSSSQIGYTHMGSDNEMNVGNPGQYVNGYIPGWML

SEQ ID NO: 16313 - protein, 248 aa, Malus x domestica
MGRGRVELKRIENKINRQVTFAKRRNGLLKKAYELSVLCDAEVALIIFSSRGKLYEFCSSFSMMKTLEKYQSCSYGSLEANLPANETQNSYQDYLMLKARVEVLQQSQRNLLGEDLSHLNTKELEHLEHQLETSLKQIRSRKTQFILDQLSDLQNREQMLVEANKALKRKLEETSVQAPEGMAWEAAGHGPNNIQQTRLPSHSEAFFHPLEGNNSSSQIGYTHMGSDNEMNVGNPGQYVNGYIPGWML

SEQ ID NO: 16314 - protein, 239 aa, Malus x domestica
MGRGRVQLKRIENKINRQVTFSKRRTGLLKKAHEISVLCDAQVALIVFSNKGKLFEYATDSCMEQILERYERYSYAERQLVEPDFESQGNWTFEYSRLKAKAEVLQRNHRHYLGEDLDSLTLKEIQNLEQQLDTALKQIRLRKNQLMNESISELQRKRKAIQEENNLLAKKIKEKEKAAAQPQVQNWEQQNHGLDLLPQPLPCLNNGGTQQDEFLQVRRNQLDLTLEPLYECHLGCFAA

SEQ ID NO: 16315 - protein, 243 aa, Malus x domestica
MGRGRVELKRIENKINRQVTFSKRRNGLLKKAYELSVLCDAEVGLIIFSSRGKLYEFASAGMSKTLERYQRCSFTPPENSIERETQSWYQEVTKLKAKYESLQRTQRHLLGEDLGPLSVKELQNLEKQLEGALAQTRQRKTQLMIEQMEDLRKKERHLGDLNKQLRVKLEAEGQNLNVIQNMWSSDAAAGSSNFSLHSSQTNPMDCTPEPVIQMGYHQYHPAEGSSIPRSLTGETNFIQGWVL

SEQ ID NO: 16316 - protein, 255 aa, Malus x domestica
MGRGRVQLKRIENKINRQVTFSKRRSGLMKKAHEISVLCDAEVALIIFSTKGKLFEYSNDSCMERILERYERYSYTERQLLANDNESTGSWTLEHAKLKARVEVLQRNQRHYMGEDLQSLSLKELQNLEQQLDSALKHIRSRKNQVMYESISELQKKDKALQEQNNLLAKKVKEKENAVAQQAQLEHVQEQRLNSSSSLLPRALQSLNFGSGSNYQAIRSSEGIPGDNQQYGDETPTPHRPNMLLPAWIVRHLNE

SEQ ID NO: 16317 - protein, 232 aa, Malus x domestica
MGRGKIEIKLIENQTNRQVTYSKRRNGIFKKAQELTVLCDAKVSLIMLSNTNKMHEYISPTTTTKSMYDDYQKTMGIDLWRTHEESMKDTLWKLKEINNKLRREIRQRLGHDLNGLSFDELASLDDEMQSSLDAIRQRKYHVIKTQTETTKKKVKNLEQRRGNMLHGYFDQEAAGEDPQYGYEDNEGDYESALALSNGANNLYTFHLHHRNLHHGGSSLGSSITHLHDLRLA

SEQ ID NO: 16318 - protein, 246 aa, Malus x domestica
MGRGRVELKRIENKINRQVTFAKRRNGLLKKAYELSVLCDAEVALIIFSNRGKLYEFCSSSSILKTLDRYQKCSYGAVDQVNRPAKELESSYREYMKLKGRYESLQRTQRNLLGEDLGPLNTKELEQLERQLEGSLKQVRSTKTQYMLDQLSDLQNKEQLLIEANRDLTMKLDEISSRNQLRQSWEGGDQGMAYATQHHHAQSQGFFQPLDCNPTLQMGYSAVGSEQMSATTNAQQVNCFIPGWML

SEQ ID NO: 16319 - protein, 237 aa, Malus x domestica
MGRGKIEIKLIENQTNRQVTYSKRRNGIFKKAQELTVLCDAKVSLIMLSNTSKMHEYISPTTTTKSMYDDYQKTMGIDLWRTHYESMKDTLWKLKEINNKLRREIRQRLGHDLNGLSYDDLRSLEDKMQSSLDAIRERKYHVIKTQTETTKKKVKNLEERRGNMLHGYEAASENPQYCYVDNEGDYESALVLANGANNLYTFQLHRNSDQLHHPNLHHHRGSSLGSSITHLHDLRLA

SEQ ID NO: 16320 - protein, 245 aa, Malus x domestica
GKVELKRIENKSNRQVTFSKRRNGLLKKAFELSVLCDAEVALIIFSGRGKLYEFSSSLSMMKTLERYQRCSYSSLDANRPANETQNSYQEYLQLETRVEALQQSQRNLLGEDLATLNTKKLEELEHQLETSLNKIRSTKTQFMLDQLSDLQNREQMLVEANKALRRKLEETSVQAPQFMAWEAAGDGHNNIQQTWLPSNSEAFFHPFGGNNSTSQIGYAHLGSHNGMDVGNPGQHVNGYIPGWML

SEQ ID NO: 16321 - protein, 246 aa, Malus x domestica
MGRGRVELKRIENKINRQVTFAKRRNGLLKKAYELSVLCDAEVALIIFSNRGKLYEFCSSSSMLKTLDRYQKCSYGAVDQVNRPAKELESSYREYMKLKGRYESLQRTQRNLLGEDLGPLNTKELEQLERQLEGSLKQVRSTKTQYMLDQLSDLQNKEQLLIEANRDLTMKLDEISSRNQLRQSWEGGDQGMAYATQHHHAQSQGFFQPLDCNPTLQMGYSAVGSEQMSATTNAQQVNCFIPGWML

SEQ ID NO: 16322 - protein, 242 aa, Malus x domestica
RVELKRIENKINRQVTFAKRRNGLLKKAYELSVLCDAEVALIVFSNRGKLYEFCSSPSILQTVDRYQKCSYGAVDQVNIPAKELESSYREYMKLKGRCESLQRTQRNLLGEELGPLNTKELEQLERQLEASLKQVRSTKTQYMLDQLSALQNKEQLLIEANRDLTMKLDEIGSRNQLRQSWEGGDQGMAYGTQHHHAQSQGFFQPLDCNPTLQIGYPAEGSEQMGATTHAQQVNCFIPGWML

SEQ ID NO: 16323 - protein, 242 aa, Malus x domestica
MEFANQAPESSTQKKLGRGKIEIKRIENTTNRQVTFCKRRNGLLKKAYELSVLCDAEVALIVFSTRGRLYEYANNSVRATIDRYKKACADSTDGGSVSEANTQFYQQEASKLRRQIREIQNSNRHILGESLSTLKVKELKNLEGRLEKGISRIRSKKNEILFSEIEFMQKRETELQHHNNFLRAKIAESEREQQQQQTHMIPGTSYDPSMPSNSYDRNFFPVILESNNNHYPRQGQTALQLV

SEQ ID NO: 16324 - protein, 207 aa, Malus x domestica
MGRGKIEIKRIENTTNRQVTFCKRRNGLLKKAYELSILCDAEVALIVFSTRGRLYEYSNNNSIRNTIERYKKACSDSTGSSSVTEINAQNSNRHLMGDALSTLTVKELKQVENRLERGITRIRSKKHELLLAEIEYFQKKEIELENENVYFRTKVSEVERLQQANMVSGSEMNAIQALASRHFFSQNMIEGGEATFPQQDKKNLHLG

SEQ ID NO: 16325 - protein, 190 aa, Malus x domestica
NGIIKKAKEITVLCDAKVSLIIYSSSGKMVEYCSPSTTLTEILDKYHGQSGKKLWDAKHENLSNEVDRVKKDNDSMQVELRHLKGEDITSLNHVELMALEEALENGLTSIRDKQSKFVDMMRDNGKALEDENKRLTYELQKQQEMKIEENVRNMENGYHQRQLGNYNNNQQQIPFAFRVQPIQPNLQERI

SEQ ID NO: 16326 - protein, 213 aa, Silene latifolia
MGRGKIEIKRIENSTNRQVTYSKRRNGIIKKAGEITVLCEAKVSLIIFSNNGKMHAYHSPETAVEDILDQYHKISGKRLWDAKHENLSNEIDRVKKENDNMQIELRHLKGEDITSLPYPDLMRLEDALENGLVGVREKQMEMYKLHKKNHKMLEDENNQLAYMLHKQEMDGNMREMEAGVCSNPSDRDYHYQNPIPPYGFRVQPMQPNLQDRM

SEQ ID NO: 16327 - protein, 227 aa, Silene latifolia
MARRKIQIKKIENLTNRQVTYSKRRNGLFKKANELTVLCDATVSIIMLSSNLKLHEFLSPGSNLTTKDVYDRYQKALGVDIWVTHEKRMQDDLQKLNELNRKLQTDIRQRMGDCLEDLSFEELCRLGQEMQEAVTLIRERKYKKIDNQIDTTKKKVRNGQEVHKGLLQEFEIPKDEPPYGLVDNGDYSNVMGYNDASRVLALRLQPCQPNLHAGAGSGSCVTTYALL

SEQ ID NO: 16328 - protein, 208 aa, Glycine max
MGRGKIEIKRIENSSNRQVTYSKRKNGILKKAKEITVLCDAQVSLIIFAASGKMHDYISPSTTLIDILERYHKTSGKRLWDAKHENLNGEIERLKKENDSMQIELRHLKGDDINSLNYKELMALEDALETGLVSVREKQMDVYRMLRRNDKILEEENRELNFLWQQRLAEEGAREVDNGFDQSVRDYNSHMPFAFRVQPMQPNLQERI

SEQ ID NO: 16329 - protein, 250 aa, Glycine max
  unsure (1)..(250): unsure at all Xaa locations
MGRGKIEIKRIENSSNRQVTYSKRKNGILKKAKEISVLCDAQVSLIIFGVSGKMHEYISPYTTLIDVLDRYQRASGKTLWDAKHENLSNEIDRLKKENDSMQIELRHLKGEDITSLNYKELMALEDALENGLSGVREKKMEVHRMFKRNGKILEEQNKELSFLLQQHLAVEGIGNMXXNNGFDEIKRGFNSHMQRAASLKQPNLKELLNSYFLKLGSVRSSKTCYTIIEFDLITKLSILYNVYAAYHYDY

SEQ ID NO: 16330 - protein, 208 aa, Glycine max
MGRGKIEIKRIENSSNRQVTYSKRKNGILKKAKEITVLCDAQVSLIIFAASGKMHDYISPSTTLIDILERYQKTSGKRIWDAKHENLNGEIERLKKENDSMQIELRHLKGEDINSLNYKELMALEDALETGLVSVREKQMDVYRMFRRNDKILEEENRELTFLWQQRLAVEGAREVDNGFDQSVRDYNSHMPFAFRVQPMQPNLQERI

SEQ ID NO: 16331 - protein, 244 aa, Glycine max
MGRGRVQLKRIENKINRQVTFSKRRSGLLKKAHEISVLCDAEVALIVFSTKGKLFEYSSDPCMERILERYERYSYAERQLVASDQPQTENWTLEHAKLKARLEVLQKNQRNFMGQDLEGLSIKELQNLEHQLDSALKHIRSRKNQIMHESISELHKKDKVLQEQNNTLAKKIKEKEKALAQHAQMEQRGDEMDLTSSALVPHPLETSNIRESSQIRGEGDNEGTPTPTRANAILPSWMLRPSNE

SEQ ID NO: 16332 - protein, 244 aa, Glycine max
MGRGRVQLKRIENKINRQVTFSKRRSGLLKKAHEISVHCDAEVALIVFSTKGKLFEYSSDPCMEKILERYERYSYAERQLVASDQPLTENWTLEHAKLKARLEVLQKNQRNFMGQDLEGLSIKELQNLEHQLESALKHIRSRKNQLMYESISELHKKDKALQEQNNTLAKKIKEKEKALAQQAQLERLGDEVDLTSSALVPQPLVTSNIRTSSQIRGEGDNEGTPTPTQANAILPPWMLRPTNE

SEQ ID NO: 16333 - protein, 247 aa, Glycine max
  unsure (1)..(247): unsure at all Xaa locations
MGRGKIVIRRIDNSTSRQVTFSKRRNGLLKKAKELAILCDAEVGVMIFSSTGKLYDFASSSMKSVMDRYSKSKEEPCQLGSSASEIKFWQREAAMLRQQLHNLQESHRRKMMGEELSGLTVKELQNLENQLEISLHGVRMKKDQLLMGEIQELNRKGNLIHQENVELYKKVYGTQDDNETNRDSVLTNGLGIGEDLQXACESPAKPATATATTLALIHIQDVCVYNCYQEKWTQIXTSMSSYKCCGI

SEQ ID NO: 16334 - protein, 246 aa, Glycine max
  unsure (1)..(246): unsure at all Xaa locations
MGRGRVQLKQIENKISRQVTFSKRRTGLRKKANEISVLCDAQVALIVFNAKGKLFEYSSESSMENVLERYERHTHIGKLVGDGDESQGNWSLQCFKLTGKVEVLERNLRNFVGEDLDPLNLRELQSLEHQLETAIKRIRTRKNQVMNESISDLQKKARQLQEQNGILTKKIKEKGKEVVERPHCGPETLGXNLSXPELQRQQRVXXPSLTLCETLQAGHLEEVVEARTVPTASTHIPPWMLHPFTR

SEQ ID NO: 16335 - protein, 227 aa, Glycine max
MARGKIQIKRIENNTNRQVTYSKRRNGLFKKANELTVLCDAKVSIIMFSSTGKLHQYISPSTSTKQFFDQYQMTLGVDLWNSHYENMQENLKKLKEVNRNLRKEIRQRMGDCLNELGMEDLKLLEEEMDKAAKVVRERKYKVITNQIDTQRKKFNNEKEVHNRLLHDLDAKAEDPRFALIDNGGEYESVIGFSNLGPRMFALSIQPSHPSAHSGGAGSDLTTYPLLF

SEQ ID NO: 16336 - protein, 274 aa, Glycine max
VAKKERKKISRAETSIFNCILPLFPHQLIQVANMAFPDPSMSASPQRKMGRGKIEIKRIENTTNRQVTFCKRRNGLLKKAYELSVLCDAEVALIVFSSRGRLYEYANNSVKATIERYKKASSDSSGAGSASEANAQFYQQEADKLRQQISNLQNNNRQMMGDSLGSLTAKDLKNLETKLEKGISRIRSKKNELLFAEIEYMQKREIDLHNNNQLLRAKIAESERNHHNMAVLPGGSNYDSMPQQQFDSRGYFQVTGLQPNNQYARQDQMSLQLV

SEQ ID NO: 16337 - protein, 223 aa, Glycine max
  unsure (1)..(223): unsure at all Xaa locations
MGRGKIEIKRIENTTNRQVTFCKRRNGLLKKAYELSVLCDAEVSLIVFSSRGRLYEYSNNNIRSTIERYKKACSDHSSASTTTEINAQYYQQESAKLRQQIQMLQNSNRHLMGDALSTLTVKELKQLENRLERGITRIRSKKHEMLLAEIEYFQKREIELENENLCLRTKITDVERIQQVNMVSGPELNVIQALASRNFFNPNMLDGGTVYPXXTDKKILHLG

SEQ ID NO: 16338 - protein, 222 aa, Glycine max
MGRGKIEIKRIENTTNRQVTFCKRRNGLLKKAYELSVLCDAEVALIVFSSRGRLYEYSNNNIRSTIERYKKACSDHSSASTTTEINAQYYQQESAKLRQQIQMLQNSNRHLMGDALSTLTVKELKQLENRLERGITRIRSKKHEMLLAEIEYFQKREIELENENLCLRTKITDVERIQQVNMVSGPELNAIQALASRSFFNPNMLEGGTVYPHSDKKILHLG

SEQ ID NO: 16339 - protein, 208 aa, Glycine max
  unsure (1)..(208): unsure at all Xaa locations
MGRGKIEIKRIENSSNRQVTYSKRKNGILKKAKEISVLCDAQVSLIIFGVSGKMHEYISPSTTLIDVLDRYQRASGKTLWDAKHENLSNEIDRIKKENDSMQIELRHLKGEDITSLNYKELMALEDALENGLSGVREKKMEVHRMFKRNDKILEEQNKELNFLLQQHLALEGVGNMXMDNGFNEIKRVFNSHMQRAASLKQPNLKERI

SEQ ID NO: 16340 - protein, 228 aa, Glycine max
  unsure (1)..(228): unsure at all Xaa locations
MARGKIQIKRIENTTNRQVTYSKRRNGLFKKANELTVLCDAKVSIIMFSSTGKLHEYISPSTSTKQFFDQYQMTLGVDLWNSHYENMQENLKKLKDVNRNLRKEIRQRMGDCLNDLGMEDLKLLEEEMDKAAKVVRERKYKVITNQIDTQRKKFNNEKEVHNRLLRDLDARAEDPRFALIDNGGEYESVIGFSNLGPRMFALSLQPSHPSAQSGXXAGSDLTTYPLLF

SEQ ID NO: 16341 - protein, 240 aa, Glycine max
  unsure (1)..(240): unsure at all Xaa locations
MGRGRVDLKRIENKINRQVTFSKRRSGLLKKAREISVLCDADVALIVFSTKGKLFDYSNEPCMKRILERYERYSYAERQLAGDDQAPNENWVIEHEKLKARVEVLQRNQRNFMGEDLDSLNLRGLQSLEQQLDSALKLIRSRKNQAMNESISALQKKDKSLREHNNLLSKKIKDKEKELAPQEQDGLQNNMDVTSVLVTQPXXESLTIGGFPEAKCNEETPTSSRPKTILPPWMPLPTNE

SEQ ID NO: 16342 - protein, 239 aa, Glycine max
MGRGRVDLKRIENKINRQVTFSKRRSGLLKKAREISVLCDADVALIVFSTKGKLLDYSNQPCTERILERYERYSYAERQLVGDDQPPNENWVIEHEKLKARVEVLQRNQRNFMGEDLDSLNLRGLQSLEQQLDSALKHIRSRKNQAMNESISELQKKDRTLREHNNLLSKKIKEKEKELTPQEQEGLQNNMDVSSVLVTQPLESLTIGGSPEVKSNEETPTSCRPKTILPPLMPLPTNE

SEQ ID NO: 16343 - protein, 214 aa, Glycine max
  unsure (1)..(214): unsure at all Xaa locations
MVRGKTQLRRIENATSRQVTFSKRRNGLLKKAFELSVLCDAEVALIIFSPRGKLYEFASSSMQDTIERYRRHNRSAQTVNRSDEQNMQHLKQETANLMKKIELLEASKRKLLGEGLGSCSLEELQQIEQQLERSVSSVRARKNQVYKEQIDQLKEKERALYAENARLCEQYGGIQPQXSNKGSERNXXPYAESSPSSEVETELFIGLLRSSYXT

SEQ ID NO: 16344 - protein, 214 aa, Glycine max; identical to SEQ ID NO: 16343
  unsure (1)..(214): unsure at all Xaa locations

SEQ ID NO: 16345 - protein, 214 aa, Glycine max; identical to SEQ ID NO: 16343
  unsure (1)..(214): unsure at all Xaa locations

SEQ ID NO: 16346 - protein, 221 aa, Glycine max
  unsure (1)..(221): unsure at all Xaa locations
MVRGKTQMRRIENATSRQVTFSKRRNGLLKKAFELSVLCDAEVALIIFSPRGKLYEFASSSMQDTIERYRRHNRSAQTVNRSDEQNMQHLKQETANLMKKIELLEASKRKLLGEGLGSCSLEELQQIEQQLERSVSNGRARKNQVYKGQIDQLKEKERALYAENARLCEQYGIQPQPATKDPKEIQPYAESSPSSEVETELFIGLPRSIXLKIIXSLPSMK

SEQ ID NO: 16347 - protein, 157 aa, Glycine max
  unsure (1)..(157): unsure at all Xaa locations
MVRGKTQMKRIENETSRQVTFSKRRNGLLKKAFELSVLCDAEVALIIFSTRGRLYEFSSSRCSSINKTVERYQRKIEDLGVSNKGNENTQHLKEVDMSMAKKIEHLEDSRRKLLGDELDKCSIDELQQLENQLERSLDKIRATXNQLFRKRIEKLKX

SEQ ID NO: 16348 - protein, 293 aa, Glycine max
  unsure (1)..(293): unsure at all Xaa locations
MYLFLNPPVTFFCFRVRFLFLGLALLRIASYVGELSTKKMGRGRVQLKRIENKTSQQVTFFKRRSGLLKKASEISVLCDAQVALIIFSTKGKLFEYSSERSMEDLLERYERCSHXQHLLXANNVESPGFWSFEHIKLTAKVEVLERNIMNFFGNDLDPLSLKELHSLEQQIETSLKRIRTRKNQVMNQSVSDLHKKARTLQVQNRWLGKXXKEKAKTVTEGPHNGPETLGFDSSTLNLSSPQLPPPPSPQRLVPSLTLSETMQGSSWKKRVKAQTVPSGNSLIPPWMLRCMSD

SEQ ID NO: 16349 - protein, 289 aa, Glycine max
  unsure (1)..(289): unsure at all Xaa locations
MYLFLNPPVTLFSYFYLCCFHRIASYVGELSTKKMGRGRVQLKRIENKTSQQVTFFKRRSGLLKKASEISVLCDAQVALIIFSTKGKLFEYSSERSMEDLLERYERCSHXQHLLXANNVESPGFWSFEHIKLTAKVEVLERNIMNFFGNDLDPLSLKELHSLEQQIETSLKRIRTRKNQVMNQSVSDLHKKARTLQVQNRWLGKXXKEKAKTVTEGPHNGPETLGFDSSTLNLSSPQLPPPPSPQRLVPSLTLSETMQGGTPVEETGEAQTVPSGNSLIPPWMLRCMSD

SEQ ID NO: 16350 - protein, 224 aa, Glycine max
MVRGKTQMKRIENETSRQVTFSKRRNGLLKKAFELSVLCDAEVALIIFSTRGRLYEFSSSSSINKTVERYQRKIEDLGVSNKGNENTQHLKEVDMSMAKKIEHLEDSRRKLLGDELDKCSIDELQQLENQLERSLDKIRATKNQLFRKRIEKLKEEEKCLLEVNKRLREQYRIERQRCLSDQDVEFATKKEGEEVETELFIGRPERRMPLKLKPTTYSAHAYIA

SEQ ID NO: 16351 - protein, 249 aa, Glycine max
MGRGRVELKRIENKINRQVTFAKRRNGLLKKAYELSVLCDAEVALIIFSTRGKLYEFCSTNSMLKTLERYQKCSYGAVEVSKPGKELEQSSYREYLKLKARFESLQRTQRNLLGEDLGPLNTKDLEQLERQLDSSLKQVRSTKTQFMLDQLADLQNKEHMLVEANRSLTMKLEEINSRNQYRQTWEAGEQSMSYGTQNAHSQGFFQPLECNPTLQIGSDYRYNPEASEQQLAATTQAQQVNGFIPGWML

SEQ ID NO: 16352 - protein, 252 aa, Glycine max
  unsure (1)..(252): unsure at all Xaa locations
MFPHKVASMAFPNPSMSVSPQKKMGRGKIEIKRIENTTXNRQVTFCKRRNGLLKKAYELSVLCDAEVALIVFSSRGRLYEYANNSVKATIERYKKACSDSSGAGSASEANAQFYQQEADKLRAQISSLQNNNRQMMGESLGPLTAKELKNLETKLEKGISRIRSKKNELLFAEIEYMQKREIDLHNNNQLLRAKIAEGERNHHNLAVLPGGSNYDSLQTSQQQFDSRGSFQVTGLQPNNQYARQDQMSLQLV

SEQ ID NO: 16353 - protein, 219 aa, Glycine max
MVRGKTQMKRIENATSRQVTFSKRRNGLLKKAFELSVLCDAEVALIIFSPRGKLYEFASSSMQESIERYRRHTKHVNPTTFRSVEQNMQHLKQEAENMMKKIDLLEAAKRKFLGEGLGACSIEELQRIEQQLERSLSNVRARKVFKEQIEQLKEKEKALLDENAKLTENARLSETSTASNKESECESKCNAESSSSSDVETELFIGLPDTRARHISHHV

SEQ ID NO: 16354 - protein, 239 aa, Glycine max
  unsure (1)..(239): unsure at all Xaa locations
MGRGKIVIRRIDNSTSRQVTFSKRRNGLVKKARELSILCDAEVGLIVFSSTGKLYDYASTSMKSVIERYNKVKEDHQQLINPASEVKLWQREVASLRQQVQYMQECHRQMMGQELSGLGIEELGNLEKRLEMSLKGVRMKKDQILIDEVKELHQKGSLAHQENVELNRKINLIRKENEEXYKRLLKLSVEXGVAASNPPFTINYGCNMLAPISLQLSLPXSQRSKPSAKAMKLGYSLKL

SEQ ID NO: 16355 - protein, 243 aa, Glycine max
  unsure (1)..(243): unsure at all Xaa locations
MGRGKIVIRRIDNSTSRQVTFSKRRNGLLKKAKELAILCDAEVGVMIFSSTGKLYDFASSSMKSVMDRYSKSKEEPCQLGSSASEIKFWQREAAMLRQQLHILQESHRRKMMGEELSGLTVKELQNLENMLEFNLQGFRIIKDQLLMGEIQELNRKGNLIHQENVELYKKVYGTQDDNETNRDSVLTNGLGIGEDLQXACESPAKPATATRIAIALIHLQDVCFTXCYQEKWTQILSSYKCGI

SEQ ID NO: 16356 - protein, 263 aa, Glycine max
  unsure (1)..(263): unsure at all Xaa locations
MGRGRVELKRIENKINRQVTFSKRRSGLLKKAREISVLCDADVALIVFSTKGKLLDYSNQPCTERILEPSERDSYAGRELVGDDQPPNENWGIEHXKAQARVEVLQXRNQRNLMGEDLDRLNLTGLQRWEHQLDSALKHIRSRKNQAMNESISELQKKDRTLREHNSLLSKKIKEKEKELTPQEQEGLQNNMDVSSVPGVPDYWVSIFLXCITEMLQTLFLRVCGVYSXIVTVYVHMHDFILTFHLVLLCVYTTSSWMHETNE

SEQ ID NO: 16357 - protein, 195 aa, Glycine max
  unsure (1)..(195): unsure at all Xaa locations
MGRGRVQLKRIENKINRQVTFSKRRAGLLKKAHEISVLCDAEVALIVFSHKGKLFEYATDSCMEKILERYERYAYAERQLVANDSESQGNWTIEYTRLKAKIDLLQRNHRHYMGEDLGSMSLKELQSLEQQLDTALKQIRTRRNQLMYESISELEKKXYLLKSXHNFMQLGLXXMVXTVHRNKFQXPXLDYACPX

SEQ ID NO: 16358 - protein, 239 aa, Glycine max
  unsure (1)..(239): unsure at all Xaa locations
MGRGKIPIRRIENSTNRQVTFCKRRNGLLKKTRELSILCDAEVGVIVFSSTGKLYEYSNTSMETIIERFNKQNNNHHRLMDATSAIKXXEAASLRQQLQHLQENHRQLMGEELSGLGINQLKHLENQLQMSLNNVRNKKDHIFSDEIKELQQKGSLIRRQNEELHKKIDLIHNENAELKKVIEARHKEEERAALKPPCAIKNRYDTLDPNSLQQRQSQPQPSEPSAEVMIMGYSLKLKM

SEQ ID NO: 16359 - protein, 241 aa, Glycine max
MGRGRVQLKRIENKINRQVTFSKRRGGLLKKAHEISVLCDAEVALIIFSHKGKLFEYATDSCMEKILERHERYAYAERQLVANDSETQENWTIEYTRLKAKIDLLQRNHRHYMGEDLASMSLKELQSLEQQLVTGIKNIRTRRNDLMSESISELQKKEKRIQEENNTLAKKIKEKEQAVAQQAAQWEQPNYRVDTSFMPQQQPPSLNICGNNYCQEAAPELGRNGLDLTLEPLYSCNLGCF

SEQ ID NO: 16360 - protein, 233 aa, Glycine max
MGRGKIEIKLIENPTNRQVTYSKRRNGIFKKAHELSVLCDAKVSLIMFSKNNKMHEYISPGLTTKRIIDQYQKTLGDIDLWRSHYEKMLENLKKLIDINNKLRRQIRHRIGEGLDMDDMSFQQLRTLEEDLVSSIGKIRERKFHVIKTRTDTCRKKVKSLEQMNRDLLFELEKCAIHPQFILHDEGDEESAVALANGASTLYAFCHQHHSHLNLPSHHSHGEEPFKTDDLRLA

SEQ ID NO: 16361 - protein, 247 aa, Glycine max
MGRGRVELKRIENKINRQVTFAKRRNGLLKKAYELSVLCDAEVALIIFSNRGKLYEFCSSSSMLKTLERYQKCSYGAVEVTKPAKELESSYREYLKLKARFESLQRTQRNLLGEDLGPLNIKELEHLERQLDSSLKQVRSTKTQFMLDQLSDLQTKEQMLVEANRSLTVKLEEINSRNHYRQSWEAGDQSMPYGGGGPETQGFFQPLECNPTLHIGPDYRYNAVASDQITATTQPQQVSGFIPGWML

SEQ ID NO: 16362 - protein, 243 aa, Glycine max
MGRGKIEIKLIENPTNRQVTYSKRRNGIFKKAHELSVLCDAKVSLIMFSKNNKMHEYISPGLTTKKIIDQYQKTLGDIDLWHSHYEKMLENLKKLKDINNKLRRQIRHRIGEGLDMDDMSFQQLRTLEEDMVSSIGKIRERKFHVIKTRTDTCRKKVKSLKQMNGNLLLELKEKCVIHPQFLLHDEGDEESAAAAAAAAVALANGASTLYAFCHQHHSHLNLFSHHSNGEEQPFKTDHDLRLA

SEQ ID NO: 16363 - protein, 247 aa, Glycine max
  unsure (1)..(247): unsure at all Xaa locations
MGRGRVELKRIENKINRQVTFAKRRNGLLKKAYELSVLCDAEVALIIFSTRGKLYEFCSTNSMLKTLERYQKCSYGAVEVSKPGKELESSYREYLKLKARFESLQRTQRNLLGEDLGPLNTKDLEQLERQLDSSLKQVRSTKTQFMLDQLADLQNKEHMLVEANRSLTMKLEEINSRNQYRQTWEAGEQSMSYGTQNAHSQGFFQPLECNPTLQIGXLTTGTTLKPQSSSXPTQAQQVNGFIPGWML

SEQ ID NO: 16364 - protein, 247 aa, Glycine max
  unsure (1)..(247): unsure at all Xaa locations
MGRGRVELKRIENKINRQVTFAKRRNGLLKKAYELSVLCDAEVALIIFSTRGKLYEFCSTNSMLKTLERYQKCSYGAVEVSKPGKELESSYREYLKLKARFESLQRTQRNLLGEDLGPLNTKDLEQLERQLDSSLKQVRSTKTQFMLDQLADLQNKEHMLVEANRSLTMKLEEINSRNQYRQTWEAGEQSMPYGTQNAHSQGFFQPLECTPTLQIGXLTTGTSLKPQSSSXPTQAQQVNGFIPGWML

SEQ ID NO: 16365 - protein, 247 aa, Glycine max
  unsure (1)..(247): unsure at all Xaa locations
MGRGKVELKRIENKINRQVTFAKRRNGLLKKAYELSVLCDAEVALIIFSNRGKLYEFCSGHSTAKTLERYHRCSYGALEVQHQPEIETQRRYQEYLKLKSRVEALQQTQRNLLGEELEHLDVNDLEQLERQLDSSLKQIRSNKTQQMLDQLSDLHRKEEMLLETNNILRNKLEEINVALQPTWEAREQNAPYNCHPPQXXEGYYETATAHCSSTLRIGYDSSGLNEAGGAAGASAQNASEFMHGWMN

SEQ ID NO: 16366 - protein, 241 aa, Glycine max
MGRGKVQLKRIENKINRQVTFSKRRSGLLKKAHEISVLCDAEVALIVFSHKGKLFEYATDSCMEKILERHERYAYAERQLVANDSETQGNWTIEYTRLKAKIDLLQRNHRHYMGEDLASMSLKELQSLEQQLDTAIKNIRTRRNDLMYASISELQKKEKMIQEQNNILAKKIKEKEQAVAQQAAQWEQPNYRVDTSFMPQQQPPSLNIGGNNYNQEAAPELGRNGLDLTLEPLYSCHLGCF

SEQ ID NO: 16367 - protein, 256 aa, Glycine max
PGRPTRPPTRPYGCEKTTEGEAQEGSSQKKMGRGKIEIKRIENTTNRQVTFCKRRNGLLKKAYELSVLCDAEVALVVFSTRGRLYEYANNSVRATIERYKKANAAASNAESVSEANTQFYQQESSKLRRQIRDIQNLNRHILGEALGSLSLKELKNLEGRLEKGLSRVRSRKHETLFADVEFMQKREIELQNHNNYLRAKIAEHERAQQQQSNMMSGTLCESLPSQSYDRNFFPVIIASDDQQQYSSQDHTALQLV

SEQ ID NO: 16368 - protein, 250 aa, Glycine max
  unsure (1)..(250): unsure at all Xaa locations
MGRGRXVELKRIENKINRQETFEKRRNGLLKKAYELSVLCDAEVSLIIFSTRGNLYEFCSTNSMLKTLERYQKCSYGAVEVSKPGKELEQSSYREYLKLKARFESLQRTQRNLLGEDLGPLNTKDLEQLERQLDSSLKQVRSTKTQFMLDQLADLQNKEHMLVEANRSLTMKLEEINSRNQYRQTWEAGEQSMSYGTQNAHSQGFFQPLECNPTLQIGSDYRYNPEASEQQLAATTQAQQVNGFIPGWML

SEQ ID NO: 16369 - protein, 244 aa, Glycine max
  unsure (1)..(244): unsure at all Xaa locations
MEDPNQAPEGSSQKKMGRGKIEIKRIENTTNRQVTFCKRRNGLLKKAYELSVLCDAEVALVVFSTRGRLYEYANNSVRATIERYKKANAAASNAESVSEANTQFYQQESSKLRRQIRDIQNLNRHILGEALGSLSLKELKNLEGRLEKGLSRVRSRKHETLFADVEFMQKREIELQNHNNYLRAKIAEHERAQQQQSNMNMSGTLCXXSLPSQSYDRNFFPVNLIASDDQQQYSRQDHTALQLV

SEQ ID NO: 16370 - protein, 244 aa, Glycine max
MGRGKVELKRIENKINRQVTFAKRRNGLLKKAYELSVLCDAEVALIIFSNRGKLYEFCSGHSMAKTLERYHRCSYGALEVQHQPEIETQRRYQEYLKLKSRVEALQQTQRNLLGEELEHLDVKDLEQLERQLDSSLKQIRSNKTQQMLDQLADLHRKEEMLLETNNILRNKLEEINVALQPTWETREQNAPYNYHPSQSEGYYETAHCNSTLRIGYDSSGLNEAGGAAGTSAQNASEFMNGWMN

SEQ ID NO: 16371 - protein, 244 aa, Glycine max
MGRGRVELKRIENKINRQVTFSKRRNGLLKKAYELSVLCDAEVALIIFSSRGKLYEFGSVGTTNTIERYQRSSFTPQDEHVECETQSWYQEVSKLKAKYESLQRTQRHLLGEDLGPLNIKELQNIEKQLEGALAQARQRKTQIMIEQMEELRRRERHLGDMNKQLRLKLEAEGFNLKATESLLSFTSAAGNSGFHLQPPQTNPIDYQQPEPFLQIGYHQYVQSEASNVPKSMACETNFMQGWIL

SEQ ID NO: 16372 - protein, 244 aa, Glycine max
  unsure (1)..(244): unsure at all Xaa locations
MEFPNEAIPEGCSQKKTGRGKIEIKRIENTTNRQVTFCKRRNGLLKKAYELSVLCDAEVALVVFSSRGRLYEYANNSVRGTIERYKKACAASTNAESVSEANTQFYQQEASKLKRQIRDIQNLNRHILGEGLSSLSLKELKNLESRLEKGLSRVRSRKHETLFADIEFMQKREIELQNHNNFLRAKIAENERAQQRQQXXMIPGTECESTIPNSQSYDRNFFPVIIDSNNNQYSRQDQTALQLV

SEQ ID NO: 16373 - protein, 487 aa, Glycine max
  unsure (1)..(487): unsure at all Xaa locations
MGRGRVVLERIENKINRQVTFSKRRSGLLKKAFELSVLCDAEVGLIIFSSRGKLFQYSSTDITKIIERYRQCRYSKSHNSLEHDSQSAYHEFLKLRAKYESLERTQRHFQGEDLEPLSFKDLQSLEKQLDITLALTRQHQTKKLMARADELREKDXSKSKSSKEVKVKRKSNGHPGFILQTKWTKDSKIRSLSLSLDSLXXDYTDKDVEESXISELSLFAESFYEMLQFQMGSRILTFLQKLRIKFVIKRNQKKRQREDEQEKDDVKKSPVKRQKGNDPSVKNEPTNMDTLNPTQLDDEKAVARNENSSNKEDDVKMEDGSDEEEDPEEDPEEYEEMENGSPQHEASNDKNAEQEANADTKSENITTNDKTADETSKEEIKVKDEVQESKADLQVKEEKEGKDEIKKETPTAKEVVVDRELLQAFRFFDRNRVGYIRVEDMRIIIHNLGMFFSHRDVKELVQSALLESNTGRDDRILYNKLVRMSDI

SEQ ID NO: 16374 - protein, 247 aa, Glycine max
MGRGRVELKRIENKINRQVTFAKRRNGLLKKAYELSVLCDAEVALIIFSNRGKLYEFCSSSSMLKTLERYQKCSYGAVEVSKPAKELESSYREYLKLKARFESLQRTQRNLLGEDLGPLNIKELEHLERQLDSSLKQVRSTKTQFMLDQLSDLQTKEQMLVEANRSLTVKLEEINSRNHYRQSWEAGDQSMPYGGGGPETQGFFQPLECNPTLHIGPDYRYNAVASDQITATTQPQQVSGFIPGWML

SEQ ID NO: 16375 - protein, 175 aa, Glycine max
  unsure (1)..(175): unsure at all Xaa locations
MGRGRVELKRIENKINRQVTFAKRRNGLLKKAYELSVLCDAEVALIIFSNRGKLYEFCSSSSMLKTLERYQKCXYGAVEVXKPAKELEQSSXXEYLKLKARFESLQRTQRNLLGEDLGPLNTKELEHLERQLDSSLKQVRSTKVIMDNLCIKNVFNFQQIIIYCNEKIIRMVNIX

SEQ ID NO: 16376 - protein, 185 aa, Glycine max
  unsure (1)..(185): unsure at all Xaa locations
GRGRVVLERIENKINRQVTFSKRRSGLLKKAFELSVLCDAEVGLIIFSSRGKLFQYSSTDITKIIERYRQCRYSKSHNSLEHDSQSAYHEFLKLRAKYESLERTQRHFQGEDLEPLSFKDLQSLEKQLDITLALTRQHQTKKLMARADELREKVKKIDILFKEVGLDVQVSIIHYNLVSFIIRFX

SEQ ID NO: 16377 - protein, 241 aa, Glycine max
MGRGRVELKRIENKINRQVTFAKRRNGLLKKAYELSVLCDAEVALIIFSNRGKLYEFCSSSSMLKTLERYQKCNYGAPEANVSTREALELSSQQEYLKLKARYEALQRSQRNLMGEDLGPLSSKELESLERQLDSSLKQIRSTRTQFMLDQLSDLQRKEHLLSEANRSLRQRLEGYQINPLQLNPGVEEMGYGRHPAQTHGEALFQQMECEPTLQIGYQPDPVSVVTAGPSMSNYMAGWLP

SEQ ID NO: 16378 - protein, 183 aa, Glycine max
  unsure (1)..(183): unsure at all Xaa locations
NIKMADDEYSFXCINHDGXKLIQVANMAFPDPSMSVSPQRKMGRGKIEIKRIENTTNRQVTFCKRRNGLLKKAYELSVLCDAEVALIVFSSRGRLYEYANNSVKATIERYKKASSDSSGAGSASEANAQFYQQEADKLRQQISNLQNNNRQMMGDSLGSLTAKDLKNLETKLEKGISRDSVQK

SEQ ID NO: 16379 - protein, 270 aa, Glycine max
LRVGGRVGEHNFFTLFPHQLTRGRTPCKNMAFPNQSMSSESPQRKMGRGKIEIKRIENTTSRQVTFCKRRNGLLKKAYELSVLCDAEVALIVFSNRGRLYEYANNSVKASIERYKKASSDSSSGGRSASEANAQFYQQEAAKLRVQISNLQNHNRQMMREGLSTMNGKDLKNLETKLEKGISRIRSKSGSRLFAEIEHMKKREIHLNNDNQLLRAKIAAGERSHHNVNGLSGSISYESMHQFDSRGFFQVTGLQHNNQYAGQDNMSLQFV

SEQ ID NO: 16380 - protein, 166 aa, Glycine max
  unsure (1)..(166): unsure at all Xaa locations
MGRGRVELKRIENKINRQVTFAKRRNGLLKKAYELSVLCDAEVALIIFSNRGKLYEFCSSSSMLKTLERYQKCNYGAPEDNVSTKEALELSSQQEYLRLKARYEALQRSQRNLMGEDLGPLSSKELESLERQLDSSLKQIRSIRTQFMLDQLSDLQRKAHRFNYAX

SEQ ID NO: 16381 - protein, 243 aa, Glycine max
  unsure (1)..(243): unsure at all Xaa locations
MEFPNEAIPEGCSQKKTGRGKIGIKRIENTTNRQVTFCKRRNGLLKKAYELSVLCDAEVALVVFSSRGRLYEYANNSVRGTIDRYKKACAASTNPESVSEANTQFYQQEASKLKRQIRDIQNLNRHILGEALSSLSLKELKNLESRLEKGLSRVRSRKHETLFADIEFMQKREIELQNHNNFLRAKIAEHEKAQQRQQXXMIPGNVCESTIPPQSYDRNFFPVNLIDSNNQYSNQDQTALQLV

SEQ ID NO: 16382 - protein, 171 aa, Glycine max
  unsure (1)..(171): unsure at all Xaa locations
MEDPNQAQEGSSQKKMGRGKIEIKRIENTTNRQVTFCKRRNGLLKKAYELSVLCDAEVALVVFSTRGRLYEYANNSVRATIERYKKANAAASNAESVSEANTQFYQQESSKLRRQIRDIQNLNRHILGEALGSLSLKELKNLEGRXLEKGLSRVRSRKEIVLQNHNNYLGA

SEQ ID NO: 16383 - protein, 246 aa, Glycine max
  unsure (1)..(246): unsure at all Xaa locations
MEFPTEAILSEGSISQKKPXGGKLEIRRIENTTNRQVTFCKRRNGLLKKAYELSVLCDAEVALVVFSSRGRLYEYANNSVRGTIERYKKACAASTNAESVSEANTQFYQQEASKLKRQIRDIQNLNRHILGEGLSSLSLKELKNLESRLEKGLSRVRSRKHETLFADIEFMQKREIELQNHNNFLRAKIAENERAQQRQQXXMIPGTECESTIPNSQSYDRNFFPVIIDSNNNQYSRQDQTALQLV

SEQ ID NO: 16384 - protein, 221 aa, Glycine max
  unsure (1)..(221): unsure at all Xaa locations
MGRGRVELKRIENKINRQVTFAKRRNGLLKKAYELSVLCDAEVALIIFSNRGKQYEFCSGSSMLKTLERYQKCNYGAPEDNVATKEALELSSQQEYLRLKARYEALQRSQRNLMGEDLGPLSSKELESLERQLDSSLKQIRSIRTQFMLDQLSDLQRKEHFLGESDRDLRQRLEEFQINPLQLNPSAEDMGYGRHPXYHPDPVSVVTEGPSMNNYMAGWLP

SEQ ID NO: 16385 - protein, 241 aa, Glycine max
MGRGRVELKRIENKINRQVTFAKRRNGLLKKAYELSVLCDAEVALIIFSNRGKQYEFCSGSSMLKTLERYQKCNYGAPEDNVATKEALELSSQQEYLRLKARYEALQRSQRNLMGEDLGPLSSKELESLERQLDSSLKQIRSIRTQFMLDQLSDLQRKEHFLGESNRDLRQRLEEFQINPLQLNPSAEDMGYGRHPGQPQGHALFQPLECEPTLQIGYHPDPVSVVTEGPSMNNYMAGWLP

SEQ ID NO: 16386 - protein, 204 aa, Glycine max
  unsure (1)..(204): unsure at all Xaa locations
MARGKVQLKRIENPVHRQVTFCKRRAGLLKKAKELSVLCDAEIGLFIFSAHGKLYELATKGTMQGLIERYMKFTRGAQPEAAAPEAHPLLVAKEETNALKQEIQTLQKGISYLFEGGNKTMAIDELQLLEKNLETWIYHIRSMKMNIMLQEIQALKDKEGTLKAANKYLHDKIVENTAIXXNFAEFATDTSYPLIVQDGGFQLY

SEQ ID NO: 16387 - protein, 159 aa, Glycine max
  unsure (1)..(159): unsure at all Xaa locations
MGRGRVELKRIENKINRQVTFAKRRNGLLKKAYELSVLCDAEVALIIFSSRGKQYEFCSSSSMLRTLDRYQKCNYGAPEPNVPSREALAELNSQQEYLKLKERYDALQRTQRNLLGEDLGPLSTKELESLERQLDSSLKQIRALRTQFMLDQLNDLQSX

SEQ ID NO: 16388 - protein, 244 aa, Glycine max
  unsure (1)..(244): unsure at all Xaa locations
MGRGRVELKRIENKINRQVTFAKRRNGLLKKAYELSVLCDAEVALIIFSNRGKQYEFCSGSSMLKTLERYQKCNYGAPEDNVATKEALVLELSSQQEYLRLKARYEALQRSQRNLMGEDLGPLSSKELESLERQLDSSLKQIRSIRTQFMLDQLSDLQRKEHFLGESNRDLRQRLEEFQINPLQLNPSAEDMGYGRHXXGQPQGHALFQPLECEPTLQIGYHPDPVSVVTEGPSMNNYMAGWLP

SEQ ID NO: 16389 - protein, 197 aa, Glycine max
MGKKKVEIKRIENKSTRQITFSKRRNGLMKKARELSILCDAKVALLIFSSTGKLYELCNGDSLAEVVQQYWDQSGTDTKSQELCFEIADIWSGSAFSQMIKRHFGVSELEHLSVSDLMELEKLTHAALSRIRSAKMRLMMESVVNLKKKIEALEKTNDVNNVVTRSIDCDQTDGVTHNLFPGQLKATTLGLTCTLNP

SEQ ID NO: 16390 - protein, 209 aa, Glycine max
MVRGKVQLKKIEDTTSRQVTFSKRRSGLLKKAYELSVLCDAEVAVIVFSQNGRLYEFSSSDMTKILERYREHTKDVPASKFGDDYIQQLKLDSASLAKKIELLEHSKRELLGQSVSSCSYDELKGIEEQLQISLQRVRQRKTQLYTEQIDQLRSQESNLLKENAKLSAKKSSQQQWPRHTQAEAEPHCSSSQSLDVDTELFIGLPKQQC

SEQ ID NO: 16391 - protein, 198 aa, Glycine max
  unsure (1)..(198): unsure at all Xaa locations
MGKKKLEIKRIENKSNRQITFSKRRKGLMKKARELSILCDAKLALLIFSSTGKLYELCNGDSLAEVVQRYWDKGASGTDTKGLRFEIADIWSDEAFSQLVQSHFGVSELEHLSVTDLMELEKLVHSALSRIRSAKMRLMMESGENLKKKEHILRNEGEVWGKRMEGQXXRGGGGNNVVTRFIDYDQTDRVTHNLLPGL

SEQ ID NO: 16392 - protein, 89 aa, Glycine max
MGRGKIEIKRIENSSNRQVTYSKRKNGILKKAKEISVLCDAQVSLIIFGVSGKMHEYISPYTTLIDVLDRYQRASGKTLWDAKHEVGFF

SEQ ID NO: 16393 - protein, 136 aa, Glycine max
  unsure (1)..(136): unsure at all Xaa locations
MGRGRVELKRIENKINRQVTFAKRRNGLLKKAYELSVLCDAEVALIIFSNRGKLYEFCSGQSITKTLERYEKNSYGGPDTAVQNKENCAAVNCCLIIINYYGLKKKKKKKKKKKKKKKKKKKKKKKKKKKKKKKKX

SEQ ID NO: 16394 - protein, 147 aa, Glycine max
  unsure (1)..(147): unsure at all Xaa locations
MGRGRVVLERIENKINRQVTFSKRRSGLLKKAFELSVLCDAEVGLIIFSSRGKLFQYSSTDITKIIERYRQCRYSXSHTGDSLEHDSXRHFQGEDLEPLSFKDLQSLEKQLDITLALTRQHQTKKLMARADELREKVRSLSXLDFNX

SEQ ID NO: 16395 - protein, 150 aa, Glycine max
  unsure (1)..(150): unsure at all Xaa locations
MGRGRVELKRIENKINRQVTFAKRRNGLLKKAYELSVLCDAEVALIIFSNRGKLYEFCSSSSMLKTLERYQKCSYGAVEVTKPAKELESSYREYLKLKARFESLQRTQRNLLQAIMGRCKSKXLTKGQSQKCILVLARCKCNPASIIILV

SEQ ID NO: 16396 - protein, 72 aa, Glycine max
MGRGKIAIRRIDNSTSRQVTFSKRRNGLLKKARELSILCDAEVGLMVFSSTGKLYDYASTSRFKYCLNRFYL

SEQ ID NO: 16397 - protein, 177 aa, Glycine max
  unsure (1)..(177): unsure at all Xaa locations
MGRGKVVLERIQNKINRQVTFSKRRNGLLKKAFELSVLCDAEIALVIFSSRGKLFQYSSTDINRIIEKYRQCCFNMSQTGDVAEHQSEQCLYQELLVLRVKHESLQRTQRNLLGEELEPLSMKELHSLEKQLDRTLAQARKHLTQKLVSRIDELHGKVHSLEQANKHLKNRHTAEEX

SEQ ID NO: 16398 - protein, 123 aa, Glycine max
  unsure (1)..(123): unsure at all Xaa locations
GRGKIVIRRIDNSTSRQVTFSKRRSGLLKKAKELAILCDAEVGVMIFSSTGKLYDFASSGMKSVMDRYSKSKEEPCQLGSSASEIKVVIIXXILRQYMHGKREGERMKRVKEVRGREENIKSX

SEQ ID NO: 16399 - protein, 135 aa, Glycine max
  unsure (1)..(135): unsure at all Xaa locations
MGRGRVQLKRIENKINRQVTFSKRRAGLLKKAHEISVLCDAEVALIVFSHKGKLFEYATDSCMEKILERYERYAYAERQLVANDSESQNSCVLISFSLSSXSVFFPKNSTHALLSYFSLMIIKFIQSKEVCAFFX

SEQ ID NO: 16400 - protein, 137 aa, Glycine max
  unsure (1)..(137): unsure at all Xaa locations
MGRGRVQLKRIENKINRQVTFSKRRAGLLKKAHEISVLCDAEVALIVFSHKGKLFEYATDSCMEKILERYERYAYAERQLVANDSESQGCYXWSTEYSSRKAKSVFFPKNSTHALLSYFSLMIIKFIQSKEVCAFFX

SEQ ID NO: 16401 - protein, 153 aa, Glycine max
  unsure (1)..(153): unsure at all Xaa locations
MGRGKIEIKKIENLNSRQVTFSKRRNGLLKKAKELSVLCDAEVAVIIFSSTGKLYEFSNTSMEHTLSRYSKGAESDSAEQXLLMCPQXDVMAVEPDTNLLMEEITKLRSAYLRMMGKELDGLSLKELQQLENQLSEGMQSVKDKKEQVLVEQL

SEQ ID NO: 16402 - protein, 182 aa, Glycine max
MVRRKIPIKKIDNVTARQVTFSKRKSGLFKKARELSLLCDSEIALIVFSPGGKLFDYASSSMQKVIERHILWSELNLEKLDQSCPTEQLRCNYADLNKEFGDRIREMRQLNGEELQGLALRELQKLEERLVSSLNRVYKAKVENFTREIDILKQKGNKLMEDNRLMKQRIIRKKKKKKKNDQ

SEQ ID NO: 16403 - protein, 122 aa, Glycine max
  unsure (1)..(122): unsure at all Xaa locations
LLAERTQRQRSSWARGKTQIXKRIENATSRQVTFSKRRNGLLKKAFELSVLCDADVALIIFSSSGKLYEFASSSIQCSIERYRMHTKHDNSTTFRSAEQNMQHLKQDAANMMNKIGLLETAX

SEQ ID NO: 16404 - protein, 92 aa, Glycine max
MGRGRVQLKRIENKINRQVTFSKRRGGLLKKAHEISVLCDAEVALIIFSHKGKLFEYATDSCMEKILERHERYAYAERQLVANDSETQENWT

SEQ ID NO: 16405 - protein, 101 aa, Glycine max
  unsure (1)..(101): unsure at all Xaa locations
MGRGRVELKRIENKINRQVTFAKRRNGLLXKAYELSVLCDAEVALIIFSNXGKLYEFSSTSSMMKTLEKYQKYSYSALETTRPINDTXNYQEXLRLKARVX

SEQ ID NO: 16406 - protein, 114 aa, Glycine max
  unsure (1)..(114): unsure at all Xaa locations
MEDPNQAPQASSQKKMGRGTIEIKRIENTTNRQVTFCKRRNGLLKKAYELSVLCDAEVALVVFSTXRGRLYEYANNSVRATIERYKKANAAASNAESVSEANTQFYQQESSKLX

SEQ ID NO: 16407 - protein, 86 aa, Glycine max
  unsure (1)..(86): unsure at all Xaa locations
MGRGRVELKRIENKINRQVTFAKRRNGLLKKAYELSVLCDAEVALIIFSNRGKLYEFCSSSRYAVCVDPFFSVSYDLVDIXKKKKR

SEQ ID NO: 16408 - protein, 96 aa, Glycine max
MGRGKVELKRIENKINRQVTFAKRRNGLLKKAYELSVLCDAEVALIIFSNRGKLYEFCSGHSRTRAVIHTQTPSSLLFMTDFVCALLSSSRSRTRA

SEQ ID NO: 16409 - protein, 84 aa, Glycine max
MGRGRVQLKRIENKINRQVTFSKRRAGLLKKAHEISVLCDAEVALIVFSHKGKLFEYATDSCEAQVLSRPFTYHSLEARMLHPF

SEQ ID NO: 16410 - protein, 74 aa, Glycine max
  unsure (1)..(74): unsure at all Xaa locations
MGRGRVQLKRIENKINRQVTFSKRRAGLLKKAHEISVLCDAEVALIVFSHKGKLFEYATDSCMQKKKKKKKKKX

SEQ ID NO: 16411 - protein, 78 aa, Glycine max
  unsure (1)..(78): unsure at all Xaa locations
MGRGRVQLKRIENKINRQVTFSKRRAGLLKKAHEISVLCDAEVALIVFSHKGKLFEYATDSCMRSVMQKKKKKKKKKX

SEQ ID NO: 16412 - protein, 83 aa, Glycine max
  unsure (1)..(83): unsure at all Xaa locations
MVRGRVELKRIENKINRQVTFAKRRNGLLKKAYELSVLCDAEVALIIFSNRGKLYEFCSSSSMLKTLERXQKCSYXAPKPSLX

SEQ ID NO: 16413 - protein, 77 aa, Glycine max
  unsure (1)..(77): unsure at all Xaa locations
MTRTRIKIKKIDNITARQVTFSKRRRGLFKKAEELSVLCDAEVGLIVFSSTGKLFDYSSSSFLXIFEKKKKKKKXKK

SEQ ID NO: 16414 - protein, 90 aa, Glycine max
MGRGKVVLERIQNKINRQVTFSKRRNGLLKKAFELSVLCDAEIALVIFSSRGKLFQYSSTEYFSSISHLFYHYNPSLLSSKKKKKKKKKK

SEQ ID NO: 16415 - protein, 303 aa, Glycine max
  unsure (1)..(303): unsure at all Xaa locations
MGRVKLPIKKIENTTNRQVTFSKRRNGLIKKAYELSVLCDVDVALIMFSPSGRATFFSGNKSIEEILERYVNLSEGEHGRXXHNKEHIQKLLSKLKDEAGQICQAPSSMTSDSQIEDLRREIFTCKSQLEEMEKRLRIFEGDPSEITTLSEAEYREYVLRDTLKQVQLRKCVLEEYNSHATHSPQVHAAKTVDVNGFISRASKNPVDWFPQGDPLHVQTLNFANVYDTALVRDQQSHHCTVVDMLTPTSTLLHSANMDLNGQMNPRSSLDAGISNTLHPQFGQAIHTNSSSWQHLNPLGTYWS

SEQ ID NO: 16416 - protein, 237 aa, Glycine max
  unsure (1)..(237): unsure at all Xaa locations
GXQLTGENKINRQVTFAKRMNGLLKKAYELSVLCDAEVALIIFSNRGKLYEFCSSSSMLKTLERYQKCNYGAPEANVSTREALELSSQQEYLKLKARYESLQRSQRNLMGEDLGPLSSKELESLERQLDSSLKQIRSTRTQFMLDQLSDLQRKEHLLSEANRSLRQRVMEGYQINPLQLNPGVEEMGYGRHPAQTHGEALFQQMECEPTLQIGYQPDPVSVVTAGPSMSNYMAGWLP

SEQ ID NO: 16417 - protein, 229 aa, Medicago sativa
MARGKIQIKRIENTTNRQVTYSKRRDGLFKKANELTVLCDAKVSIIMFSSTGKLHEYISPSASTKQFFDQYQMTVGIDLWNSHYENMQENLKKLKDVNRNLRKEIRQGMGECLNDLSMEELRLLEDEMDKAAKAIRERKYKVITNQIDTQRKKSNNEREVHNRLLRDLDARAEDPRFEMMDNGGEYESVIGFSNLGPRMFALSLQPTHPNPHNGGASAASDLTTYPLLF

SEQ ID NO: 16418 - protein, 247 aa, Medicago sativa
MARGKIQIKRIENTTNRQVIYSKRRNGLFKKANELTVLCDAKVSIIMFSSTGKLHEYISPSASTKQFFDQYQTTVGIDLWNSHYENMQENLKKLKDVNRNLRKEIRQGMGECLNDLSMEELRLLEDEMDKALKAIRERKYKVITNQIDTQRKKFNNEREVDNRLLRDLDARAEDPRFEMMDNGGEYESVIGFSNLGPRMFALSLQPTHPNPHNGGASAASDLTTYPLLFSHFSLRIRTTNTTITFQQ

SEQ ID NO: 16419 - protein, 212 aa, Medicago sativa
MGRGKIEIKRIENSSNRQVTYSKRKSGILKKANEINVLCDAQVSTIIFAPSGKMHEYISPSTTLIDMLERYQKASGKRLWDAKHENLRNEIEKLKKENEDMEIKLRHLKGKDINTLNYKKLMSLEDVLENGLLTIRDKQMEVYQMVTRNDKILEEENRELNFILQQQHMAVEGGREMDYNDEFDESSGSDFNSQMPFSFRLQPMQLHSLLQL

SEQ ID NO: 16420 - protein, 224 aa, Oryza sativa (indica cultivar-group)
MARGKVQLRRIENPVHRQVTFCKRRAGLLKKARELSILCEADIGIIIFSAHGKLYDLATTGTMEELIERYKSASGEQANACGDQRMDPKQEAMVLKQEINLLQKGLRYIYGNRANEHMTVEELNALERYLEIWMYNIRSAKMQIMIQEIQALKSKEGMLKAANEILQEKIVEQNGLIDVGMMVADQQNGHFSTVPLLEEITNPLTILSGYSTCRGSENGLFLLT

SEQ ID NO: 16421 - protein, 233 aa, Oryza sativa (indica cultivar-group)
MVRGRTELKRIENPTSRQVTFSKRRNGLLKKAFELSVLCDAEVALIVFSPRGRLYEFASAPSLQKTIDRYKAYTKDHVNNKTIQQDIQQVKDDTLGLAKKLEALDESRRKILGENLEGCSIEELRGLEMKLEKSLHNIRLKKTELLERQIAKLKEKERTLLKDNENLRGKHRNLEAAALVANHMTTTTAPAAWPRDVPMTSSTAGAADAMDVETDLYIGLPGTERSSNRSETG

SEQ ID NO: 16422 - protein, 246 aa, Oryza sativa (indica cultivar-group)
MGRGKVQLKRIENTINRQVTFSKRRSGLLKKANEISVLCDAEVALIIFSTKGKLYKYATDSCMDKILERYERYSYAEKVLISAESDTQGNWCHEYRKLKAKVETIQKCQKHLMGEDLESLNLKELQQLEQQLENSLKHIRSRKSQLMLESINELQRKEKSLQEENKVLQKELVEKQKVQKQQVQWDQTQPQTSSSSSSFMMREALPTTNISNYPAAAGERIEDVAAGQPQHVRIGLPPWMLSHING

SEQ ID NO: 16423 - protein, 213 aa, Oryza sativa (indica cultivar-group)
ENSTNRQVTFCKRRAGLLKKARELSILCEADIGIIIFSAHGKLYDLATTGTMEELIERYKSASGEQANACGDQRMDPKQEAMVLKQEINLLQKGLRYIYGNRANEHMTVEELNALERYLEIWMYNIRSAKMQIMIQEIQALKSKEGMLKAANEILQEKIVEQNGLIDVGMMVADQQNGHFSTVPLLEEITNPLTILSGYSTCRGSENGLFLLT

SEQ ID NO: 16424 - protein, 238 aa, Oryza sativa (indica cultivar-group)
ENTMNRQVTFFKRRNGLLKKAHEISVLCDADVALIVFSTKGKLYEFSSHSSMEGILERYQRYSFDERAVLEPNTEDQENWGDEYGILKSKLDALQKSQRQLLGEQLDTLTTKELQQLEHQLEYSLKHIRSKKNQLLFESISELQKKEKSLKNQNNVLQKLMETEKEKNNAIINTNREEQNGATPSTSSPTPVTAPDPIPTTNNSQSQPRGSGESEAQPSPAQAGNSKLPPWMLRTSHT

SEQ ID NO: 16425 - protein, 238 aa, Oryza sativa (indica cultivar-group)
ENSTNRQVTFAKRRNGLLKKAYELSVLCDAEVALIVFSNRGKLYEFCSTQSMTKTLEKYQKCSYAGPETAVQNRESEQLKASRNEYLKLKARVENLQRTQRNLLGEDLDSLGIKELESLEKQLDSSLKHVRTTRTKHLVDQLTELQRKEQMVSEANRCLRRKLEESNHVRGQQVWEQGCNLIGYERQPEVQQPLHGGNGFFHPLDAAGEPTLQIGYPAEHHEPMNSACMNTYMPPWLP

SEQ ID NO: 16426 - protein, 196 aa, Oryza sativa (japonica cultivar-group)
MGRGRSEIKRIENPTQRQSTFYKRRDGLFKKARELAVLCDADLLLLLFSASGKLYHFLSPTVPSVREFVERYEATTHTKVWADIRQERRAELEKVGSMCDLLEKQLRFMTVDDGEEYTVPSLEALEHNLEAAMRKVRSEKDRKIGGEICYLQNIIRGRQEERYGLCDKIAHAQTLKDVECGSTSLSNGLDLKLGFN

SEQ ID NO: 16427 - protein, 233 aa, Oryza sativa (japonica cultivar-group)
MVRGRTELKRIENPTSRQVTFSKRRNGLLKKAFELSVLCDAEVALIVFSPRGRLYEFASAPSLQKTIDRYKAYTKDHVNNKTIQQDIQQVKDDTLGLAKKLEALDESRRKILGENLEGFSIEELRGLEMKLEKSLHKIRLKKTELLEQQIAKLKEKERTLLKDNENLRGKHRNLEAAALVANHMTTTTAPAAWPRDVPMTSSTAGAADAMDVETDLYIGLPGTERSSNRSETG

SEQ ID NO: 16428 - protein, 265 aa, Oryza sativa (japonica cultivar-group)
MGRGKIEIKRIENKTSRQVTFCKRRNGLLKKAYELAILCDAEIALIVFSSRGRLYEFSNVNSTRSTIERYKKASASTSGSAPVIDVNSHQYFQQEAAKMRHQIQTLQNANRHLIGESIGNMTAKELKSLENRLEKGISRIRSKKHELLFSEIEYMQKREADLQNENMFLRAKVAEAERAEHDDQQAAEDDEMAPAPAVGGGSSSGTELEALPATFDTREYYQPAPPVSMLAAAAAAAAAQYSSDHHQTALHLGYFKVDSGKGGLL

SEQ ID NO: 16429 - protein, 222 aa, Oryza sativa (japonica cultivar-group)
MARGKVQLRRIENPVHRQVTFCKRRAGLLKKARELSILCEADIGIIIFSAHGKLYDLATTGTMEELIERYKSASGEQANACGDQRMDPKQEAMVLKQEINLLQKGLRYIYGNRANEHMTVEELNALERYLEIWMYNIRSAKMQIMIQEIQALKSKEGMLKAANEILQEKIVEQNGLIDVGMMVADQQNGHFSTVPLLEEITNPLTILSGYSTCRGSEMGYSF

SEQ ID NO: 16430 - protein, 224 aa, Oryza sativa (japonica cultivar-group)
MGRGKIEIKRIENATNRQVTYSKRRTGIMKKARELTVLCDAQVAIIMFSSTGKYHEFCSPSTDIKGIFDRYQQAIGTSLWIEQYENMQRTLSHLKDINRNLRTEIRQRMGEDLDGLEFDELRGLEQNVDAALKEVRHRKYHVITTQTETYKKKVKHSYEAYETLQQELGLREEPAFGFVDNTGGGWDGGAGAGAAADMFAFRVVPSQPNLHGMAYGGNHDLRLG

SEQ ID NO: 16431 - protein, 224 aa, Oryza sativa (japonica cultivar-group)
MGRGKIEIKRIKNATNRQVTYSKRRTGIMKKARELTVLCDAQVAIIMFSSTGKYHEFCSPSTDIKGIFDRYQQAIGTSLWIEQYENMQRTLSHLKDINRNLRTEIRQRMGEDLDGLEFDELRGLEQNVDAALKEVRHRKYHVITTQTETYKKKVKHSYEAYETLQQELGLREEPAFGFVDNTGGGWDGGAGAGAAADMFAFRVVPSQPNLHGMAYGGNHDLRLG

SEQ ID NO: 16432 - protein, 235 aa, Oryza sativa (japonica cultivar-group)
MGRGKIVIRRIDNSTSRQVTFSKRRNGIFKKAKELAILCDAEVGLVIFSSTGRLYEYASTSMKSVIDRYGRAKEEQQHVANPNSELKFWQREAASLRQQLHSLQENHRQLMGQDLSGLGVKELQTLENQLEMSIRCIRTKKDQLMIDEIHELNRKGSLIHQENMELYRKVNLIRQENAELYKKLYETGAENEANRDSTTPYNFAVIEEANTPARLELNPPSQQNDAEQTTPPKLG

SEQ ID NO: 16433 - protein, 247 aa, Oryza sativa (japonica cultivar-group)
MGRGKIEIKRIENTTNRQVTFCKRRNGLLKKAYELSVLCDAEVALIVFSSRGRLYEYANNSVKSTVERYKKANSDTSNSGTVAEVNAQHYQQESSKLRQQISSLQNANSRTIVGDSINTMSLRDLKQVENRLEKGIAKIRARKNELLYAEVEYMQKREVELQNDNMYLRSKVVENERGQQPLNMMGAASTSEYDHMVNNPYDSRNFLQVNIMQQPQHYAHQLQPTTLQLGSRPSISFGVDTVRTHVR

SEQ ID NO: 16434 - protein, 246 aa, Oryza sativa (japonica cultivar-group)
MGRGKVQLKRIENKINRQVTFSKRRSGLLKKANEISVLCDAEVALIIFSTKGKLYEYATDSCMDKILERYERYSYAEKVLISAESDTQGNWCHEYRKLKAKVETIQKCQKHLMGEDLESLNLKELQQLEQQLENSLKHIRSRKSQLMLESINELQRKEKSLQEENKVLQKELVEKQKVQKQQVQWDQTQPQTSSSSSSFMMREALPTTNISNYPAAAGERIEDVAAGQPQHVRIGLPPWMLSHING

SEQ ID NO: 16435 - protein, 267 aa, Oryza sativa (japonica cultivar-group)
MGRGKVQLKRIENKINRQVTFSKRRNGLLKKAHEISVLCDAEVAAIVFSPKGKLYEYATDSRMDKILERYERYSYAEKALISAESESEGNWCHEYRKLKAKIETIQKCHKHLMGEDLESLNLKELQQLEQQLESSLKHIISRKSHLMLESISELQKKERSLQEENKALQKELVERQKNVRGQQQVGQWDQTQVQAQAQAQPQAQTSSSSSSMLRDQQALLPPQNICYPPVMMGERNDAAAAAAVAAQGQVQLRIGGLPPWMLSHLNA

SEQ ID NO: 16436 - protein, 249 aa, Oryza sativa (japonica cultivar-group)
MGRGPVQLRRIENKINRQVTFSKRRNGLLKKAHEISVLCDADVALIVFSTKGKLYEFSSHSSMEGILERYQRYSFDERAVLEPNTEDQENWGDEYGILKSKLDALQKSQRQLLGEQLDTLTIKELQQLEHQLEYSLKHIRSKKNQLLFESISELQKKEKSLKNQNNVLQKLMETEKEKNNAIINTNREEQNGATPSTSSPTPVTAPDPIPTTNNSQSQPRGSGESEAQPSPAQAGNSKLPPWMLRTSHT

SEQ ID NO: 16437 - protein, 230 aa, Oryza sativa (japonica cultivar-group)
MVRGKTQMKRIENPTSRQVTFSKRRNGLLKKAFELSVLCDAEVALIVFSPRGKLYEFASASTQKTIERYRTYTKENIGNKTVQQDIEQVKADADGLAKKLEALETYKRKLLGEKLDECSIEELHSLEVKLERSLISIRGRKTKLLEEQVAKLREKEMKLRKDNEELREKCKNQPPLSAPLTVRAEDENPDRNINTTNDNMDVETELFIGLPGRSRSSGGAAEDSQAMPHS

SEQ ID NO: 16438 - protein, 241 aa, Oryza sativa (japonica cultivar-group)
  unsure (1)..(241): unsure at all Xaa locations
MGRGKIVIRRIDNSTSRQVTFSKRRNGLLKKAKELSILCDAEVGLVVFSSTGXLYEFSSTNMKTVIDRYTNAKEELLGGNATSEIKIWQREAASLRQQLHNLQESHKQLMGEELSGLGVRDLQGLENRLEISLRNIRMRKDNLLKSEIEELHVKGSLIHQENIELSRSLNVMSQQKLELYNKLQACEQRGATDANESSSTPYSFRIIQNANMPPSLELSQSQQREGECSKTAAPELGLHLP

SEQ ID NO: 16439 - protein, 233 aa, Oryza sativa (japonica cultivar-group)
MGRGKVQVRRIENEVSRQVTFSKRRPGLLKKAHEIAVLCDVDVAAIVFSAKGNLFHYASSHTTMERILEKYDRHELLSEGNNVIEEFPELEGSMRYDHIKLRGKIEALKKSQRNLMGQELDSLTLQDIQQLEDQIDTSLNNIRSRKEKLLMEKNTILEKKITELETLHTSIRASPTEAAAPPACNIADAFVPNLNICCGDSGEPETVTAPLGWTSSNNGLPWWMLQSSSNGKS

SEQ ID NO: 16440 - protein, 239 aa, Oryza sativa (japonica cultivar-group)
MGRGKVVLQRIENKISRQVTFAKRRNGLLKKAYELSILCDAEVALVLFSHAGRLYQFSSSSNMLKTLERYQRYIYASQDAAAPTSDEMQNNYQEYVNLKAHVEILQQSQRNLLGEDLAPLATNELEQLESQVVRTLKQIRSRKTQVLLDELCDLKRKEQMLQDANRVLKRKLDEIDVEAAPPQPPWNGNCSNGHGGGGGVFSSEPPQPEHFFQALGLHAVDVNQPPAPPPGGYPPEWMA

SEQ ID NO: 16441 - protein, 116 aa, Oryza sativa (japonica cultivar-group)
MVRGKTQMKRIENPTSRQVTFSKRRNGLLKKAFELSVLCDAEVALIVFSPRGKLYEFASARKIRPEKTAKTIFPRVAIELPSKQSHYFHKEISCETGKVRNSENIGNLVLAFRRAI

SEQ ID NO: 16442 - protein, 320 aa, Oryza sativa (japonica cultivar-group)
MGRGKVQLKRIENKINRQVTFSKRRNGLLKKAHEISVLCDAEVAAIVFSPKGKLYEYATDSSLTILLIIKESVNTYTYGYRIMGRMDKILERYERYSYAEKALISAESESEITLPQLTTCTASRSTHGICFQYCLMSKTLGNWCHEYRKLKAKIETIQKCHKHLMGEDLESLNLKELQQLEQQLESSLKHIISRKSHLMLESISELQKKERSLQEENKALQKELVERQKNVRGQQQVGQWDQTQVQAQAQAQPQAQTSSSSSSMLRDQQALLPPQNICSYPPVMMGERNDAAAAAAVAAQGQVQLRIGGLPPWMLSHLNA

SEQ ID NO: 16443 - protein, 175 aa, Capsicum annuum
MGRGKVELKRIDNKINRQVTFAKRRNGLLKKAYELSVLCDAEIALIIFSSRGKLYEFCSSSSMSKTLERYHKHNYGALEGTQPSADSQNNYQEYLKLKTRVEVLQQSQRHMLGEDLGELNTKDLEQLERQLDSSLRQIRSTKTQHMFDQLAELHQKEQSLTEMNKSLKTKVSISP

SEQ ID NO: 16444 - protein, 245 aa, Capsicum annuum
MGRGRVELKRIENKINRQVTFAKRRNGLLKKAYELSVLCDAEVALIIFSNRGKLYEFCSTSSMVKTIEKYQRCSYATLEANQSATDTQNNYHEYLRLKARVELLQRSQRNFLGEDLGTLSTKDLEQLENQLESSLKQIRSRKTQFMLDQLADLQQREQMLAESNRLLRRKLEESTAGFPVRLSWEDGADQAMHQHNRLPHTEGFLQPLGLHSSPPHFGYNPVNTDEVNAAATAHNMNGFIHGWML

SEQ ID NO: 16445 - protein, 227 aa, Lycopersicon esculentum
MGRGRVQLKRIENKINRQVTFSKRRSGLLKKAHEISVLCDAEVGLIVFSTKGKLFEYANDSCMERILERYERYSFAEKQLVPTDHTSPVSWTLEHRKLKARLEVLQRNQKHYVGEDLESLSMKELQNLEHQLDSALKHIRSRKNQLMHESISVLQKKDRALQEQNNQLSKKVKEREKSAQQISGINSSSLFAHTDFYLGTYQSTNVIDNGKWKEVVLHSSKVQLIIL

SEQ ID NO: 16446 - protein, 245 aa, Lycopersicon esculentum
MGRGRVHLKRIENKINRQVTFSKRRSGLLKKAHEISVLCDAEVGLIVFSTKGKLFEYANDSCMERILERYERYSFAEKQLVPTDHTSPVSWTLEHAKLKARLEVLQRNQKHYVGEDLESLSMKELQNLEHQLDSALKHIRSRKNQLMHESISVLQKKDRALQEQNNQLSKKVKEREKEVAQQNQWEINSSSFVLPQQLDSPHLGEAYQSTNVIDNGEVEGGSSSQQQGAANNTVMPQWMLRHLNN

SEQ ID NO: 16447 - protein, 223 aa, Lycopersicon esculentum
MGRGKIEIKRIENNTNRQVTFCKRRNGLLKKAYELSVLCDAEIALIVFSTRGRLYEYSNNNVKATIERYKKATAETSSAYTTQELNAQFYQQESKKLRQQIQMMQNTNRHLVGEGLSSLNVRELKQLENRLERGITRIRSKKHEAILAETEDLHKREIQLEQENAFLRSKIAENERLQELSMMPSGGEEYNAFQQYLARNMLQLNMMETALPSYDPLSPDHKR

SEQ ID NO: 16448 - protein, 201 aa, Lycopersicon esculentum
MARGKVQMKRIENPVHRQVTFCKRRAGLLKKAKELSVLCDAEVGLFIFSAHGKLYELATKGSMQGLIERYIKSTKGVEVAEEAKDTQPLDPKEEINMLKNEIDVLQKGLSYMYGGGAGTMTLDELHSLEKYLEIWMYHIRSAKMDIMFQEIQLLKNKGGILEAANKYLQDKIDEQYTVTNMTQNLTDFQCPLTVQNEIFQF

SEQ ID NO: 16449 - protein, 397 aa, Lycopersicon esculentum
MGRGKVELKRIENKINRQVTFAKRRNGLLKKAYELSILCDAEIALIIFSSRGKLYEFCSNSSMSKTLERYHRYNYGTLEGTQTSSDSQNNYQEYLKLKTRVEMLQQSQRHLLGEDLGQLGTKDLEQLERQLDSSLRQIRSTKTQHILDQLAELQQKEQSLTEMNKSLRIKLEELGVTFQTSWHCGEQSVQYRHEQPSHHEGFFQHVNCNNTLPISMEQILERYERYSYAERRLLANNSESPVQENWSLEYTKLKARIDLLQRNHKHYMGEDLDSMSLKDLQNLEQQLDSALKLIRSRKNQLMHESISELQKKERAILEENNMLTKKIKEKDKIVEQQGEWHQQTNQVSTSTSFLLQPHQCLNMGGNYQDEVAEARRNNELDLNLDSLYPLYNMNKHL

SEQ ID NO: 16450 - protein, 242 aa, Lycopersicon esculentum
MGRGKVELKRIENKINRQVTFAKRRNGLLKKAYELSILCDAEIALIIFSSRGKLYEFCSNSSMSKTLERYHRYNYGTLEGTQTSSDSQNNYQEYLKLKTRVEMLQQSQRHLLGEDLGQLGTKDLEQLERQLDSSLRQIRSTKTQHILDQLAELQQKEQSLTEMNKSLRIKLEELGVTFQTSWHCGEQSVQYRHEQPSHHEGFFQHVNCNNTLPISYGYDNVQPENAAPSTHDATGVVPGWML

SEQ ID NO: 16451 - protein, 248 aa, Lycopersicon esculentum
MDFQSDLTREISPQRKLGRGKIEIKRIENTTNRQVTFCKRRNGLLKKAYELSVLCDAEVALVVFSNRGRLYEYANNSVKATIERYKKACSDSSNTGSVSEANAQYYQQEASKLRAQIGNLMNQNRNMMGEALAGMKLKELKNLEQRIEKGISKIRSKKNELLFAEIEYMQKREVDLHNNNQYLRAKIAETERAQHQHQQMNLMPGSSSNYHELVPPPQQFDTRNYLQVNGLQTNNHYPRQDQPPIQLV

SEQ ID NO: 16452 - protein, 244 aa, Lycopersicon esculentum
MGRGKVELRKIENKINRQVTFSKRRGGLVKKAHEISVLCDAEVALIVFSQKGKIFEYSSDSCMEQILERYERYSYAERRLLANNSESPVQENWSLEYTKLKARIDLLQRNHKHYMGEDLDSMSLKDLQNLEQQLDSALKLIRSRKNQLMHESISELQKKERAILEENNMLTKKIKEKDKIVEQQGEWHQQTNQVSTSTSFLLQPHQCLNMGGNYQDEVAEARRNNELDLNLDSLYPLYNMNKHL

SEQ ID NO: 16453 - protein, 222 aa, Lycopersicon esculentum
GKIEIKKIENLTNRQVTFSKRRNGIFKKRKELTVLCDAKISLIMLSSTRKYHEYTSPNTTTKKMIDQYQSALGVDIWSIHYEKMQENLKRLKEINNKLRREIRQRTGEDMSGLNLQELCHLQENITESVAEIRERKYHVIKNQTDTCKKKARNLEEQNGNLVLDLEAKCEDPKYGVVENEGHYHSAVAFANGVHNLYAFRLQPLHPNLQNEGGFGSRDLRLS

SEQ ID NO: 16454 - protein, 222 aa, Lycopersicon esculentum
GKIEIKKIENSTNRQVTYSKRRNGIFKKRKELTVLCDAKISLIMLSSTRKYHEYTSPNTTTKKMIDQYQSALGVDIWSIHYEKMQENLKRLKEINNKLRREIRQRTGEDMSGLNLQELCHLQENITESVAEIRERKYHVIKNQTDTCKKKARNLEEQNGNLVLDLEAKCEDPKYGVVENEGHYHSAVAFANGVHNLYAFRLQPLHPNLQNEGGFGSRDLRLS

SEQ ID NO: 16455 - protein, 222 aa, Lycopersicon esculentum
GKIEIKKIENSTNRQVTYSKRRNGIFKKRKELTVLCDAKISLIMLSSTRKYHEYTSPNTTTKKMIDQYQSALGVDIWSIHYEKMQENLKRLKEINNKLRREIRQRTGEDMSGLNLQELCHLQENITESVAEIRERKYHVIKNQTDTCKKKARNLEEQNGTLVLDLEAKCEDPKYGVVENEGHYHSAVAFANGVHNLYAFRLQPLHPNLQNEGGFGSRDLRLS

SEQ ID NO: 16456 - protein, 246 aa, Lycopersicon esculentum
MGRGRVELKRIENKINRQVTFAKRRNGLLKKAYELSVLCDAEVALLVFSNRGKLYEFCSTSNMLKTLDRYQKCSYGTLEVNRSIKDNEQSSYREYLKLKAKYESLQRYQRHLLGDELGPLTIDDLEHLEVQLDTSLKHIRSTRTQMMLDQLSDLQTKEKLWNEANKVLERKMEEIYAENNMQQAWGGGEQSLNYGQQQHPQSQGFFQPLECNSSLQIGYDPITTSSQITAVTNAQNVNGMIPGWML

SEQ ID NO: 16457 - protein, 246 aa, Lycopersicon esculentum
MGRGRVELKRIENKINRQVTFAKRRNGLLKKAYELSVLCDAEVALLVFSNRGKLYEFCSTNNMLKTLDRYQKCSYGTLEVNRSIKDNEQSSYREYLKLKAKYESLQRYQRHLLGDELGPLTIDDLEHLEVQLDTSLKHIRSTRTQMMLDQLSDLQTKEKLWNEANKVLERKMEEIYAENNMQQAWGGGEQSLNYGQQQHPQSQGFFQPLECNSSLQIGYDPITTSSQITAVTNAQNVNGMIPGWML

SEQ ID NO: 16458 - protein, 269 aa, Lycopersicon esculentum
MVFPINQELLVDESSSQLRKTSGGTGGGGRGKIEIKRIENTTNRQVTFCKRRNGLLKKAYELSVLCDAEVSLIVFSSRGRLYEYANNSVRATIDRYKKHHADSTSTGSVSEANTQYYQQEASKLRRQIRDIQTYNRQIVGEALGSLSPRDLKNLEGKLEKAIGRVRSKKNELLFSEIELMQKREIELQNANMYLRAKIAEVERAQEQMNLMPGGGGGGGGGGGGGSDHQYHHQPNYEDARNNSLPVNLLEPNPHYSRRDNGDQTPLQLV

SEQ ID NO: 16459 - protein, 173 aa, Lycopersicon esculentum
MGRGKVELKRIENQTNRQVTFSKRRNGLLKKAYELSILCDAEVALLLFSPSGKAYHFASHDIERTILRYKNEVGLSKNSDQGPRAMEVWRTKIDDMTRTIHELEARDKHFCWRRVIKSWYERLKQLERQLRVGVERIRSKKHKILHEENIHLQKQVKLYEVEGAQGFSIQIQG

SEQ ID NO: 16460 - protein, 224 aa, Lycopersicon esculentum
MGRGRVELKRIEGKINRQVTFAKRRNGLLKKAYELSVLCDAEVALIIFSNRGKLYEFCSSSSMLKTLERYQKCNYGAPEPNISTREALEISSQQEYLKLKGRYEALQRSQRNLLGEDLGPLNSKELESLERQLDMSLKQIRSTRTQLMLDQLTDYQRKEHALNEANRTLKQRLMEGSQLNLQCSQMHKLWAMAGKQLKLRAMASFILWIVNLLCKLGIRMIQLQ

SEQ ID NO: 16461 - protein, 159 aa, Lycopersicon esculentum
MVRGKTQMRRIENATSRQVTFSKRRNGLLKKAFELSVLCDAEVGLIIFSPRGKLYEFASSSTQEIIRGNKRHTKDRVQPENQAGPQYLQYMQHEAANLMKKIELLETAKRKFLGEGLQSCTLQEVQQIEKQLERSVGTIRARKLQVFKEQVERLKKKKK

SEQ ID NO: 16462 - protein, 227 aa, Nicotiana tabacum
MARGKIQIKRIENQTNRQVTYSKRRNGLFKKANELTVLCDAKVSIIMISSTGKLHEFISPSVTTKQLFDLYQKTVGVDLWNSHYEKMQEQLRKLKDVNRNLRREIRQRMGESLNDLNYEQLEELNENVDNSLKLIRERKYKVIGNQIDTYKKKVRNVEEIHRNLLLEFDARQEDPYGLVEQEGDYNSVLGFPNGGPRILALRLQPNHQPNHHLHSGGGSDITTFALA

SEQ ID NO: 16463 - protein, 242 aa, Nicotiana tabacum
MGRGKVQLRRIENKINRQVTFSKRRGGLVKKAHEISVLCDAEVALIVFSHKGKIFEYSSDSCMEQILERYERYSYTERRLLASNSESSVQENWSLEYAKLKAKIDLLQRNHKHYMGEDLDSLNLKDLQNLEQQLDTSLKLIRSRKNQLMHESISMLQKKEKAIQEENNMLSKKIKEKDNTVGQQVEWHQQNQVPTSTSFLLQPHPCLNIGGNYQEEAEEARRNELDLNLDSLYPCHMGCFAT

SEQ ID NO: 16464 - protein, 245 aa, Nicotiana tabacum
MGRGRVELKRIENKINRQVTFAKRRNGLLKKAYELSVLCDAEVALIIFSSRGKLSEFCSTSSMMQTLEKYQQCSYASLDPMQSASDHTQNNYHEYLRLKARVELLQRSQRNLLGEDLGTLNSGELEHLEHQLDSSLKQIRSRKTQNMLDQLADLQQKEQMLAEANKQLRRKLEESAARVPLRLSWDNGGQTMQHNRQLPPQTEGFFQPLGLNSSPQFGYSPMGGNEVNAAATANNMNGFIPGWML

SEQ ID NO: 16465 - protein, 245 aa, Nicotiana tabacum
MGRGRVQLKRIENKINRQVTFSKRRSGLLKKAHEISVLCDAEVGLIVFSTKGKLFEYSTDSCMERILERYERYSYAERQLTATDHETPGSWTLEHAKLKARFEVLQRNQRHYAGEDLDSLSMKELQNLEHQVDSALKHIRSRKNQLMHESISELQKKDKALQEQNNKLSKQVKEREKELAQQTQWEQQSHDHLNSSTFVLSQPLSSLHLGEAYSTAGDNGEVEGSSRQQQQNTVMPPWMLRHLNN

SEQ ID NO: 16466 - protein, 242 aa, Nicotiana tabacum
MGRGKVQLRRIENKINRQVTFSKRRGGLAKKAHEISVLCDAEVALIVFSHKGKIFEYSSDSCMEQILERYERYSYAERRLLSSNSESSVQENWSLEYAKLKAKIDLLQRNHKHYMGEDLDSLNLKDLQNLEQQLDTSLKLIRSRKNQLMHESISMLQKKEKAIQEENNMLSKKIKEKDKTVGKQAEWHQQNQVPNSASFLLQPHPCLNIGGNYQEEAEEARRNELDLNLDSLYPCHMGCFAT

SEQ ID NO: 16467 - protein, 245 aa, Nicotiana tabacum
MGRGRVQLKRIENKINRQVTFSKRRSGLLKKAHEISVLCDAEVGLIVFSTKGKLFEYSTDSCMERILERYERYSYAERQLTATDHETPGSWTLEHAKLKGRLEVLQRNQGHYAGEDLDSLCMKELQNLEHQLDSALKHIRSRKNQLMHESISELQKKDEALQEQNNNLSKQVKEGEKELAQQTQWEQQSHDHLNSSSFVLTQPLSSLHLGEAYPTAGDNGELEGSSRQQQQNTVMPPWMLRHLNG

SEQ ID NO: 16468 - protein, 209 aa, Nicotiana tabacum
MGRGKIEIKRIENSSNRQVTYSKRRNGILKKAKEISVLCDARVSVIIFASSGKMHEFSSTSLVDILDQYHKLTGRRLWDAKHENLDNEINKVKKDNDNMQIELRHLKGEDITSLNHRELMMLEDALDNGLTSIRNKQNDLLRMMRKKTQSMEEEQDQLNWQLRQLEIASMNRNMGEIGEVFHQRENEYQTQMPFAFRVQPMQPNLQERF

SEQ ID NO: 16469 - protein, 245 aa, Petunia x hybrida
MGRGRIQLKRIENKISRQVTFSKRRSGLLKKAHEISVLCDADVALIVFSTKGKLFEYSTESSMESILERYERYSYAERKLNANDSDPKENWTLEYPKLMSRIELIQRNIRHYMGQDLDPLSLRELQSLEQQIDTALKRIRSRKNQLMHESISELHKKERALQEQNNLMTKKLKENEKTQSGQTQPISSQNDATFMVPQPPSLSHHVANLTIGGAFGAKTVTNTNGVQASNSQMPPWMIRHVNNEG

SEQ ID NO: 16470 - protein, 231 aa, Petunia x hybrida
MARGKIQIKRIENQTNRQVTYSKRRNGLFKKANELTVLCDAKVSIIMISSTGKLHEFISPSITTKQLFDLYQKTVGVDLWNSHYEKMQEQLRKLKEVNRNLRKEIRQRMGESLNDLNYEQLEELMENVDNSLKLIRERKYKVIGNQIETFKKKVRNVEEIHRNLLLEFDARQEDPYGLVEQEGDYNSVLGFPNGGHRILALRLQPNHHQPNHHHHLHSGGGSDITTFALLE

SEQ ID NO: 16471 - protein, 225 aa, Petunia x hybrida
MGRGKIEIKKIENSTNRQVTYSKRRNGLFKKAKELTVLCDAKICLIMLSSTRKFHEYTSPNTTTKKMIDLYQRTLGVDIWNKHYEKMQENLNRLKDINNKLRREIRQRTGEDMSGLNLQELCHLQGNVSDSLAEIRERKYHVIKTQTDTCRKRVRNLEEQHGSLVHDLEAKSEDPTYGVVENEGHFNSAMAFANGVHNLYAFRLQTLHPNLQNGGGFGSRDLRLA

SEQ ID NO: 16472 - protein, 228 aa, Petunia x hybrida
MGRGKIEIKRIENNTNRQVTFCKRRNGLLKKAYELSVLCDAEIALIVFSTRGRVYEYANNNIKGTIERYKKATAETSNACTTQELNAQFYQQESKKLRQQIQLLQNTNRHLVGEGLSALNVRELKQLENRLERGITRIRSKKHEMILAETENLQKREIQLEQENTFLRSKIAENERLQELSMMPATGQEYNAFQQYFARNMLQLNMMEGGVPSYDPLPAHDKKSLQLE

SEQ ID NO: 16473 - protein, 245 aa, Petunia x hybrida
MGRGRVELKRIENKINRQVTFAKRRNGLLKKAYELSVLCDAEVALIIFSSRGKLYEFCSTSSMMKTLEKYQQCSYASLDPMQSANDTQNNYHEYLRLKARVELLQRSQRNLLGEDLGSLNSKELEQLEHQLDSSLKQIRSKKTQHMLDQLADLQQKEQMLAEANKQLRRKLEESAARIPLRLSWDNGGQPMQHNRLPPQTEGFFQPLGLNSSSPQFGYSPMGANEVNNAVSTAQNMNGFIPGWML

SEQ ID NO: 16474 - protein, 242 aa, Petunia x hybrida
MEFQSDLTREISPQRKLGRGKIEIKRIENTTNRQVTFCKRRNGLLKKAYELSVLCDAEVALIVFSSRGRLYEYANNSVKATIERYKKACSDSSNTGSIAEANAQYYQQEASKLRAQIGNLQNQNRNFLGESLAALNLRDLRNLEQKIEKGISKIRAKKNELLFAEIEYMQKREIDLHNNNQYLRAKIAETERSQQMNLMPGSSSYDLVPPQQSFDARNYLQVNGLQTNNHYPRQDQPPLQLV

SEQ ID NO: 16475 - protein, 225 aa, Petunia x hybrida
MGRGKIEIKRIENNTNRQVTFCKRRNGLLKKAYELSVLCEAEIALIVFSTRGRVYEYSNNNIRAIIDRYKKATVETSNAFTTQELNAQFYQQESKKLRQQIQLIQNSNRHLVGEGLSSLNVRELKQLENRLERGIARIRSKKHEMILAESEDLQKREIQLEQENAFLRSKIAENERLQELSMMPAGGQEYNAIQQYLARNMLQLNMMEGVPSYPLPSDKKSLDLE

SEQ ID NO: 16476 - protein, 245 aa, Petunia x hybrida
MGRGRVELKRIENKINRQVTFAKRRNGLLKKAYELSVLCDAEVALIIFSNRGKLYEFCSTSSMTKTIEKYQRCSYATLEANQSATDNQNNYHEYLRLKARVELLQRSQRNLLGEDLGTLSTKDLEQLENQLESSLKQIRSRKTQFMLDQLADLQQREQMLAESNKQLRQKLEESVAGIPHRLCWEDGLQAMQHNSRLPQTEGFFQPLGLNSSNSPQFGYNPAGTDVENAAATTHNMNGFIHGWML

SEQ ID NO: 16477 - protein, 212 aa, Petunia x hybrida
MGRGKIEIKRIENSSNRQVTYSKRRNGIIKKAKEITVLCDAKVSLIIFGNSGKMHEYCSPSTTLPDMLDGYQKTSGRRLWDAKHENLSNEIDRIKKENDSMQVKLRHLKGEDINSLNHKELMVLEEGLTNGLSSISAKQSEILRIVRKNDQILEEEHKQLQYALHQKEMAAMGGNMRMIEEVYHQRDRDYEYQQMPFALRVQPMQPNLHERM

SEQ ID NO: 16478 - protein, 242 aa, Petunia x hybrida
  unsure (1)..(242): unsure at all Xaa locations
MEFQSDLTREISPQRKLGRGKIEIKRIENTTNRQVTFCKRRNGLLKKAYELSVLCDAEVALIVFSSRGRLYEYANNSVKATIERYKKACSDSSNTGSIAEANAQYYQQEASKLRAQIGNXQNQNRNFLGESLAALNLRDLRNLEQKIEKGISKIRAKKNELLFAEIEYMQKREIDLHNNNQYLRAKIAETERSQQMNLMPGSSSYDLVPPQQSFDARNYLQVNGLQTNNHYPRQDQPPLQLV

SEQ ID NO: 16479 - protein, 212 aa, Petunia x hybrida
MGRGKIEIKRIENSSNRQVTYSKRRNGIIKKAKEITVLCDAKVSLIIFGNSGKMHEYCSPSTTLPDMLDGYQKTSGRRLWDAKHENLSNEIDRIKKENDNMQVKLRHLKGEDINSLNHKELMVLEEGLTNGLSSISAKQSEILRMVRKNDQILEEEHKQLQYALHQKEMAAMGGNMRMIEEVYHQRDRDYEYQQMPFALRVQPMQPNLHERM

SEQ ID NO: 16480 - protein, 246 aa, Petunia x hybrida
MGRGRVQMKRIENKINRQVTFSKRRSGLLKKAHEISVLCDAEVGLIVFSTKGKLFEYATDSCMERILERYERYSYAERQLVSTDHSSPGSWNLEHAKLKARIEVVQRNQRHYMGEDLDSLSMKDLQNLEQQLDSSLKHIRSRKNQLMHESISELQKKDKSLQEQNNLLSKKVKEREKELAQQTQWEQQNNHHEINSSSSFVLPQPLDSPHLGEAYQSTVDNGEVEGASQQQPANTMPPWMLRHLNG

SEQ ID NO: 16481 - protein, 218 aa, Petunia x hybrida
MVRGKTQMRRIENATSRQVTFSKRRNGLLKKAFELSVLCDAEVGLVIFSPRGKLYEFASSCMQEIIERYKRHTKDKVQNENQAGEQNLQLQHEAASLMKKIELLEISRRRLMGEGLQSCTLQEIQQLEKQLERSVSTIRARKIQVFKEQIARLKEKEKILAAENAMLKEKFGGFQERQVSSGEQVGEALCAEGNEKSDVETELFIGPPEGRIRRPSQN

SEQ ID NO: 16482 - protein, 268 aa, Petunia x hybrida
MIIMGRGKIEVKRIENKTSRQVTFSKRRAGLLKKTHELSVLCDAQIGLIIFSSKGKLFEYCSQPHSMSQIISRYLQTTGASLPVEDNRVQLYDEVAKMRRDTLNLQLSLQRYKGDDLSLAQYEELNELEKQLEHALNKIRARKLELMQQQMENLKKTEKMLEKENHDMYQWLMNNQMYKQESAAMDHEDHHHHHEHQQAITELNLLGEQPLLSHFTFFGDQEQPSTSTVNHFASISLTSPPANSISPYRLQPSHPNLQDSHVHGPSYD

SEQ ID NO: 16483 - protein, 218 aa, Petunia x hybrida
MQEMVRGKVQMKRIENATSRQVTFSKRRNGLMKKAYELSVLCDAEVAVVIFSQRGRLYEFSSSSMQKTIDRYRECARETLTNNSIQAQQQIQYLKEETENMAKKIEVLEVSRRKLTGQSLGSCSMNELQQIDSQLERSLKNIRARKSQLFEDEIERLKAKKNLLLEENARLSEKCGQMSREPALAPPDPLIQQQEKGNCSLSIKNSEVETDLFIGLRS

SEQ ID NO: 16484 - protein, 245 aa, Petunia x hybrida
MGRGRVQLKRIENKINRQVTFSKRRSGLLRKAHEISVLCDAEVGLIVFSTKGKLFEYSTDSCMERILERYERYSYAERQLSGATDNDTPGSWTLEHAKLKARLEVLQRNQKHYAGEDLDSLSMKELQNLEQQLDSALKQIRSRKNQLMHESISELQKKDKALQEQNNKLSKQVKEREKELAQQSQWEPQSHDLNSSSFVLSQPLNSLHLGEAYPSAGDNGEVEGSSRQQPPNTVMPPWMLRHLNG

SEQ ID NO: 16485 - protein, 253 aa, Petunia x hybrida
MGRGRVELKRIENKINRQVTFSKRRNGLLKKAYELSVLCDAEVALIIFSSRGKLYEFGNAGITKTLERYQRCCLNPQDNCGERETQSWYQEVSKLKGKFEALQRTQRHLLGEDLGPLSVKELQNLEKQLEGALAQARQRKTQIMMEQMEELRRKERHLGDVNKQLKVKVSLELSSLEAEGQAGLNRALPFLWTSNALEAGNSNFPVHHSQSNPMDCGPDPVLQYRDHHYMAADGPSGSRSMAVETNIMQGWGL

SEQ ID NO: 16486 - protein, 215 aa, Petunia x hybrida
MVRGKTQMRRIENATSRQVTFSKRRNGLLKKAFELSVLCDAEVSLIIFSTRGKLYEFSSSSMQEIIERYRRHSEDVQGEKPAVEQNNMQNLKLDAASLMKKIEILETSKRKLLGEDLGSCSLEELQQIEKQLERSISTIRARKMEVFREQIERLKGNVKVLATENAMLWEKCGDLEMQQTSGGEDLSIEGSEKSDVETELFIGLPECRTKRPLQN

SEQ ID NO: 16487 - protein, 216 aa, Petunia x hybrida
MVRGKTQMRRIENATSRQVTFSKRRNGLLKKAFELSVLCDAQVGLVIFSPRGKQYEFSSSSMQEIIERYKGHTKDKVQTENQAGEQNLQHETAGLMKKIEFLETSKRKLLGEGLGSCTLEELQKIEKQLERSVSIIRARKMQVFKEQIEKLNEKEKALAAENAMLREKFGGLQQRQASSGEKEGEVVCTEGSDKSDVETELFIGPPECRIRHRLQN

SEQ ID NO: 16488 - protein, 247 aa, Petunia x hybrida
MVFPNQEFESSSSQRKSGRGKIEIKRIENTTNRQVTFCKRRNGLLKKAYELSVLCDAEVALIVFSSRGRLYEYANNSVRATIDRYKKHHADSTSTGSVSEANTQYYQQEAAKLRRQIRDIQTYNRQIVGEALSSLSPRGLKNLEGKLEKAIGRVRSKKNELLFSEIELMQKREIEMQNANMYLRAKIAEVERATQQMNLMHGGGSEYQQQPMSSTSQPYDARNFLPVNLLEPNPHYSRQDQTALQLV

SEQ ID NO: 16489 - protein, 224 aa, Petunia x hybrida
MGRGRVELKRIENKINRQVTFAKRRNGLLKKAYELSVLCDAEVALIIFSNRGKLYEFCSSSSMLKTLERYQKCNYGAPETNISTREALEISSQQEYLKLKARYEALQRSQRNLLGEDLGPLNSKELESLERQLDMSLKQIRSTRTQLMLDQLQDLQRKEHALNEANRTLKQRLMEGSTLNLQCSKMHKMWATADKQLKLREMASFILWNVNPLYKLGIKMIQLQ

SEQ ID NO: 16490 - protein, 241 aa, Petunia x hybrida
MGRGRVELKRIENKINRQVTFAKRRNGLLKKAYELSVLCDAEVALIIFSNRGKLYEFCSSSSMLKTLERYQKCNYGAPETNISTREALEISSQQEYLKLKARYEALQRSQRNLLGEDLGPLNSKELESLERQLDMSLKQIRSTRTQLMLDQLQDLQRKEHALNEANRTLKQRLMEGSTLNLQWQQNAQDVGYGRQATQTQGDGFFHPLECEPTLQIGYQNDPITVGGAGPSVNNYMAGWLP

SEQ ID NO: 16491 - protein, 240 aa, Petunia x hybrida
MGRGKVELKRIENKINRQVTFAKRRNGLLKKAYELSVLCDAEVALIIFSNRGKLYEFCSSSSMSTTLEKYHRYCYGALEGSQPSTDSQNIYQEYLKLKTRVEALQQSQRHMLGADLGQLGTKDLEQLERQLDSSLRQIRSTRTQNMLDQLSELQEKQEQSLIEMNKSLRMKLEELGVAFQTSMHSGEESVQYRQQPAEPEGLFHPVECNNSLPIRYNTLPREHVVPSAQDSTGVLPGWML

SEQ ID NO: 16492 - protein, 210 aa, Petunia x hybrida
MGRGKIEIKRIENSSNRQVTYSKRRNGILKKAKEISVLCDARVSVIIFASSGKMHEFSSTSLVDILDQYHKLTGRRLLDAKHENLDNEINKVKKDNDNMQIELRHLKGEDITSLNHRELMILEDALENGLTSIRNKQNEVLRMMRKKTQSMEEEQDQLNCQLRQLEIATMNRNMGEIGEVFQQRENHDYQNHMPFAFRVQPMQPNLQERL

SEQ ID NO: 16493 - protein, 246 aa, Petunia x hybrida
MGRGRVELKKIENKINRQVTFAKRRNGLLKKAYELSVLCEAEVALIIFSNRGKLYEFSSTSNMVKTLDRYQKCSYGTLEVNHRSVKDNNEERIYREYLKLKAKYESLQRYQRQLLGDELGPLNIDELEHLELQLDSSLKLIKSTRTQLMLDQLSDLQTKEKLWVEANKVLERKLEQIYAENNIQQSWGGGEQSGAYGQQHAQTQGFFQPLECNSTLQIGYDPATSSQITAVTSGQNVNGIIPGWML

SEQ ID NO: 16494 - protein, 250 aa, Solanum tuberosum
MGRGRVQLKRIENKINRQVTFSKRRSGLLKKAHEISVLCDAEVGLIVFSTKGKLFEYANDSCMERLLERYERYSFAERQLVPTDHTSPGSWTLEHAKLKARLEVLQRNQKHYVGEDLESLNMKELQNLEHQLDSALKHIRSRKNQLMHESISVLQKQDRALQEQNNQLSKKVKEREKEVAQQNQWDQQNHEINSSTFVLPQQLDSPHLGEAYQNTNVVDNGEVEGGNSSQQQGAANNTVMPQWMLRHLNG

SEQ ID NO: 16495 - protein, 228 aa, Solanum tuberosum
MARGKIQIKKIENQTNRQVTYSKRRNGLFKKANELTVLCDAKVSIVMISSTGKLHEFISPSITTKQLFDLYQKTIGVDIWTSHYEKMQEQLRKLKDVNRNLRKEIRQRMGESLNDLNFEQLEELMENVDNSLKLIRERKYKVIGNQIETYRKKVRNVEEIHRNLLLEFDARQEDPYGGLVEQEGDYNSVLGFPTGGHHILALGLQPNNNHHHHLHSGGGSDITTFALG

SEQ ID NO: 16496 - protein, 228 aa, Solanum tuberosum
MARGKIQIKKIENQTNRQVTYSKRRNGLFKKANELTVLCDAKVSIVMISSTGKLHEFISPSITTNNLFDLYQKTIGVDIWTSHYEKMQEQLRKLKDVNRNLRKEIRQRMGESLNDLNFEQLEELMENVDNSLKLIRERKYKVIGNQIETYRKKVRNVEEIHRNLLLEFDARQEDPYGGLVEQEGDYNSVLGFPTGGHHILALGLQPNNNHHHHLHSGGGSDITTFALG

SEQ ID NO: 16497 - protein, 218 aa, Ipomoea batatas
MGRGKVEIRRIEKSTNRRVTFWKRRNGLLKKAMEMGILCDAEVGLMIFSSTGKLHEFATTSIRSVIERYNKTQGDSLQSPLDPTLELKFWQIEVAILRQQLHNMQEDHRKVMGEVYGLSVKDLQNLENQLEMSLSGIRMKKEQILIEQIQELTHKQGSFVHQENFELFNKFQAYGTSDPNAVNGDTISPYDFTISEESQGHIHFQLPQNFSDLARALY

SEQ ID NO: 16498 - protein, 220 aa, Rumex acetosa
MARGKIQIKRIENDTNRQVTYSKRRSGLFKKAKELTILCDAKVSIIMISNTNKLHEFISPNITTKQVYDAYQTTFSPDLWTSHYAKMEQELRNLNEVNRQIRKEIRRRMGCCLEDMSYQELVFLQQDMENAVTNLSERKYKVLSNQIETGKKKLRNVQGIRQNLMQAYDALREDPHCGLVYNGGEYDHVMRSHLVGLHFPREAHIPSAGGSCLTTYTYLE

SEQ ID NO: 16499 - protein, 195 aa, Rumex acetosa
MTRGQIQIRRIENITNRQVTYSKRRNGLFKKAQELVVLCDAKVSIIMISSRNKLHEFTTPGTTTKQIYDMYQQLSGNDVWSSQYAMMLEELRKIKEANGNIRKEIRRRMGFSMEDMSFRELVILQQDMQDSVAKISERKYKAIANQIETTRKKLRNSHGIHRSLVHAFGALNLNEYGADPPTAAGSYLTTYTYLE

SEQ ID NO: 16500 - protein, 252 aa, Antirrhinum majus
MGRGRVQLKRIENKISRQVTFSKRRSGLLKKAHEISVLCDAEVALIVFSTKGKLFEYSTESSMERILERYERYSYAEKKLTSDSHEPEENWCLEYPKLVARIELLERNIRNYVGEDLDHLSMRELQSLEQQLDTALKRTRTRKNQLMHESISQLQKKERSLQDQNNILAKKIKDNEKQQNEKQQDVHEGFAQSSSSINMLLQPPATQLHAVPCLPISGGFQQTVRVEEGGDRTRIADSRSHIPPWLLQHVNQ

SEQ ID NO: 16501 - protein, 247 aa, Antirrhinum majus
MGRGRVELKRIENKINRQVTFAKRRNGLLKKAYELSVLCDAEVALIIFSNRGKLYEFCSSSNMLKTIERYQKSSYGSLEVNHQAKDIEASSYKEYLKLKSKYESLQGYQRHLLGDDLGPLNMNDLEHLEHQLETSLKHIRSTRTQVMLDQLSDLQTKEKMMVDANKALERKLEEIYAANHLQQSWGGGGDHSNAYNDHQHAQSQGFFQPLECNSTLQIGFNDPVASSQMTAPTDAQNMHGLVPGWML

SEQ ID NO: 16502 - protein, 248 aa, Antirrhinum majus
MGRGKVQLKRIENKINRQVTFSKRRGGLLKKAHELSVLCDAEVALIVFSNKGKLFEYSTDSCMDRILEKYERYSFAERQLVSNEPQSPANWTLEYSKLKARIELLQRNHRHYMGEDLDSMSLKEIQSLEQQLDTALKNIRTRKNQLLYDSISELQHKEKAIQEQNTMLAKKIKEKEKEIAQQPQWEHHRHHTNASIMPPPPQYSMAPQFPCINVGNTYEGEGANEDRRNELDLTLDSLYSCHLGCFAA

SEQ ID NO: 16503 - protein, 246 aa, Antirrhinum majus
MASLSDQSTEVSPERKIGRGKIEIKRIENKTNQQVTFCKRRNGLLKKAYELSVLCDAEVALVVFSSRGRLYEYANNSVKATIDRYKKASSDSSLNGSISEANTQYYQQEASKLRAQISNLQNQNRNMLGESLGALSLRELKNLESRVERGISRIRSKKNELLFAEIEYMQKRQEIDLHHNNQYLRAKIAESERVQGQHMNLMPGGSSGYEQLVETQPFDARNYLQVNGLQPNNDYPRQDQLPLQLV

SEQ ID NO: 16504 - protein, 215 aa, Antirrhinum majus
MGRGKIEIKRIENSSNRQVTYSKRRNGIMKKAKEISVLCDAHVSVIIFASSGKMHEFCSPSTTLVDMLDHYHKLSGKRLWDPKHEHLDNEINRVKKENDSMQIELRHLKGEDITTLNYKELMVLEDALENGTSALKNKQMEFVRMMRKHNEMVEEENQSLQFKLRQMHLDPMNDNVMESQAVYDHHHHQNIADYEAQMPFAFRVQPMQPNLQERF

SEQ ID NO: 16505 - protein, 227 aa, Antirrhinum majus
MARGKIQIKRIENQTNRQVTYSKRRNGLFKKAHELSVLCDAKVSIIMISSTQKLHEYISPTTATKQLFDQYQKAVGVDLWSSHYEKMQEHLKKLNEVNRNLRREIRQRMGESLNDLGYEQIVNLIEDMDNSLKLIRERKYKVISNQIDTSKKKVRNVEEIHRNLVLEFDARREDPHFGLVDNEGDYNSVLGFPNGGPRIIALRLPTNHHPTLHSGGGSDLTTFALLE

SEQ ID NO: 16506 - protein, 239 aa, Antirrhinum majus
MEFPNQDSESLRKNGRGKIEIKRIENITNRQVTFCKRRNGLLKKAYELSVLCDAEVALVVFSSRGRLYEYANNSVRATIERYKKASADSSNSVSTSEANTQFYQQEANKLRRQIREIQTSNRQMLGEGVSNMALKDLKSTEAKVEKAISRIRSKKNELLFAEIEHMQKRELELHNANMFLRAKIAEGERAQQQMNLMPGSDYQPMTSQSYDVRNFLPMNLMEPNQQQYSRHDQTALQLV

SEQ ID NO: 16507 - protein, 247 aa, Antirrhinum majus
MGRGKIEVKRIENNTSRQVTFSKRRSGLMKKTHELSVLCDAQIGLIVFSTKGKLTEYCTPPFSMKQIIDRYVKAKGILPEMENRAGPHADNDQVIKELTRMKEETLNLQLNLQRYKGDDLSTVRFEELTELEKLLDQSLNKVRARKLELLHEQMENLKRTEFMLEKENQEMYHWLMSNQIQRQAEVEHHHQQQVMTELKLVEQQQPLMNEFPFFGEDLHLGTLPLLDTHSYRLQPTQPNLQDPAQIN

SEQ ID NO: 16508 - protein, 242 aa, Antirrhinum majus
MGRGRVELKRIENKINRQVTFAKRRNGLLKKAYELSVLCDAEVALIIFSNRGKLYEFCSSTSMLNTLERYQKCNYGPPETNVSTREALELSSQQEYLKLKARYEALQRSQRNLLGEDLGPLNSKELESLERQLDMSLKQIRSTRTQAMLDTLTDLQRKEHALNEANRSLKHRLMDGSQISLQWNPNAEDHVGYGRQPSQPSADGFYHPLECEPTLHIGFQSDQITVAGAGPSVNNYISGWLP

SEQ ID NO: 16509 - protein, 243 aa, Antirrhinum majus
MGRGRVELKRIENKINRQVTFAKRRNGLLKKAYELSVLCDAEVALIIFSNRGKLYEFCSNSGTMLKTLERYQKCNYGAPEANVSTREALELSSQQEYLKLKARYEALQRSQRNLLGEDLGPLNSKELESLERQLDMSLKQIRSTRTQAMLDTLTDLQRKEHALNEANRSLKHRLMEGSQISLQWNPNAHDMGYGRQAAAQPQGDGFFHPLECEPTLQMGFQSEITVGAAGPSVNNYNMTGWLP

SEQ ID NO: 16510 - protein, 92 aa, Mimulus guttatus
ARGKIQIKRIENQTNRQVTYSKRRNGLFKKAHELTVLCDAKVSILMISSTQKLHEHISPSITTKQMFDQYQKAVGVDVWNTHYERMQEHLRK

SEQ ID NO: 16511 - protein, 232 aa, Chrysanthemum x morifolium
MRGKIQIKKIENSTNRQVTYSKRRNGLFKKASELTVLCDAKVSIIMVSCTDKLHEYISPSITMKQFFDQYQKTTGIDLWNSHYQKMQEELRQQKEVNRNLRKQIRQRLGDCLEDLGFEELLALEKDSQEAVYIIRERKLKVIGNKVETSKKKVRSAQDVYKKLMHEFDIRGEDPQYGMIEDGVDYENVYGYPHMGAQHILTLRLQPDHPNNLHAIATGATTSSDLTTYGLFG

SEQ ID NO: 16512 - protein, 196 aa, Chrysanthemum x morifolium
MGTGKIEIKRIENTSNRQVTYSKRKNGIIKKAKEITVLCDANVSLVIYGSSGKMYEYCSPKTNLIDMLDRYQRLSGNKLWDAKHENLQNEIDRIKKENESMQIELRHLKGEDITSLNYEELIAYEDALENGLTNIREKKDDIPKIMRKHEQVLEEENKHLMYLVQQSEMAAMGDYQAHEPFSFRVQPMQPNLHERM

SEQ ID NO: 16513 - protein, 229 aa, Chrysanthemum x morifolium
MARGKIQIKKIENSTNRQVTYSKRRNGLFKKASELTVLCDAKVSIIMVSCTDKLHEYISPSITTKQFFDQYQKASGIDLWNSHYEKMQEVLRQLKDVNKKLRTHIRQRLGDCLDHLGFEELLDLEKESQEAVYVIRERKLKVIGNKLETSKKKVRSAQDVYKKLMHEFDIRGEDPQFGMIEDAGEYETIYGYPPHIATQRILTLRLQPNHPDNLHAATASDLTTYSLLG

SEQ ID NO: 16514 - protein, 265 aa, Chrysanthemum x morifolium
MANSDAFELDFSCIDRSMSFPDESADMSPQRKLGKGKIEIKRIENTTNRQVTFCKRRNGLLKKAYELSVLCDAEVALIVFSSRGRLYEYANNSVRGTIDRYKKACLDPPSSGSVSEANAQYYQEESGKLRSQIANLQNQNRQFYRNIMGESLTDMPMKDLKNLETKLEKAITRIRSKKNELLFAEIEYMQKRELELHNNNQFLRAKIAENERSAQQQHMSLMPGSSDYELVTPHQPFDGRNYLQSNEMQPSNDYSCQDQTPLQLV

SEQ ID NO: 16515 - protein, 91 aa, Mimulus nasutus
  unsure (1)..(91): unsure at all Xaa locations
ARGKIQIKRIENQTXRQXTYSKRRNGLFKKAHELTVLCDAKVSILMISSTQKLHEYISPSITTKQMFDQYQKAVGVDVWNTHYERMQEHLR

SEQ ID NO: 16516 - protein, 199 aa, Dicentra eximia
AGIMKKARELTVLCDAEVSLIMFSSTGKFSEYISPSATTKRMFDRYQQVSGVNLWNSHYERMQDNLNKQKEINNKLRREIRQRMGEDLNDLSIEELRGLEQNMDNSLKIVRDRKYHVITTQTETYRKKLRNLHETHNNLLREFEGRDEDTHYALANEGDYETALEMANGGQNIFAFRLQPSQPNLHDGGGYGSHDLRLA

SEQ ID NO: 16517 - protein, 167 aa, Helianthus annuus
MGRGKIEIKRIENTSNRQVTYSKRKNGIIKKAKEITVLCDANVSLVIYGSSGKMYEYCSPKTNLIDMLDRYQRLSGNKLWDAKHENLQNEIDRIKKENESMQIELRHLKGEDMTSLNYEELIGYEDALENGLTNIREKKDEIPKIMRKREQVLEDVVIYAFMQIMLR

SEQ ID NO: 16518 - protein, 196 aa, Helianthus annuus
MGRGKIEIQRIDNTIHRLVTYSKRKNGIIRKAKEITVLCDANVSLVVYGSSGKMYEYCSPNTNLTDMLDRYPRLSGNKLWDAKHENLQIEIDRIKKENESMQIELRHLKGEDITSLNYEELIAFEDALENGLTHIREKKDEIPQIMRKHEQVLEEENKHLMYMVQQSEMAAMGDYQADGPFSFRVQPMQPNLHERM

SEQ ID NO: 16519 - protein, 210 aa, Helianthus annuus
MGRGRIEIQKIENNTNRQVTYSKRRNGIFKKAHELTVLCDAKVSLIMFSNTGKFHEYISPSTTTKKIYDMYQTTLGFDLWSSHYERMQETLKKLKDSNNKLRREIRQRVLGEDLDGLDMNDLTILEQHMQDSLTVVRERKVKNLEQRNCNLRLDYDTIHQLEKKYGMVENEVGYESTIAYSNLYGFCENPNNNIIHGSGSGYEPHGLRLD

SEQ ID NO: 16520 - protein, 247 aa, Helianthus annuus
MSFPNESGEMSPQRKLGRGKIEIKRIENTTNRQVTFCKRRNGLLKKAYELSVLCDAEVALIVFSSRGRLYEYANNSVKGTIDRYKKACLDPPSSGSVAEANAQFYQQEAAKLRQQIANLQNQNRQFYRNIMGESLGNMPAKDLKNLEGKLEKGISRIRSKKNELLFAEIEYMPKRENELHNNNQFLRAKIAENERSQQQHMSLMPGSSDYDLVPPHQPFDGRNYLQVNDLQPNNSYSCQDQTPLQLV

SEQ ID NO: 16521 - protein, 267 aa, Helianthus annuus
MENSEAIEHEHDFSCIDRSMSFQNEDSGDISPQRRIGKGKIEIKRIENTTNRQVTFCKRRNGLLKKAYELSVLCDAEVALIVFSSRGRLYEYANNSVRGTIDRYKKSCLDPPSTGSVAEANAQFYQQEATKLRQQIANLQNQNRQFYRNIMGESLADMPGKELKNLESKLEKAINRIRAKKNELLFAEIEYMQKRELELHNSNQFLRARISENERAQQQHMSLMPGSSGYNDLGPHQSFDGLNDLQTNELQLNNNYSCQDQTPLQLV

SEQ ID NO: 16522 - protein, 248 aa, Helianthus annuus
MSFQNEDSGDISPQRRIGKGKIEIKRIENTTNRQVTFCKRRNGLLKKAYELSVLCDAEVALIVFSSRGRLYEYANNSVTGTIDRYKKSCLDPPSTGSVAEANAQFYQQEATKLRQQIANLQNQNRQFYRNIMGESLADMPGKELKNLESKLEKAINRIRAKKNELLFAEIEYMQKRELELHNSNQFLRARIAENERAQQQHMSLMPGSSGYNDLGPHQSFDGLNDLQTNELQLNNNYSCQDQTPLQLV

SEQ ID NO: 16523 - protein, 244 aa, Liquidambar styraciflua
LATTEFPNQSSEGSSSQKKMGRGKIEIKRIENTTNRQVTFCKRRNGLLKKAYELSVLCDAEIALIVFSSRGRLYEYANNSVKSTIERYKKASDTSNPGSVSETNAQFYQQESSKLRRQIRDIQNLNRHIMGEALSSLTFRELKNLEGRLEKGISRIRSKKNELLFAEIEYMQKREIELQNANMYLRAKIAENERNQQQTELMPGSVYETMPSSQPYDRSFLVANLLEPPNHHYSRQDQTPLQLV

SEQ ID NO: 16524 - protein, 261 aa, Lolium perenne
MGRGKVQLKRIENKINRQVTFSKRRNGLLKKAHEISVLCDAEVAVVVFSPKGKLYEYATDSSMDKILERYERYSYAEKALISAESESEGNWCHEYRKLKAKIETIQKCHKHLMGEDLECLNLKELQQLEQQLESSLKHIRSRKSHLMMESISELQKKERSLQEENKALQKELVERQKAARQQQQEQWDRQTQTQQAQNQPQAQTSSSSSSFMMRDQQAHAQQNICYPPVTMGGEAVAAAPGQQGQLRIGGLPPWMLSHLNA

SEQ ID NO: 16525 - protein, 245 aa, Lolium perenne
MGRGKVQLKRIENKINRQVTFSKRRSGLLKKAHEISVLCDAEVGLIIFSTKGKLYEFATDSCMDKILERYERYSYAEKVLISTESEIQGNWCHEYRKLKAKVETIQRCQKHLMGEDLESLNLKELQQLEQQLESSLKHIRARKNQLMHESISELQKKERSLQEENKILQKELIEKQKAHTQQAQWEQTQPQTSSSSSSFMMGEATPATNCSNPPAAASDRAEDATGQPSARTVLPPWMVSHINNG

SEQ ID NO: 16526 - protein, 245 aa, Lolium perenne
MGRGKVEMRRIENKISRQVTFAKRRNGLLKKAYELSLLCDAEVALIIFSSRGRLFEFSSSSCIYKTLERYRTCNHNSQEANPPLENEISYQEYLKLKTRVEFLESSQRNILGQDLGPLSIKELDQIENDIDVSLKHIRSRKSQVLVDQLSDLKNKEQELQDQNKDLRKKLQDTILEKNAVHMLWQDGGQNSGHAIEPYQGLLQYPDHGSSMQIGYHQSYTDQLNNKDIASQNNPNGEPGSSAGWI

SEQ ID NO: 16527 - protein, 246 aa, Lolium perenne
MGRGRVELKRIENKINRQVTFAKRRNGLLKKAYELSVLCDAEVALIVFSNRGKLYEFCSTQSMTKTLEKYQKCSYAGPETTVQNRENEQLKNSRNEYLKLKARVDNLQRTQRNLLGEDLDSLGIKELESLEKQLDSSLKHIRTTRTQIMVDQLTELQRREQMFSEANKCLRIKLEESNQVHGQQLWEHNNNLLSYERQPEVQPPMNGGNGFFHPLDPAGEPTLHIGYPQESLNGSCMTTFMSPWLP

SEQ ID NO: 16528 - protein, 260 aa, Lolium perenne
MGRGRVELKRIENKINRQVTFSKRRNGLLKKAYELSVLCDAEVALIIFSSRGKLYEFGSAGTTKTLERYQHCCYNAQDSSSALSETQSWYQEMSKLKAKFEALQRTQRHLLGEDLGPLSVKELQQLEKQLECSLSQARQRKTQLMMEQVEELRRKERQLGEINRQLKHKLDAEGSSSNSFRAMQQITWAAGTVVDEGAGAYHMHHQQQPNHSAAMDCEPTLQIGYPHQFAAAEQAANNIPRSSAPGGENNFMLGWVLGAN

SEQ ID NO: 16529 - protein, 228 aa, Lolium perenne
MGRGKVELKRIDNKISRQVTFAKRRNGLLKKAYELSVLCDAEVALIIFSTRGRLFEFSTSSCMYKTLERYRSCNYNSKATATPETELSNYQEYLKMKTRVEFLQTTQRNLLGEDLGPLSIKELEQLENQIEISLKNIRSTKSQQSLDQLFELKRKEQQLQDVNKDLRRKIQETSAENVLHMSCQDVGPSGSSGQANQANEQELFHSAVCDPTLHIGFHQSYLDQLNNN

SEQ ID NO: 16530 - protein, 279 aa, Lolium perenne
MGRGPVQLRRIENKINRQVTFSKRRSGLLKKAHEISVLCDAEVALIVFSTKGKLYEYSSQDSNMDVILERYQRYSFEERAIVDQNIGGQANWGDEFGSLKIKLDALQKSQRQLLGEQLDPLTTKELQQLEQQLDSSLKHIRSRKNQLLFESISELQKKEKSLKDQNGVLQKHLVETEKEKSNVLSNIHHREQTNGAANIHRREQMNETTHIHNQEQLNGATTSSPSPTPVAVLDSVATLNIGSSQSREAAGEEPESQPSPAQANSGKLPPWMLRTISNR

SEQ ID NO: 16531 - protein, 241 aa, Lolium perenne
MGRGKVVLQRIENKISRQVTFAKRRNGLLKKAYELSILCDAEVALVLFSHAGRLYQFSSSSNMLKTLERYQRHIFASQDAVVPTSDEMQNNYLEYMELKARVEVLQHSQRNLLGDDLAPLNTSELDQLESQVGKTLRQIRSRKTQVLLDELCDLKRKEHMLEDANLTLKRKLDEMEVDAAPPPPPPPQQQQLPWQNDHGVAVPSYAPPQPDHFFQALECSPSLQPAFRCMDVNQPPPAWMA

SEQ ID NO: 16532 - protein, 187 aa, Oryza sativa
  unsure (1)..(187): unsure at all Xaa locations
MGRGRSEIKRIENPTQRQSTFYKRRDGLFKKARELAVLCDADLLLLLFSASGKLYHFLSPTVPSVREFVERYEATTHTKVWADIRQERRAELEKVGSMCDLLEKQLRFMTVDDGEEYTVPSLEALEHNLEAAMRKVRSEKDRKIGGEICYLQNIIRGRQEERYGLCDKIAHAQTLKDVGGSTSLSNX

SEQ ID NO: 16533 - protein, 412 aa, Oryza sativa
MGRGKIEIKRIENATNRQVTFSKRRGGLLKKANELAVLCDARVGVVIFSSTGKMFEYCSPTCSLRELIEHYQTVTNTHFEEINHDQQIFVEMTRMRNEMEKLDGGIRRFTGDDLSNLTLADINDLEQQLEFSVTKVRARKHQLLNQQLDNLRRKINENHHQAAVGGGDVKAMVEMAPVLSMLTAAPAYYGEESSSTALQLTPPLPVDAAAAAGFRLQPTQPNLQDPGCSSSSFHAAAAGHGLQLWHRRIWSPRVDFANLLGAFGGSGEEEERERKKRRDKKESRRSSRDEQAEEEEEEERRRRKKKKHGDRGKDKERDSKEKHSKEKEKSKRKHKDDDFKEISKDDYFAKNNEFATWLKEEKGKFFSDLSSESARDLFEKFVKTWNKGKLPSQYYEGITRGPRSAHKWNIKV

SEQ ID NO: 16534 - protein, 240 aa, Oryza sativa
MICVIFPFVISSNFIAIHLKNLNFIVQIRGHSMGRGKIAIKRIDNTMNRQVTFSKRRGGLMKKARELAILCDADVGLIVFSCTGRLYDFSSSSSMKSIIERYQEAGEEHCRLLNPMSEAKFWQREVTTLRQQVQNLHHNNRQLLGEEISNFTVRDLQLLQNQVEMSLHSIRNKKDQLLAEEILKLNEKGSLVQKENSELRKKFNIAHQRNIELHKKVKFLFDLLETYKNVDKNGGGLLVI

SEQ ID NO: 16535 - protein, 300 aa, Oryza sativa
MGRGKIEIKRIENKTSRQVTFCKRRNGLLKKAYELAILCDAEIALIVFSSRGRLYEFSNVNSTRSTIERYKKASASTSGSAPVIDVNSHQYFQQEAAKMRHQIQTLQNANRHLIGESIGNMTAKELKSLENRLEKGISRIRSKKHELLFSEIEYMQKREADLQNENMFLRAKVAEAERAEHDDQQAAEDDEMAPAPAVGGGSSSGTELEALPATFDTREYYQPAPPVSMLAAAAAAAAAQYSSDHHQTALHLGYFKAASSRSIAMDANIACIRSNYTVFRKSDDDEDDNNYCGIVRIVRW

SEQ ID NO: 16536 - protein, 257 aa, Oryza sativa
MGRGKIEIKRIENATNRQVTFSKRRGGLLKKANELAVLCDARVGVVIFSSTGKMFEYCSPTCRELIEHYQTVTNTHFEEINHDQQIFVEMTRMRNEMEKLDGGIRRFTGDDLSNLTLADINDLEQQLEFSVTKVRARKHQLLNQQLDNLRRKEHILEDQNSFLCRMINENHHQAAVGGGDVKAMVEMAPVLSMLTAAPAYYGEESSSTALQLTPPLPVDAAAAAGFRLQPTQPNLQDPGCSSSSFHAAAAGHGLQLW

SEQ ID NO: 16537 - protein, 224 aa, Oryza sativa; identical to SEQ ID NO: 16430

SEQ ID NO: 16538 - protein, 224 aa, Oryza sativa
  unsure (1)..(224): unsure at all Xaa locations
MARGKVQLRRIENPVHRQVTFCKRRAGLLKKARELSILCEADIGIIIFSAHGKLYDLATTGTMEELIERYKSASGEQANACGDQRMDPKQEAMVLKQEINLLQKGLRYIYGNRANEHMTVEELNALERYLEIWMYNIRSAKMQIMIQEIQALKSKEGMLKAANEILQEKIVEQNGLIDVGMMVADQQNGHFSTVPLLEEITNPLTILSGYSTCRGSEMGYSFXH

SEQ ID NO: 16539 - protein, 223 aa, Oryza sativa
MGRGKIEIKRIKNATNRQVTYSKRRTGIMKKARELTVLCDAQVAIIMFSSTGKYHEFCSPSTDIKGIFDRYQQAIGTSLWIEQYENMQRTLSHLKDINRNLRTEIRQRMGEDLDGLEFDELRGLEQNVDAALKEVRHRKYHVISTQTETYKKKVKHSYEAYKTLQQELGLCEEPAWFVDNTGGGWDGGAGAGAAADMFAFRVVPSQPNLHGMAYGGNHDLRLG

SEQ ID NO: 16540 - protein, 233 aa, Oryza sativa; identical to SEQ ID NO: 16421

SEQ ID NO: 16541 - protein, 233 aa, Oryza sativa; identical to SEQ ID NO: 16421

SEQ ID NO: 16542 - protein, 275 aa, Oryza sativa
MGRGRIEIKRIENTTSRQVTFCKRRNGLLKKAYELSVLCDAEVALIVFSSRGRLYEYSNNNNVKATIDRYKKAHACGSTSGAPLIEVNAQQYYQQESAKLRHQIQMLQNTNKHLVGDNVSNLSLKELKQLESRLEKGIAKIRARKNELLASEINYMAKREIELQNDNMDLRTKVNTYQIAEEEQQLQQVTVARSAAMELQAAAAAQQQQQNPFAVAAAQLDMKCFFPLNLFEAAAQVQAVAAQRQQIIPTELNLGYHHHLAIPGATAADAPPPHF

SEQ ID NO: 16543 - protein, 270 aa, Oryza sativa
MGRGRIEIKRIENTTSRQVTFCKRRNGLLKKAYELSVLCDAEVALIVFSSRGRLYEYSNNNNVKATIDRYKKAHACGSTSGAPLIEVNAQQYYQQESAKLRHQIQMLQNTNKHLVGDNVSNLSLKELKQLESRLEKGIAKIRARKNELLASEINYMAKREIELQNDNMDLRTKIAEEEQQLQQVTVARSAAMELQAAAAAQQQQQNPFAVAAAQLDMKCFFPLNLFEAAAQVQAVAAQRQQIIPTELNLGYHHHLAIPGATAADAPPPHF

SEQ ID NO: 16544 - protein, 209 aa, Oryza sativa
MGRGKIEIKRIENSTNRQVTFSKRRSGILKKAREISVLCDAEVGVVIFSSAGKLYDYCSPKTSLSRILEKYQTNSGKILWDEKHKSLSAEIDRIKKENDNMQIELRHLKGEDLNSLQPKELIMIEEALDNGIVNVNDKLMDHWERHVRTDKMLEDENKLLAFKLHQQDIALSGSMRDLELGYHPDRDFAAQMPITFRVQPSHPNLQENN

SEQ ID NO: 16545 - protein, 209 aa, Oryza sativa; identical to SEQ ID NO: 16544

SEQ ID NO: 16546 - protein, 605 aa, Oryza sativa
  unsure (1)..(605): unsure at all Xaa locations
MGRGRVELKKIENPTNRQVTFSKRRMGLLKKANELAILCDAQIGVIVFSGTGKMYEYSSPPWRIANIFDRYLKAPSTRFEEMDVQQRIIQEMTRMKDENNRLRIIMRQYMGDDLASLTLQDVSNLEQQIEFSLYKVRLRKQQQLLDQQLLEMRREMQIPGDQSNYLWNLIGEQAQAPLXGESEAVPAVGCGWQQPXMYNQDAESSMTALQLSPQLEYKLQPLQPNLQEEANLHGYVLRLWMAEETKVLLSLPRLERLIARGMWGEAIGYACRFLPRRPPSLPAQRTHLTAEAQTLLLFLHMHRCFADVVAGNETGAAWSDKHRRRYCLARVTGISSHAIAIRRIIQTFVLSDKIRESMDWGRVREKVVRVVRRLVHDTPELAGFLDLPGGMVKPHNVLPIGFGVPSSGQPDQGLSLDSSLRAGCESSEHHQWRYPLRSSEKKGAPVAAITQTMFSTIKTDSENSGTASATKKGTYMHSSQEDCHTENYCQGFIPRKHQREELAPEEDIDPKRQHTTLTFGEASLSSPSGTLHVNSDELHAASELFWSAGCFLDEEDKTVDELLANAVGTFGAFFILLLLLPSQLRLFMSPKDIYVIAQLYLSPSA

SEQ ID NO: 16547 - protein, 233 aa, Oryza sativa
MVRGRTELKRIENPTSRQVTFSKRRNGLLKKAFELSVLCDAEVALIVFSPRGRLYEFASAPSLQKTIDRYKAYTKDHVNNKTIQQDIQQVKDDTLGLAKKLEALDESRRKILGENLEGCSIEGLRARGMKLEKSLHNIRLKKTELLERQIAQLKEKERTLLKDNENLRGKHRNLEAAALVANHMTTTTAPAAWPRDVPMTSSTAGAADAMDVETDLYIGLPGTERSSNRSETG

SEQ ID NO: 16548 - protein, 238 aa, Oryza sativa
  unsure (1)..(238): unsure at all Xaa locations
XFVKVDRLINMGRGKIEIKRIENKTSRQVTFCKRRNGLLKKAYELAILCDAEIALIVFSSRGRLYEFSNFSTRSTIERYKKASASTSGSAPVIDVNSQYFQQEAAKMRHQIQTLQNANRHLIGESIGNMTAKELKSLENRLEKGISRIRSKKHELLFSEIEYMQKREADLQNENMFLRAKVSYPYTVNNHDLHTCLVGGAKVGLNFSSSHKNISFIETYIFVRETKFSPSSQTPLIYI

SEQ ID NO: 16549 - protein, 359 aa, Oryza sativa
MVQCHEVGQPRGERRKVQEEEKHQGQYIDGLSPHRPPLHLISSFPNHSLLLEHTPLFLIIISSLIREELANMHIYKEQEAEPSTGLMMPEPAPVASPGSGGSGGSGSVGAEKIGSRGKIEIKRIENTTNRQVTFCKRRSGLLKKAYELSVLCDAEVALVVFSSRGRLYEYSNNSVKETIERYKKANSDTSNASTVAEINAQHYQQEAAKLKQQITNLQNSNRTLVGDNITTMNHRELKQLEGRLDKGLGKIRARKNELLCAEIEYMQRRETELQNDNMYLKSKVAESERGLQTVNMMGSASTSEYVQNMIHYDPRNFLQFNIMHQPQYYPEQEDRKAFMSGKKYSQCNIVRVHSSTNEI

SEQ ID NO: 16550 - protein, 267 aa, Oryza sativa
MGRGKVQLKRIENSMNRQVTFSKRRNGLLKKAHEISVLCDAEVAAIVFSPKGKLYEYATDSRMDKILERYERYSYAEKALISAESESEGNWCHEYRKLKAKIETIQKCHKHLMGEDLESLNLKELQQLEQQLESSLKHIRSRKSHLMLESISELQKKERSLQEENKALQKELVERQKNVRGQQQVGQWDQTQVQAQAQAQPQAQTSFFFFFMLRDQQALLSPQNICYPPVMMGQRNDAAARRRWRPKARCNFRIGGFPPWMLSTFKA

SEQ ID NO: 16551 - protein, 267 aa, Oryza sativa; identical to SEQ ID NO: 16550

SEQ ID NO: 16552 - protein, 249 aa, Oryza sativa
  unsure (1)..(249): unsure at all Xaa locations
MGRGKIEIKRIENTTNRQVTFCKRRNGLLKKAYELSVLCDAEVALIVFSSRGRLYEYANNSVKSTVERYKKANSDTSNSGTVAEVNAQHYQQESSKLRQQISSLQNANSRTIVGDSINTMSLRDLKQVENRLEKGIAKIRARKNELLYAEVEYMQKREVELQNDNMYLRSKVVENERGQQPLNMMGAASTSEYDHMVNNPYDSRNFLQVNIMQQPQHYAHQLQPTTLQLGQXSRPSISFGVDTVRTHVR

SEQ ID NO: 16553 - protein, 236 aa, Oryza sativa
MGRGKIEIKRIENTTNRQVTFCKRRNGLLKKAYELSVLCDAEVALIVFSSRGRLYEYANNSVKSTVERYKKANSDTSNSGTVAEVNAQHYQQESSKLRQQISSLQNANSRTIVGDSINTMSLRDLKQVENRLEKGIAKIRARKNELLYAEVEYMQKREVELQNDNMYLRSKVVENERGQQPLNMMGAASTSEYDHMVNNPYDSRNFLQVNIMQQPQHYAHQLQPTTLQLGQQPAFN

SEQ ID NO: 16554 - protein, 210 aa, Oryza sativa
MGRGKIEIKRIENSTNRQVTFSKRRSGILKKAREIGVLCDREVGVVIFSSAGKLSDYCTPKTTLSRILEKYQTNSGKILWDEKHKSLSAEIDRVKKENDNMQIELRHMKGEDLNSLQPKELIAIEEALNNGQANLRDKMMDHWRMHKRNEKMLEDEHKMLAFRVHQQEVELSGGIRELELGYHHDDRDFAASMPFTFRVQPSHPNLQQEK

SEQ ID NO: 16555 - protein, 246 aa, Oryza sativa; identical to SEQ ID NO: 16434

SEQ ID NO: 16556 - protein, 246 aa, Oryza sativa
MGRGKVQLKRIENKINRQVTFSKRRSGLLKKANEISVLCDAEVALIIFSTKGKLYEYATDSCMDKILERYERYSYAEKVLISAESDTQGNWCHEYRKLKAKVETIQKCQKHLMGEDLESLNLKELQQLEQQLENSLKHIRSRKSQLMLESINELQRKEKSLQEENKVLQKELVEKQKVQKQQLQWDQTQPQTISSSSSFMMREALPTTNISNYPAAAGERIEDVPAGQPQHVRIGLPPWMLSHING

SEQ ID NO: 16557 - protein, 210 aa, Oryza sativa; identical to SEQ ID NO: 16554

SEQ ID NO: 16558 - protein, 190 aa, Oryza sativa
  unsure (1)..(190): unsure at all Xaa locations
MGQGKIEMKRIEDATRRQVTFSKRRAGFLKKANELAVLCDAQVGVVVFSDKGKLFDFCSPPVILMELFHRYEITTRNTRLQETNHDEQMVMEITRLRNEIDQLEASLRRQTGEDLSSVSTVDELSQLQLQLESSLSKVHARKDELMSQQLEDMRREQQELLNQNFFMHQMNHKGNNTTTLSKIELLRTSX

SEQ ID NO: 16559 - protein, 267 aa, Oryza sativa
MGRGKVQLKRIENKINRQVTFSKRRNGLLKKAHEISVLCDAEVAAIVFSPKGKLYEYATDSRMDKILERYERYSYAEKALISAESESEGNWCHEYRKLKAKIETIQKCHKHLMGEDHESLNLKELQQLEQQLESSLKHIISRKSHLMLESISELQKKERSLQEENKALQKELVERQKNVRGQQQVGQWDQTQVQAQAQAQPQAQTSSSSSSMLRDQQALLPPQNICYPPVMMGERNDAAAAAAVAAQGQVQLRIGGLPPWMLSHLNA

SEQ ID NO: 16560 - protein, 267 aa, Oryza sativa; identical to SEQ ID NO: 16435

SEQ ID NO: 16561 - protein, 148 aa, Oryza sativa
MGRGRVELKKIENPTNRQVTFSKRRMGLLKKANELAILCDAQIGVIVFSGTGKMYEYSSPPWRIANIFDRYLKAPSTRFEEMDVQQVQIIQEMTRMKDENNRLRIIMRQYMGDDLASLTLQDVSNLEQQIEFSLYKVRLRKSRLQDLD

SEQ ID NO: 16562 - protein, 186 aa, Oryza sativa
  unsure (1)..(186): unsure at all Xaa locations
MGRGKIEIKRIENKTSRQVTFCKRRNGLLKKAYELAILCDAEIALIVFSSRGRLYEFSNFSTRSTIERYKKASASTSGSAPVIDVNSQYFQQEAAKMRHQIQTLQNANSRHLIGESIGNMTAKELKSLENRLEKGISRIRSKKHELLFSEIEYMQKREADLQNENMFLRAKVIKRDKVDWSLNXIX

SEQ ID NO: 16563 - protein, 169 aa, Oryza sativa
  unsure (1)..(169): unsure at all Xaa locations
MGRGKIAIKRIDNTMNRQVTFSKRRGGLMKKARELAILCDADVGLIVFSCTGRLYDFSSSSMKSIIERYQEAGEEHCRLLNPMSEAKSHSYMTYTDRQLLGEEISNFTVRDLQLLQNQVEMSLHSIRNKKGSLVQKENSELRKKFNIAHQRNIELHKKHHAYYKRKKSX

SEQ ID NO: 16564 - protein, 253 aa, Oryza sativa
MGRGKVQLKRIENKINRQVTFSKRRNGLLKKAHEISVLCDAEVAAIVFSPKGKLYEYATDSRMDKILERYERYSYAEKALISAESESEGNWCHEYRKLKAKIETIQKCHKHLMGEDLESLNLKELQQLEQQLESSLKHIISRKERSLQEENKALQKELVERQKNVRGQQQVGQWDQTQVQAQAQAQPQAQTSSSSSSMLRDQQALLPPQNICYPPVMMGERNDAAAAAAVAAQGQVQLRIGGLPPWMLSHLNA

SEQ ID NO: 16565 - protein, 246 aa, Oryza sativa
MGRGKVQLKRIENKINRQVTFSKRRSKLLKKANEISVLCDAEVALIIFSTKGKLYEYATDSCMDKILERYERYSYAEKVLISAESDTQGNWCHEYRKLKAKVETIQKCQKHLMGEDLESLNLKELQQLEQQLENSLKHIRSRKSQLMLESINELQRKEKSLQEENKVLQKELVEKQKVQKQQVQWDQTQPQTSSSSSSFMMREALPTTNISNYPAAAGERIEDVAAGQPQHERIGLPPWMLSHING

SEQ ID NO: 16566 - protein, 246 aa, Oryza sativa
MGRGKVQLKRIENKINRQVTFSKRRNGLLKKAHEISVLCDAEVAAIVFSPKGKLYEYATDSRMDKILERYERYSYAEKALISAESESEGNWCHEYRKLKAKIETIQKCHKHLMGEDLESLNLKELQQLEQQLESSLKHIISRKSHLMLESISELQKKEKSLQEENKVLQKELVEKQKVQKQQVQWDQTQPQTSSSSSSFMMREALPTTNISNYPAAAGERIEDVAAGQPQHVRIGLPPWMLSHING

SEQ ID NO: 16567 - protein, 225 aa, Oryza sativa
  unsure (1)..(225): unsure at all Xaa locations
MGRGRVELKKIENPTNRQVTFSKRRMGLLKKANELAILCDAQIGVIVFSGTGKMYEYSSPPWRIANIFDRYLKAPSTRFEEMDVQQDENNRLRIIMRQYMGDDLASLTLQDVSNLEQQIEFSLYKVRLRKQQLLDQQLLEMRREMQIPGDQSNYLCHMAQAPLXGESEAVPAVGCGWQQPXMYNQDAESSMTALQLSPQLEYKLQPLQPNLQEEANLHGYVLRLW

SEQ ID NO: 16568 - protein, 249 aa, Oryza sativa; identical to SEQ ID NO: 16436

SEQ ID NO: 16569 - protein, 354 aa, Oryza sativa
  unsure (1)..(354): unsure at all Xaa locations
MVQCHEVGQPRGERRKVQEEEKHQGQYIDGLSPHRPGLHLISSFPNHSLLLEHTPLFLIIISSLIREELANMHIYKEQEAEPSTGLMMPEPAPVASPGSGGSGGSGSVGAEKIGSRGKIEIKRIENTTNRQVTFCKRRSGLLKKAYELSVLCDAEVALVVFSSRGRLYEYSNNSVKETIERYKKANSDTSNASTVAEINAQHYQQEAAKLXKQQITHLQNSNRELKQLEGRLDKGLGKIRARKNQLLCAEIEYMQRRETELQNDNMYLXSTVAESERGLQTVNMMGSASTSEYVQNMIHYDPRNFLQFNIMHQPQYYPEQEDRKAFMSDERXNMDPYHATISIMHVPSSRRLIS

SEQ ID NO: 16570 - protein, 249 aa, Oryza sativa; identical to SEQ ID NO: 16436

SEQ ID NO: 16571 - protein, 230 aa, Oryza sativa; identical to SEQ ID NO: 16437

SEQ ID NO: 16572 - protein, 250 aa, Oryza sativa
MGRGRVELKRIENKINRQVTFSKRRNGLLKKAYELSVLCDAEVALIIFSSRGKLYEFGSAGITKTLERYQHCCYNAQDSNNALSETQSWYHEMSKLKAKFEALQRTQRHLLGEDLGPLSVKELQQLEKQLECALSQARQRKTQLMMEQVEELRRKERQLGEINRQLKHKLEVEGSTSNYRAMQQASWAQGAVVENGAAYVQPPPHSAAMDSEPTLQIGYPHQFVPAEANTIQRSTAPAGAENNFMLGWVL

SEQ ID NO: 16573 - protein, 250 aa, Oryza sativa; identical to SEQ ID NO: 16572

SEQ ID NO: 16574 - protein, 201 aa, Oryza sativa
  unsure (1)..(201): unsure at all Xaa locations
MGRGKIEIKRIENSTNRQVTFSKRRAGILKKAREIGVLCDAEVGVVIFSSAGKLSDYCTPKTTLSRILEKYQTNSGKILWDEKHKSLSAEIDRVKKENDNMQIELRXXPKELIAIEEALNNGQANLRDKMMDHWRMHKRNEKMLEDEHKMLAFRVHQQEVELSGGIRELELGYHHDDRDFAASMPFTFRVQPSHPNLQQEK

SEQ ID NO: 16575 - protein, 125 aa, Oryza sativa
  unsure (1)..(125): unsure at all Xaa locations
MGRGKIEIKRIENATNRQVTFSKRRGGLLKKANELAVLCDARVGVVIFSSTGKMFEYCSPTCSLRELIEHYQTVTNTHFEEINHDQXGDDLSNLTLADINDLEQQLEFSVTKVRARKNIIGQREX

SEQ ID NO: 16576 - protein, 249 aa, Oryza sativa
MGRGPVQLRRIENKINRQVTFSKRRNGLLKKAHEISVLCDADVALIVFSTKGKLYEFSSHSSMEGILERYQRYSFDERAVLEPNTEDQENWGDEYGILKSKLDALQKSQRQLLGEQLDTLTTKELQQLEHQLEYSLKHIRSKKNQLLFESISELQKKEKSLKNQNNVLQKLMETEKEKNNAIINTNREEQNGATPSTSSPTPVTAPDPIPTTNNSQSQPRGSGESEAQPSPAQAGNSKLPPWMLRTSHT

SEQ ID NO: 16577 - protein, 263 aa, Oryza sativa
DLAWLVGCSWRSIGMGRGRVELKRIENKINRQVTFAKRRNGLLKKAYELSVLCDAEVALIIFSNRGKLYEFCSTQSMTKTLEKYQKCSYAGPETAVQNRESEQLKASRNEYLKLKARVENLQRTQRNLLGEDLDSLGIKELESLEKQLDSSLKHVRTTRTKHLVDQLTELQRKEQMVSEANRCLRRKLEESNHVRGQQVWEQGCNLIGYERQPEVQQPLHGGNGFFHPLDAAGEPTLQIGYPAEHHEAMNSACMNTYMPPWLP

SEQ ID NO: 16578 - protein, 249 aa, Oryza sativa
MGRGRVELKRIENKINRQVTFAKRRNGLLKKAYELSVLCDAEVALIIFSNRGKLYEFCSTQSMTKTLEKYQKCSYAGPETAVQNRESEQLKASRNEYLKLKARVENLQRTQRNLLGEDLDSLGIKELESLEKQLDSSLKHVRTTRTKHLVDQLTELQRKEQMVSEANRCLRRKLEESNHVRGQQVWEQGCNLIGYERQPEVQQPLHGGNGFFHPLDAAGEPTLQIGYPAEHHEAMNSACMNTYMPPWLP

SEQ ID NO: 16579 - protein, 121 aa, Oryza sativa
  unsure (1)..(121): unsure at all Xaa locations
MGRGKIEIKRIDNATSRQVTFSKRRSGLFKKARELSILCDAEVGLLVFSSTSRLYDFASSSSMKSIIERYNETKEDPHQTMNASSEAKVWLVQITVLQIEISMISIXEFCLNRPVFENLSX

SEQ ID NO: 16580 - protein, 248 aa, Oryza sativa
MGRGRVELKRIENKINRQVTFAKRRNGLLKKAYELSVLCDAEVALIIFSNRGKLYEFCSGQSMTRTLERYQKFSYGGPDTAIQNKENELVQSSRNEYLKLKARVENLQRTQRNLLGEDLGTLGIKELEQLEKQLDSSLRHIRSTRTQHMLDQLTDLQRREQMLCEANKCLRRKLEESNQLHGQVWEHGATLLGYERQSPHAVQQVPPHGGNGFFHSLEAAAEPTLQIGFTPEQMNNSCVTAFMPTWLP

SEQ ID NO: 16581 - protein, 249 aa, Oryza sativa
MGRGRVELKRIENKINRQVTFSKRRNGLLKKAYELSVLCDAEVALIIFSSRGKLYEFGSAGINKTLEKYNSCCYNAQGSNSALAGGEHQSWYQEMSRLKTKLECLQRSQRHMLGEDLGPLSIKELQQLEKQLEYSLSQARQRKTQIMMEQVDDLRRKERQLGELNKQLKNKLEAEADSSNCRSAIQDSWVHGTVVSGGRVLNAQPPPDIDCEPTLQIGYYQFVRPEAANPRSNGGGGDQNNNFVMGWPL

SEQ ID NO: 16582 - protein, 249 aa, Oryza sativa
MGRGKVELKRIENKINRQVTFAKRRNGLLKKAYELSVLCDAEVALIIFSNRGKLYEFCSTQSMTKTLEKYQKCSYAGPETAVQNRESEQLKASRNEYLKLKARVENLQRTQRNLLGEDLDSLGIKELESLEKQLDSYLKHVRTTRTKHLVDQLTELQRKEQMVSEANRCLRRKLEESNHVRGQQVWEQGCNLIGYERQPEVQQPLHGGNGFFHPLDAAGEPTLQIGYPAEHHEAMNSACMNTYMPPWLP

SEQ ID NO: 16583 - protein, 249 aa, Oryza sativa; identical to SEQ ID NO: 16581

SEQ ID NO: 16584 - protein, 248 aa, Oryza sativa; identical to SEQ ID NO: 16580

SEQ ID NO: 16585 - protein, 157 aa, Oryza sativa
IKSIENSTNRQVTFSKRRSGILKKAREISVLCDAEVGVVIFSSAGKLYDYCSPKTSLSRILEKYQTNSGKILWDEKHKSLSAEIDRIKKENDNMQIELRHLKGEDLNSLQPKELIMIEEALDNGIVNVNDKLMDHWERIRCWKTRTSCWLSNCTSKI

SEQ ID NO: 16586 - protein, 259 aa, Oryza sativa
LVGGSWRSIGMGRGRVELKRIENKINRKVTFAKRRNGLLKKAYELSVLCDAEVALIIFSNRGKLYEFCSTQSMTKTLEKYQKCSYAGPETAVQNRESEQLKASRNEYLKLKARVENLQRTQRNLLGPDLDSLGIKELESLEKQLDSSLKHVRTTRTKHLVDQLTELQRKEQMVSEANRCLRRKLEESNHVRGQQVWEQGCNLIGYERQPEVQQPLHGGNGFFHPLDAAGEPTLQIGYPAEHHEAMNSACMNTYMPPWLP

SEQ ID NO: 16587 - protein, 259 aa, Oryza sativa
MVGGSWRSIGMGRGRVELKRIENKINRKVTFAKRRNGLLKKAYELSVLCDAEVALIIFSNRGKLYEFCSTQSMTKTLEKYQKCSYAGPETAVQNRESEQLKASRNEYLKLKARVENLQRTQRNLLGPDLDSLGIKELESLEKQLDSSLKHVRTTRTKHLVDQLTELQRKEQMVSEANRCLRRKLEESNHVRGQQVWEQGCNLIGYERQPEVQQPLHGGNGFFHPLDAAGEPTLQIGYPAEHHEAMNSACMNTYMPPWLP

SEQ ID NO: 16588 - protein, 157 aa, Oryza sativa; identical to SEQ ID NO: 16585

SEQ ID NO: 16589 - protein, 154 aa, Oryza sativa
  unsure (1)..(154): unsure at all Xaa locations
MGRGKIVIRRIDNSTSRQVTFSKRRNGIFKKAKELAILCDAEVGLVIFSSTGRLYEYASTSMKSVIDRYGRAKEEQQHVANPNSELKVWSFVASSYIXNRELTFLNSNLREINSTEINKKSMQELASFNNRIKPSLYSNKDGSQXLQNKQPHPX

SEQ ID NO: 16590 - protein, 113 aa, Oryza sativa
MGRGKIEIKRIDNATSRQVTFSKRRSGLFKKARELSILCDAEVGLLVFSSTSRLYDFASSSSMKSIIERYNETKEDPHQTMNASSEAKVLQIEISMISIGILPKPTGFRELVN

SEQ ID NO: 16591 - protein, 270 aa, Oryza sativa
  unsure (1)..(270): unsure at all Xaa locations
MGRGKVQLKRIENKINRQVTFSKRRNGLLKKAHEISVLCDAEVAAIVFSPKGKLYEYATDSRMDKILERYERYSYAEKALISAESESEITLPHXQHALHPEVLMVFVXQYCLRHLMGEDLESLNLKELQQLEQQLESSLKHIISRKCSFLAXXVQERSLQEENKALQKELVERQKNVRGQQQVGQWDQTQVQAQAQAQPQAQTSSSSSSMLRDQQALLPPQNICYPPVMMGERNDAAAAAAVAAQGQMIIVVVVGQTAAVCTVNHGSNLE

SEQ ID NO: 16592 - protein, 96 aa, Oryza sativa
  unsure (1)..(96): unsure at all Xaa locations
MGRGKIVIRRIDNSTSRQVTFSKRRNGIFKKAKELAILCDAEVGLVIFSSTGRLYEYASTSSMKSVIDRYGRAKEEQQHVANPNSELKVCLDDCNX

SEQ ID NO: 16593 - protein, 112 aa, Oryza sativa
  unsure (1)..(112): unsure at all Xaa locations
MGRGKIVIRRIDNSTSRQVTFSKRRNGIFKKAKELAILCDAEVGLVIFSSTGRLYEYASTSMKSVIDRYGRAKEEQQHVANPNSXXRVRTHQSFSVKISVVLSELCNKRXLG

SEQ ID NO: 16594 - protein, 225 aa, Oryza sativa
MGRGKVELKRIENKISRQVTFAKRRNGLLKKAYELSVLCDAEVALIIFSTRGRLFEFSTSSCMYKTLERYRSCNYNLNSCEASAALETELSNYQEYLKLKTRVEFLQTTQRNLLGEDLVPLSLKELEQLENQIEISLMNIRSSKNQQLLDQVFELKRKEQQLQDANKDLKRKIQETSGENMLHISCQDVGPSGHASEANQEFLHHAICDPSLHIGYQAYMDHLNQ

SEQ ID NO: 16595 - protein, 225 aa, Oryza sativa; identical to SEQ ID NO: 16594

SEQ ID NO: 16596 - protein, 257 aa, Oryza sativa
MGRGKVELKRIENKISRQVTFAKRRNGLLKKAYELSLLCDAEVALIIFSGRGRLFEFSSSSCMYKTLERYRSCNYNSQDAAAPENEINYQEYLKLKTRVEFLQTTQRNILGEDLGPLSMKELEQLENQIEVSLKQIRSRKNQALLDQLFDLKSKEQQLQDLNKDLRKKLQETSAENVLHMSWQDGGGHSGSSTVLADQPHHHQGLLHPHPDQGDHSLQIGYHHPHAHHHQAYMDHLSNEAADMVAHHPNEHIPSGWI

SEQ ID NO: 16597 - protein, 257 aa, Oryza sativa; identical to SEQ ID NO: 16596

SEQ ID NO: 16598 - protein, 115 aa, Oryza sativa
  unsure (1)..(115): unsure at all Xaa locations
MGRGKIAIKRIDNTMNRQVTFSKRRGGLMKKARELAILCDADVGLIVFSCTGRLYDFSSSSMKSIIERYQEAGEEHCRLLNPMSEAKGFQKENSELRKKLHCSSTQHRITQEDMX

SEQ ID NO: 16599 - protein, 211 aa, Oryza sativa
  unsure (1)..(211): unsure at all Xaa locations
MLVLGKVQLKRIENKINRQVTFSKRMSGLLKKANEISVLCDAEVALIIFSTKGKLYEYATDSCMDKILERYERYSYAEKVLISPEFDTHGNWCHEYRKLKAKVETIQKCQKHLMGEDPESLNLKELQSLEQHLENSLKHITSRKSQLMLESINXLQRKEKSLEEENKVLPKELGGKXQKVHKQQXLLWDPSNPYTSFLLISSFLNEGRPFX

SEQ ID NO: 16600 - protein, 239 aa, Oryza sativa; identical to SEQ ID NO: 16440

SEQ ID NO: 16601 - protein, 274 aa, Oryza sativa
MGWPVRPASARSDRHQFGLTEYGFVGSVSAIPSSTISASRGPSHANQVSSSSSTEPYPYVDRSARTAPGRNTGRTATPQPSCFFESEVKICFLVCVLGVEEEEELDMGRGKIEIKRIENSTNRQVTFSKRRAGILKKAREIGVLCDAEVGVVIFSSAGKLSDYCTPKTTLSRILEKYQTNSGKILWDEKHKPKELIAIEEALNNGQANLRDKMEKMLEDEHKMLAFRVHQQEVELSGGIRELELGYHHDDRDFAASMPFTFRVQPSHPNLQQEK

SEQ ID NO: 16602 - protein, 87 aa, Oryza sativa
  unsure (1)..(87): unsure at all Xaa locations
MGRGKIEIKRIDNATSRQVTFSKRRSGLFKKARELSILCDAEVGLLVFSSTSRLYDFASSSDDVQVAEIPRTNLVHDAFALERSVRX

SEQ ID NO: 16603 - protein, 181 aa, Oryza sativa
MGRGKIEIKRIENKTSRQVTFCKRRNGLLKKAYELAILCDAEIALIVFSSRGRLYEFSNVNRHLIGESIGNMTAKELKSLENRLEKGISRIRSKKEADLQNENMFLRAKVAEAERAEHDDQQAAEDDEMAPAPAVGGGSSSAVSMLAAAAAAAAAQYSSDHHQTALHLGYFKVDSGKGGLL

SEQ ID NO: 16604 - protein, 96 aa, Oryza sativa
  unsure (1)..(96): unsure at all Xaa locations
MGRGRVELKRIENKINRQVTFSKRRNGLLKKAYELSVLCDAEVALIIFSSRGKLYEFGSAGYNXCLHTLSSDAITLFPPPPSLVLSSSSSWLDHFX

SEQ ID NO: 16605 - protein, 205 aa, Oryza sativa
  unsure (1)..(205): unsure at all Xaa locations
MGRGRVELKRIENKINRQVTFAKRRNGLLKKAYELSVLCDAEVALIIFSNRGKLYEFCSGQSLERTMVLXTSWWRFCGDLGLHMVDLRVCSCFXNLLGEDLGTLGIKELEQLEKQLDSSLRHIRSTRXXKLEESNQLHGQVWEHGATLLGYERQSPHAVQQVPPHGGNGFFHSLEAAAEPTLQIGFTPEQMNNSCVTAFMPTWLP

SEQ ID NO: 16606 - protein, 236 aa, Oryza sativa
IKSIENKITRQVTFSKRRNGLLKKAYELSVLCDAEVALIIFSSRGKLYEFGSAGINKTLEKYNSCCYNAQGSNSALAGGEHQSWYQEMSRLKTKLECLQRSQRHMLGEDLGPLSIKELQQLEKQLEYSLSQARQRKTQIMMEQVDDLRRKERQLGELNKQLKNKLEAEADSSNCRSAIQDSWVHGTVVSGGRVLNAQPPPDIDCEPTLQIGYYQFVRPERPIQEAMEEEGIRTTTL

SEQ ID NO: 16607 - protein, 84 aa, Oryza sativa
  unsure (1)..(84): unsure at all Xaa locations
MGRGRVELKKIENPTNRQVTFSKRRMGLLKKANELAILCDAQIGAIVFXSSGEMFXCPTPPWRIANIFDRYLKAPSTRFEEMDX

SEQ ID NO: 16608 - protein, 79 aa, Oryza sativa
  unsure (1)..(79): unsure at all Xaa locations
MGRGKIVIRRIDNSTSRQVTFSKRRNGIFKKAKELAILCDAEVGLVIFSSTGRLLVQAFLSLFIIATRFAKSPLSLSFX

SEQ ID NO: 16609 - protein, 106 aa, Oryza sativa
  unsure (1)..(106): unsure at all Xaa locations
MGRGPVQLRRIENKINRQVTFSKRRNGLLKKAHEISVLCDADVALIVFSTKGKLYEFSSHSSXVRTRLAPPPPSPPLRSTAHARRLSSPRARHGRARGAPRSWAAC

SEQ ID NO: 16610 - protein, 110 aa, Oryza sativa
  unsure (1)..(110): unsure at all Xaa locations
MGRGPVQLRRIENKINRQVTFSKRRNGLLKKAHEISVLCDADVALIVFSTKGKLYEFSSHSSXVRTRLAPPPPPPPLRDLPRSTAHARRLSSPRARHGRARGAPRSWAAC

SEQ ID NO: 16611 - protein, 92 aa, Oryza sativa
  unsure (1)..(92): unsure at all Xaa locations
MGRGKVQVRRIENEVSRQVTFSKRRPGLLKKAHEIAVLCDVDVAAIVFSAKGNLFHYASSHTTYVSVSIFVRSGRKLSAPFSSLDGATFLRX

SEQ ID NO: 16612 - protein, 66 aa, Oryza sativa
MARERREIRRIESAAARQVTFSKRRRGLFKKAEELAVLCDADVALVVFSSTGKLSQFASSNSTIHL

SEQ ID NO: 16613 - protein, 88 aa, Oryza sativa
  unsure (1)..(88): unsure at all Xaa locations
MGRGKVELKRIENKISRQVTFAKRRNGLLKKAYELSLLCDAEVALIIFSGRGRLFEFSSSSCETLVDLRENPVEIEGVGRQIELQASX

SEQ ID NO: 16614 - protein, 94 aa, Oryza sativa
  unsure (1)..(94): unsure at all Xaa locations
MGRGKVQVRRIENEVSRQVTFSKRRPGLLKKAHEIAVLCDVDVAAIVFSAKGNLFHYASSHTTYVTITTPAAYTTAGSSIANPIQAHTSIHNSX

SEQ ID NO: 16615 - protein, 90 aa, Oryza sativa
  unsure (1)..(90): unsure at all Xaa locations
MGRGKVQVRRIENEVSRQVTFSKRRPGLLKKAHEIAVLCDVDVAAIVFSAKGNLFHYASSACLENYLRDIFLLKIIPPKXPSCCLDPRAI

SEQ ID NO: 16616 - protein, 237 aa, Oryza sativa
ENKINRQVTFAKRRNGLLKKAYELSVLCDAEVALIIFSNRGKLYEFCSGQSMTRTLERYQKFSYGGPDTAIQNKENELVQSSRNEYLKLKARVENLQRTQRNLLGEDLGTLGIKELEQLEKQLDSSLRHIRSTRTQHMLDQLTDLQRREQMLCEANKCLRRKLEESNQLHGQVWEHGATLLGYERQSPHAVQQVPPHGGNGFFHSLEAAAEPTLQIGFTPEQMNNSCVTAFMPTWLP

SEQ ID NO: 16617 - protein, 107 aa, Oryza sativa
  unsure (1)..(107): unsure at all Xaa locations
MGGGGGVQHQETTTTVVQVAAEASRKKVEVRSAGRRGRREMRRIEDATSRQVTFSKRRSGLLKKAFELSVLCDAEVALIVFSPRGRLYQFASASSIPLTYPSFNTTX

SEQ ID NO: 16618 - protein, 231 aa, Sorghum bicolor
MGRGRVELKRIENKINRQVTFAKRRNGLLKKAYELSVLCDAEVALIIFSNRGKLYEFCSGQSITKTLERYEKHMRPDTAVQNKENELVQSSRNEYLKLKARVDNLQRTQRNLLGEDLGSLGIKELEQLEKQLDSSLRHIRSTRTQHMLDQLTDLQRREQMLCEANKCLRRKLEETSNQVHSKCGARCQLTRLRAATPPHSRPHHILAMDCSFIPWKLQQSQPCRSGSLLNI

SEQ ID NO: 16619 - protein, 228 aa, Sorghum bicolor
KVQLKRIENKINRQVTFSKRRNGLLKKAHEISVLCDAEVAVIVFSPKGKLYEYATDSRMDKILERYERYSYAEKALISAESESEGNWCHEYRKLKAKIETIQKCHKHLMGEDLESLNPKELQQLEQQLESSLKHIRSRKSHLMAESISELQKKERSLQEENKALQKELAERQKAAASRQQQQGAVGPADTDPGPDKLIIVLLHDEAGSAGSAASTKHMLPAADNRRER

SEQ ID NO: 16620 - protein, 61 aa, Sorghum bicolor
MGRGKVVLQRIENKISRQVTFAKRRNGLLKKAYELSILCDAEVALVLFSHAGRLYQFSSSS

SEQ ID NO: 16621 - protein, 196 aa, Triticum aestivum; identical to SEQ ID NO: 665

SEQ ID NO: 16622 - protein, 196 aa, Triticum aestivum
MGRGRSEIKRIDNPTQRQSTFYKRRDGLFKKARELAVLCDADLLLLLFSASGKLYQYLAPTVPSVKEFVERYEAATHTKVWSDIRQERRAELEKVAKMCDLLEKELRFMTVDDGEQYTVPSLAALEHNLEAAMHKVRSEKDRKIGGEMSYLENMIRGKQAERYGLCDKLAHAQSLKVVEGGSTSLNNGLDLKLGFN

SEQ ID NO: 16623 - protein, 254 aa, Triticum aestivum
MVKESASPGSGSGSPGGAAEKMGRGRIEIKRIENTTNRQVTFCKRRNGLLKKAYELSVLCDAEVALIVFSGRGRLYEYSNNSVKATIERYKKATSDTSSAGTVAEINAQHYQQESAKLKQQITTLQNSNRTLIGDTMATMSHRDLKQLEGRLDKGLGKIRARKNELLCAEIEYMQRREMELQNNNFFLREKVAETERGQQQTLNMMGAASTSNEYEQNMIHCDPRTFLQFNFMQQQPQYYSQQEDRKSLNSVGR

SEQ ID NO: 16624 - protein, 318 aa, Triticum aestivum
  unsure (1)..(318): unsure at all Xaa locations
MATTGWGNSRYARRGGDSARGSGAYSLRKPQRERHHQGEEMDHSLSFPSYLQRRVQEVAAQENPVKESASPGSGSGSPGGAAEKMGRGRIEIKRIENTTNRQVTFCKRRNGLLKKAYELSVLCDAEVALIVFSGRGRLYEYSNNSVKATIERYKKXATSDTSSAGTVAEINAQHYQQESAKLKQQITTLQNSNRTLIGDTMATMSHRDLKQLEGRLDKGLGKIRARKNELLCAEIEYMQRREMELQNNNFFLREKVAETERGQQQTLNMMGAASTSNEYEQNMIHCDPRTFLQFNFMQQQPQYYSQQEDRKSLNSVGR

SEQ ID NO: 16625 - protein, 237 aa, Triticum aestivum
MGRGKIEIKRIENATNRQVTYSKRRSGIMKKARELTVLCDAQVAIIMFSSTGKYHEFCSTGTDIKGIFDRYQQAIGTSLWIEQYENMQRTLNHLKDINRNLRTEIRQRMGEDLDALEFEELRDLEQNVDAALKEVRQRKYHVITTQTETYKKKVKHSQEAYKNLQQELGMREDPAYGFVDNPAAGGWDGVAAGGWDGVAPVAMGGGLAADMYAFRVVPSQPNLHGMAYGGSHDLRLG

SEQ ID NO: 16626 - protein, 229 aa, Triticum aestivum
MGRGKIEIKRIENATNRQVTYSKRRSGIMKKARELTVLCDAQVAIIMFSSTGKYHEFCSTGTDIKGIFDRYQQAIGTSLWIEQYENMQRTLSHLKDINRNLRTEIRQRMGEDLDALEFEELRDLEQNVDAALKEVRQRKYHVITTQTETYKKKVKHSQEAYKNLQQELGMREDPAYGFVDNPVAGGWDGVAAVAMGGGSAADMYAFRVVPSQPNLHGMAYGGSHDLRLG

SEQ ID NO: 16627 - protein, 229 aa, Triticum aestivum
MGRGKIEIKRIENATNRQVTYSKRRSGIMKKARELTVLCDAQVAIIMFSSTGKYHEFCSTGTDIKGIFDRYQQAIGTSLWIEQYENMQRTLSHLKDINRNLRTEIRQRMGEDLDALEFEELRDLEQNVDAALKEVRQRKYHVITTQTETYKKKVKHSQEAYKNLQQELGMREDPAYGFVDNPVAGGWDGVAAVAMGGGLAADMYAFRVVPSQPNLHGMAYGGSHDLRLG

SEQ ID NO: 16628 - protein, 229 aa, Triticum aestivum; identical to SEQ ID NO: 16627

SEQ ID NO: 16629 - protein, 271 aa, Triticum aestivum
MMSMMADLSCGASGVTVNDHQLAAPAPEDSAVAGSEKMGRGRIEIKRIENTTNRQVTFCKRRNGLLKKAYELSVLCDAEVALIVFSSRGRLYEYSNNSVKATIERYKKANSDTSNSGTVAEVNAQYYQQESSKLRQQISSLQNSNSRSLVRDSVSTMTLRDLKQLEGRLEKGIAKIRARKNELMYAEVEYMQKREMELHNDNIYLRSKVSENERGQQPMNMMASGSTSSEYDHMVPPFDSRNFLQANMQQQQHYSQQLQPTALQLGQQYFN

SEQ ID NO: 16630 - protein, 279 aa, Triticum aestivum
  unsure (1)..(279): unsure at all Xaa locations
MGRGRIEIKRIENTTSRQVTFCKRRNGLLKKAYELSVLCDAEVALIVFSSRGRLYEYSNNSVKATIDRYKKAHACGSTSGVPLIEVNAQQYYQQEAARLRHQIQMLQSTNKHLVGDSVGNLSLKELKQLESRLEKGIAKIRARKNELLSSEINYMVKXEIELXRSDNIDLRTKIAEEERGTQQVTIARPSAAXXELNPFTALXXMKCFVPANLFEAAGATRAQARRRGXXHRARPGRSLRYKQPAAALAGPAARQYQWTWGGTCLTTHPARTLEGRRQC

SEQ ID NO: 16631 - protein, 244 aa, Triticum aestivum
MGRGKVQLKRIENKINRQVTFSKRRSGLLKKAHEISVLCDAEVGLIIFSTKGKLYEFSTESCMDKILERYERYSYAEKVLVSSESEIQGNWCHEYRKLKAKVETIQKCQKHLMGEDLESLNLKELQQLEQQLESSLKHIRSRKNQLMHESISELQKKERSLQEENKVLQKELVEKQKAHVAQQDQTQPQTSSSSSSFMLRDAPPAANTSIHPAATGERAEDAAVQPQAPPRTGLPPWMVSHING

SEQ ID NO: 16632 - protein, 244 aa, Triticum aestivum
MGRGKVQLKRIENKINRQVTFSKRRSGLLKKAHEISVLCDAEVGLIIFSTKGKLYEFSTESCMDKILERYERYSYAEKVLVSSESEIQGNWCHEYRKLKAKVETIQKCQKHLMGEDLESLNLKELQQLEQQLESSLKHIRSRKNQLMHESISELQKKERSLQEENKVLQKELVEKQKAQAAQQDQTQPQTSSSSSSFMMRDAPPAAATSIHPAAAGERAGDAAVQPQAPPRTGLPLWMVSHING

SEQ ID NO: 16633 - protein, 244 aa, Triticum aestivum; identical to SEQ ID NO: 16632

SEQ ID NO: 16634 - protein, 257 aa, Triticum aestivum
  unsure (1)..(257): unsure at all Xaa locations
MVRGKTQMKRIENPTSRQVTFSKRRGGLLKKAFELSVLCDAEVALVVFSPRGRLYEFASSSMKNTIERYKTVTKDNMSRQTVQQDLEKILADAEGLSKKLDALEACKSKLLGQNLEECSIEELQSLEVKIEKSLLGIRAMKTRRFEEQLSTLRQKEMTLRQHNEELYSQCQKEQHLAPAAAAPPAPATLAAPPAPATLAEQGLDVETDLFLGLPGTGRSXDSGRLTTLEKNAQNKLAMELQAAAAAGNGCGRRIDKI

SEQ ID NO: 16635 - protein, 275 aa, Triticum aestivum
  unsure (1)..(275): unsure at all Xaa locations
MGRGKVQLKRIENKINRQVTFSKRRNGLLKKAHEISVLCDAEVAVIVFSPKGKLYEYATDSSMDKILERYERYSYAEKALISAESESEGNWCHEYRKLKAKIETIQKCHKHLMGEDLDSLNLKELQQLEQQLESSLKHIRSRKSHLMMESISELQKKERSLQEENKALQKELVERQKAAASRQQQQQQQQMQWEHQAQTQXTHAHTQNQPQAQTSSSSSSFMMRDQQAHAPQQNICSYPPVTMGGEAAAAAAAPGQQAQLRIGGLPLWMLSHLNA

SEQ ID NO: 16636 - protein, 240 aa, Triticum aestivum
MGRGKIVIRRIDNSTSRQVTFSKRRNGIFKKAKELGILCDAEVGLVIFSSTGRLYEYASSSMKSVIDRYGRAKEEQQLVANPNSELKFWQREAASLRQQLHNLQENHRQLTGQDLSGMGVKELQTLENQLEISLRCIRTKKDQILIDEIHELNHKGSLVHQENMELYRKINLIRQENAELQKKLSETEAATEVNRDSRTPYNFAVVEDANVSVDLELNSPQQQNDVEHTAPPKLGLQLHP

SEQ ID NO: 16637 - protein, 262 aa, Triticum aestivum
  unsure (1)..(262): unsure at all Xaa locations
MAFTPAHKDRHHHRPLPLPAVHTPQRQGGEESSGSWVLLGPLSFFSASEELVEMGRGKIEIKRIENSSNRQVTFAKRRAGLVKKAREIGVLCDAEVGVVIFSSAGKLYDFWTPKTTLPRILEKYQTNSGKILWDEKHKSISAEIDRVKKENDNMQIELRHMKGEDVNSLQPKELIAIEEALTNGQTNLRDKMMDHWKMHRRNEKMLEEEHKLLALRMHQQDDLSSGMREMELGYHXXGRDFTSQMPFTFRLQPSHPNLQEDK

SEQ ID NO: 16638 - protein, 209 aa, Triticum aestivum
MGRGKIEIKRIENQSNRQVTFSKRKNGILKKAKEISVLCDAEVGVVVFSSAGKLYDFCSPKTSLSRILEKYQTNSGKILWDEKHKSLSAEIDRIKKENDNMQIELRHLKGEDLNSLQPKELIMIEEALDNGLTSLHEKQMEHYDRLMKHGKMLEDENKLLAFKVHQHDIALSGSMRDLELGYHPDRDFAAQMPITFRVQPSHPNLQEDS

SEQ ID NO: 16639 - protein, 140 aa, Triticum aestivum
  unsure (1)..(140): unsure at all Xaa locations
MGRGKIAIERIDNATNRQVTFSKRRGGLMKKARELAILCDADLALIVFSSTGRLYDFASSSGMEAILERYQEAKQEHCGVLNPTSEAKLWQREVTTLRQQVQNLQHNNRQLLGEELSGSTVRDLQFLVNQVEMSLHSVRX

SEQ ID NO: 16640 - protein, 275 aa, Triticum aestivum
  unsure (1)..(275): unsure at all Xaa locations
MGRGKVQLKRIENKINRQVTFSKRRNGLLKKAHEISVLCDAEVAXLIVFSPKGKLYEFATDSCMDKILERYERYSYAEKALVSAESDSQGNWCHEYRKLKAKIETIQKCHKHLMGEDLDSLNLKELQQLEQQLESSLKHIRSRKSHLMMESISELQKKERSLQEENKALQKELVERQKAAASRQQQQQQQQMQWEHQAQTQTHAHTQNQPQAQTSSSSSSFMMRDQQAHAPQQNICSYPPVTMGGEAAAAAAAPGQQAQLRIGGLPPWMLSHLNA

SEQ ID NO: 16641 - protein, 246 aa, Triticum aestivum
MGRGRVELKRIENKINRQVTFAKRRNGLLKKAYELSVLCDAEVALIVFSNRGKLYEFCSTQSMTKTLDKYQKCSYAGPETTVQNRENEQLKNSRNEYLKLKARVDNLQRTQRNLLGEDLDSLGIKELESLEKQLDSSLKHIRTTRTQHMVDQLTELQRREQMFSEANKCLRIKLEESNQVHGQQLWEHNNNVLGYERQPEVQPPMHGGNGFFHPLDAAGEPTLHIGYPPESMSNSCMTTFMPPWLP

SEQ ID NO: 16642 - protein, 249 aa, Triticum aestivum
MGRGRVELKRIENKINRQVTFAKRRNGLLKKAYELSVLCDAEVALIIFSNRGKLYEFCSGQSMPKTLERYQKCSYGGPDTAIQNKENELVQSSRNEYLKLKARVENLQRTQRNLLGEDLGSLGIKDLEQLEKQLDSSLRHIRSTRTQHMLDQLTDLQRKEQMLCEANKCLRRKLEESSQLQGQMWEQHAANLLGYERQSPHQQQAPHHGGNGFFHPLDPTTEPTLQIGYTQEQINNACVAASFMPTWLP

SEQ ID NO: 16643 - protein, 258 aa, Triticum aestivum
MGRGRVELKRIENKINRQVTFSKRRNGLLKKAYELSVLCDAEVALIIFSSRGKLYEFGSAGTTKTLERYQHCCYNAQDSNGALSETQSWYQEMSKLKAKFEALQRTQRHLLGEDLGPLSVKELQQLEKQLECSLSLARQRKTQLMMEQVEELRRKERQLGDINRQLKHKLDAEGSNSNNYRAMQQISWAAGTVVDEGAAAYHMQQQQQHPNHSAAMDCEPTLQIGYHHQFAAPDQAANNIPRSSAPGGENNFMLGWVL

SEQ ID NO: 16644 - protein, 258 aa, Triticum aestivum; identical to SEQ ID NO: 16643

SEQ ID NO: 16645 - protein, 259 aa, Triticum aestivum
MGRGRVELKRIENKINRQVTFSKRRNGLLKKAYELSVLCDAEVALIIFSSRGKLYEFGSAGTTKTLERYQHCCYNAQDSNGALSETQSWYQEMSKLKAKFEALQRTQRHLLGEDLGPLSVKELQQLEKQLECSLSLARQRKTQLMMEQVEELRRKERQLGDINRQLKHKLDAEGSNSNNYRAMQQITWAAGTVVDEGAAAYHMQQQQQQHPNHSAAMDCEPTLQIGYPHQFAAPDQAANNIPRSSGPGGENNFMLGWVL

SEQ ID NO: 16646 - protein, 201 aa, Triticum aestivum
  unsure (1)..(201): unsure at all Xaa locations
MVRGKTQMKRIENATSRQVTFSKRRNGLLKKAFELSVLCDAEVALVVFSPRGRLYEFASATSLQKSIDRYKAYTKDTVNNKTVQPDIQQVKADALSLAKKLEALEDTKRKILGENLGGCSTEELHFLEGKIEKSLRVIRGKKTQLLEQQIANLKEKERTLLKDNEXLRGKRNLEXAAVSSCPELRCTPAATWRAGARASAG

SEQ ID NO: 16647 - protein, 268 aa, Triticum aestivum
  unsure (1)..(268): unsure at all Xaa locations
MGRGPVQLRRIENKINRQVTFSKRRSGLLKKAHEISVLCDAEVALIVFSTKGKLYEYSSQDSSMDVILERYQRYSFEERAVLDPSIGNQANWGDEYGSLKIKLDALQKSQRQLLGEQLDPLTTKELQQLEQQLDSSLKHIRSRKNQLLFESISELQKKEKSLKDQNGVLQKHLVETEKEKNNVLSNIHHQEXQLNGATNINHQEQLNGATTSSPSPTPATAQDSMATPNIGPYQSRESGGGNPEPQPSPAQANNSNLPPWMLSTISNR

SEQ ID NO: 16648 - protein, 269 aa, Triticum aestivum
  unsure (1)..(269): unsure at all Xaa locations
MAPSSPAAAAVAEGDEQQQQQIVAAAAAAKKGGGKRGRREMRRIEDATSRQVTFSKRRSGLLKKAFELGVLCDAEVALIVFSPRGRLYEYASAPDLQKTIDRYLNHTKGTSANEKTVEQPAAGVQMCRSEATALKHKIDAIEAYQRKLSGEGLGSCSAHELQELELQLEKSLSCIRQKKQQKMLDKILELKEKERKLLTENVVLREEYKALPLLELATAAAAERSPDGAXELKKLRRTSGGCXYMEVETELVIGRPGSSSXSSSRKLID

SEQ ID NO: 16649 - protein, 197 aa, Triticum aestivum
  unsure (1)..(197): unsure at all Xaa locations
MGRGKVVLQRIENKISRQVTFAKRRNGLLKKAYELSLLCDAEVALVLFSHAGRLYQFSSSSNMLKTLERYQRYIFASQDAAVPTRDEKQNNYLEYMELKARVEVLQHSQRNLLGEDLAPLSTTELDQLESQVGKTLRQIRXRKTQVLVXELCXLKKGAKLXXQDXKHGTXEKLXXLTXRXXVDHXRWAXXXHRTXGK

SEQ ID NO: 16650 - protein, 211 aa, Triticum aestivum
  unsure (1)..(211): unsure at all Xaa locations
MGRGKVEMRRIENKISRQVTFAKRRNGLLKKAYELSLLCDAEVALIIFSGRGRLFEFSSSSCMYKTLERYRTCNCNSQEATPLAENEINYQQYLKLKTRLEYLESSQRNILGEDLGPLSMKELEQIENQIDISLKHIRTRKNKVLLDELYDLKSKEQELQDQNKDLRKKLQDTSCAENALHMAWQDRGQSSSSGHAIDTTYPGLVQHPEHX

SEQ ID NO: 16651 - protein, 99 aa, Triticum aestivum
  unsure (1)..(99): unsure at all Xaa locations
MARGKVQLRRIENPVHRQVTFCKRRAGLLKKARELSVLCDADIGIIIFSAHGKLYDLATTGTMDGLIERYKSASGEGMAADGCGDQRVDPKQEAMVLKX

SEQ ID NO: 16652 - protein, 77 aa, Triticum aestivum
MGRGKIEIKRIENATNRQVTYSKRRSGIMKKARELTVLCDAQVAIIMFSSTGKYHEVCSTGTDIKGIFDRYQRPSGP

SEQ ID NO: 16653 - protein, 166 aa, Triticum aestivum
MARRGRVELRRIEDRTSRQVRFSKRRAGLFKKAFELAVLCDAEVALLVFSPAGKLYEYASSSIEGTYDLYQRFAGAGTNLNGGDASSNNDGDPSNIQSTLKEIASWSIQNNADDSDANKLEKLEKLLTDALRNTKSKKMSAQQNSGAGTSGENANGPRGKKKRGRT

SEQ ID NO: 16654 - protein, 166 aa, Triticum aestivum
MARRGRVELRRIEDRTSRQVRFSKRRAGLFKKAFELALLCDAEVALLVFSPAGKLYEYASSSIEATYDRYQRFAGPGTNVNGGDARSNNDGDPSNIQSTLEDIASWSLQNNADVSDATKLEKLEKLLTDALRNTKSKKMSAQLNSGAGTRSAQNANGPRGLEGGRT

SEQ ID NO: 16655 - protein, 73 aa, Triticum aestivum
  unsure (1)..(73): unsure at all Xaa locations
MARRGRVELRRIEDRTSRQVRFSKRRAGLFKKAFELSLLCDAEVALLVFSPAGKLYEYASSSYCETADTFKYX

SEQ ID NO: 16656 - protein, 238 aa, Triticum monococcum
MGRGKVVLQRIENKISRQVTFAKRRNGLLKKAYELSLLCDAEVALVLFSHAGRLYQFSSSSNMLKTLEKYQRYIFASQDAAVPTTDEMQNNYLEYMELKARVEVLQRSQRNLLGEDLAPLSTIELEQLEGQVGKTLRQIRSRKTQVLLDEMCDLKRKEQILQDANMTLKRKLGEIELEATPDPPQQPQQQQMWQGDRGVPPHTPPQPEHFFQALERYPSLQPVFRGMDVNQPPPAWMA

SEQ ID NO: 16657 - protein, 175 aa, Zea mays
MGRGRSEIKRIDNPTQRQSTFYKRRDGLFKKARELAVLCDADLLLLLFSASGKLYQYLAPTVPSVKEFVERYEASTHTKVWSDIRQERRRELEKVAKMCDLLEKELRFMTVDDGERYTVPSLAALEHNLEAAMHKVRSEKDRKIGGEMSYLENMIRGKQAERYGLCDKLAHAQSL

SEQ ID NO: 16658 - protein, 196 aa, Zea mays
MGRGRSEIKRIENPTQRQSTFYKRRDGLFKKARELSVLCDVDLLLLLFSTSGKLYHYLSPTVPSVKDLVERYEATTHTKVWTDIRQERRAELEKAEQMCELMEKELRVMTVDDGEQYTVPSLELLEHSLEAAVRKVRSEKDRKIGGEINYLENIIRGRHEERYGLCNKLAHSQASKREEGGSTPPSSGLELKLGLN

SEQ ID NO: 16659 - protein, 261 aa, Zea mays
MSRYCVNEQSSTRPHPASAGSWHGSTPAGSSPSNLKQATTGKEQLGGGCCSAARLRVRDDDMGRGRSEIKRIENPTQRQSTFYKRRDGLFKKARELAVLCDVDLLLLLFSGSGKLYHYLSPTVPTVKDLVERYEAATHSKVWADVRQERRAELEKAERMCELMEKELRFMTVDDGEQYTVPSLELLEHSLEAAVHRVRSEKDRKIGGEIDCLQNIIRGRHEERYGLCDKLAHSQAWNNGGEGGGSTPPSGGGGLELKLGFN

SEQ ID NO: 16660 - protein, 199 aa, Zea mays
MGRGRSEIKRIENPTQRQSTFYKRRDGLFKKARELAVLCDVDLLLLLFSGSGKLYHYLSPTVPTVKDLVERYEAATHSKVWADVRQERRAELEKAERMCELMEKELRFMTVDDGEQYTVPSLEQLEHSLEAAVHRVRSEKDRKIGGEIDCLQNIIRGRHEERYGLCDKIAHSQAWNNGGEGGGSTPPSGGGLELKLGFN

SEQ ID NO: 16661 - protein, 199 aa, Zea mays
MGRGRSEIKRIENPTQRQSTFYKRRDGLFKKARELSVLCDVDLLLLLFSTSGKLYHYLSPTVPSVKDLVERYEAATHSKVWADVRQERRAELEKAERMCELMEKELRFMTVDDGEQYTVPSLELLEHSLEAAVRRVRSEKDRKIGGEIDCLQNIIRGRHEERYGLCDKLAHSQAWNNGGEGGGSTPPSGGGLELKLGFN

SEQ ID NO: 16662 - protein, 200 aa, Zea mays
  unsure (1)..(200): unsure at all Xaa locations
MGRRRSEIKRIENPAQGQSTFYKRRDGLFKKAREPAVLCDGDSLLTIFSGAGARXSGFRTPRPTVKDLVERYEAATHSKVWADVRQERRAELEKAERMCELMEKELRFMTVDDGEQXYTVPSLEQLEHSLEAAVHRVRSEKDRKIGGEIDCLQNIIRGRHEERYGLCDKIAHSQAGNNGGEGGGSTPPSGGGLELKLGFN

SEQ ID NO: 16663 - protein, 112 aa, Zea mays
MGRGRSEIKRIENPTQRQSTFYKRRDGLFKKARELSVLCDVDLLLLLFSTSGKLYHYLSPTVPSVKDLVERYEATTHTKERRAELEKAEQMCELMEKELRVMTVDDGEQYTV

SEQ ID NO: 16664 - protein, 113 aa, Zea mays
  unsure (1)..(113): unsure at all Xaa locations
MGRGRSEIKRIENPTQRQSTFYKRRDGLFKKARELSVLCDVDLLLLLFSTSGKLYXXATTHTKVWTDIRQERRAXXEKXGQMCELMEKELRVXTXVDDGXXQYTVPSLELLEH

SEQ ID NO: 16665 - protein, 124 aa, Zea mays
  unsure (1)..(124): unsure at all Xaa locations
THREATFYKRRDCLFKKGGELSGLCDVNLLLVLSSTCGKLYHYLSATVPYVEDLVERYEGTTHTKGCTDIRQERRAQLAKAELTCELMEKELRVMTGDDGXQYTVPTVELLEHKLDAAVHKVRX

SEQ ID NO: 16666 - protein, 143 aa, Zea mays
  unsure (1)..(143): unsure at all Xaa locations
MGRARMEIKWIXNPTKWQATFYKSRDGLFMKDSDFSVLWDVDLVLFLFSTSGKIYHYLSTTVPSDLDLINRNHVTTPTKGXTDIRQESSWHLNKGDIKCYMLXKELRFLTVDDXGDRYTVPSLELLQHXLDCAEHMVPSDKDR

SEQ ID NO: 16667 - protein, 122 aa, Zea mays
  unsure (1)..(122): unsure at all Xaa locations
XPTLRRSTYYKRRDRLCHKGRELYGLCDADLVLLLFSSSWKVYHYRLGTVLCVTDLCERDDCTTHTTVWTDMLQERSAELQKAEPMCQLVXNELQDMTVDDRXQYTGPAVXLLEHSLQAVVX

SEQ ID NO: 16668 - protein, 348 aa, Zea mays
  unsure (1)..(348): unsure at all Xaa locations
MGRGKIEIKRIENSTNRQVTFSKRRGGLLKKANELAVLCDARVGVVIFSSTGKMFEYCSPACSLRELIEQYQHATNSHFEEINHDQQILLEMTRMKNEMEKLETGIRRYTGDDLSSLTLDDVSDLEQQLEYSVSKVRARKHQLLNQQLDNLRRKEQILEDQNTFLYRMINENQQAALTGEVKLGEMAPLAMLQPPPAFAHSATAYYGGESSSSGTALQLMSAAPQLHADDLGFRLQPTQPNLQDPXAAPCGGLHGHGLAAVINCDQFGRTVTCSASKRDYWSTHAVSWSQSPSCIISIIWLVCHLDSFIYACNAINSLDNNSTIVMYLIKKKKKSGPLHHQKKKKKNR

SEQ ID NO: 16669 - protein, 260 aa, Zea mays
  unsure (1)..(260): unsure at all Xaa locations
MGRGKIEIKRIENSTNRQVTFSKRRGGLLKKANELAVLCDARVGVVIFSSTGKMFEYCSPACSLRELIEQYQHATNSHFEEINHDQQILLEMTRMKNEMEKLETGIRRYTGDDLSSLTLDDVSDLEQQLEYSVSKVRARKHQLLNQQLDNLRRKEQILEDQNTFLYRMINENQQAALTGEVKLGEMTAPLAMLQPPPAFAHSXTAYYGGESSSGGTALQLMSAAPQLQHADLGFRLQPTQPNLQDPAAACGGLHGHGLQL

SEQ ID NO: 16670 - protein, 240 aa, Zea mays
MGRGKIVIRRIDNSTSRQVTFSKRRNGIFKKAKELAILCDAEVGLVIFSSTGRLYEYSSTSMKSVIDRYGKAKEEQQVVANPNSELKFWQREAASLRQQLHNLQENYRQLTGDDLSGLNVKELQSLENQLETSLRGVRAKKDHLLIDEIHDLNRKASLFHQENTDLYNKINLIRQENDELHKKIYETEGPSGVNRESPTPFNFAVVETRDVPVQLELSTLPQQNNIEPSTAPKLGLQLIP

SEQ ID NO: 16671 - protein, 240 aa, Zea mays; identical to SEQ ID NO: 16670

SEQ ID NO: 16672 - protein, 259 aa, Zea mays
MGRGKIEIKRIENSTNRQVTFSKRRGGLLKKANELAVLCDARVGVVIFSSTGKMFEYCSPACSLRELIEQYQHATNSHFEEINHDQQILLEMTRMKNEMEKLETGIRRYTGDDLSSLTLDDVSDLEQQLEYSVSKVRARKHQLLNQQLDNLRRKEQILEDQNTFLYRMINENQQAALTGEVKLGEMAPLAMLQPPPAFAHSATAYYGGESSSSGTALQLMSAAPQLHADDLGFRLQPTQPNLQDPAAPCGGLHGHGLQL

SEQ ID NO: 16673 - protein, 270 aa, Zea mays
  unsure (1)..(270): unsure at all Xaa locations
MGRGRIEIKRIENNTSRQVTFCKRRNGLLKKAYELSVLCDAEVALIVFSSRGRLYEYANNSVKATVERYKKAHTVGSSSGPPLLEHNAQQFYQQESAKLRNQIQMLQNTNRHLVGDSVGNLSLKELKQLESRLEKGISKIRARKSELLAAEISYMAKRETELQNDHMTLRTKIEEGEQQLQXQVTVARSVAAAAAXATNLELNPFLEMDTKCFFTGGPFATLDMKCFLPGSLQQMLEAQQRQMLATELNLGYQLAPPGSDAANNNPHHQF

SEQ ID NO: 16674 - protein, 268 aa, Zea mays
MGRGRIEIKRIENNTSRQVTFCKRRNGLLKKAYELSVLCDAEVALIVFSSRGRLYEYANNSVKATVERYKKAHTVGSSSGPPLLEHNAQQFYQQESAKLRNQIQMLQNTNRHLVGDSVGNLSLKELKQLESRLEKGISKIRARKSELLAAEISYMAKRETELQNDHMTLRTKIEEGEQQLQQVTVARSVAAAAAATNLELNPFLEMDTKCFFTGGPFATLDMKCFLPGSLQQMLEAQQRQMLATELNLGYQLAPPGSDAANNNPHHQF

SEQ ID NO: 16675 - protein, 268 aa, Zea mays; identical to SEQ ID NO: 16674

SEQ ID NO: 16676 - protein, 268 aa, Zea mays; identical to SEQ ID NO: 16674

SEQ ID NO: 16677 - protein, 288 aa, Zea mays
MSFLLKEKEMIIAAGIVASMGRGRIEIKRIENNTSRQVTFCKRRNGLLKKAYELSVLCDAEVALIVFSSRGRLYEYANNSVKATIERYKKAHTVGSSSGPPLLEHNAQQFYQQESAKLRNQIQMLQNTNRHLVGDSVGNLSLKELKQLESRLEKGISKIRARKSELLAAEISYMAKRETELQNDHMTLRTKIEEGEQQLQQVTVARSVAAAAAATTNLELNPFLEMDTKCFFTGGPFATLDMKCFLPGSLQQMLEAQQRQMLATELNLGYQLAPPGSDAADNNPHHQF

SEQ ID NO: 16678 - protein, 269 aa, Zea mays
MGRGRIEIKRIENNTSRQVTFCKRRNGLLKKAYELSVLCDAEVALIVFSSRGRLYEYANNSVKATIERYKKAHTVGSSSGPPLLEHNAQQFYQQESAKLRNQIQMLQNTNRHLVGDSVGNLSLKELKQLESRLEKGISKIRARKSELLAAEISYMAKRETELQNDHMTLRTKIEEGEQQLQQVTVARSVAAAAAAATNLELNPFLEMDTKCFFTGGPFATLDMKCFLPGSLQQMLEAQQRQMLATELNLGYQLAPPGSDAADNNPHHQF

SEQ ID NO: 16679 - protein, 270 aa, Zea mays
  unsure (1)..(270): unsure at all Xaa locations
MGRGRIEIKRIENNTSRQVTFCKRRNGLLKKAYELSVLCDAEVALIVFSSRGRLYEYANNSVKATIERYKKAHTVGSSSGPPLLEHNAQQFYQQESAKLRNQIQMLQNTNRHLVGDSVGNLSLKELKQLESRLEKGISKIRARKSELLAAEISYMAKRETELQNDHMTLRTKIEEGEQQLQQVTVARSVAAAAAAATNLELNPFLEMDTKCFFTGGPFATXLDMKCFLPGSLQQMLEAQQRQMLATELNLGYQLAPPGSDAADNNPHHQF

SEQ ID NO: 16680 - protein, 304 aa, Zea mays
LTSSFSSLSGSLPEERHYCHTTTPPMLNMMTDLSCGPSSKAAKGGQPAATTGSGGDRQGRGKIEIKRIENTTNRQVTFCKRRNGLLKKAYELSVLCDAEVALVVFSSRGRLYEYANNSVKSTIERYKKANSDTSNSGTVAEVNAQHYQQESSKLRQAIDSLQNANRTIVGDSIHTMGLRELKQMEGKLEKAINKIRARKNELLYAEVEYMQKREMDLQTDNMYLRSKIAENNETGQPPMNMIGLPSTSEYDHMAPFVDSRNFLQVNMQQQPQHYSHLSAATNDPPTRMMKLRIFGQQSMHASTQ

SEQ ID NO: 16681 - protein, 240 aa, Zea mays
MGRGKIVIRRIDNSTSRQVTFSKRRNGIFKKAKELAILCDAEVGLVIFSSTGRLYEYSSTSMKSVIDRYGKAKEEQQDVANPNSELKFWQREAASLRQQLHNLQENYRQLTGDDLSGLNVKELQSLENQLETSLRGVRAKKDHLLIDEIHDLNRKASLFHQENTDLYNKINLIRQENDELHKKIYETEGPSGVNRESPTPFNFAVVETRDVPVQLELSTLPQQNNIEPSTAPKLGLQLIP

SEQ ID NO: 16682 - protein, 265 aa, Zea mays
MGRGRIEIKRIENNTSRQVTFCKRRNGLLKKAYELSVLCDAEVALVVFSSRGRLYEYANNSVKATIERYKKAHAVGSSSGPPLLEHNAQQFYQQESAKLRNQIQMLQNTNRHLVGDSVGNLSLKELKQLESRLEKGISKIRARKSELLAAEINYMAKRETELQNDHMNLRTKIEEGEQQLQQVTVAQSVAAAAATDVELNPFLEMDTKCFFPGGPFATLDMKCFFPGSLQMLEAQQRQMLATELNLGYQLAPPDTDVANNNPQQF

SEQ ID NO: 16683 - protein, 196 aa, Zea mays
  unsure (1)..(196): unsure at all Xaa locations
MGRGRIEIKRIENNTSRQVTFCKRRNGLLKKAYELSVLCDAEVALVVFSSRGRLYEYANNSVKATIERYKKAHAVGSSSGPPLLEHNAQQFYQQESAKLRNQIQMLQNTNRHLVGDSVGNLSLKELKQLESRLEKGISKIRARKSELLAAEINYMAKRETELQNDHMNLRTKIEEGEXQLQQVTVAQSVAAAAAPT

SEQ ID NO: 16684 - protein, 266 aa, Zea mays
  unsure (1)..(266): unsure at all Xaa locations
MGRGRIEIKRIENNTSRQVTFCKRRNGLLKKAYELSVLCDAEVALVVFSSRGRLYEYANNSVKATIERYKKAHAVGSSSGPPLLEHNAQQFYQQESAKLRNQIQMLQNTNRHLVGDSVGNLSLKELKQLESRLEKGISKIRARKSELLAAEINYMAKRETELQNDHMNLRTKIEEGEQQLQQVTVAQSVAAAAATDVELNPFLEMDTKCFFPGXGPFATLDMKCFFPGSLQMLEAQQRQMLATELNLGYQLAPPDTDVANNNPQQF

SEQ ID NO: 16685 - protein, 212 aa, Zea mays
MGRGKIEIKRIENSTNRQVTFSKRRAGLVKKAREIGVLCDAEVGVVIFSSGGKLYDYCSPRTSLSRILEKYQTNSGKILWGEKHKNLSAEIDRVKKENDNMQIQLRHLKGEDLNSLQPRELIAIEEGLQNGQTNMREKQMDYWRMHTTNGKMLEDEHKILTFRMHQQAVDLSGGMRELETGYHQVQHDRDFISQMPFTFRVQPNHPNLQEDE

SEQ ID NO: 16686 - protein, 228 aa, Zea mays
  unsure (1)..(228): unsure at all Xaa locations
MGRGKIEIKRIENATNRQVTYSKRRTGIMKKARELTVLCDAQVAIIMFSSTGKYHEFCSPGTDIKTIFDRYQQAIGTSLWIEQYENMQRTLSHLKDINRGLRTEIRQRMGEDLDSLDFDELRGLEQNVDAALKEVRHRKYHVISTQTDTYKKKVKHSHEAYKNLQQELGMREDPXAFGYVDNTGAGVAWDGAAAALGGAPPDMYAFRVVPSQPNLHGMAYGFHDLRLG

SEQ ID NO: 16687 - protein, 199 aa, Zea mays
MGRGKIEIKRIENSTNRQVTFSKRRNGILKKAREISVLCDAEVGVVVFSSAGKLYDYCSPKTSLSKILEKYQTNSGKILWGEKHKSLSAEIDRIKKENDTMQIELRHLKGEDLNSLQPKDLIMIEEALDNGLTNLNEKLTKMMEDENKLLAFKLHQQDIALSGSMRELELGYHPDRDLAAQMPITFRVQPSHPNLQENN

SEQ ID NO: 16688 - protein, 226 aa, Zea mays
MGRGKIEIKRIENATNRQVTYSKRRTGIMKKARELTVLCDAQVAIIMFSSTGKYHEFCSPGTDIKTIFDRYQQAIGTSLWIEQYENMQRTLSHLKDINRGLRTEIRQRMGEDLDSLDFDELRGLEQNVDAALKEVRHRKYHVISTQTDTYKKKVKHSHEAYKNLQQELGMREDPAFGYVDNTGAGVAWDGAAALGGAPPDMYAFRVVPSQPNLHGMAYGFHDLRLG

SEQ ID NO: 16689 - protein, 227 aa, Zea mays
MGRGKIEIKRIENATNRQVTYSKRRTGIMKKARELTVLCDAQVAIIMFSSTGKYHEFCSPGTDIKTIFDRYQQAIGTSLWIEQYENMQRTLSHLKDINRGLRTEIRQRMGEDLDSLDFDELRGLEQNVDAALKEVRHRKYHVISTQTDTYKKKVKHSHEAYKNLQQELGMREDPAFGYVDNTGAGVAWDGAAAALGGAPPDMYAFRVVPSQPNLHGMAYGFHDLRLG

SEQ ID NO: 16690 - protein, 265 aa, Zea mays
MGRGRIEIKRIENNTSRQVTFCKRRNGLLKKAYELSVLCDAEVALVVFSSRGRLYEYANNSVKATIERYKKAHAVGSSSGPPLLEHNAQQFYQQESVKLRNQIQMLQNTNRHLVGDSVGNLSLKELKQLESRLEKGISKIRARKSELLAAEINYMAKRETELQNDHMNLRTKIEEGEQQLQQVTVAQSVAAAAATDVELNPFLEMDTKCFFPGGPFATLDMKCFFPGSLQMLEAQQRQMLATELNLGYQLAPPDTDVANNNPQQF

SEQ ID NO: 16691 - protein, 265 aa, Zea mays; identical to SEQ ID NO: 16690

SEQ ID NO: 16692 - protein, 212 aa, Zea mays
MGRGKIEIKRIENSTNRQVTFSKRRAGLVKKAREIGVLCDAEVGVVIFSSGGKLYDYCSPRTSLSRILEKYQTNSGKILWGEKHKNLSAEIDRVKKENDNMQIQLRHLKGEDLNSLQPRELIAIEEGLQNGQTNMREKQMDYRRMHKTNGKMLEDEHKILTFRMHQQAVDLSGGMRELETGYHQVQHDRDFISQMPFTFRVQPNHPNLQEDE

SEQ ID NO: 16693 - protein, 227 aa, Zea mays; identical to SEQ ID NO: 16689

SEQ ID NO: 16694 - protein, 212 aa, Zea mays
  unsure (1)..(212): unsure at all Xaa locations
MGRGKIEIKRIENSTNRQVTFSKRRNGILKKAREISVLCDAEVGVVVFSSAGKLYDYCSPKTSLSKILEKYQTNSGKILWGEKHKSLSAEIDRIKKENDTMQIELRHLKGEDLNSLQPKDLIMIEEALDNGLTNLNEKLMEHWERRVTNTKMMEDENKLLAFKLHQQDIAXLSGSMRELELGYHPXDRDLXAAQMPITFRVQPSHPNLQENN

SEQ ID NO: 16695 - protein, 209 aa, Zea mays
MGRGKIEIKRIENSTNRQVTFSKRRNGILKKAREISVLCDAEVGVVVFSSAGKLYDYCSPKTSLSKILEKYQTNSGKILWGEKHKSLSAEIDRIKKENDTMQIELRHLKGEDLNSLQPKDLIMIEEALDNGLTNLNEKLMEHWERRVTNTKMMEDENKLLAFKLHQQDIALSGSMRELELGYHPDRDLAAQMPITFRVQPSHPNLQENN

SEQ ID NO: 16696 - protein, 171 aa, Zea mays
MGRGKIKIKRIENSTNRQVTFSKRRAGLVKKAREIGVLCDAEVGVVIFSSGGKLYDYCSPRTSLSRILEKYQTNSGKILWGEKHKNLSAEIDRVKKENDNMQIQLRHLKGEDLNSLQHRELIAIEEGLQNGQTNMREKQMDYWRMHKTNGKMLEDEHKILTFRMHQQAVDL

SEQ ID NO: 16697 - protein, 245 aa, Zea mays
MGRGKVQLKRIENKINRQVTFSKRRSGLLKKAHEISVLCDAEVALIIFSTKGKLYEYSTDSCMDKILDRYERYSYAEKVLISVESETQGNWCHEYRKLKAKVETIQKCQKHLMGEDLETLNLKELQQLEQQLESSLKHIRTRKSQLMLESISELQRKEKSLQEENKVLQKELAEKQKAQRKQVQWGQTQQQTSSSSSCFMIREAAPTTNISIFPVAAGGRLVEGAAAQPQARVGLPPWMLSHLSS

SEQ ID NO: 16698 - protein, 270 aa, Zea mays
  unsure (1)..(270): unsure at all Xaa locations
MGRGRIEIKRIENNTSRQVTFCKRRNGLLKXXYELSVLCDAEVALIVFSSRGRLYEYANNSVKATIERYKKAHTVGSSSGPPLLEHNAQQFYQQESAKLRNQIQMLQNTNRHLVGDSVGNLSLKELKQLESRLEKGISKIRARKSELLAAEISYMAERETELQNDHMTLRTEIEEGEQQLQQVTXVARSVAAAAAAATNLELNPFLEMDTKCFFTGGPFATLDMKCFLPGSLQQMLEAQQRQMLATELNLGYQLAPPGSDAADNNPHHQF

SEQ ID NO: 16699 - protein, 263 aa, Zea mays
MLNMMTDLSCGPSSKAKGGQPAAAPGSGGDRQGRGKIEIKRIENTTNRQVTFCKRRNGLLKKAYELSVLCDAEVALVVFSSRGRLYEYANNSVKSTIERYKKANSDTSNSGTVAEVNAQHYQQESSKLRQAIDSLQNANSRTIVGDSIHTMGLRELKQMEGKLEKAINKIRARKNELLYAEVEYMQRREMDLQTDNMYLRSKIAENNNETGQPAMNMIGVPSTSEYDHMASFVDSRNFLQVNMQQQQPQHYSHQLQPTTLQLG

SEQ ID NO: 16700 - protein, 209 aa, Zea mays
MGRGKIEIKRIENSTNRQVTFSKRRNGILKKAREISVLCDAEVGVVVFSSAGKLYDYCSPKTSLSKILEQYRPGSGKILWGEKHKSLSAEIDRIKKENDTMQIELRHLKGEDLNSLQPKDLIMIEEALDNGLTNLNEKLMEHWERRVTNTKMMEDENKLLAFKLHQQDIALSGSMRELELGYHPDRDLAAQMPITFRVQPSHPNLQENN

SEQ ID NO: 16701 - protein, 273 aa, Zea mays
MGRGKVQLKRIENKINRQVTFSKRRNGLLKKAHEISVLCDAEVAVIVFSPKGKLYEYATDSRMDKILERYERYSYAEKALISAESESEGNWCHEYRKLKAKIETIQKCHKHLMGEDLESLNPKELQQLEQQLDSSLKHIRSRKSHLMAESISELQKKERSLQEENKALQKELAERQKAVASRQQQQQQQVQWDQQTHAQAQTSSSSSSFMMRQDQQGLPPPHNICFPPLTMGDRGEELAAAAAAQQQQPLPGQAQPQLRIAGLPPWMLSHLNA

SEQ ID NO: 16702 - protein, 273 aa, Zea mays; identical to SEQ ID NO: 16701

SEQ ID NO: 16703 - protein, 268 aa, Zea mays
  unsure (1)..(268): unsure at all Xaa locations
MGRGKIEIKRIENTTSRQVTFCKRRNGLLKKAYELSILCDAEIALIVFSTRGRLYEYSSNSVRSTIERYKKASASTSGTAPVTDVNSLQYFQQEAAKLRQQIQTLQNSNRHLMGESTGNMTAKELKGLESRLERGIGRIRSKKHELXLLAEIEYMQKREADLHNENMFLRAKVAEAERALEQEAAEDQTMMVPAAVRGATTELKALPASFDASGYYQYQQHQHVVAAASAASSSQYAEQPQGQQEYHHQTALHLGYLKIDSAADKGFL

SEQ ID NO: 16704 - protein, 239 aa, Zea mays
MGRGKIVIRRIDNSTSRQVTFSKRRNGIFKKARELAILCDAEVGLVIFSSTGRLYEYASTSIKSVIDRYGRAKEEEHVADPNTELKFWQREAASLRQQLHNLQENHRQLMGQNLSGLGVKGLQNLENQLEMSICCIRTKKDQLLVDEIHELNRKGSLIQQDNMGLHRKVNLIRQENAELYKKLYEKEAEGEVNRDSTTPYNFVVAEGANVPIHLELNIPLQENGVEQPVAPKLGLQLNQ

SEQ ID NO: 16705 - protein, 273 aa, Zea mays
FPADREALPHHHHPMLNMMTDLSCGPSSKVKEQVAAAPTGSGDRQGQGRGKIEIKRIENTTNRQVTFCKRRNGLLKKAYELSVLCDAEVALVVFSSRGRLYEYANNSVKSTIERYKKANSDSSNSGTVAEVNAQYYQQESSKLRQMIHSLQNANTRNIVGDSIHTMGLRDLKQMEGKLEKAISKIRARKNELLYAEVDYMQKREMDLQTDNMYLTSKIAESNETGQPAMHMMGVPPPTSEYDHMAPFDSRNFLQVSMPQHYSHQLQPTTLQLG

SEQ ID NO: 16706 - protein, 212 aa, Zea mays
MGRGKIKIKRIENSTNRQVTFSKRRAGLVKKAREIGVLCDTEVGVVIFSSGGKLYDYCSPRTSLSRILEKYQTNSGKILWGEKHKNLSAEIDRVKKENDNMQIQLRHLKGEDLNSLQHRELIAIEEGLQNGQTNMREKQMDYWRMHKTNGKMLEDEHKILTFRMHQQAVDLSGGMRELEIGYHQVQHDRDFISQMPFTFRVQPNHPNLQEDE

SEQ ID NO: 16707 - protein, 286 aa, Zea mays
  unsure (1)..(286): unsure at all Xaa locations
MGRGKVELKKIENPTNRQVTFSKRRMGLFKKANELAILCDAQIGVIIFSGSGRMYEYSSPGCRIASVFDRYLKAPSTRFEEMDIQQKIVQEMTRMKDERNRLRMIMAQYMAEDLASFSAQDLSNLEQQIEFSLYKVRLRKQELLDQQLLEIHQREMHMPAEQGGYLCLMNPAAAIASGQHQQAGEMVGINPRPFPWXGTWEPVAVAVAARASSSCCTAGTXAESSMTALGLSPQLHGYRLQPRQPNLQQDADIHGWLXFXFGRGCASSTRRDDAERAAPLLATCSF

SEQ ID NO: 16708 - protein, 271 aa, Zea mays
MGRGKVQLKRIENKINRQVTFSKRRNGLLKKAHEISVLCDAEVAVIVFSPKGKLYEYASDSRMDKILERYERYSYAEKALISAESESEGNWCHEYRKLKAKIETIQRCHKHLMGEDLESLNPKELQQLEQQLESSLKHIRSRKSHLMAESISELQKKERSLQEENKALQKELSERQKAVASRQQQQQQVQWDQQTQVQVQTSSSSSSFMMRQDQQGLPPPQNICFPPLSIGERGEEVAAAAQQQLPPPPGQAQPQLRIAGLPPWMLSHLNA

SEQ ID NO: 16709 - protein, 245 aa, Zea mays
MGRGKVQLKRIENKINRQVTFSKRRSGLLKKAHEISVLCDAEVALIIFSTKGKLYEYSTDSCMDKILDRYERYSYAEKVLISAESETQGNWCHEYRKLKAKVETIQKCQKHLMGEDLETLNLKELQQLEQQLESSLKHIRTRKNQLMLESISELQRKEKSLQEENKVLQKELAEKQKAQRKQVQWGQTQQQTSSSSSCFVIREAAPTTNISIFPVAAGGRLVEGAAAQPQARVGLPPWMLSHLSS

SEQ ID NO: 16710 - protein, 230 aa, Zea mays
  unsure (1)..(230): unsure at all Xaa locations
MARGKVQLRRIENPVHRQVTFCKRRAGLLKKARELSVLCDAHVGIIVFSAHGKLYDLATTGTMEELIERYRTASSREAADGCGDNNRMDAKQETMVLQQEINLLQKGLRYIYGNRTNEHMNVEELNALERYLEIWMYNIRSAKMQIMIQEIQALKSKEGMLQAANEVLQEKIVEQSSLLDVGMVVADQQNGHFSTVPLVEEMISNPLTILSGYSNCRGYSFXHCHNTLGG

SEQ ID NO: 16711 - protein, 245 aa, Zea mays; identical to SEQ ID NO: 16709

SEQ ID NO: 16712 - protein, 271 aa, Zea mays; identical to SEQ ID NO: 16708

SEQ ID NO: 16713 - protein, 212 aa, Zea mays
MGRGKIKIKRIENSTNRQVTFSKRRAGLVKKAREIGVLCDTEVGVVIFSSGGKLYDYCSPRTSLSRILEKYQTNSGKILWGEKHKNLSAEIDRVKKENDNMQIQLRHLKGEDLNSLQHRELIAIEEGLQNGQTNMREKQMDYWRMHKTNGKMLEDEHKILTFRMHQQAVDLSGRMRELEIGYHQVQHDRDFISQMPFTFRVQPNHPNLQEDE

SEQ ID NO: 16714 - protein, 245 aa, Zea mays; identical to SEQ ID NO: 16709

SEQ ID NO: 16715 - protein, 212 aa, Zea mays; identical to SEQ ID NO: 16713

SEQ ID NO: 16716 - protein, 225 aa, Zea mays
MARGKVQLRRVENPVHRQVTFCKRRAGLLKKARELSVLCDASVGIIVFSAHGKLYDLATTGTMEELIERYKAASAGEANGCGNNRMDPKHETTVLQQEINLLQKGLRYIYGNRANEHMNVDELNALERYLEIWMYNTRSAKMQIMAQEIQALKSKEGMLKAANEILQEKIVEQSSLLDVGMVVADQQNGRFSTVPLVEEVISSNPLTILSGYSSCRGSEMGYSFC

SEQ ID NO: 16717 - protein, 224 aa, Zea mays
MARGKVQLRRVENPVHRQVTFCKRRAGLLKKARELSVLCDASVGIIVFSAHGKLYDLATTGTMEELIERYKAASAGEANGCGNNRMDPKHETTVLQQEINLLQKGLRYIYGNRANEHMNVDELNALERYLEIWMYNTRSAKMQIMAQEIQALKSKEGMLKAANEILQEKIVEQSSLLDVGMVVADQQNGRFSTVPLVEEVISSNPLTILSGYSSCRGSEMGYSF

SEQ ID NO: 16718 - protein, 224 aa, Zea mays
MARGKVQLRRVENPVHRQVTFCKRRAGLLKKARELSVLCDASVGIIVFSAHGKLYNLATTGTMEELIERYKAASAGEANGCGNNRMDPKHETTVLQQEINLLQKGLRYIYGNRANEHMNVDELNALERYLEIWMYNTRSAKMQIMAQEIQTLKSKEGMLKAANEILQEKIVEQSSLLDVGMVVADQQNGRFSTVPLVEEVISSNPLTILSGYSSCRGSEMGYSF

SEQ ID NO: 16719 - protein, 224 aa, Zea mays
MARGKVQLRRVENPVHRQVTFCKRRAGLLKKARELSVLCDASVGIIVFSAHGKLYDLATTGTMEELIERYKAASAGEANGCGNNRMDPKHETTVLQQEINLLQKGLRYIYGNRANEHMNVDELNALERYLEIWMYNTRSAKMQIMAQEIQALKSKEGMLKAANEILQEKIVEQSSLLDVGMVVADQQNGRFSTVPLVEEVISSNPLTVLSGYSSCRGSEMGYSF

SEQ ID NO: 16720 - protein, 214 aa, Zea mays
  unsure (1)..(214): unsure at all Xaa locations
MGRGKIEIKRIENSTNRQVTFSKRRAGLVKKAREIGVLCDAEVGVVIFSSGGKLYDYCSPRTSLSRILEKYQTNSGKILWGEKHKNLSAEIDRVKKENDNMQIQLRHLKGEDLNSLQPRXELIAIEEGLQNGQTNMREKQMDYWRMHKTNGKMLEDEHKILTFRMHQQAVDLSGGMRELETGYHQVQHDRDFISQMPFTXFRVQPNHPNLQEDE

SEQ ID NO: 16721 - protein, 245 aa, Zea mays; identical to SEQ ID NO: 667

SEQ ID NO: 16722 - protein, 245 aa, Zea mays; identical to SEQ ID NO: 667

SEQ ID NO: 16723 - protein, 245 aa, Zea mays; identical to SEQ ID NO: 667

SEQ ID NO: 16724 - protein, 245 aa, Zea mays; identical to SEQ ID NO: 667

SEQ ID NO: 16725 - protein, 245 aa, Zea mays; identical to SEQ ID NO: 667

SEQ ID NO: 16726 - protein, 259 aa, Zea mays
MLNMMTDLSCGPSSKVKEQVAAAPTGSGDRQGQGRGKIEIKRIENTTNRQVTFCKRRNGLLKKAYELSVLCDAEVALVVFSSRGRLYEYANNSVKSTIERYKKANSDSSNSGTVAEVNAQYYQQESSKLRQMIHSLQNANTRNIVGDSIHTMGLRDLKQMEGKLEKAIIKIRARKNELLYAEVDYMQKREMDLQTDNMYLRSKIAESNETGQPAMHMTMGAPPTSEYDHMAPFDSRNFLQVSMPQHYSHQLQPTTLQLG

SEQ ID NO: 16727 - protein, 259 aa, Zea mays; identical to SEQ ID NO: 16726

SEQ ID NO: 16728 - protein, 262 aa, Zea mays
  unsure (1)..(262): unsure at all Xaa locations
MVRGKTELKRIENATSRQVTFSKRRNGLLKKAFELSVLCDAEVGLVVFSPRGKLYEFASAASLQKTIDRYRTYTRENVNNKTVQQDIQQVKADAVSLASRLEALEKTKRMFLGENLEECSIEELHNLEVKLAKSLHVIRGKKTQLLEQQISKLKEKERTLLQDNKELRDKQRNLQSPPEAPPDLNRCVPPWPRSLPAPSNDMDVETELYIGLPGRERSSNRDSDXTTDFQFDRLKGISSLKLKHRRAHVNGFICNFCMQTCT

SEQ ID NO: 16729 - protein, 77 aa, Zea mays
  unsure (1)..(77): unsure at all Xaa locations
XLVERYEAAXHXXXWADXRQRDLAXERRAELEKAERMCELMEKELRFMTVDDGEQYTXPSLEQLXHSLEAAVHRVRX

SEQ ID NO: 16730 - protein, 262 aa, Zea mays; identical to SEQ ID NO: 16728
  unsure (1)..(262): unsure at all Xaa locations

SEQ ID NO: 16731 - protein, 212 aa, Zea mays
MGRGKIKIKRIENSTNRQVTFSKRRAGLVKKAREIGVLCETEVGVVIFSSGGKLYDYCSPRTSLSRILEKYQTNSGKILWGEKHKNLSAEIDRVKKENDNMQIQLRHLKGEDLNSLQHRELIAIEEGLQNGQTNMREKQMDYWRMHKTNGKMLEDEHKILTFRMHQQAVDLSGRMRELEIGYHQVQHDRDFISQMPFTFRVQPNHPNLQEDE

SEQ ID NO: 16732 - protein, 270 aa, Zea mays
MGRGKVQLKRIENKINRQVTFSKRRNGLLKKAHEISVLCDAEVAVIVFSPKGKLYEYASDSRMDKILERYERYSYAEKALISAESESEGNWCHEYRKLKAKIETIQRCHKHLMGEDLESLNPKELQQLEQQLESSLKHIRSRKSHLMAESISELQKKERSLQEENKILQKELSERQKAVASRQQQQQQVQWDQQTQVQVQTSSSSSSFMMRQDQQGLPPPQNICFPPLSIGERGEEVAAAAQQQLPPPGQAQPQLRIAGLPPWMLSHLNA

SEQ ID NO: 16733 - protein, 270 aa, Zea mays; identical to SEQ ID NO: 16732

SEQ ID NO: 16734 - protein, 224 aa, Zea mays
MARGKVQLRRVENPVHRQVTFCKRRAGLLKKARELSVLCDASVGIIVFSAHGKLYDLATTGTMEELIERYKAASAGEANGCGNNRMDPKHETTVLQQEINLLQKGLRYIYGNRANEHMNVDELNALKRYLEIWMYNTRSAKMQIMAQEIQALKSKEGMLKAANEILQEKIVEQSSLLDVGMVVADQQNGRFSTVPLVEEVISSNPLTVLSGYSSCRGSKMGYSF

SEQ ID NO: 16735 - protein, 231 aa, Zea mays
MGRGKVQLKRIENKINRQVTFSKRRSGLLKKAHEISVLCDAEVALIIFSTKGKLYEYSTDSCMDKILERYERYSYAEKVLISAEYETQGNWCHEYRKLKAKVETIQKCQKHLMGEDLETLNLKELQQLEQQLESSLKHIRTRKSQLMVESISALQRKLAEKQKDQRQQVQRDQTQQQTSSSSMSFMLREAAPTTNVSIFPVAAGGRVVEGAAAQPQARVGLPPWMLSHLSC

SEQ ID NO: 16736 - protein, 218 aa, Zea mays
  unsure (1)..(218): unsure at all Xaa locations
MGRGKIEIKRIDSATSRQVTFSKRRSGLFKKAKELAILCDAEVGLAVFSSTGRLYDFASTSMKCVIERYSEAREEHRQTMSASAEAKXQLLGQQLSGLNVGDLQNLENKLETSLRNIRLKKDQLIFYQIQELNRKGSLMHQESIELYNKVNLLHQHNTELQRKVYGQGVNNEQTSTTVRHSTRDTENLPINLELSVQRDKSETPSVGLXGEIFVQTSG

SEQ ID NO: 16737 - protein, 250 aa, Zea mays
MGRGRGKVEVRRIENSVSRQVTFSKRRRGLAKKARELAVLCDADVALLVFSDKGRLHDFAAHGSMERILGRYERYLLCEDRDDVTQDYPEESQGNMSYDHIKLRSKLEAIKKSQRNLMGEQLESLTFREVQQLEHRIDSALRNVRSRKDHILLNSIQELRNKETFLMEQNGILEKEMIKKKKAAVGASSSLHTTTSTAAASSTAAAAAALPNLNICPDDSDEPGMAAAAGIRLPWWMLQPSAVSQRQEQH

SEQ ID NO: 16738 - protein, 132 aa, Zea mays
  unsure (1)..(132): unsure at all Xaa locations
PGVRSAARLRVRDDYXWXEGPHRDKAGREPDAAGVHLLQAQGRALQEGGEQYTVPSLELLEHSLEAAVHRVRSEKDRKIGGEIDCLQNIIRGRHEERYGLCDKVSYKTTEEMVHSRQKNLPAGLPMALPASR

SEQ ID NO: 16739 - protein, 244 aa, Zea mays
MGRGRVELKRIENKINRQVTFAKRRNGLLKKAYELSVLCDAEVALIVFSNRGKLYEFCSGPSITRTLERYEKNSYAGPDTAVQNKENELVQNSRNEYLKLKAKVDNLQRTQRNLLGEDLGSLGVKELDQLEKQIDSSLSHIRSTRTQHMLDQLTDLQRREQMMCEANKCLRRKLEETSNQVHGQVWEHGANLLLGYERHSSPQQAPSHVGNGLFFHPLEAAAEPTLQIGFAPEHMNNFMPAWLP

SEQ ID NO: 16740 - protein, 244 aa, Zea mays; identical to SEQ ID NO: 16739

SEQ ID NO: 16741 - protein, 246 aa, Zea mays
  unsure (1)..(246): unsure at all Xaa locations
MGRGRVELKRIENKINRQVTFAKRRNGLLKKAYELSVLCDAEVALIVFSNRGKLYEFCSGPSITRTLERYEKNSYAGPDTAVQNKENELVQNSRNEYLKLKAKVDNLQRTQRNLLGEDLGSLGVKELDQLEKQIDSSLSHIRSTRTQHMLDQLTDLQRREQMMCEANKCLRRKLEETSNQVHGQVWEHGXANLLLGYERHSSPQQAPSHVGNGLFFHPLEAAAEPXTLQIGFAPEHMNNFMPAWLP

SEQ ID NO: 16742 - protein, 253 aa, Zea mays
  unsure (1)..(253): unsure at all Xaa locations
MGRGKVQLKRIENKINRQVTFSKRRSGLLKKAHEISVLCDAEVALIIFSTKGKLYEYSTDSCMDKILERYERYSYAEKVLISAEYETQGNWCHEYRKLKAKVETIQKCQKHLMGEDLETLNLKELQQLEQQLESSLKHIRTRKSQLMVESISALQRKEKSLQEENKVLQKEKALLLHAXLAEKQKDQRQQVQRDQTQQQTSSSSTSFMLREAAPTTNVSIFPVAAGGRVVEGAAAQPQARVGLPPWMLSHLSC

SEQ ID NO: 16743 - protein, 254 aa, Zea mays
  unsure (1)..(254): unsure at all Xaa locations
MGRGKVQLKRIENKINRQVTFSKRRSGLLKKAHEISVLCDAEVALIIFSTKGKLYEYSTDSCMDKILDRYERYSYAEKVLISVESETQGNWCHEYRKLKAKVETIQKCQKHLMGXEDLETLNLKELQQLEQQLESSLKHIRTRKNQLMLESISELQRKEKSLQEENKVLQKEKALLLPAXLAEKQKAQRKQVQWGQTQQQTSSSSSCFVIREAAPTTNISIFPVAAGGRLVEGAAAQPQARVGLPPWMLSHLSS

SEQ ID NO: 16744 - protein, 243 aa, Zea mays
MGRGRVELKRIENKINRQVTFAKRRNGLLKKAYELSVLCDAEVALIIFSNRGKLYEFCSGQSITKTLERYEKNSYGGPDTAVQNKENELVQSSRNEYLKLKARVDNLQRTQRNLLGEDLGSLGVKELEQLEKQLDSSLRHIRSTRTQHMLDQLTDLQRREQMLCEANKCLRRKLEETSNQVHGQVWEHGANLLGYERHSPQQQAPSHVGNGLFFHPLEAAAEPTLQIGFAPEHMNNFMPTWLP

SEQ ID NO: 16745 - protein, 243 aa, Zea mays; identical to SEQ ID NO: 16744

SEQ ID NO: 16746 - protein, 243 aa, Zea mays; identical to SEQ ID NO: 16744

SEQ ID NO: 16747 - protein, 246 aa, Zea mays
  unsure (1)..(246): unsure at all Xaa locations
MGRGKVQLKRIENKINRQVTFSKRRSGLLKKAHEISVLCDAEVALIIFSTKGKLYEYSTDSCMDKILERYERYSYAEKVLISAEYETQGNWCHEYRKLKAXKVDTIQECQKHLMGEDLRTLNLKELQQLEQQLESSLKHIRTRKSQLMVESISALQRKEKSLQEENKVLQKELAEKQKDQRQQVQRDQTQQQTSSSSTSFMLREAAPTTNVSIFPVAAGGRVVEGAAAQPQARVGLPPWMLSHLSC

SEQ ID NO: 16748 - protein, 299 aa, Zea mays
MVRGKTQMKRIENPTSRQVTFSKRRNGLLKKAFELSVLCDAEVALVVFSPRGKLYEFASGSAQKTIERYRTYTKDNVSNKTAHQDIEQVKADAEGLAKKLEALEAYKRKLLGERLEECSFEELHSLEVKLEKSLHCIRGRKTQLLEEQLHKLKEKEMNLRKSNEDLREKCKKQPPPPPPMLMAPPPPPAPAAIDHTGPKDVGMDVETELYIGLPGRDYRSNKHDCTVAVRSGQVRPASSAENNLRSVVRRTGDASQAQANQHDKDHECRVVFYKPVHRPSKAHAPERPSENTYPLISLY

SEQ ID NO: 16749 - protein, 261 aa, Zea mays
  unsure (1)..(261): unsure at all Xaa locations
MGRGKVELKKIENPTNRQVTFSKRRMGLFKKANELAILCDAQIRVIIFSGSGRMYEYSSPPXEVREALFIYLFIPSTRFEEMDIQQKIVQEMTRMKDERNRLRMIMAQXMAEDLASFSAQDLSNLEQQIEFSLYKVCLRKXELLDQQLLEIRQRVHNIPTSDPSLGSLYTSLFQKARAGEMVGINPRPFLWWDVGASGSGSQSQQLLHGRDAAESSMTALGLSPQMHXXYRLHPRQPNLRQDTDVHGWLWXAAAACAWTLI

SEQ ID NO: 16750 - protein, 286 aa, Zea mays
MHIREEEATPSTVTGIMSTLTSAGQQKLKEPISPGGGSASVAGSAAERNNGGRGKGKTEIKRIENTTNRQVTFCKRRNGLLKKAYELSVLCDAEVALIVFSSRGRLYEYANNSVKGTIERYKKATSDNSSAAGTIAEVTIQHYKQESARLRQQIVNLQNSNRALIGDSITTMSHKELKHLETRLDKALGKIRAKKNDVLCSEVEYMQRREMELQNDNLYLRSRVDENERAQQTANMMGAPSTSEYQQHGFTPYDPIRSFLQFNIVQQPQFYSQQEDRKDFNDQGGR

SEQ ID NO: 16751 - protein, 286 aa, Zea mays; identical to SEQ ID NO: 16750

SEQ ID NO: 16752 - protein, 286 aa, Zea mays; identical to SEQ ID NO: 16750

SEQ ID NO: 16753 - protein, 286 aa, Zea mays; identical to SEQ ID NO: 16750

SEQ ID NO: 16754 - protein, 272 aa, Zea mays
  unsure (1)..(272): unsure at all Xaa locations
MVRGKTQMKRIENPASRQVTFSKRRNGLLKKAFELSVLCDAEVALVVFSPRGKLYEFASGSAQKTIERYRTYTKDNVSNKTAHQDIEQVKADAEGLAKKLEALEAYKRKLLGERLEECSFEELHSLEVKLEKSLHCIRGRKCKKQPPPPPPMLMAPPPPPAPAAIDXXRGPKDVGMDVETELYIGLPGRDYRSNKHDCTVAVRSGQVRLASSAENNLRSVVRRTGDASQAQANQHDKDHECRVVFYKPVHRPSKAHAPERPSENTYPLISLY

SEQ ID NO: 16755 - protein, 275 aa, Zea mays
  unsure (1)..(275): unsure at all Xaa locations
MGRGPVQLRRIENKINRQVTFSKRRNGLLKKAHEISVLCDAEVALIVFSTKGKLYEYSSHSSMEGILERYQRYSFEERAVLNPSIEDQANWGDEYVRLKSKLDALQKSQRQLLGEQLSSLTIKELQQLEQQLDSSLKHIRSRKNQLMFDSISALQKKEKALTDQNGVLQKFMEAEKEKNKALMNAHREQQNGASTSSPSLSPPIVPDSMPTLNIGPCQPRGGAESESEPSPAPAQANRGNLPPWMLRTVKXQVRSSQCSFAADLDSNTPVTEMLR

SEQ ID NO: 16756 - protein, 251 aa, Zea mays
MGRGPVQLRRIENKINRQVTFSKRRNGLLKKAHEISVLCDAEVALIVFSTKGKLYEYSSHSSMEGILERYQRYSFEERAVLNPSIEDQANWGDEYVRLKSKLDALQKSQRQLLGEQLSSLTIKELQQLEQQLDSSLKHIRSRKNQLMFDSISALQKKEKALTDQNGVLQKFMEAEKEKNKALMNAQLREQQNGASTSSPSLSPPIVPDSMPTLNIGPCQHRGAAESESEPSPAPAQANRGNLPPWMLRTVK

SEQ ID NO: 16757 - protein, 258 aa, Zea mays
  unsure (1)..(258): unsure at all Xaa locations
MVRGKTQMKRIENPTSRQVTFSKRRNGLLKKAFELSVLCDAEVALVVFSPRGKLYEFASGSAQKTIERYRTYTKDNVSNKTVQQDIERVKADADGLSKRLEALEAYKRKLLGERLEDCSIEELHSLEVKLEKSLHCIRGRKTELLEEQVRKLKQKCKKQPPXVPMASAPPRAPAVDXNVEDGHREPKDDGMDVETELYIGLPGRDYRSSKDKAAVAVRSSVRSVLGVAREWVSCPLGDASAFCKEASRDLWWWSPHGA

SEQ ID NO: 16758 - protein, 301 aa, Zea mays
MVRGKTQMKRIENPASRQVTFSKRRNGLLKKAFELSVLCDAEVALVVFSPRGKLYEFASGSAQKTIERYRTYTKDNVSNKTAHQDIEQVKADAEGLAKKLEALEAYKRKLLGERLEECSFEELHSLEVKLEKSLHCIRGRKTQLLEEQLHKLKEKEMNLRKSNEDLREKCKKQPPPPPPMLMAPPPPPAPAAIDHTGPKDVGMDVETELYIGLPGRDYRSNKHDCTVAVRSGQVRPASSAENNLRSVVRRTGDASQAQANQHDKDHECRVVFYKPVHTVRQRHMRQNVRQRTLTPSSPSIS

SEQ ID NO: 16759 - protein, 497 aa, Zea mays
MCIQSPHFCNIMMHAYGINLIHSMRDIQSLLSPPQHRHPPTPPPFPSFPSASNSANKPLRLAAPPPTRADPGERGRRRDWGRRSWDPGPAARPARGWRLGQSPPARGGPLLFFSLPPPPSPCHFWRRHLLPPPQPPEAGGARAARPPPGRFGPRAPPAARRLLPAAGAAAIRSGRGRRGEGGGSVSRFDWSSRPRRSRMVRGKTQMKRIENPASRQVTFSKRRNGLLKKAFELSVLCDAEVALVVFSPRGKLYEFASGSAQKTIERYRTYTKDNVSNKTAHQDIEQVKADAEGLAKKLEALEAYKRKLLGERLEECSFEELHSLEVKLEKSLHCIRGRKTQLLEEQLHKLKEKEMNLRKSNEDLREKCKKQPPPPPPMLMAPPPPPAPAAIDHTGPKDVGMDVETELYIGLPGRDYRSNKHDCTVAVRSGQVRLASSAENNLRSVVRRTGDASQAQANQHDKDHECRVVFYKPVHRPSKAHAPERPSENTYPLISLY

SEQ ID NO: 16760 - protein, 299 aa, Zea mays
MVRGKTQMKRIENPASRQVTFSKRRNGLLKKAFELSVLCDAEVALVVFSPRGKLYEFASGSAQKTIERYRTYTKDNVSNKTAHQDIEQVKADAEGLAKKLEALEAYKRKLLGERLEECSFEELHSLEVKLEKSLHCIRGRKTQLLEEQLHKLKEKEMNLRKSNEDLREKCKKQPPPPPPMLMAPPPPPAPAAIDHTGPKDVGMDVETELYIGLPGRDYRSNKHDCTVAVRSGQVRLASSAENNLRSVVRRTGDASQAQANQHDKDHECRVVFYKPVHRPSKAHAPERPSENTYPLISLY

SEQ ID NO: 16761 - protein, 242 aa, Zea mays
  unsure (1)..(242): unsure at all Xaa locations
MGRGRVELKRIENKINRQVTFAKRRNGLLKKAYELSVLCDAEVALIIFSNRGKLYEFSSTQSMPKTLEKYQKCSFAGPETALQNRENEQLKSSRNEYLKLKARVDNLQRTQRNLLGEDLESLGIKELEHLEKQLDSSLKHIRSTRTQHMVDQLTELQKKEQMFCEANKCLRRRLEESNQVIWQHAWEXXSERHSEVQPQQLNGNNFFHPLDGAGEPTXLQIGYPSEALTSSCMTTFLPPWLP

SEQ ID NO: 16762 - protein, 255 aa, Zea mays
MGRGRVELKRIENKINRQVTFSKRRNGLLKKAYELSVLCDAEVALIIFSGRGKLYEFGSAGVTKTLERYQHCCYNAQDSNNSALSESQSWYQEMSKLRAKFEALQRTQRHLLGEDLGPLSVKELQQLEKQLECALSQARQRKTQVMMEQVEELRRTERHLGEMNRQLKHKLEAEGCSNYTTLQHAACWPAPGGTIVEHDGATYQVHPPAHSVAMDCEPTLQIGYPHHQFPPPEAVNNIPRSAATGENNFMLGWVL

SEQ ID NO: 16763 - protein, 232 aa, Zea mays
MVRGKTQMKRIENPTSRQVTFSKRRNGLLKKAFELSVLCDAEVALVVFSPRGKLYEFASGSAQKTIERYRTYTKDNVSNKTVQQDIERVKADADGLSKRLEALEAYKRKLLGERLEDCSIEELHSLEVKLEKSLHCIRGRKTELLEEQVRKLKQKEMSLRKSNEDLREKCKKQPPVPMASAPPRAPAVDNVEDGHREPKDDGMDVETELYIGLPGRDYRSSKDKAAVAVRSG

SEQ ID NO: 16764 - protein, 232 aa, Zea mays; identical to SEQ ID NO: 16763

SEQ ID NO: 16765 - protein, 255 aa, Zea mays; identical to SEQ ID NO: 16762

SEQ ID NO: 16766 - protein, 240 aa, Zea mays
MGRGRVELKRIENKINRQVTFAKRRNGLLKKAYELSVLCDAEVALIIFSNRGKLYEFSSTQSMPKTLEKYQKCSFAGPETALQNRENEQLKSSRNEYLKLKARVDNLQRTQRNLLGEDLESLGIKELEHLEKQLDSSLKHIRSTRTQHMVDQLTELQKKEQMFCEANKCLRRRLEESNQVIWQHAWEQSERHSEVQPQQLNGNNFFHPLDGAGEPTLQIGYPSEALTSSCMTTFLPPWLP

SEQ ID NO: 16767 - protein, 225 aa, Zea mays
  unsure (1)..(225): unsure at all Xaa locations
MARGKVQMRRIENPVHRQVTFCKRRMGLLKKARELSVLCDAAIGVIVISPHGKIYDLATNGNMQGLIERYRRACSEMHGESSNQTQTIKQEVLALTHEIDLLQKGFRYMHGENDIDHMNLVELQTLENNLEMWANNIRSQKMQIISREIDMLRNKEAILQAVNGVLQERIIEQNGILNFSGTAMTPSQLTMESNYYLXAKLSSYEFIYVWFRKCMVFHFVPSQTS

SEQ ID NO: 16768 - protein, 231 aa, Zea mays
  unsure (1)..(231): unsure at all Xaa locations
MARGKVQLRRVENPVHRQVTFCKRRAGLLKKARELSVLCDASVGIIVFSAHGKLYDLATTGTMEELIERYKAASAGEANGCGNNRMDPKHETTVLQQEINLLQKGLSIVLGRYIHGNRANEHMNVDELNALERYLEXIWMYNTRSAKMQIMAQEIQALKSKEKGMLKAANEILQEKIVEQSSLLDVGMVVADQQNGRFSTVPLVEEVISSNPLTVLSGYSSCRGSKMGYSF

SEQ ID NO: 16769 - protein, 255 aa, Zea mays
MGRGRVELKRIENKINRQVTFSKRRNGLLKKAYELSVLCDAEVALIIFSSRGKLYEFGSAGITKTLERYQHCCYNAQDSNGALSETQSWYQEMSKLRAKFEALQRTQRHLLGEELGPLSVKELQQLEKQLECALSQARQRKTQLMMEQVEELRRKERHLGEMNRQLKHKLEAEGCSNYRTLQHAAWPAPGSTMVEHDGATYHVHPTTAQSVAMDCEPTLQIGYPPHHQFLPSEAANNIPRSPPGGENNFMLGWVL

SEQ ID NO: 16770 - protein, 255 aa, Zea mays; identical to SEQ ID NO: 16769

SEQ ID NO: 16771 - protein, 255 aa, Zea mays; identical to SEQ ID NO: 16769

SEQ ID NO: 16772 - protein, 255 aa, Zea mays; identical to SEQ ID NO: 16769

SEQ ID NO: 16773 - protein, 255 aa, Zea mays; identical to SEQ ID NO: 16769

SEQ ID NO: 16774 - protein, 225 aa, Zea mays
MGRGKEELKRIENKISRQVTFAKRRNGLLKKAYELSVLCDAEVALIIFSSRGRLFEFSTSSCIYKTLERYRSCSFASEASAPLEAELNNYQEYLKLKTRVEFLQTTQRNLLGEDLGPLSVKELEQLENQIEISLKQIRSSKNQQMLDQLFDLKRKEQQLQDANKDLRMKIEETSEENVLRLSSQDIGCSGSSGHGDEANQEHLQLALDPSLHIGYQAYMDHLNND

SEQ ID NO: 16775 - protein, 225 aa, Zea mays
MGRGKVELKRIENKISRQVTFAKRRNGLLKKAYELSVLCDAEVALIIFSSRGRLFEFSTSSCIYKTLERYRSCSFASEASAPLEAELNNYQEYLKLKTRVEFLQTTQRNLLGEDLGPLSVKELEQLENQIEISLKQIRSSKNQQMLDQLFDLKRKEQQLQDANKDLRMKIEETSEENVLRLSSQDIGCSGSSGHGDEANQEHLQLALDPSLHIGYQAYMDHLNND

SEQ ID NO: 16776 - protein, 240 aa, Zea mays
MGRGKVELKRIENKISRQVTFAKRRNGLLKKAYELSLLCDAEVALIIFSGRGRLFEFSSSSCMYKTLERYRSSNYSTQEVKAPLESEINYQDYLKLRTRVDFLQTTQRNILGEDLGPLSMKELEQLENQIEVSLKHIRSRKNQMLLDQLFDLKSKEQELQDLNKDLRKKLQETSPQNVIHDVSWEEGGHSGSSVLGPFQGLLQYHGNDPSLQTRYHQQAYMDQLNEDMADPDEHGRSGWI

SEQ ID NO: 16777 - protein, 258 aa, Zea mays
IENNTSRQVTFCKRRNGLLKKAYELSVLCDAEVALIVFSSRGRLYEYANNSVKATVERYKKAHTVGSSSGPPLLEHNAQQFYQQESAKLRNQIQMLQNTNRHLVGDSVGNLSLKELKQLESRLEKGISKIRARKSELLAAEISYMAKRETELQNDHMTLRTKIEEGEQQLQQVTVARSVAAAAAATNLELNPFLEMDTKCFFTGGPFATLDMKCFLPGSLQQMLEAQQRQMLATELNLGYQLAPPGSDAANNNPHHQF

SEQ ID NO: 16778 - protein, 245 aa, Zea mays
  unsure (1)..(245): unsure at all Xaa locations
MGRGRVELKRIENKINRQVTFAKRRNGLLKKAYELSVLCDAEVALIIFSNRGKLYEFSSTQSMPKTLEKYQKCSFAGPETALQNRENEQLKSSRNEYLKLKARVDNLQRTQRNLLGEDLESLGIKELEHLEKQLXDSSLKHIRSTRTQHMVDQLTELQKKEQMFCEANKCLRRRLEESNQVIWQHAWEQSERAXXEVQPQQLNGNNFFXHPLDGXAGEPTXLQIGYPSEALTSSCMTTFLPPWLP

SEQ ID NO: 16779 - protein, 240 aa, Zea mays
MGRGKVVLQRIENKISRQVTFAKRRNGLLKKAYELSVLCDAEVALVLFSHAGRLYQFSSSSNLLKTLERYQRYIYASADAAVPSSDQMQNNYQEYVKLKARVEVLQHSQRNLLGEDLALLSPSELDQLENQVDKTLKQIRSRKTQVLLDELCDLKRKEQMLQDANRVLKRKLGEFEAEAASPPQLAWQGEGGMLSHDPPQPEHFFQALESNPCLQPTYHTMDMNQQPVPAPGGCYPAWMS

SEQ ID NO: 16780 - protein, 241 aa, Zea mays
MGRGKVVLQRIENKISRQVTFAKRRNGLLKKAYELSILCDAEVALVLFSHAGRLYQFSSSSNLLKTLERYQRYIYASADAAVPSSDQMQNNYQEYVKLKARVEVLQHSQRNLLGEDLALLSPSELDQLENQVDKTLKQIRSRKTQVLLDELCDLKRKEQMLQDANRVLKRKLGEFEAEAASPPQLAWQGEGGMLSHDPPQPEHFFVALESNAPLQPTYHTMDMNQQPEPAPGGCYPPAWMA

SEQ ID NO: 16781 - protein, 232 aa, Zea mays
MGRGKVVLQRIENKISRQVTFAKRRNGLLKKAYELSILCDAEVALVLFSHAGRLYQFSSSSNLLKTLERYQRYIYASADAAVPSSDQMQNNYQEYVKLKARVEVLQHSQRNLLGEDLALLSPSELDQLENQVDKTLKQIRSRKTQVLLDELCDLKRKEQMLQDANRVLKRKLGEFEAEAASPPQLAWQGEGGMLSHDPPQPEHFFQALAYHTMDMNQQPVPAPGGCYPAWMS

SEQ ID NO: 16782 - protein, 98 aa, Zea mays
  unsure (1)..(98): unsure at all Xaa locations
MGRGKIVIRRIDNSTSRQVTFSKRRNGIFKKAKELAILCDAEVGLVIFSSTGRLYEYSSTSMKSVIDRYGKAKEEQQVVANPNSELKVWQKKKKKGRX

SEQ ID NO: 16783 - protein, 233 aa, Zea mays
  unsure (1)..(233): unsure at all Xaa locations
MGRGKVVLQRIENKISRQVTFAKRRNGLLKKAYELSILCDAEVALVLFSHAGRLYQFSSSSNLLKTLERYQRYIYASADAAVPSSDQMQNNYQEYVKLKARVEVLQHSQRNLLGEELAPLSPSELDQLESQVDKTLKQIRSRKTQVLLDELCDLKRKEQMLQDANRVLKRKLHEFETEAASPPQXWRGXGGGGMLSHDPPQPEHFFVALAYHTMDMNQQPEPAPGGYPPAWMA

SEQ ID NO: 16784 - protein, 277 aa, Zea mays
  unsure (1)..(277): unsure at all Xaa locations
MGRGPVQXLRRIENKINRQVTFSKRRNGLLKKAHEISVLCDAEVALIVFSTKGKLYEYSSHSSMEGILERYQRYSFEERAVLNPSIEDQANWGDEYVRLKSKLDALQKSQRQLLGEQLSSLTIKELQQLXEQQLDSSLKHIRSRKNQLMFDSISALQKKEKALTDQNGVLQKFMEAEKEKNKALMNAHREQQNGASTSSPSLSPPIVPDSMPTLNIGPCQHRGAAESESEPSPAPAQANRGNLPPWMLRTVKXQVRSSQCSFAADLDSNTPVTEMLR

SEQ ID NO: 16785 - protein, 241 aa, Zea mays
MGRGKVVLQRIENKISRQVTFAKRRNGLLKKAYELSILCDAEVALVLFSHAGRLYQFSSSSDLLKTLERYQRHIYASADAAVPSSDEMQNNYQEYVKLKARVEVLQHSQRNLLGEELAPLSPSELDQLESQVDKTLKQIRSRKTQVLLDELCDLKRKEQMLQDANRVLKRKLHEFEAEAASPPQLAWQGGGGMLSHDPPQPEHFFVALESNAPLQPTYHTMDMNQQPEPAPGGCYPPAWMA

SEQ ID NO: 16786 - protein, 234 aa, Zea mays
  unsure (1)..(234): unsure at all Xaa locations
MGRGKVVLQRIENKISRQVTFAKRRNGLLKKAYELSILCDAEVALVLFSHAGRLYQFSSSSDLLKTLERYQRHIYASADAAVPSCDEMQNNYQEYVKLKARVEVLQHSQRNLLGEELAPLSPSELDQLESQVDKTLKQIRSRKTQVLLDELCDLKRKEQMLQDANRVLKRKLHEFEAEAASPPQXWRGXGGGGMLSHDPPQPEHFFVALAYHTMDMNQQPEPAPGGCYPPAWMA

SEQ ID NO: 16787 - protein, 252 aa, Zea mays
  unsure (1)..(252): unsure at all Xaa locations
MDLGIDDRPSMARGKVQLRRIENPVHRQVTFCKRRAGLLKKARELSVLCDAHVGIIVFSAHGKLYDLATSGTMEELIERYRTASSIEAADGCGDNNRMDAKQETMVLQQEINLLHEGLRYIYMNRTNEHMNVEALNALCKDADXWLXNTKALKKQGMSKPLYILTLREGMLKAANEILQEKIVEQSSLLDVGMVVADQQNGRFSTVPLVEEVISSNPLTVLSGYSSCRGSEXGLLLLTVITNSLGAPSVDYY

SEQ ID NO: 16788 - protein, 234 aa, Zea mays; identical to SEQ ID NO: 16786
  unsure (1)..(234): unsure at all Xaa locations

SEQ ID NO: 16789 - protein, 234 aa, Zea mays; identical to SEQ ID NO: 16786
  unsure (1)..(234): unsure at all Xaa locations

SEQ ID NO: 16790 - protein, 127 aa, Zea mays
  unsure (1)..(127): unsure at all Xaa locations
MLNMMTDLSCGPSSKVKEQVAAAPTGSGDRQGQGRGKIEIKRIENTTNRQVTFCKRRNGLLKKAYELSVLCDAEVALVVFSSRGRLYEYANNSVKSTIERYKKANSDSSTLGTVAEVNAQYYQQESX

SEQ ID NO: 16791 - protein, 241 aa, Zea mays
MGRGKVELKRIENKISRQVTFAKRRNGLLKKAYELSLLCDAEVALIIFSGRGRLFEFSSSSCMYKTLERYRSSNYSQEVKTPLDTEIKYQDYLKLRTRVEFLQTTQRNILGEDLGPLSMKELEQLEDQIEISLKHISSRKNQMLLDQLFDLKSKEQELLDLNKDLRKQLQETRPENALRVSWEEGGHSGASGNVLDPYQGLLQHLDNDPSLQFGYHHQAYMDQLNNEDLVDPNEHGRSGWI

SEQ ID NO: 16792 - protein, 103 aa, Zea mays
  unsure (1)..(103): unsure at all Xaa locations
MGRGRVELKRIENKINRQVTFAKRRNGLLKKAYELSVLCDAEVALIIFSNRGKLYEFCSGQSITKTLERYEKNSYGGPDTAVQNKENCAAVIAVXLLLIIRGX

SEQ ID NO: 16793 - protein, 259 aa, Zea mays
MLNMMTDRRGGPSANREEQVAAAHIRQAPRRGAREGIRALRAIRSTSSRQVTFCKRRNGLLKKAYELSVLCDAEVALVVFSSRGRLYEYANNSVKSTIERYKKANSDSSNSGTVAEVNAQYYQQESSKLRQMIHSLQNANTRNIVGDSIHTMGLRDLKQMEGKLEKAIIKIRARKNELLYAEVDYMQKREMDLQTDNMYLRSKIAESNETGQPAMHMTMGAPPTSEYDHMAPFDSRNFLQVSMPQHYSHQLQPTTLQLG

SEQ ID NO: 16794 - protein, 110 aa, Zea mays
  unsure (1)..(110): unsure at all Xaa locations
MGRGRVELKRIENKINRQVTFAKRRNGLLKKAYELSVLCDAEVALIIFSNRGKLYEFSSTQSMPKTLEKYQKKEQMFCEANKCLRRRLEESNQKKKKKKKKKYSALLPLX

SEQ ID NO: 16795 - protein, 124 aa, Zea mays
  unsure (1)..(124): unsure at all Xaa locations
MVRGKTELKRIENATSRQVTFSKRRNGLLKKAFELSVLCDAEVGLVVFSPRGKLYEFASAASLQKTIDRYRTYTRENVNNKTVQQDIQQVKADAVSLASRLEALEKTKRSIFGQRSDHICIPIX

SEQ ID NO: 16796 - protein, 60 aa, Zea mays
MGRGRIEIKRIENNTSRQVTFCKRRNGLLKKAYELSVLCDAEVALIVFSSRGRLYEYANN

SEQ ID NO: 16797 - protein, 214 aa, Zea mays
TTSRQVTFCKRRNGLLKKAYELSVLCDAEVALVVFSSRGRLYEYANNSVKSTIERYKKANSDSSNSGTVAEVNAQYYQQESSKLRQMIHSLQNANTRNIVGDSIHTMGLRDLKQMEGKLEKAIIKIRARKNELLYAEVDYMQKREMDLQTDNMYLRSKIAESNETGQPAMHMTMGAPPTSEYDHMAPFDSRNFLQVSMPQHYSHQLQPTTLQLG

SEQ ID NO: 16798 - protein, 76 aa, Zea mays
MGRGKIEIKRIENSTNRQVTFSKRRGGLLKKANELAVLCDARVGVVIFSSTGKMFEYCSPACRLTDLLEKKKKKAA

SEQ ID NO: 16799 - protein, 127 aa, Zea mays
  unsure (1)..(127): unsure at all Xaa locations
MGRGRTEMKKIQNDVSRRATFGKRRRGLLKKAHELAVLCGVDLGLLVFDDDGAGKLFDYCAPNTSWSELIERYESITKHQFQFQGQGIHHDDHQQQPSADITGLRREGDHLEASVTRQTGENLSSTX

SEQ ID NO: 16800 - protein, 94 aa, Zea mays
MGRGKVQLKRIENKINRQVTFSKRRNGLLKKAHEISVLCDAEVAVIVFSPKGKLYEYASDSRMDKILERYERYSYAEKALISAESESDGNWSEV

SEQ ID NO: 16801 - protein, 169 aa, Zea mays
  unsure (1)..(169): unsure at all Xaa locations
GRCLRGKVQLKRRENYXINRQVTFSKRRSGLLKKANEISVLCDAEVALIIFSTKGKLYEYATDSCMDKILERYERYSYAEKVLISAESDTQGNWCHEYRKLKAKAETIQKCQKHLMGEDLEFLNXKELQQLELQLENSLKHFRSRKSHQWLRSINELXREEKSLXEENX

SEQ ID NO: 16802 - protein, 112 aa, Zea mays
  unsure (1)..(112): unsure at all Xaa locations
MAPRGRVELRRIEDKASRQVRFSKRRAGLFKKAFELALLCDAEVALLVFSPGGKLYEYSSSXNRDVAXXSDLQSRLKEIATWSKQNNAEESDANELEKLEELLTNALRNTKX

SEQ ID NO: 16803 - protein, 207 aa, Zea mays
MAARIGADGKAMARRGRVELRRIEDRVSRQVRFSKRRSGLFKKAFELSLLCDAEVALIVFSPAGKLYEYASTSIEDTYNRYQQFSGEGRNINDGNRNDNKDEASSVQLMLSKIATWSPQSNADESDVDELEKLENLLRNALKDTRSTKIQMLAKQNSGASTSGQKSPGKERREHGSVQRPPTWDCSCFPLPMDACTDYDLVGCETLC

SEQ ID NO: 16804 - protein, 179 aa, Zea mays
  unsure (1)..(179): unsure at all Xaa locations
NESHEDHRTSASSPTRSIAPSSPILGNWNSLQSLRWFCSLAFNSFDXLLFLQTDLSCGPSSKAKGGQPAATSSGGDRQGRGKIEIKRIENTTNRQVTFCKRRNGLLKKAYELSVLCDAEVALVVFSSRGRLYEYANVYLVPRSYTLRASAVCVVQIRSKFAPIFLEAKPRGWRVNWGAS

SEQ ID NO: 16805 - protein, 92 aa, Zea mays
MGRGRVELKRIENKINRQVTFAKRRNGLLKKAYELSVLCDAEVALIIFSSRGKQYEFCSSSSMLRTLDRYQKCNYGAPEPNVPSREALAELN

SEQ ID NO: 16806 - protein, 86 aa, Zea mays
MGRGKVQLKRIENKINRQVTFSKRRSGLLKKAHEISVLCDAEVALIIFSTKGKLYEYSTDSWYALGPLRCLRFDTARCVLPHFQAV

SEQ ID NO: 16807 - protein, 60 aa, Zea mays
MGRGKVQLKRIENKINRQVTFSKRRSGLLKKAHEISVLCDAEVALIIFSTKGKLYEYSTD

SEQ ID NO: 16808 - protein, 86 aa, Zea mays
  unsure (1)..(86): unsure at all Xaa locations
MGRGRVELKRIENKINRQVTFAKRRNGLLKKAYELSVLCDAEVALIVFSNRGKLYEFCSGPSGRRPQILSDLTSGEELGGGGSLDX

SEQ ID NO: 16809 - protein, 115 aa, Zea mays
  unsure (1)..(115): unsure at all Xaa locations
MGRGKIVIRRIDNSTSRQVTFSKRRSGLLKKAKELSILCDAEVGLIIFSSTGRLYDFSNTKYDSSTINLLSLVARCMSRLNKYLRGLHFFAKKFGSVPDPLLFLRLKFKKKKKKX

SEQ ID NO: 16810 - protein, 74 aa, Zea mays
MAPRGRVELRRIEDKASRQVRFSKRRAGLFKKAFELALLCDAEVALLVFSPGGKLYEYSSSTVLAAKKKKKKAA

SEQ ID NO: 16811 - protein, 86 aa, Zea mays
  unsure (1)..(86): unsure at all Xaa locations
MGRGKVEMRRVENRVSRQVTFSKRRKGLLKKADELAVLCGVDVGVVVFSERGKLFEYSSPTSALRSLSLPLKCWLGSQHTPISSSX

SEQ ID NO: 16812 - protein, 251 aa, Zea mays
LAARVGSHGEGSGGAQAGGGEINRQVTFAKRRNGLLKKAYELSVLCDAEVALIIFSNRGKLYEFCSGQSITKTLERYEKNSYGGPDTAVQNKENELVQSSRNEYLKLKARVDNLQRTQRNLLGEDLGSLGVKELDQLEKQIDSSLSHIRSTRTQHMLDQLTDLQRREQMMCEANKCLRRKLEETSNQVHGQVWEHGANLLLGYERHSSPQQAPSHVGNGLFFHPLEAAAEPTLQIGFAPEHMNNFMPAWLP

SEQ ID NO: 16813 - protein, 90 aa, Zea mays
  unsure (1)..(90): unsure at all Xaa locations
MVRGKTELKRIENATSRQVTFSKRRNGLLKKAFELSVLCDAEVGLVVFSPRGKLYEFASAARTKSLKKPMTASKISIPSILXRQKSLNVX

SEQ ID NO: 16814 - protein, 231 aa, Zea mays
KINRQVTFAKRRNGLLKKAYELSVLCDAEVALIIFSNRGKLYEFCSGQSITKTLERYEKNSYGGPDTAVQNKENELVQSSRNEYLKLKARVDNLQRTQRNLLGEDLGSLGVKELDQLEKQIDSSLSHIRSTRTQHMLDQLTDLQRREQMMCEANKCLRRKLEETSNQVHGQVWEHGANLLLGYERHSSPQQAPSHVGNGLFFHPLEAAAEPTLQIGFAPEHMNNFMPAWLP

SEQ ID NO: 16815 - protein, 218 aa, Zea mays
  unsure (1)..(218): unsure at all Xaa locations
MGRVKLQIKRIENNTNRQVTFSKRRNGLIKKAYELSVLCDIDIALIMFSPSNRLSHFSGRRRIEDVITRYINLPENERGGGXXGGVVRNREYLMNMLTQLKREGDIAEQLTPPSPANSNIEDLQHEIRKYRHQVEELEKQIRMFEPDPAVLVLTNEAETCEKFLMDTLTRVEERKKYLSCNQLGPFEPSPTDIHVGKPTASQQLEGWIIPSSIKKKKK

SEQ ID NO: 16816 - protein, 78 aa, Zea mays
  unsure (1)..(78): unsure at all Xaa locations
MGRGPMPLRRIENKIHRQVTFFNRRDGLLKKAHEISVLCDAXDALIVLSTKGKLYQYSSHSSMEGISERYQRYLFEEX

SEQ ID NO: 16817 - protein, 168 aa, Zea mays
SASSPTRSIAPSSPIFRNWNFLQSLRWFCSLAFNSFLLFLQTDLSCGPSSKAKGGQPAATSSGGDRQGRGKIEIKHIENTTNRQVTFCKRRNSLLKKAYELSVLCDAEVALVVFSSRGRLYEYANVYLVPRSYTLRASAVCVVQIRSKFAPIFLEAKPRGWRVNWGAS

SEQ ID NO: 16818 - protein, 173 aa, Zea mays
RSYRTSASSPTRSIAPSSPIFRNWNFLQSLRWFCSLAFNSFLLFLQTDLSCGPSSKAKGGQPAATSSGGDRQGRGKIEIKHIENTTNRQVTFCKRRNSLLKKAYELSVLCDAEVALVVFSSRGRLYEYANVYLVPRSYTLRASAVCVVQIRSKFAPIFLEAKPRGWRVNWGAS

SEQ ID NO: 16819 - protein, 160 aa, Zea mays
RSYRTSASSPTRSIAPSSPIFRNWNFLQSLRWFCSLAFNSFLLFLQTDLSCGPSSKAKGGQPAATSSGGDRQGRGKIEIKHIENTTNRQVTFCKRRNSLLKKAYELSVLCDAEVALVVFSSRGRLYEFDMPRAYYHSRFEEESQDSASVVLLLIQLPYWQ

SEQ ID NO: 16820 - protein, 167 aa, Zea mays
ASSPTRSIAPSSPIFRNWNFLQSLRWFCSLAFNSFLLFLQTDLSCGPSSKAKGGQPAATSSGGDRQGRGKIEIKHIENTTNRQVTFCKRRNSLLKKAYELSVLCDAEVALVVFSSRGRLYEYANVYLVPRSYTLRASAVCVVQIRSKFAPIFLEAKPRGWRVNWGAS

SEQ ID NO: 16821 - protein, 159 aa, Zea mays
HERTSASSPTRSIAPSSPIFRNWNFLQSLRWFCSLAFNSFLLFLQTDLSCGPSSKAKGGQPAATSSGGDRQGRGKIEIKHIENTTNRQVTFCKRRNSLLKKAYELSVLCDAEVALVVFSSRGRLYEFDMPRAYYHSRFEEESQDSASVVLLLIQLPYWQ

SEQ ID NO: 16822 - protein, 60 aa, Zea mays
KGRGKIEIKHIENTTNRQVTFCKRRNSLLKKAYELSVLCDAEVALVVFSSRGRLYEYANV

SEQ ID NO: 16823 - protein, 168 aa, Zea mays; identical to SEQ ID NO: 16817

SEQ ID NO: 16824 - protein, 166 aa, Zea mays
MAPRGRVELRRIEDKASRQVRFSKRRAGLFKKAFELALLCDAEVALLVFSPGGKLYEYSSSSIEDTYDRYHQFAGAGRKVNGHNNDNRDVAASDLQSRLKEIATWSKQNNAEESDANELEKLEELLTNALRNTKAKKMLAKENNGGAGASTSSQMLLYSAERATDK

SEQ ID NO: 16825 - protein, 60 aa, Zea mays
QGRGKIEIKRIENTTNRQVTFSKRRNGPLKKAYELSVLCDAEVALVVFSSRGCLYEYANN

SEQ ID NO: 16826 - protein, 105 aa, Zea mays
  unsure (1)..(105): unsure at all Xaa locations
MARERLQTKRIESAADRQVTFYKRRRGLFKKAEELSALCDADVALIVFSSTGKLSQFAHCRINEISAXDRTHMPKMQPWRQPSLDLNLEHSXYAXNLNEQLVEAS

SEQ ID NO: 16827 - protein, 107 aa, Zea mays
  unsure (1)..(107): unsure at all Xaa locations
MGRGLVELKRVENKINRQVTFAKRLNGLLKKAYDLSVLCDAHIXVLIFFSNRGKLYKFCIVPSITRTLERYXKNNYAGPHTAVQNTXNDLTHNTPNEYLKLKAKVDX

SEQ ID NO: 16828 - protein, 244 aa, Zea mays
RNGLLKKAYELSILCDAEIALIVFSTRGRLYEYSSNSVRSTIERYKKASASTSGTAPVTDVNSLQYFQQEAAKLRQQIQTLQNSNRHLMGESTGNMTAKELKGLESRLERGIGRIRSKKHELLLAEIEYMQKREADLHNENMFLRAKVAEAERALEQEAAEDQTMMVPAAVRGATTELKALPASFDASGYYQYQQHQHVVAAASAASSSQYAEQPQGQQEYHHQTALHLGYHVKIDSAADKGFL

SEQ ID NO: 16829 - protein, 66 aa, Zea mays
  unsure (1)..(66): unsure at all Xaa locations
MGRGPVQLRRIENKINRQVTFSKRRNGLLKKAHEISVLCDAEAALIVFSTKGNLYEYSSHASKAGX

SEQ ID NO: 16830 - protein, 124 aa, Zea mays
MDAEAARRKQVAPPQEKRKRGRLELRRIQDRTSRQVRFSKRRSGLFKKAHELSVLCDAEVAMVVFSPAGRLYHYASLGTSIEKTFCRYWDLANTDIDLNIEARDSRDNYNTNIQLQVKSIFFFR

SEQ ID NO: 16831 - protein, 201 aa, Thalictrum thalictroides
AGIVKKAQELTVLCDAEVSLLMVSSTGRIHEYVSPCSTHKNLYDRYQQASGTNLWQPHYERMQETMKKLKEINNKLRKEIRQRNGEDLDELNFQQLCGLEQNMEKSVEGVRNRKFHVITTSTDTYKKKIKNHEETHNSLRREFEEGDADFRFPSVDFEGDYQSTIGFANGNPQIFAVRWQPKLQSNIQDKEAYGSYGLSLV

SEQ ID NO: 16832 - protein, 183 aa, Thalictrum thalictroides
AGIVKKAKELTVPCDTQVSLIMISSSGKIHEYISPSYTHKNLYDKYQQVSGNNIWKPHYERMQDNLQKLKEINNKLRKEIRQRNGEDLDELNFQQLCGLEQNMEKSVDCVRNRKFHVISSQTDIYKKKVKNHQVTYNGLLRGFEERDADCQYASPDFEGEYQSTIEFATENPHIFAFGLQPQL

SEQ ID NO: 16833 - protein, 205 aa, Trollius laxus
AGILKKAKELTVLCDAEVSLLMFSSTGKLHEFVSPSTTTKKVYDRYQQTSGISLWQSHYERMQDNLNKLKEINRKLRREIRQRNGEDLDGLTFQQLCTLEQNMDKSAECVRNRKFHVIGTQTDTYKKKLMLQVKNHEETQNDLLREMQRREAEYHYAFGDQEGDYPSAVNGNAAHIFAFRLQPSQPNLHLQDDASGYGSYGLSLA

SEQ ID NO: 16834 - protein, 196 aa, Trautvetteria carolinensis
AGIMKKAKELTVLCDAEVSLIMFSSSGKCVDFISPTISQKEFYDKYQKITRDDLWKSQYDKMQEELKTLVEINRKLRREIGQRVGEDLDDLSIQELRSLEQDLRNTEKVVRQRKFGLLSSQGETQKKKVRNLAEINSNLWQEYQERSEEEYALANGMSALELGNGVAPHIYSFRLHPSQPNLHEDEEYEIHGLRLA

SEQ ID NO: 16835 - protein, 57 aa, Perilla frutescens
MGRGRVQLKRIENKINRQVTFSKRRAGLLKKAHEISVLCDAEVALIVFSHKGKLFEY

SEQ ID NO: 16836 - protein, 239 aa, Ceratopteris richardii
MVRRKIKIKRIENATTRQVTFSKRRGGLLKKAHDLSVLCDADVGVIIFSSKGKLFQFANPSMKSVLERYYKAQGDAESADNVSSAENIEIDRITLFTEKLKALQRNVIGDDLERLSLRDLIHLEQQIHESLGRIRAKKEEMILDQLEDFKKKVTDARKTTNANSSLLDKLLDFCSSDMTSSHNFVDCEPLLISEAPQADASLAGRAATSEQSTDVRECSPPAKRLRITEDLNHSPVCME

SEQ ID NO: 16837 - protein, 220 aa, Ceratopteris richardii
MGRGKIEMKRIENRTTRQVTFCKRRAGLVKKARELSVLCDADVALIVFSSSGRLFEYAGSRSMREIIQAYVDAHEDSSSLLQLRSEEACVSQDLRAELTELRKEVESLRQEKRRKDGDIHDLKLLSADELDSLEGEVETSLCSIRKRQKQLYREKMNETFRKEEELRKENEKLRKQVEELQCARWEICCAQGFEASATSMCTSHGMTSERSDSFLDLRLN

SEQ ID NO: 16838 - protein, 383 aa, Ceratopteris richardii
MNTFLSSGPHTYLNNLRCGEWGSGTAPGPIADPKSAAYYRDHTKNDKVNDLSNRLHSYGPPEALQYPNQHAIAADTEKMEVENSGKMAASVERSAQDAHASGALQEDVVAAYVDNMPACVAGVTLVPQGGRGTIPIRRIDNPTSRQVTFSKRRNGLLKKAYELSVLCDAEVGVMVFSATGRLSEFASTSMQKVLERYQEHSNGAPSRKVLLQDVEFWKREVLFLRDQLFHLKNYENHILGENQIPLDLAEIQRVETRLENALNKIRIQKVQVLHGEMQQIYKQEARLFEENNILRKKLAEATTINGMRGSMSTMTMSHEDLPGSTNQSYGTKALQGGCPSDTSTTTSNDPNHHSSHPPSHPSASQPLTLHLTSPCSPKLDLRL

SEQ ID NO: 16839 - protein, 238 aa, Ceratopteris richardii
MVRRKIKIKRIENATTRQVTFSKRRGGLLKKAHDLSVLCDAEVAVIIFSSKGKLFQFANPSMETVLGRYVKASRDPEAGDNGSSTDNVEADRLTVFTEKLKMLQSNVIGDDLERLSLRDLIHLEQQVHESLGHIRAKKDELILEQIDEFKQKMADTRRTTNANTSMLDRLVDFCSSGITGSQNIVASEPGYVVGVPRTDTLRAGWIATSDQSNDGPEYVPCAKRFRITEGLNESPASE

SEQ ID NO: 16840 - protein, 238 aa, Ceratopteris richardii
MVRRKIKIKRIENATTRQVTFSKRRGGLLKKAHDLSVLCDAEVAVIIFSSKGKLFQFANPSMETVLGRYVKASRDPEAGDNGSSTDNVEADRLTVFTEKLKMLQSNVIGDDLERLSLRDLIHLEQQVHESLGHIRAKKDELILEQIDEFKQKMADTRRTTNANTSMLDRLVDFCSSGITGSQNIVESEPGYVVGVPRTDTLRAGWIATSDQSNDGPEYVPCAKRFRITEDLNESPASE

SEQ ID NO: 16841 - protein, 240 aa, Ceratopteris richardii
MPRRKVKIKRIENGATRQITFSKRRAGLFKKAHDLSVLCDAKVAVIVFSEKGRLFEFASPSMESILKRYMDSQKYLGISEEENSSARLLNGDKHWVTTLRNRLKMLRSDLVELDLERLSGGNLIRLEQEMNYNLGRIRAKKDQLILREIESYSNKELMHKAHKRKEQVMNEKAARKVDCQGPCVSNSTALENADEEFLQMDRYASYDGDVIDECPSSVKKSMVLQDLNRLPSEYAQTLVE

SEQ ID NO: 16842 - protein, 215 aa, Ceratopteris richardii
MVRTKIKIKRIENATTRQVTFSKRRGGLFKKAHDLSVLCDAEVAVIIFSSKGKLFHFGNPSMETVLKRYMKANGDPKAGDNGSSTDNVEADHLTVFTEKLKLLQSVVIGDDLERLSVRDIIYLEQQFHENLGRIRAKKDELMLERNNDLMQKMADTRRRTNVNTSMLNRLADFCSSDIIGSRTFVENEPADHVVGVPRTDTSRAGRDCSKRPKQQ

SEQ ID NO: 16843 - protein, 142 aa, Brassica rapa subsp. pekinensis
RQVTFCNRRNGLLKKAYELSVLCDAEVTLIVFSSRGRLYEYSNNSVKGTIERYKKAISDNTNTGTVAEINGQYYQQESAKLRQQIISIQNSNRQLMGETIGSMSPKELRNLEGRLDRSINRIRSKKNELLFAEIDYMQKREL

SEQ ID NO: 16844 - protein, 208 aa, Arabidopsis lyrata
MGRGKIEIKRIENANNRVVTFSKRRNGLVKKAKEITVLCDAKVALIIFASNGKMVDYCCPSMDLGAMLDQYQKLSGKKLWDAKHENLSNEIDRIKKENDSLQLELRHLKGEDIQSLNLKNLMAVEHAIEHGLDKVRDHQMELLNSKRRNDKMIMEEHRQLTFQLQQQDMAIASNARGMMMRDHDGQFGYRVQPIQPNLQEKIMSLVID

SEQ ID NO: 16845 - protein, 231 aa, Arabidopsis lyrata
  unsure (1)..(231): unsure at all Xaa locations
MARGKIQIKRIENQTNRQVTYSMRRNGLFKKAHELTVLCDARVSIIMFSSSNKLHEYISPNTTTKEIVDLYQTVSDVDVWATQYERMQETKRKLLETNRNLRTQIKQRLGECLDELDIQELRRLEDEMENTFKLVRERKIKSLGNQIETTKKKNKSQQDIQKXLIHELELRAEDPHYGLVDNGGDYDSVLGYQIEGSRAYAFRFHQNHHHQYPNHALHAPSASDIITFHLL

SEQ ID NO: 16846 - protein, 195 aa, Cimicifuga racemosa
TGIVKKARELAVLCDAEVSLIMFSSTGKLSEYISPSTTTKKIYDTYQQVTGVDLWNSHYEKMQETLKKQKESNMKLRKEIRQRIGEGLDDLSFEELRGLEQDLNGSVKVVRDRKYHTIATQTETYRKKLRNLQETHTHLVREFEARGEDPYYEGGYESLLGMSNGAAHLLPYRLQPSQPNLQDGENYGSYNLRLG

SEQ ID NO: 16847 - protein, 249 aa, Rosa rugosa
MAYENKPNTVLDSDAQRRLGRGKIEIKRIENTTNRQVTFCKRRNGLLKKAYELSVLCDAEVALIVFSNRGRLYEYSNNSSVRETIERYKKACADSSNNGSVSEATTQYYQQEAAKLRAQITTLQNSNRGYMAEGLSNMSIKELKGVETKLEKAISRIRSKKNELLFAEIEYMQKRELDLHNNNQLLRAKIAENERHQQSINAIAGGHGSYDIMQPTQPFHEARNYFQVNALQPNIHQYSRHDQISLQLV

SEQ ID NO: 16848 - protein, 248 aa, Rosa rugosa
MAYENKPNTVLDSDAQRRLGRGKIEIKRIENTTNRQVTFCKRRNGLLKKAYELSVLCDAEVALIVFSNRGRLYEYSNNSVRETIERYKKACADSSNNGSVSEATTQYYQQEAAKLRAQITTLQNSNRGYMAEGLSNMSIKELKGVETKLEKAISRIRSKKNELLFAEIEYMQKRELDLHNNNQLLRAKIAENERHQQSINAIAGGHGSYDIMQPTQPFHEARNYFQVNALQPNIHQYSRHDQISLQLV

SEQ ID NO: 16849 - protein, 250 aa, Rosa rugosa
MAYENKPNTVLDSDAQRRLGRGKIEIKRIENTTNRQVTFCKRRNGLLKKAYELSVLCDAEVALIVFSNRGRLYEYSNNSVRETIERYKKACADSSNNGSVSEATTQYYQQEAAKLRAQITTLQNSNRGYMAEGLSNMSIKELKGVETKLEKAISRIRSKKNELLFAEIEYMQKRELDLHNNNQLLRAKGQIAENERHQQSINAIAGGHGSYDIMQPTQPFHEARNYFQVNALQPNIHQYSRHDQISLQLV

SEQ ID NO: 16850 - protein, 261 aa, Rosa rugosa
MGRGKIEIKLIENQTNRQVTYSKRRNGIFKKAQELTVLCDAQVSLIMQSSTDKIHEYISPTTTTKKMFDLYQKNLQIDLWSSHYEAMKENLWKLKEVNNKLRRDIRQRLGHDLNGLSYAELQDLEETMSQSVQIIRDRKYHVLKTQAETTRKKVKNLEERNSNLMHGYGAPGNEDPQYGYVDNEGDYESAVALANGASNLYFFNRVHNNHNLDHGHGGGSLVSSITHLQNPNNHGNHNLENGHGGGSLISSITHLHDLRLA

SEQ ID NO: 16851 - protein, 203 aa, Rosa rugosa
MGRGKIEIKRIENSSNRQVTYSKRKNGIIKKAKEITVLCDAKVSLIIIASSGKMVEYCSGPQETRMKILDKYHSQSGKRLWDAKHENLCNEVDRVKKDNDGMQIELRHLKGEDITSLNHVDLMALEEAIENGLASIRDRMSKYMDAVRENNRALEDENKRLAYQLHKMMKSEENLRDMNYNNNTQIPFALRVQPNQPNLHDRM

SEQ ID NO: 16852 - protein, 228 aa, Papaver nudicaule
MGRGKIEIKRIENATNRQVTYSKRRSGILKKAKELTVLCDAEVSLIMFSSTGKMTEYLSPSLNGNTKRVYDKYQQLSGISLWNSHYESLQNALNKQKEINRRLRREIRQRMGEDLDELTIEELRSLEQNLEASVKVVRDRKYHVIITQTETTRKKLRNHTEQNHGLLREFEPILDEDPHYVIAHQEEDYESAIELAHGGPNIFAFRLQPSQPNLHNGGGYNCHDLRLA

SEQ ID NO: 16853 - protein, 221 aa, Papaver nudicaule
SGIFKKAKELTILCDAQVCLIMFSNTGKVCEYVSPSTTMKEFFDRFRRITNIDLWASQYETLQEELKTQKEINNKLKKEIRQRTGQDDLSELSLDEMRILEKNLIDSADIVRNRKNHVLNSHTETSKKRNKAQEETYKNLVRALHSQADREEQEFHFYAIPADTEGDHHRDYLSSSSSMRRLSISGGGDCENSQITFQLQPSQPNLHHAAGGGYFYSQHYA

SEQ ID NO: 16854 - protein, 125 aa, Dubautia laxa
TNRQVTYSKRRNGIFKKAHELTVICDAKVSLIMFSNNGKFHVYISPSTTTKKIYDMYQTTLGFDLWTSHYERMTETMKKLKESNNKLRREIRQRVLGEDLDGLDMNDLTILEQQMQDSLTVVRER

SEQ ID NO: 16855 - protein, 125 aa, Dubautia laxa
TNRQVTYSKRRNGIFKKAHELTVPCDAKVSLIMFSNTGKFHEYISPSTTTKKIYDMYQTTLGFDLWSSHYERMTETMKKLKDSNNKLRREIRQRVLGGDLDGLDMNDLTILEQQMQDSLTVVRER

SEQ ID NO: 16856 - protein, 242 aa, Daucus carota subsp. sativus
MGRGKVQLKRIENKINRQVTFSKRRGGLLKKAHEISVLCDAEVALIVFSNKGKLFEYSTDSSMEEILERYERYSYAERQVIANDPESTGNWTLEYTKLKARIDLLQRDHRHYMGEDLDSLTLKEIQNLEQQLDTALKHIRSRKNQLIFESISDLQKKEKAIQEENGKLTKKIKEREKTMVQQAQWEKQNPSPNLSTFLMPQENPFLNIGGTFQGESSQGMTRNDLDLTLEPNHYPCNLRCFA

SEQ ID NO: 16857 - protein, 216 aa, Daucus carota subsp. sativus
MGRGKIEIKRIENSNNRQVTYSKRRNGLIKKAKEITVLCEAAVSVVIFSSPSKLYEYCSPSTSITEMLDRYHQHSGQRLWDPEHEALSNEIKRIKEENEKMQIDLRHLNAEDISSLNIKELMTIENDLENGLMNIGEKRRESYKRMQKDGQRLEEENMQLRYVYQQQMEAMAGKVRDIENEFNHLKVNDQSYEAQMPFAFRLQPNQPNLHNQMLLD

SEQ ID NO: 16858 - protein, 223 aa, Daucus carota subsp. sativus
MARGKIQIKKIENATNRQVTYSKRRNGLFKKAHELSVLCDAKVSIIMVSSTNKLHEFITPNLSQKQLYDQYQKAKPCDLWSNHYQAMQEQLRKLREVNRNLRNEISHRKGESLNGVSHEELYILEQKMQEAVDITRAQKMKTITNQIEKSKKKVRNGEQVQRTLLQDLELFKEEDPHYGLVDNGGDYETVFGCSNAYPGLLALRLQSNHYNFHGGAGSDLTFA

SEQ ID NO: 16859 - protein, 255 aa, Daucus carota subsp. sativus
MSFVDDQSGDLSLHERKSGRGKIEIKRIENTTNRQVTFCKRRNGLLKKAYELSVLCDAEVALIVFSNRGRLYEYANNSVRGTIERYKKANSDTPNTATVSEANTQYYQKEAARLRQQISNLQNSNRHLMGEALGAVPAKELKGLETKLQNGLSRVRSKKNELLFAEIEFMRKREIDLHNNNQYLRAKISENERAQQQMSLMPGASGSSEQYRDVGQPHESFDARNYLQVNGLQPNNANYSSHQDHQTQHVPLQLV

SEQ ID NO: 16860 - protein, 246 aa, Daucus carota subsp. sativus
MGRGKVELKRIENKINRQVTFAKRRNGLLKKAYELSVLCDAEVALIIFSNRGKLYEFCSTSSMNKTLGRYHRCSYGALETGQTDRDTQSSYQEYIKLKAKVEALQQSQRHLLGEELGQLGTKELEELERQLDSTLRQVRSTKTQYMLDQLSDLQQKEQELVEINKALRNKLEENDVRIQSQWEAAERNNVAYRSHPAEHPPDHGVFESLECNNTMHMGYNSAMNDHQMASATPTQNASGVIPGWML

SEQ ID NO: 16861 - protein, 214 aa, Magnolia praecocissima
MGRGKIEIKRIENSTNRQVTYSKRRGGIMKKAKELTVLCDAQVSLIMFSSTGKFSEYCSPSTTTKNIFDRYQQASGISLWNSHYERMQSHLIKLKEENNNLRREIRQRIGEDLEDLEIEELRGLEQNLESSIKVVRDRKYHVITTQTETYKKKLRSLRDEHAKLIRQLEGQAENGAYGLVDNGGPDYESALVLANGGVHSLHDTGFGIHDLRLA

SEQ ID NO: 16862 - protein, 240 aa, Magnolia praecocissima
MGRGRVQLKRIENKINRQVTFSKRRMGLLKKAHEISVLCDAEVAVIVFSTKGKLYEYSTDSRMSRILERYERYSYAERELVLSGPESEGSWCLEYGKLKAKVESLQRNLRHFTGEDLDTLSLKELQQLEHQLDAALKHIRSRRPIMLIHCGASKKEKSLREQNNMLEKEIQEKEKAMAQQAQWEQQNQSQSSHPSWLASPLPTLNIGTYHQGNEVEEEGARPPARTNSLMPPWMLRHVNE

SEQ ID NO: 16863 - protein, 204 aa, Magnolia praecocissima
  unsure (1)..(204): unsure at all Xaa locations
MARGKIQMKRIENSVHRQVTFCKRRAGLLKKARXXSVLCDVDIGLMIFSTHGKLYELATKGTMEGLIERYLGTSRGAQIEGGPAXXPPESDQEVFMLKQEIELLQKGLRNSIGGGMGNMTMDELHALERHLELWIYHIRSTKMRIMIQEIQSLKDNEGILKSANEFLQGKIEEQNVIFDMPPMIGGIPYPLTIPNEIFLEELNY

SEQ ID NO: 16864 - protein, 231 aa, Magnolia praecocissima
ENKINRQVTFSKRRNGLLKKAYELSVLCDAEVALIVFSSRGKLYEFGSAGINKTLERYQRCCYTFHDANITDRDTQGWYQEVSKLNAKCDSLQRSQRHLLGEDLGPLSVKELQKLERQLESALTQTRQRKTQIMLEHMEALREKERQLGDINKELKNKLEAKGQGAFRAMQASWESGPLVGNNGFPMHPSQSAAIECEPTLQIGYHSFAAPEANIPRTVVAESNFMHGWIL

SEQ ID NO: 16865 - protein, 208 aa, Magnolia praecocissima
NRQVTFCKRRNGLLKKAYELSVLCDAEVALIVFSSRGRLYEYANNSVRNTIDRYKKACADSSSLGCVSEANSQYYQQESSKLRQQIALLQNANRHLMGEALSSMTVKELKQLENRLEKGISRIRSKKNELLFAEIEYMQKREVDLQNDNMYLRAKITENERAQQQMGMLPAPEYDVMPGFDSRNFLQVNLMDSSHHYSHQEQTALQLG

SEQ ID NO: 16866 - protein, 212 aa, Magnolia praecocissima
  unsure (1)..(212): unsure at all Xaa locations
ENKINRQVTFAKRRNGLLKXAHELSVLCDAEVALIIFSTRGKLYEFCSSPSMLQTLERYQKCSYSTLEVSAPTNETQSSYQEYLKLKARVEILQRTQRNLLGEDLGPLSTKELEQLENQLEMSLKQIRSTKTQFMLDQLLDLKEGQCWRKQQGLKRKLEEMVEKSSSAVVGHRCTKHVFXKIANLLILRDSSSLWIANQHXRWXTIPCMKIR

SEQ ID NO: 16867 - protein, 231 aa, Magnolia praecocissima
ENKINRQVTFAKRRNGLLKKAYELSVLCDAEVALIIFSNRGKLYEFCSSSSMLKTLERYQKCNYGAPELPVSTRETQSYHQEYLKLKARVEALQRSQRNLLGEDLGPLSGKELETLERQLDISLRQIRSTRTQCMLDQLGDLQRREHMLSEANKTLTRRLEEGAQANQNQVWEPNAHAVDSYNRQQPQQQGDGFFHPLECEPTLHIGYQPDQITIAAPGPSVNNYMPGWLV

SEQ ID NO: 16868 - protein, 228 aa, Hyacinthus orientalis
MGRGKIEIKRIENTTSRQVTFCKRRNGLLKKAYELSVLCDAEVALIVFSTRGRLYEYSNSNSVKTTIERYKKACTDTTNTGTVSEANSQYYQQEATKLRQQITNLQNTNRTLMGESLSTMSLRELKQLEGRLERGINKIRTKKNELLSAEIEYMQKREAEMHNDNMYLRNKIAENERAQQQMNMLPSTATEYEGIPQFDSRNFLQVSLMEPNNHHYSRQQQQTALQLG

SEQ ID NO: 16869 - protein, 202 aa, Hyacinthus orientalis
MGRGKIEIKRIENSTNRQVTFSKRRNGIIKKAKEISVLCESEIAIVVFSSLSKMSEFCSPNTTFPKMLEKYQQHSGKKLWDAKHENLSAEIDRIKRENDNMQIELRHLKGEDLSSLNPRELIPIEEALQNGVTGARAKQMEFLKMMKLNGKLLEDENKKLAYLLHHQELAMDGSRHQRGTEYASEIPMALRVQPVQPNLQEA

SEQ ID NO: 16870 - protein, 202 aa, Hyacinthus orientalis
MGRGKIEIKRIENSTNRQVTFSKRLNGIIKKAKEISVLCESEIAIVIFSSLNKISDFCSPNTSLPKMLEKYQQHSGKKLWDAKHENLSAEIDRIKRENDNMQIELRRLKGDDLTSLNPRELIPIEEALQNGVTGACAKQMEFLKMMKLNGKLLEDENKKLAYFLHHQELAMDGNRHQRGTEYASEIPMALRVQPVQPNLQEA

SEQ ID NO: 16871 - protein, 210 aa, Lilium regale
MGRGKIEIKRIENSTNRQVTFSKRRNGIIKKAREISVLCEAQVSVVIFSSSGKMSEYCSPSTSLPKILERYQVNCGKKIWDPKHEHLSAEIDRIKKENDNMQIQLRHLKGEDLNSLQPKELIPIEEALENGIRGVREKQNDFLRMLKKNERILEEDNKRLTYILHHQQLAMDENMRNLEFAYHHKDGDFSSQMPMAFRVQPIQPNLHEDK

SEQ ID NO: 16872 - protein, 228 aa, Lilium regale
MGRGKIEIKKIENSTNRQVTYSKRRTGIIKKATELTVLCDAEVSLLMFSSTGKLSEFCSPSTDTKKIFDRYQQLSGINLWSAQYEKMQNTLNHLSEINRNLRKEISQRMGEELDGLDIKDLRGLEQNLDEALKLVRHRKYHVINTQTETYKKKVKNSEEAHKNLLRDLVNREMKDENPVYGYVDEDPSNYDGGLALANGASHLYEFRVQPSQPNLHGMGYGSHDLRLA

SEQ ID NO: 16873 - protein, 676 aa, Saccharomyces cerevisiae
MGRRKIEIQRISDDRNRAVTFIKRKAGLFKKAHELSVLCQVDIAVIILGSNNTFYEFSSVDTNDLIYHYQNDKNLLHEVKDPSDYGDFHKSASVNINQDLLRSSMSNKPSKSNVKGMNQSENDDDENNDEDDDDHGNFERNSNMHSNKKASDKNIPSAHMKLLSPTALISKMDGSEQNKRHPENALPPLQHLKRLKPDPLQISRTPQQQQQQNISRPYHSSMYNLNQPSSSSSSPSTMDFPKLPSFQNSSFNGRPPPISISPNKFSKPFTNASSRTPKQEHKINNSGSNNNDNSNYTQSPSNSLEDSIQQTVKARRKLSARPVLRVRIPNNNFSSNSAIPSEPSSASSTSANGNSMGSSQIMKENKTSRSSKISPLSASASGPLTLQKGNNGRMVIKLPNANAPNGSNNGNGSNNNNHPYPFGSGSSPLFSATQPYIATPLQPSNIPGGPFQQNTSFLAQRQTQQYQQMSFKKQSQTVPLTTTLTGRPPSTFSGPETSNGPPTGSLPSKFVHDLMSNSPNVSSISMFPDWSMGPNSAKPGNTNNPGTFPPVQTAVNNGNSSNISSTNNTNNNNNNNNNNSSNNNSNNGNDNNSNNSNNSYYSNNEDAPVNGAAISEHTTDGDSNNQSNSSTYDAAATAYNGNTGLTPYINTAQTPLGTKFFNFSTDISGEKNSSKI

SEQ ID NO: 16874 - protein, 67 aa, Secale strictum subsp. kuprijanovii
GNWCHEYRKLKAKVETIQKCQKHLMGEDLESLNLKELQQLEQQLESSLKHIRSRKNQLMPESISELQ

SEQ ID NO: 16875 - protein, 130 aa, Harmonia nutans
QRNHRHYMGEEIESLSLKEIQNLEQQLDTGLKHIRTRKNQLLHESISELQKKGKAIQEQNTTLTKRIKEKEKDKTIPQSSHWEQPSYVDHDTTFLMLPPHPALNIGGDYNQVGGGGADGRSNELDLSLQP

SEQ ID NO: 16876 - protein, 130 aa, Brassica incana
AQTNWSMEYSRLKAKIELLERNQRHYLGEDLESISIKELQNLEQQLDTSLKHIRSRKNQLMHESLNHLQRKEKEILEENSMLAKQIKERESILRTHQNQSEQQNRSHHVAPQPQPQLNPYMASSPFLNMG

SEQ ID NO: 16877 - protein, 130 aa, Madia sativa
QRNHRHYMGEEIESLSLKEIQNLEQQLDTGLKHIRTRKNQLLHESISELQKKGKAIQEQNTTLTKRIKEKEKDKTIPQSSHWEQYVDHDTTFLMPPPHPPINIGGDYNQVGGGGGDGSGSSNELDLSLQP

SEQ ID NO: 16878 - protein, 133 aa, Centromadia pungens
QRNHRHYMGEDIESLSLKEIQNLEQQLDTGLKNIRTRKNQLLHESISELQKKGKAIQEQNTTLTKKIKEKEKDKTIPQNTQWEMHNYVDPDTTFLMPPPPPALNMGGDYNHGGASSSEGGDGRTNELDLSLQP

SEQ ID NO: 16879 - protein, 133 aa, Deinandra lobbii
QRNHRHYMGEDIESLSLKEIQNLEQQLDTGLKNIRTRKNQLLHESISELQKKGKAIQEQNTTLTKKIKEKEKDKTIPQNTQWEMHNYVDPDTTFLMPPPPPALNMGGDYNHSGAGSSEGGDGRSNELDLSLQP

SEQ ID NO: 16880 - protein, 135 aa, Calycadenia multiglandulosa
QRNHRHYMGEEIESLSLKEIQNLEQQLDTGLKHIRTRKNQLLHESISELQKKGKAIQEQNTSLTKRIKEKEKDKRTLPQNSQWEQHSYVDHDTTFLMPPPHPTLNIGGDYKQVGGGGGGAHDDGRSNELNLSLQP

SEQ ID NO: 16881 - protein, 136 aa, Osmadenia tenella
QRNHRHYMGEEIESLSLKEIQNLEQQLDTGLKHIRTRKNQLLHESISGLQKKGKAIQEQNTSLTKRIKEKENDKRMPQNSQWEHHSYVDHDTTFLMPPPHPTLNINGGDYDQVGGGGCGGADHDGRSNELDLSLQP

SEQ ID NO: 16882 - protein, 156 aa, Brassica oleracea var. italica
AQTNWSVEYSRLKAKIELLERNQRHYLGEDLESISIKELQNLEQQLDTSLKHIRSRKNQLMHESLNHLQRKEKEILEENSMLAKQIRERESILRTHQNQSEQQNRSHHVAPQPQPQLNPYMASSPFLNMGGMYQGEYPTAVRRNRLDLTLEPIYNC

SEQ ID NO: 16883 - protein, 156 aa, Brassica oleracea var. acephala
AQTNWSVEYSRLKAKIELLERNQRHYLGEDLESISIKELQNLEQQLDTSLKHIRSRKNQLMHESLNHLQRKEKEILEENSMLAKQIKERESILRTHQNQSEQQNRSHHVAPQPQPQLNPYMASSPFLNMGGMYQGEYPTAVRRNRLDLTLEPIYNC

SEQ ID NO: 16884 - protein, 156 aa, Brassica oleracea var. acephala
AQTNWSMEYSRLKAKIELLERNQRHYLGKDLESISIKELQNLEQQLDTSLKHIRSRKNQLMHESLNHLQRKEKEILEENSMLAKQIKERESILRTHQNQSEQQNRSHHVAPQPQPQLNPYMASSPFLNMGGMYQGEYPTAVRRNRLDLTLEPIYNC

SEQ ID NO: 16885 - protein, 156 aa, Brassica oleracea var. acephala
AQTNWSMEYSRLKAKIELWERNQRHYLGEDLESISIKELQNLEQQLDTSLKHIRSRKNQLMHESLNHLQRKEKEILEENSMLAKQIKERESILRTHQNQSEQQNRSHHVAPQPQPQLNPYMASSPFLNMGGMYQGEYPTAVRRNRLDLTLEPIYNC

SEQ ID NO: 16886 - protein, 154 aa, Glycine max
  unsure (1)..(154): unsure at all Xaa locations
XEKVLVSSESEIQGNWCHEYRKLKAKVETIQKCQKHLMGEDFESLNLKELQQLEQQLESSLKHIRSRKNQLMHESISELQKKERSLQEENKVLQKELVEKQKAHVAQQDQTQPQTSSSSSSFMLRDAPPAANTSIHPAATGERAEDAAVQPQAX

SEQ ID NO: 16887 - protein, 128 aa, Argyroxiphium caliginis
QRNHRHYMGEEIESLSLKEIQNLEQQLDTGLKHIRTKKNQLLHESIPELQKKGKAIQEQNTTLTKRIKEKEKDKTIPQSSHWEQYVDHDTTFLMPPPHPPLNIGGDYNQVGGGRGDGRSNELDLSLQP

SEQ ID NO: 16888 - protein, 135 aa, Kyhosia bolanderi
QRNHRHYMGEDIESLSLKEIQNLEQQLDTGLKNIRTRKNQLLHESISELQKKGKAIQEQNTTLTKKIKEKEKVKTTMPQNTQWEMHNYVDPDTTFLMPPPPPALNMGGDYNQGGAGSSEAGGDGRTNELDLSLQP

SEQ ID NO: 16889 - protein, 128 aa, Carlquistia muirii
QRNHRHYMGEEIESLSLKEIQNLEQQLDTGLKHIRTRKNQLLHESISELQKKGKAIQEQNTTLTKRIKEKEKDNTIPQSSHWEQYVDHDTTFLMPPPHPPINIGGDYNQVGGGGADGRSNELDLSLQP

SEQ ID NO: 16890 - protein, 128 aa, Anisocarpus scabridus
QRNHRHYMGEEIESLSLKEIQNLEQQLDTGLKHIRTRKNQLLHESISELQKKGKAIQEQNTTLTKRIKEKEKDKTIPQSSHWEQYVDHDTTFLLPPPHPPLNIGGDYNQVGGGGGDGRSNELDLSLQP

SEQ ID NO: 16891 - protein, 128 aa, Wilkesia gymnoxiphium
QRNHRHYMGEEIESLSLKEIQNLEQQLDTGLKHIRTRKNQLLHESISELQKKGKAIQEQNTTLTKRIKEKEKDKTIPQSSHWEQYVDHDTTFLMQPPHPPLNIGGDYNQVGGGRGDGRSNELDLSLQP

SEQ ID NO: 16892 - protein, 67 aa, Secale cereale
GNWCHEYRKLKAKVETIQKCQKHLMGEDLESLNLKELQQLEQQLESSLKHIRSRKNQLMAESISELQ

SEQ ID NO: 16893 - protein, 66 aa, Triticum aestivum subsp. spelta
DWCHEYRKLKAKVETIQKCQKHLMGEDLESLNLKELQQLEQQLESSLKHIRSRKNQLMPESISELQ

SEQ ID NO: 16894 - protein, 117 aa, Brassica insularis
RNQRHYLGEDLQAVSSKELQNLEQQLDTALKHIRSRKNQLMYDSINELQRKEKAIQEQNGMLSKEIKEREKILRAQQEQWDQQNHGHNMPPPSPPQQHQIQHPYMLSHQPSPFLDMG

SEQ ID NO: 16895 - protein, 128 aa, Argyroxiphium sandwicense
QRNHRHYMGEEIESLSLKEIQNLEQQLDTGLKHIRTKKNQLLHESISELQKKGKAIQEQNTTLTKRIKEKEKDKTIPQSSHWEQYVDHDTTFLMPPPHPPLNIGGDYNQVGGGRGDGRSNELDLSLQP

SEQ ID NO: 16896 - protein, 128 aa, Dubautia latifolia
QRNHRHYMGEEIESLSLKEIQNLEQQLDTGLKHIRTRKNQLLHESISKLQKKGKAIQEQNTTLTKRIKEKEKDKTIPQSSHWEQYVDHDTTFLMPPPHPPLIIGRDYNQVGGGGGDGRSNELDLSLQP

SEQ ID NO: 16897 - protein, 128 aa, Dubautia laxa
QRNHRHYMGEEIESLSLKEIQNLEQQLDTGLKHIRTRKNQLLHESISELQKKGKAIQEQNTTLTKRIKEKDKDKTIPQSSHCEQYVDHDTTFLMPPPHPPLNIGGDYNQVGGGRGDGRSNELDLSLQP

SEQ ID NO: 16898 - protein, 128 aa, Dubautia plantaginea
QRNHRHYMGEEIESLSLKEIQNLEQQLDTGLKHIRTRKNQLLHESISELQKKGKVIQEQNTTLTKRIKEKEKDKTIPQSSHWEQYVDHDTTFLMPPPHPPLNIGGDYNQVGGGRGDGRSNELDLSLQP

SEQ ID NO: 16899 - protein, 128 aa, Dubautia raillardioides
QRNHRHYMGEEIESLSLKEIQNLEQQLDTGLKHIRTRKNQLLHESISELQKKGKAIQEQNTTLTKRIKEKEKDKTIPQSSHWEHYVDHDTTFLMPPPHPPLNIGGDYNQVGGGRGDGRSNELDLSLQP

SEQ ID NO: 16900 - protein, 128 aa, Dubautia scabra
QRNHRHYMGEEIESLSLKETQNLEQQLDTGLKHIRTRKNQLLHESISELQKKGKAIQEQNTTLTKRIKEKEKDKTIPQSSHWEQYVDHDTTFLTPPPHPPLNIGGDYNQVGGGRGDGRSNELDLSLQP

SEQ ID NO: 16901 - protein, 128 aa, Dubautia sherffiana
QRNHRHYMGEEIESLRLKEIQNLEQQLDTGLKHIRTRKNQLLHESISKLQKKGKAIQEQNTTLTKRIKEKEKDKTIPQSSHWEQYVDHDTTFLMPPPHPPLIIGRDYNQVGGGGGDGRSNELDLSLQP

SEQ ID NO: 16902 - protein, 67 aa, Triticum aestivum subsp. sphaerococcum
GNWCHEYRKLKAKVETIQKCQKHLVGEDLESLNLKELQQLEQQLESSLKHIRSRKNQLMPESISELQ

SEQ ID NO: 16903 - protein, 235 aa, Mus musculus
MEGAKRADANLLTDTGTESSPRSPVCSLRHFACEQNLLSRPDGSASFLQGDTSVLAGVYGPAEVKVSKEIFNKATLEVILRPKIGLPGVAEKSRERLVRNTCEAVVLGALHPRTSITVVLQVVSDAGSLLACCLNAACMALVDAGVPMRALFCGVTCALDSDGNLVLDPTTKQEKEARAILTFALDSAEQKLLMSTTKGLYSDAELQQCLAAAQAASQHIFRFYRESLQRRYSKS

SEQ ID NO: 16904 - protein, 235 aa, Mus musculus
MEGAKRADANVLTDTGTESSPRSPVCSLRHFACEQNLLSRPDGSASFLQGDTSVLAGVYGPAEVKVSKEIFNKATLEVILRPKIGLPGVAEKSRERLVRNTCEAVVLGALHPRTSITVVLQVVSDAGSLLACCLNAACMALVDAGVPMRALFCGVTCALDSDGNLVLDPTTKQEKEARAILTFALDSAEQKLLMSTTKGLYSDAELQQCLAAAQAASQHIFRFYRESLQRRYSKS

SEQ ID NO: 16905 - protein, 229 aa, Rattus norvegicus
MEGAKRADAKVLTDTGTESSPRSPVCSLRHFACEQNLLSRPDGSASFLQGDTSVLAGVYGPAEVKVSKEIFNKATLEVILRPKIGLPGVAEKSRERLIRNTCEAVVLGALHPRTSITVVLQVLLACCLNAACMALVDAGVPMRALFCGVTCALDPDGNLVLDPTTKQEKEARAILTFALDSAEQKLLMSATKGLYSDAELQQCLAAAQAASQHIFRFYRESLQRRYSKS

SEQ ID NO: 16906 - protein, 246 aa, Pyrobaculum aerophilum str. IM2
MKRPPVPLLQNGVRADGRTPDQMREVKIAVGVVSNADGSAMVSYGATTAVAAVYGPREMHPRHLSLPDRGVMRVRYHMAPFSTKDERKSPTPSRREIEISKILREALEPAIVLEQYPRSRIDVFVEILQADGSTRVASLTAASLALADAGIYMRDLVVGVSVGLVDGTVVLDLNGLEDQYGEGDLPLGYMPNLKRFTLLQLDGAWTRDMFLQALNLAVRGAEYVYQIARDALKNKYMSIAEEIYGR

SEQ ID NO: 16907 - protein, 212 aa, Anopheles gambiae str. PEST
MVTDSTKTVANSLNLRRMVCETNVLSRSDCSAALSQGATQVMVAANGPAEVKFKNAESENCHLEVQYRSNAGQEDIQHRLMESLIKRSFVRVVATPAFCRSAVYIYVQEMTDRGGLLACSINASCLALITSGVELNFTVAAVHCIMTEDGAMILDPDHKQLKLARSSFTFVFDSIGKNTVTSYVHGSFTFEEYEQVVSVCRKAVEKIFDFYR

SEQ ID NO: 16908 - protein, 250 aa, Pyrococcus furiosus DSM 3638
MMLKPEGLKLIDENGRRLDGRKKYELRPIKMKVGVLKNANGSAYIEWGKNKIIAAVYGPREIHPKHLQRPDRAILRVRYNMAPFSVEERKKPGPDRRSIEISKVIRGALEPALILEMFPRTAIDVFIEVLQADAGTRVAGITAASLALADAGIPMRDLVAACSAGKIEGEIVLDLNKEEDNYGEADVPVAIMPIKNDITLLQMDGYLTKEEFIEAVKLAIKGAKAVYQKQREALKEKYLKIAQEVEGSEQ

SEQ ID NO: 16909 - protein, 240 aa, Methanothermobacter thermautotrophicus str. Delta H
MITIITQDQLKTSPSVREDGRAFDELRPLKIEAGILERADGSSYLEFGGNKILVAVYGPREAQIRKLQRPDRAVIRCRYNMAPFSVEERKRPGPDRRSVEISKITAEALRPALILEKFPRSVIDVFIEVLEAEGGTRCAGITAASVALADAGIPMRDMVVACAAGKVGDQVVLDLSEEEDKEGQADVPVAILPRTREITLLQSDGNLTPEEFERALDLAVEGCLRIHEVQKEALRKRYGE

SEQ ID NO: 16910 - protein, 239 aa, Methanopyrus kandleri AV19
MEERPERLISEDGLRLDGRKPDEMRPLKIQAGVLKRADGSAYLELGANKIVAAVYGPRELHPRHKQKPDRAVVRFRYNMAPFSVDERKRPGPDRRSIEISKLSKEALEPAIFTEYYPRTAIDIFVEVLQADAGTRCAGISAASVALADAGIEMRDLVAACAAGKVEGKVVLDPMYYEDGYGEADVPLAMMPKEGKITLLQMDGDMTPGEFKQAVKLAKKGCKIVYKEQRRALKEKYGGD

SEQ ID NO: 16911 - protein, 493 aa, Methanosarcina mazei Goe1
MSNKPENLTLITDDGLRLDGRRADEIRPMKIEVGVLSRADGSCYLEWGRNKILVGVFGPREAHPRRSQRADSAVIRYRYNMASFSVEDRARPGPSRRSIEISKVSREAFEPVIMAELFPKTAIDIFVEVLQADAGTRTAAINASSIALADAGIPMKGLITSCAFGKVDGKIVLDLNKEEDNYGEADFPVAMTQDGEITLIQMDGNLTPDEIKQGLELVKKGCKEILEIQQAVLRKKFETPVEEVSEETAPEKGAEKEVLEPSPVAAIVEETPEEAEEPEVEISEEVEAEILASEVIPDFEDELEEEIEEELEESEEDLETEEEEFEEEALEEEAEPEEDLEEDLEEDLGEELEEEEEELEEEEFEEEALEEETELEASLECAPELKEFDEIEARLEKEDASIEAEEEIEPEAEEATEEGLEEEAEIEETAASEEENIEAEAEAEEEAEPEVEAEEISTEAEEAEEEPEEEKSEGPWKVVKDPSEAGTRGEKDE

SEQ ID NO: 16912 - protein, 501 aa, Methanosarcina barkeri
MSDKPEKLITDDGLRLDGRHADEIRPMKIEIGVLSRADGSCYLEWGRNKVLVGVFGPREAHPRRSQRADTAVIRYKYNMASFSTEDRARPGPSRRSIEISKVSREAFEPVIMAELFPKTAIDIFVEILQADAGTRTAAINASSIALADAGIPMKGLVTSCAFGKVDGQIVLDLNKEEDNYGEADFPVAMTQDGEITLLQMDGNLTTDEIRKGFELVKKGCKEILEIQQAVLRTKFETPVEEPEAKAAEEVEETELEVVETESSLEYAPEAAVVEEIIEEAEEPEEGISEETVEACAVNKEAPECEELEKVIKDAEAEVVEGEVTEKVVEAEVEEEAEEEAFEDKADFESSFEASFEEVSEAEELEEPESEEVVSGEEAEVESEIEESADEEAQPEVETQLEVETQLEEKAEVEEETQLEEKVQPEEEAGIEEVQPEEEAGIEEVASEETFESEPEIESEAESKKEAPAEQTIEESEEEKCKGPWKVVKDPSESGSRGENDE

SEQ ID NO: 16913 - protein, 258 aa, Archaeoglobus fulgidus DSM 4304
MSEFNEKPEKLIVDGLRLDGRKFDELRPIKIEASVLKRADGSCYLEMGKNKVIAAVFGPREVHPRHLQDPSKAIIRYRYNMAPFSVEERKRPGPDRRSIEISKVSKEAFEAVIMKELFPRSAIDIFVEVLQADAGSRTACLNAASVALVDAGVPMKGMITSVAVGKADGQLVLDPMKEEDNFGEADMPFAFLIRNGKIESIALLQMDGRMTRDEVKQAIELAKKGALQIYEMQREAILRRYIEVGEEMDEITEGGEDA

SEQ ID NO: 16914 - protein, 248 aa, Sulfolobus solfataricus
MREMLQVERPKLILDDGKRTDGRKPDELRSIKIELGVLKNADGSAIFEMGNTKAIAAVYGPKEMHPRHLSLPDRAVLRVRYHMTPFSTDERKNPAPSRREIELSKVIREALESAVLVELFPRTAIDVFTEILQADAGSRLVSLMAASLALADAGIPMRDLIAGVAVGKADGVIILDLNETEDMWGEADMPIAMMPSLNQVTLFQLNGSMTPDEFRQAFDLAVKGINIIYNLEREALKSKYVEFKEEGV

SEQ ID NO: 16915 - protein, 248 aa, Thermoplasma acidophilum
MKRMEANKIKLINEDNLRLDGRSFNELRPIKIQAGVLNRADGSAYIEWGGNKIMVGVYGPKEAYPKHSQDIDHAIVKARYNMAAFSVDERKRPGPDRRTMEISKVISEALSSSIMIEQFPRAEIDVYIEVLQADAGTRIAGLTAATVALADAGVPMRDMVVGCTAGKVDGHMVLDLSKEEDNYGEADIPIAIMPKTGDIVLMQMDGDVTEDELYQAMDMIFEATKRISQIQREALLNKYKIQDIGEGE

SEQ ID NO: 16916 - protein, 249 aa, Pyrococcus abyssi
MMEKPEGLKLIDENGRRIDGRKKYELRPIKMEVGVLKNANGSAYIEWGKNKIIAAVYGPRELHPKHLQRPDRAILRVRYNMAPFSVEERKKPGPDRRSIEISKVIKGALEPALILEMFPRTAIDVFIEVLQADAGTRVAGITAASLALADAGIPMRDLVAACAAGKIEGEIVLDLNKEEDNYGEADVPVAIMPLKNDITLLQMDGYLTKDEFIEAVKLAIKGAKAVYQKQREALKEKYLKIAQEVEGSE

SEQ ID NO: 16917 - protein, 239 aa, Arabidopsis thaliana
MEIDREDGRTPNQLRPLACSRNILHRPHGSASWSQGDTKVLAAVYGPKAGTKKNENAEKACFEVIWKPKSGQIGKVEKEYEMILKRTIQSICVLTVNPNTTTSVIIQVVHDDGSLLPCAINAACAALVDAGIPMKHLAVAICCCLAENGYLVLDPNKLEEKKMTAFAYLVFPNTTLSVLPEGSSVAEGEPVEHGIITSITHGVMSVDDYFLCVENGRAATASLSAFFRKNFQQSSSKAG

SEQ ID NO: 16918 - protein, 243 aa, Glycine max
METDRPDGRTPNQLRPLACSCSILHRAHGSASWAQGETKVLAAVYGPKAGTKKNENPEKASIEVIWKPKTGQIGKLEKEYEMILKRTLESICIRTIYPNTTTSVIVQVVHDDGALLPCAINAACTALVDAGIPLKHLAVAICCSVTDSGCIILDPTKEEEEKMKAYINLVFPNTIVSVLPERSSQVGSEPMAHGIMTSVTQGAMSVDDYLHCLDRGRAASARLSEFVRKNIGPKSTCEASKAG

SEQ ID NO: 16919 - protein, 248 aa, Glycine max
  unsure (1)..(248): unsure at all Xaa locations
METDRPDGRTPNQLRPLAYSCSILHRAHGSASWAQGETKVLAAVYGPKAGTKKNENPEKASIEVIWKPKTGQIGKMEKEYEMILKRTLESICIRTIYPNTTTSVIVQVVHDDGAVSYLKIQFXYDXSACAALVDAGIPLKHLAVAICCSVTDSGCIILDPTKDEEEKMKAFANLVFPNTIVSVLPERDHCKWGEPMENGIMTSVTQGAMSVNDYLHCLERGRAACASLSEFVRKNIGTKSTSEPSKAG

SEQ ID NO: 16920 - protein, 105 aa, Glycine max
  unsure (1)..(105): unsure at all Xaa locations
MGAKEVERVDGRTPNQLRPLACSRNLLNRAHGSAQWSQGNTIVLAAVYGPKAGTRKGENPEKASIEVIWKPKSGQIGKPEKEYEMILKRTLQSICLLTIHPNTTX

SEQ ID NO: 16921 - protein, 89 aa, Glycine max
  unsure (1)..(89): unsure at all Xaa locations
METDRPDGRTPNQLRPLVCSCSILHRSHGSASWAQGETKVLAAVYGPKAGTKKSENPEKASIEVIWKPKTGPIGKVEKEYEMIXLKRTX

SEQ ID NO: 16922 - protein, 280 aa, Oryza sativa (japonica cultivar-group)
MEESRADGRNPNQLRPFSCTRNPLDRAHGSARWAQGDTIVLAAVYGPKPGTRKGENPEKASIEVVWKPMTGQIGKQEKEYEMTLKRTLQSICLLTVHPNTTTSVILQVVGNDGSLLPCAINACCAALVFAGIPLKHLAVAIGCGVLEDGEVILDTNKAEEQQLKSFAHLVFPNSRKSASSKEPNQKEEDSERGLITSITHGVMSGRLFQLHREGPCCIVTDLGFYEDNIAEAGTWRCLRGGNHAIENASTLQKHKVVAAHVLNMKRVGTLGALLMFEIGS

SEQ ID NO: 16923 - protein, 238 aa, Oryza sativa
MEESRADGRNPNQLRPFSCTRNPLDRAHGSARWAQGDTIVLAAVYGPKPGTRKGENPEKASIEVVWKPMTGQIGKQEKEYEMTLKRTLQSICLLTVHPNTTTSVILQVVGNDGSLLPCAINACCAALVFAGIPLKHLAVAIGCGVLEDGEVILDTNKAEEQQLKSFAHLVFPNSRKSASSKEPNQKEEDSERGLITSITHGVMSEEDYFSCIERGLAASSRISDFMRTTLQKQAPGDV

SEQ ID NO: 16924 - protein, 233 aa, Oryza sativa
  unsure (1)..(233): unsure at all Xaa locations
MEESRADGRNPNQLRPFSCTRNPLDRAHGSARWAQGDTIVLAAVYGPKPGTRKGENPEKASIEVVWKPMTGQIGKQEKEYEMTLKRTLQSICLLTVHPNTTTSVILQVVGNDGSVXXFCRNVLLSIVSGFCDAVAIGCGVLEDGEVILDTNKAEEQQLKSFAHLVFPNSRKSASSKEPNQKEEDSERGLITSITHGVMSEEDYFSCIERGLAASSRISDFMRTTLQKQAPGDV

SEQ ID NO: 16925 - protein, 212 aa, Oryza sativa
MEESRADGRNPNQLRPFSCTRNPLDRAHGSARWAQGDTIVLAAVYGPKPGTRKGENPEKASIEVVWKPMTGQIGKQEKEYEMTLKRTLQSICLLTVHPNTTTSVILQVVGNDVAIGCGVLEDGEVILDTNKAEEQQLKSFAHLVFPNSRKSASSKEPNQKEEDSERGLITSITHGVMSEEDYFSCIERGLAASSRISDFMRTTLQKQAPGDV

SEQ ID NO: 16926 - protein, 73 aa, Oryza sativa
  unsure (1)..(73): unsure at all Xaa locations
ARGESRADGRXPNQLRPFFCTRNVSTAAHCSARWAQWDTIVLAAVYGPKPGTRKGENPEKASIEVVWKPMTGX

SEQ ID NO: 16927 - protein, 248 aa, Triticum aestivum
GRKRRRRRGEGGMERAGGRKANQLRAYSCTRNPLERAHGSARWAQGDTVVLAAVYGPRPGTRKGENPEKASVEVVWKPKTGQIGRQEKEYEMTLKRTLQSICLLTVHPNTTTSVILQVMGDDGSLLPCAINASCAALVFAGVPMKHLAVAIGCGVLADGAVILDTSKAEEQQLKSFAHLVFPNSSKSVDVKESQQKDGQPERGLITSITHGVMSEDDYFNCIERGLAASARISDFMRTTLQKHTPDYL

SEQ ID NO: 16928 - protein, 242 aa, Schizosaccharomyces pombe
MSHLEILSLEGLRNDGRRWDEMRNFQCRFGIEPSENGSAFIELGNTKVLCIVDGPSEPVIKSKARADRTFVNVEINIASFSTIDVKKRFKSDRRIQLQCLALQNTFEEIIQTELYPRSQISVYLHVLQDDGAVMASCINATTLALIDAGIPVKDFVCCSTAGIVESDMLLDLNSLEESALSWLTVAVLGNIKKVVYMQLETSMHLDYLESVMNMAIAGSEHIYNTMQSAVRQSAKPALASLS

SEQ ID NO: 16929 - protein, 242 aa, Schizosaccharomyces pombe
MSHFEILSLEGLRNDGRRWDEMRNFQCRIGIEPSENGSAFIELGNTKVLCIVDGPSEPVIKSKARADRTFVNVEINIASFSTIDVKKRFKSDRRIQLQCLALQNTFEEIIQTELYPRSQISVYLHVLQDDGAVMASCINATTLALIDAGIPVKDFVCCSTAGIVESDMLLDLNSLEESALSWLTVAVLGNIKKVVYMQLETSMHLDYLESVMNMAIAGSEHIYNTMQSAVRQSAKPALASLS

SEQ ID NO: 16930 - protein, 226 aa, Schizosaccharomyces pombe
MNRIGILSRSDGSSEWKQGSARVICGVNGPIDVKIRDERLNKATVEVLVQPVSGVAETLEKMISSRIVGILEDAIFLNTYPRTLIQVSIQIIEEDGTDTLAAVINGAVLALLDAGISLKYIPCAINCHWKNKITQDEPDVDGTINKLESIITICYSISSEPAKLIFLETAGPIPEEDFFRVLETAPLHAEEVSKKMKELLFETYNESDGHENEKNPKEDVEMDVVA

SEQ ID NO: 16931 - protein, 246 aa, Saccharomyces cerevisiae; identical to SEQ ID NO: 498

SEQ ID NO: 16932 - protein, 248 aa, Thermoplasma volcanium
MIKTETSKIKLINEDNLRLDGRSFNELRPIKIEAGVLNRADGSAYIEWGGNKIIVGVYGPKEAYPKHSQDIDHAVVKARYNMAAFSVDERKRPGPDRRTMEISKVISEALSSSIMIEQFPRAEIDVYIEVLQADAGTRIAGLTAATVALADAGIPMRDMVVGCTAGKVDGHIVLDLSKEEDNFGEADIPMAIMPKTGEIVLLQMDGDVTEDEFYEATSMIIEATKKISQIQRNALLNKYKIEGIEGGE

SEQ ID NO: 16933 - protein, 251 aa, Neurospora crassa
MATVTPEASLNALPRADGSARYSYAGYTVTASVNGPIEAQRRDEHAYEAHVDVIVRPSAGVGGTRERHLEFILQSSLSQIILVKNFPRSVIQIVLQVESTPENAYVNTKLVQASLNLPIIPALFQTAVLALLSAAVPMKATATSTVVAVVSDDGSKKIVADPSPQDIREATSLHVLAFTSHDELLLSESEGDFTVKEWDGVYENAQKICCQTASKQDGIDMVLDDDASSPDMRHFLRSTLETKVASDLHWK

SEQ ID NO: 16934 - protein, 273 aa, Neurospora crassa
MPLDTSAYSLALLRVDGRRWNELRRIHAQIRTQAAADGSSYLEMGHTKVMCVVNGPSEPGPRRGATSGGGGGGGQSKNAEVAVNIVIAGFSSVDRKRRGRGDKHILELQSTISQALAASLHTHLFPHSTINISLHVLSQDGSLLAALINAATLACVDAGIPMTDYVAACTAGSTSTYAANDEGADPLLDMNHQEEQELPGLTVATLGDSDRVAVLVCESRVQVSRLEGMLAVGVDGCKQVREILDRVVREKGIKMIQEGTVERGVGLNDMELD

SEQ ID NO: 16935 - protein, 249 aa, Pyrococcus horikoshii
MMEKPEGLKLIDENGRRIDGRKKYELRPIKMKVGVLKNANGSAYIEWGRNKIIAAVYGPRELHSKHLQRPDRAILRVRYNMAPFSVEERKKPGPDRRSIEISKVIKGALEPALILEMFPRTSIDVFIEVLQADAGTRVAGITAASLALADAGIPMRDLVAACAAGKIEGEIVLDLNKEEDNYGEADVPVAIMPLKNDITLLQMDGYLTKEEFIEAVRLAIKGAKAVYQKQREALKEKYLKIAQEVEESE

SEQ ID NO: 16936 - protein, 188 aa, Encephalitozoon cuniculi
MDGIKSMVSVISHCTGSSRFSYNNTTVFCVVHGPSDAISRQEDPDRAILDVRWRDMVLINGRVYDKYFSRVIEKILSKNIILELDACKVIQISFNVVGETRNTLFCAVNAALLALADGGIPLRSMFYASSSFMHEEEVVVFDKDENILSTHSFEGISETNIEKARDFLKYVKEAQAYTLRSKFPFCAD

SEQ ID NO: 16937 - protein, 233 aa, Drosophila melanogaster
MNLPAKMDVEKDKLRQMHCEFNPLSRCDGSVMYSQGATGLIGAVLGPIEVKTQNLSIDGSYLECNYRPKAGLPQVTDRIREAAIRDVLELALLSEAHPRSKMSVQIQELEDRGSIDACAVNCACLAMLIGGLPLKYSFAAVHAIINEQGEYVLDPDQSETLHQRASFTFAFDSVEGNLLLIQTKGSFKIAQFNDIECLCRAASAEIFQFYRNQVAKYHGRSEATAKKEDVNET

SEQ ID NO: 16938 - protein, 233 aa, Drosophila melanogaster
MNLPAKMDVEKDKLRQMHCEFNPLSRCDGSVMYSQGATGLIGAVLGPIEVKTQNLSIDGSYLECNYRPKAGLPQVTDRIREAAIRDVLELALLSEAHPRSKMSVQIQELEDRGSIDACAVNCACLAMLIGGLPLKYSFAAVHAIINEQGEYVLDPDQSETLHQRASFTFAFDSVEGNLLLIQTKGSFKIAQFNDIECLCLAASAEIFQFYRNQVAKYHGRSEATAKKEDVNET

SEQ ID NO: 16939 - protein, 235 aa, Homo sapiens [sequence omitted]

SEQ ID NO: 16940 - protein, 235 aa, Homo sapiens
MEEETHTDAKIRAENGTGSSPRGPGCSLRHFACEQNLLSRPDGSASFLQGDTSVLAGVYGPAEVKVSKEIFNKATLEVILRPKIGLPGVAEKSRERLIRNTCEAVVLGTLHPRTSITVVLQVVSDAGSLLACCLNAACMALVDAGVPMRALFCGVACALDSDGTLVLDPTSKQEKEARAVLTFALDSVERKLLMSSTKGLYSDTELQQCLAAAQAASQHVFRFYRESLQRRYSKS

SEQ ID NO: 16941 - protein, 268 aa, Homo sapiens
MAQPGACALVTQPVCGARCQAEVTTAAARGLGAMEEETHTDAKIRAENGTGSSPRGPGCSLRHFACEQNLLSRPDGSASFLQGDTSVLAGVYGPAEVKVSKEIFNKATLEVILRPKIGLPGVAEKSRERLIRNTCEAVVLGTLHPRTSITVVLQVVSDAGSLLACCLNAACMALVDAGVPMRALFCGVACALDSDGTLVLDPTSKQEKEARAVLTFALDSVERKLLMSSTKGLYSDTELQQCLAAAQAASQHVFRFYRESLQRRYSKS

SEQ ID NO: 16942 - protein, 240 aa, Ferroplasma acidarmanus
MEGNIKLMREDGLRLDGRSLNEMRPIKIQTGVVERADGSAFIEWGANKIIVAVYVREAYPKHAQNIDRAIVKARYNMSGYSVEERKRPGPDRRTMEISKVVSEALSSAIVLEKLPRAEIDVFIQVLEADAGTRIASLTASSVAVADAGVPMRDLVVGCTAGKADGKIVLDLSKDEDNFGQADIPMAILPRTGKVVLLQLDGDVTEEEFNEATSMMMDAMPRISELQRNALMSKYSIEDGE

SEQ ID NO: 16943 - protein, 950 aa, Streptomyces coelicolor A3(2)
MIVRLSVRAGTLESTMTEDLSPAERYAAARQRAVEQATALASFREMYDFGLDPFQIEACQALEAGKGVLVAAPTGSGKTIVGEFAVHLALQQGRKCFYTTPIKALSNQKYADLCRRYGTDKVGLLTGDNSVNSEAPVVVMTTEVLRNMLYAGSQTLLGLGHVVMDEVHYLSDRFRGAVWEEVIIHLPESVTLVSLSATVSNAEEFGDWLDTVRGDTQVIVSEHRPVPLFQHVLAGRRMYDLFEEAEGHKKAVNPDLTRMARLEASRPSYQDRRRGRAMKEADRERERRQRSRVWTPSRPEVIERLDSEGLLPAITFIFSRAGCEAAVQQCLYAGLRLNDEGARERVRALVEERTSSIPREDLHVLGYYEWLEGLERGIAAHHAGMLPTFKEVVEELFVRGLVKAVFATETLALGINMPARSVVLEKLVKWNGEQHADITPGEFTQLTGRAGRRGIDVEGHAVVLWQRAMNPEHLAGLAGTRTYPLRSSFKPSYNMAVNLVDQFGRHRSRELLETSFAQFQADKSVVGISRQVQRNEEGLEGYKASMTCHLGDFDEYARLRRELKDREQELARQGANQRRAEAAVALEKLKPGDVIHVPTGKYAGLALVLDPGLPAGRSNGHRGFDHHDGPRPLVLTAERQVKRLASIDFPVPVEALDRMRIPKSFNARSPQSRRDLASALRSKAGHITPERARKKRSQAADDREINRLRKAIRAHPCHGCDDREDHARWAERYHRLLRDTSQLERRIEGRTNTIARTFDRIVALLTELDYLRGDEVTEHGKRLARLYGELDLLASECLREGVWEGLSPAELAACVSALVFESRAADDATAPKVPSGRAKAALGETVRIWGRLDALEEDFRISQTEGVGQREPDLGFAWAAYMWASGKGLDEVLREVEMPAGDFVRWCKQVIDVLGQISAAAPGAGSTVPKNARKAVDELLRGVVAYSSVG

SEQ ID NO: 16944 - protein, 854 aa, Streptomyces coelicolor A3(2)
MRTADSPITTRDRQDGGVTLIDQLPRTADPDALYEAFEAWAQERGLTLYPHQEEALIEVVSGANVIVSTPTGSGKSMIAAGAHFAALARDEVTFYTAPIKALVSEKFFELCKIFGTENVGMLTGDASVNSDAPVICCTAEVLASIALRDGKHADIGQVVMDEFHFYAEPDRGWAWQIPLLELPQAQFVLMSATLGDVSFFEKDLARRTDRPTAVVRSATRPVPLSYEFRYTPLTETLTDLLAARQAPVYIVHFTQAQAVERAQALMSINMCTREEKQRIAELIGNFRFTTKFGRNLSRYVRHGIGVHHAGMLPKYRRLVEKLAQAGLLKVICGTDTLGVGVNVPIRTVLFTALTKYDGTRVRTLRAREFHQIAGRAGRAGFDTEGFVVAQAPEHVVENEKALAKAGDDPKKRRKVVRKKAPEGFVAWSESTFDKLIGSQPEPLTSRFRVTHTMLLSVIARPGDAFSAMRHLLEDNHEPRRQQLRHIRRAIAIYRSLLDGGIVEKLDQPDAEGRIVRLTVDLQQDFALNQPLSTFALAAFELLDPESPSYALDMVSVVESTLDDPRQILAAQQNKARGEAVAAMKADGVEYEERMERLQDITYPKPLEELLFHAYDTYRRSHPWVGDHPLSPKSVIRDMYERALTFTELVSHYELARTEGIVLRYLASAYKALDHTVPDDLKSEDLQDLIEWLGEMVRQVDSSLLDEWEQLANPAEMTAEEAQEKADQVRPVTANARAFRVLVRNAMFRRVELAALDQVGELGEMDADAGWDADAWGEAMDKYWDEYDDLGTGPNARGPKLLVIEEEPQNALWRVRQIFDDPNDDHDWGISAEVDLTASDAEGRAVVRVTDVGQL

SEQ ID NO: 16945 - protein, 1244 aa, Mus musculus
MMETERLVLPPLDPLNLPLRALEVGCTGRWELLNVPGPPESTLPHGLPPCAPDLCQEAEQLFLSSPAWLPLHGVEHSARKWQRKTDPWSLLAAVETPVPSDLQAQRHPTTGHILGYKEVLLENTNLSATTSLSLRRPPGPASQSLWGNPTQYPFWPGGMDEPSITDLHTREEAEEEIDFEKDLLTVPPGFKKGVDFAPKDHPAPVPGLLSLSRLLEPLDLSGGDEDEGEAAGGPRGDNASPSPSGTPLVRASSLEDLVLKEAATVVSTPEPPKPPPQEQWAVPVDVTSPVGDFYRLIPQPAFQWAFEPDVFQKQAILHLEQHDSVFVAAHTSAGKTVVAEYAIALAQKHMTRTIYTSPIKALSNQKFRDFRNTFGDVGLLTGDVQLHPEASCLIMTTEILRSMLYSGSDVIRDLEWVIFDEVHYINDAERGVVWEEVLIMLPEHVSIILLSATVPNALEFADWIGRLKRRQIYVISTVARPVPLEHYLFTGNSPKTQGELFLLLDSRGAFHTQGYYAAVEAKKERMSKHAQTFGAKQPTHQGGPAQDRGVYLSLLASLRTRAQLPVVVFTFSRGRCDEQASGLTSLDLTTSSEKSEIHLFLQRCLARLRGSDRQLPQVLHMSELLRRGLGVHHSGILPILKEIVEMLFSRGLVKVLFATETFAMGVNMPARTVVFDSMRKHDGSTFRDLLPGEYVQMAGRAGRRGLDPTGTVILLCKGRVPEMADLHRMMMGKPSQLQSQFRLTYTMILNLLRVDALRVEDMMKRSFSEFPSRKDSKAHEQALADLTKRLGALEEPDVTGQLADLPEYYSWAEELTETQNMIQRRIMESVNGLKSLSVGRVVVVKNEEHHNAMGVILQVSSNSTSRVFTTLVLCDKPVVSDNPRDKGPATPDVPHPDDLIGFKLFLPEGPCEHTVAKLQPGDVAAISTKVLRVNGEKISEDFSKRQQPKFRKDPPLAAVTTAVQELLRLAQSYPAGPPTLDPINDLQLKDVAVVEGGLRARKLEELIRGAQCVHSPRFPAQYVKLRERMQIQKEMERLRFLLSDQSLLLLPEYHQRVEVLRTLGYVDEAGTVKLAGRVACAMSSHELLLTELMFDNALSALRPEEIAALLSGLVCQSPGDPGDQLPSTLKQGVERVKAVAKRIGEVQVACGLNQTVEEFVGELNLGLVEVVYEWARGMPFSELAGLSGTPEGLVVRCIQRLAEMCRSLRGAARLVGEPVLGAKMETAATLLRRDIVFAASLYTQ

SEQ ID NO: 16946 - protein, 1236 aa, Mus musculus
MMETERLDPLNLPLRALEVGCTGRWELLNVPGPPESTLPHGLPPCAPDLCQEAEQLFLSSPAWLPLHGVEHSARKWQRKTDPWSLLAAVETPVPSDLQAQRHPTTGHILGYKEVLLENTNLSATTSLSLRRPPGPASQSLWGNPTQYPFWPGGMDEPSITDLHTREEAEEEIDFEKDLLTVPPGFKKGVDFAPKAPVPGLLSLSRLLEPLDLSGGDEDEGEAAGGPRGDNASPSPSGTPLVRASSLEDLVLKEAATVVSTPEPPKPPPQEQWAVPVDVTSPVGDFYRLIPQPAFQWAFEPDVFQKQAILHLEQHDSVFVAAHTSAGKTVVAEYAIALAQKHMTRTIYTSPIKALSNQKFRDFRNTFGDVGLLTGDVQLHPEASCLIMTTEILRSMLYSGSDVIRDLEWVIFDEVHYINDAERGVVWEEVLIMLPEHVSIILLSATVPNALEFADWIGRLKRRQIYVISTVARPVPLEHYLFTGNSPKTQGELFLLLDSRGAFHTQGYYAAVEAKKERMSKHAQTFGAKQPTHQGGPAQDRGVYLSLLASLRTRAQLPVVVFTFSRGRCDEQASGLTSLDLTTSSEKSEIHLFLQRCLARLRGSDRQLPQVLHMSELLRRGLGVHHSGILPILKEIVEMLFSRGLVKVLFATETFAMGVNMPARTVVFDSMRKHDGSTFRDLLPGEYVQMAGRAGRRGLDPTGTVILLCKGRVPEMADLHRMMMGKPSQLQSQFRLTYTMILNLLRVDALRVEDMMKRSFSEFPSRKDSKAHEQALADLTKRLGALEEPDVTGQLADLPEYYSWAEELTETQNMIQRRIMESVNGLKSLSVGRVVVVKNEEHHNALGVILQVSSNSTSRVFTTLVLCDKPVVSDNPRDKGPATPDVPHPDDLIGFKLFLPEGPCEHTVAKLQPGDVAAISTKVLRVNGEKISEDFSKRQQPKFRKDPPLAAVTTAVQELLRLAQSYPAGPPTLDPINDLQLKDVAVVEGGLRARKLEELIRGAQCVHSPRFPAQYVKLRERMQIQKEMERLRFLLSDQSLLLLPEYHQRVEVLRTLGYVDEAGTVKLAGRVACAMSSHELLLTELMFDNALSALRPEEIAALLSGLVCQSPGDPGDQLPSTLKQGVERVKAVAKRIGEVQVACGLNQTVEEFVGELNFGLVEVVYEWARGMPFSELAGLSGTPEGLVVRCIQRLAEMCRSLRGAARLVGEPVLGAKMETAATLLRRDIVFAASLYTQ

SEQ ID NO: 16947 - protein, 163 aa, Rattus norvegicus
MSSHELLLTELMFDNALSALRPEEIAALLSGLVCQSPGDPGDQLPSTLKQGVERVKAVAKRIGEVQVACGLNQTVEEFVGELNFGLVEVVYEWARGMPFSELAGLSGTPEGLVVRCIQRLAEMCRSLRGAARLVGEPVLGAKMETAATLLRRDIVFAASLYTQ

SEQ ID NO: 16948 - protein, 122 aa, Rattus norvegicus
MPKLTEQLAGPLRQMQECAKRIAKVSAEAKLEIDEETYLSSFKPHLMDVVYTWATGATFAHICKMTDVFEGSIIRCMRRLEELLRQMCQAAKAIGNTELENKFAEGITKIKRDIVFAASLYL

SEQ ID NO: 16949 - protein, 271 aa, Rattus norvegicus
MSHRADDGHTCDKDRQHCDYQAIGAAGKDRLLRDERDEKGQKSSRRLDQSIMYEAEHNYLLKSLEKNLEIPKDCTYADQKAIDEETLQIVFGRVKCGKKGDTLKKLARRGIGYHHRSMTAKEKQLVEILFRKGFIRVVTATGTLALGINMPCKSVVFAQNSVYLDALNYRQMSGRAGRRGQDLLGDVYFFDIPLPKIGKLIKSKVPELRGQFPLSITLILRLMLLATKADDLEDGKAKVLCPLLRPLSSLLAWLKSARLCFYLAFHAFSVL

SEQ ID NO: 16950 - protein, 1088 aa, Rattus norvegicus
MKSDDPIVTSLVKHKEFDELVHWHSHRPLSDDYDRTKATFDDKKDPYYLSRLQKYHRFQRLYGSSLESVTSKMITTEGPKPKKDCIKSKRTKAHKTKAEIIVRENKKRLIAEEEQKEGQKWSALSFSIEEEMRRNLNSGIKKLEEFLKSCKSSSVKTQAERVGLQACLKAWKEHCRAEGKTTKDFNIAVNMMKRIHSLLEKQSEFLQEADQKLIARCLTYLGFYELADSLCPTQDTADDVKMTKKKYSVGIGPARFQLQYMGHYLIREERKDPDPRVQDFIPDTWQKYSVGIGPARFQLQYMGHYLIREERKDPDPRVQDFIPDTWQRELLDVVDNYESAVIVAPTSSGKTYASYYCMEKVLKESNEGVVVYVAPTKALVNQVAATVQNRYTKNMPGGEALCGVFTRDYRHEALNSQVLITVPACFEILLLAPHRQNWVKRIRYVIFDEVHCLGGEIGAEIWEHLLVMIRCPFLALSATISNPQHLTEWLQSVKRYWKQVDSTMEQGSVSQRNAATRGSYHKDRVQARQSYKVRLVLYGERYNDLEKYLCSVRQGDVCFDHFHPCAALTTDHNLCPENFTQFKNKIVIKKLDARKYEESLKEEFTNWVKNGNEKEAQLVLKKLSPDYHDYSGQMLDFFPCLVEKLRKMEKLPALFFLFSLDTVEECAENVCEFLEEKQEEKRPPKADKEAYIMANKLRKVKKSLEKQKIDEKGQKSSRRLDQSIMYEAEHDYLLKSLEKNLEIPKDCTYADQKAIDEEALQMVFKRVKYERKGDTLKKLARRGIGYHHSSMTNKEKQLVEILFRKGFIRVVTATRTLSLGINMPCKSVVFAQNSVYLDALNYRQMSGRAGRRGQDLLGDVYFFDIPLPKIGKLIKSKVPDLRGQFPLSITLILRLMLLATKADDLEDGKAKGHIDQEGNPTGFAGLVTHLHYHEPSNLVFVSFLVKGLFHKLCQPTSKDSKCFSEDVMEKLVLVLANLFGRRYIPAKFHEAHPKFYQSKVFLDDLPQDFSDALLEYNMQVTRDFASFLLIVSRLADMKQEYQLPLSKIGKYILVLLVSLRELCENEEDNVVLAFEQLSKSFHEKFELV

SEQ ID NO: 16951 - protein, 893 aa, Nostoc sp. PCC 7120
MNYPAPSPELDLGLIFPFDLDQFQKDAIASLNAGRSVVVCAPTGSGKTLVGEYAIYRALTRGKRVFYTTPLKALSNQKLRDFREKFGFEQVGLLTGDASINRDAPILVMTTEIFRNMLYGTPIGQVGISLVDVEAVVLDECHYMNDRQRGTVWEESIIYCPRGVQLVALSATVANSDQLTDWLSRVHGPTDLIYSDFRPVPLEFHYCNPKGLFPLLNDSKTKINPRLANRGKKRQGDRGKNGRPEAPSLIYTLNHLQQRDMLPAIYFIFSRRGCDKAVAEVGDLWLVNNEESQILRRQIDDFLARNPEAGRSGQIAPLYRGVAAHHAGILPAWKVLVEELFQQGLIKVVFATETLAAGINMPARTTVISTLSKRTDTGHRLLNASEFLQMAGRAGRRGMDKQGHVVTVQTPFEGSKEAAYLATSKPDPLVSQFTPSYGMVLNLLQTHTIDEAKELIERSFGQYMATLHLRPDYEEIAALEGELAKLQEQINAVDENDILIYEKLRQRLKVERQLLKTLQEQAQEERQEQIKMLLDFAVLGTLLSLKGQNFKVSTPITAVLVGKTSGSTQSACLVCLGQDNRWYVAATADVVDLYAELPRVDVPPDILPPPELMLKPGQSSRGAKETMAIAQSIPDPQQSLHLSPEVAEQLSRTAAIQAQLEANPLHQSGNVSMVFKARARYVELEAELEEIQAQVEQQSQRYWEEFLNLITILQQFDCLDNLVPTALGQIAAAIRGENELWLGLALASGELNNLDPHHLAATIAALVTETPRPDSRVNFNLSPEIDDAWSRLQKTRRAVLKVQYRHGVALPVGLENRYIGLIALVEQWALGIEWVELCQNTTLDEGDVVRILRRSLDLLSQIPHVPNLPDVLQRNAYRAMQLIDRFPVNEVVE

SEQ ID NO: 16952 - protein, 725 aa, Paramecium bursaria Chlorella virus 1
MSFESTLKHPLDVFQKDAIKSMDNDHSVFVAAHTSSGKTIIAEYAYHISDGTNVIYTAPLKAISNQKYKDFSSKFGADNVGIITGDVVKNETAKLLIMTTEIFRIMVIKRDQRIQNVKWVIFDEVHYINDKSRGSVWEESIILMPDTMRAVFLSATVPNAVEFSNWFSKLKNHPVDVVSTKKRPIPLKYNVIHNSEIKDIETFDKILADSPEEITKDTIKMLYNSKLTPCIIFSCNKKKIDRLAQKLYKSVNIMTTYESKNIRRHFNDLLKKCQVPEDSVYHQKYLEYACEGIGVHHAGVVPYVKEIIEILYCKGIIPVLISTETVAVGVNGPAHSVLFESLFKFDGLNNRLLREHEFIQMAGRAGRRGFDEEGRVFVLHDPAVERGMISKLINGKPETLHSSLKMSANLVLNCIQRNMNIEDIVNDSFDSFCPFVPTEEDRSQVYNYNKRLNKWMDVLSRPDIWRHTKKGYTCTMDSGIAGTFTEISHNGRYKISGEDGNEYYSGVVEILDPERKPLDFKKMKIKDFVSACAITELKKIPFTPKHPDYDKVMEYEQLKETNDHLLREYNEYTQWLANENMMKDGLLTPIGEIGCSITSICPVLGTKLLDDTLKDTDIVMMIAAFFAELDNSSIGNEIGMPYKFYIPKFVNWDLIKAAGMWYEGKDIPEICEELGLFEGNLISVLIQVNNTLNELIAAKPDGTEKLENIQKQHFRGILKTSSLYI

SEQ ID NO: 16953 - protein, 1006 aa, Synechocystis sp. PCC 6803
MKTLAYANPADLFAFPLDDFQQEAIAALDQDQSVVVCAPTGSGKTVVGEYAIYRAIARGKRVFYTTPLKALSNQKIRDFQEKLEKLGLENAAQLVGLITGDTVINADAPVVVMTTEIFRNMLYETPIGEVGTSLEDVETVVFDEVHYISDRGRGTVWEESIIYCPSTIQLVGLSATIGNPEQLTEWINQVRTGVSLKVLRQGEQRNDSPPCVLVNSDFRPVPLTFHYSTRKGLFPLLNEKKTGVNTRLLPKAGNKNTRSGKNRRMRREDCPYPLLVMQQLQERNLLPVIYVIFSRRGCEQAAQSLEDLSLVEPAEQESIQLQLLDFFFGKNPLLRQKLERDLANGLPDLVQAVVAYLDHPQDSEAAQRLLTALAIDPEGMFKLWGWIAQSSPMTRFEQIEPLLRGIAVHHAGILPDMKTLVEKLFEQGLIKVVFATATLSAGINMPARTTVISALSKRTNEGHAMLSPSEFLQIAGRAGRRGMDTEGHVITVQTPFEGANEASYLALAEAEPLKSWFTPSYGMVLNLLQKHDLEEVKSLLERSFAEYLAQFALEPTKVAIAETVKKLSQLDIKLAGIGEKDLRSYEKFRGRLREEQRLLKILEEQAEKERKQQLKDQLKTLAPGQLLYLKGRHVKIHQPRLAVIVAPLAPAHNLPQWCCLGSDNRWYHVTVGDIYAVPIGNLSPAQWQHLTPPPAELLAPGKSVKGDEETLAIAAGLDPQTYPLEPSPELVEQQARVDHVEKLLAVHPLASQKHPGKLLEQFHQRQELRKTLSKRQQEYDRLQSRQSYYWQEFLDLIDILQEMEALEEYTPTLLGEVAATLRGENELWLGLALISGKFNDLEPEQLAAAASALITETPRSDAWTDFKPSPVVLAALRPSNDLFGLLFCLKHPQPPLALWQAMTVADHLQRLNLWDLRRKLIKAQNQRAIAIPLWLEVDFMGLVEQWALGMEWENLCRQTSLDEGDLVRLFRRTVDLLWQIPQVPHLSPRLKRNARIAVQQMKRFPL

SEQ ID NO: 16954 - protein, 601 aa, Sulfolobus islandicus filamentous virus
MVKMSIQLNEFQKKALQSFLMSDKNLLITAPTGTGKSFLAMLMAMETKSRVVYTVPLRALALQLNDDFHNKVAPLVNGYADSVALTSEVYEEDPENLEERVIFTTYEKADAIFRRHYPWTDRIETLIIDEIHNIGDKERGKAIENLIAYAMNEGIRIVAMSATIPDVNKIAEIIDAEIIKTDERPIPLYKAVKIGNKLYFEDGDVIELKEDFIKKMVRKNKVVMIFTSTRKKAEELYMIYDRKFQNKVAFFHAGLDAETKLRLLEETRQGKYNIIVSTTALSQGVNFPFYAVVFDDLKLPIIEYGRFTGWKQITPIEFDQICGRAGRPGYDEEGLCIIEATDIRQAEKLKRTYFNTSYGTITGHHVLEDFLLALISKYIYAKPDRIMEATKHTISFRNISEELVKEKLEELKNAKLIGEDGTGYFVTLYGRAVAESYFDVKDAITYHDVLTKNNVKEEEIINAILENENVLNASKGENVNIIFNSWIKGVDEKTIVKATKNMTLNDLNKLVQTLSWQTYGVYRITKALGKKELADKLRLLFLEIRYGVPASALALVQLPGIGRKRAIELMRNGIHNKTELCSQKEISKKIIGEKMVKVLCK

SEQ ID NO: 16955 - protein, 920 aa, Mycobacterium leprae
MTDLAELARFTAELPFSLDDFQQRACAALERGHGVLVCAPTGAGKTVVGEFAVHLALAAGGKCFYTTPLKALSNQKYTDLTARYGRNRIGLLTGDQSVNGDSPVVVMTTEVLRNMLYADSFALQGLSHVVMDEVHFIADRMRGPVWEEVILHLPDDVRMVSLSATVSNAEEFGGWVQTVRGDTTVVVDEHRPVPLWQHVLVGKRLFDLFDYDSNVDQSPVNPNLLRHIAHCREADRMSDWRNPRRRAGRGSGVRPRFYRSLARPEVIAILDAEGLLPAITFVFSRFGCDAAVQQCLRSPLRLTSEEERAQIAEVIDHRCGDLADADLAVLGYYEWREGLLRGLAAHHAGMLPAFRHAVEELFTAGLVKAVFATETLALGINMPARTVVLERLVKFNGKQHVPLTPGEYTQLTGRAGRRGIDVEGHAVVIWHPSEDTSGPSAVAGLASARTFPLRSSFVPSYNMTINLVHWMSPERAHALLEQSFAQYQADRSVVGLVRGIERCTQVLGDISSELGGPDAPILEYARLRARIAEMERAQSFVFRLQRKQAANDVLAALRRGDIITITHGRHGGLAVVLESARDSSNPRPLVLTEHRWAGRISSADYMGAAAPVGSMTLPKRVEHRQQRVRRDLASALRSAATRLSVPDIGDGVDGDKIGFNDGVLHDPELASLRAQLRRHRSNNAPGLDTQLQQAERYLRIERYNAQLQRKVAAATNSLARTFDRIVGLLIERDFIRGPADDPQVTDDGRLLARIYSESDLLVAECLRTGAWAGLRPAELAAVVSAVLYETRGDDGPGGPVDAEAPTPRLRQALQHTSRLSATLRADEQRHRIALSREPDDGFVGVIYCWARTGDLAAVLAAADASGNGAPLSAGDFVRWCRQVLDLLDQLRNAAPEPDLRATAKRAINDVRRGVVAVDAG

SEQ ID NO: 16956 - protein, 1173 aa, Anopheles gambiae str. PEST
PTWLKEPPPIVEDTEDLLRAFILEPKIPIHEPKPYFEPRHPSFDQLYDIPHAPISTRIVPDRCPETGKVLDFIETQVQNAGSTAKNSMSLQREPTESIDSARGSASYFPFWPGGFDEPESVLAGLVPSPLFETDLKSCPPGFATGVEFEAPPTGTDGARATEDSGKSGMVDLLSAIASEEAFVELLPEGLQTQLSTNDQSTQGTQQEPLPAGIDEEEGLLAVAGELGAGEQVLKISTVTNNALQSAEWAEMLDISKPVDDFYVKIPTMAHRFPFELDIFQKQAILKLEEHSHVFVAAHTSAGKTVVAEYAIALSKKHMTKTIYTSPIKALSNQKYRDFKTTFQDVGLITGDIQIDPTASCLIMTTEILRSMLYCGSDITRDLEYVIFDEVHYITDSDRGHVWEEVLILLPDHVCIVMLSATVPNTIEFANWVGKTKKKRVWVVSTAKRPVPLEHYLYTGFGGKSKDDSFLIVNAQSQFVQDGYRRAKESYEAKQAKSTGRRTNGPYSQRQEQTLWVGLIDHLQKKEKLPVVAFTLSRNRCDNNAEALMSCDLTTAREKYAITSFFQQCLQRLVPADRVLPQVQQIQSCLERGIGIHHSGILPILKEIVEMLFARGLVKILFATETFAMGVNMPARTNLPLDGELKTMILGKPVRLESQFRLTYAMMLYLLRVELVSVENMMLHSFREFDKRQQMPQSKLELNQVQEKMSALSKLSDHLQPLCEFYEAASEYLNLRNELLPKQLCQPKAINELKVGRVVVVTDEHHYNKLGILLSVSVQSHKELKLVVLVLDHCASGKTQPASPETLNRGPLWHQMLSLALPYQTFLPEGVGGHAVLTLAPVNLIELTKHTIKCDANGIIRSWEYRLIPRFRDAPPSQSTIEAVAALAELNATVVQAGSVTGTLELVRFPRDLTNLELTQQLQTAQGRLNRWLPYTGMADFEHEFAVVYDRKQLERKLDELKYQASYESLSLYPDYCRKLQVLQELKYIDDMQQVAMKGRVACEMGQNELMITELVMRNILTDLQPAEIAALLSSLVFQAKSDVTPKLTETLQKAEAQFREVENDIRLVERQYGVTDVCKKEELNFGLTEVVYEWARNKPFAEIMLLTDIKEGIIVRCIQQLNETLCNVKDAARIIGDPVLHSKMEEASNAIKRDIVFAASLYTSSTPIVIGEV

SEQ ID NO: 16957 - protein, 1361 aa, Giardia lamblia ATCC 50803
MIALLGRDENSSPEGGSREATNVDNIREQLQAVLMDQGLLEQTKKLPIVVDVSESATEDPLKKIHHSVVFPHGYEIPRDPANKIYTCEPPAELPVKFPYELDPFQRRAIGALHIGHSVLVAAHTSAGKTTVAEYIIATALAQNQRVVYTTPIKALSNQKYQDLKLAAYTKGSVGIMTGDTTLNRTAGVLVMTTEILRNMLHQGAELLREIGYVIFDEVHYMRNSERGLVWEDCIAMLSSNIQFCFLSATVPNASEFAGWVASLHSIPVHVVYTQYRPVPLMHFLCPVGGDGLYPICSSIDKNKIRHDQVIKAKANLPHDNAQAVARGEEEGTSGHSNKKQQQKAVRDTLHKVMKNLIARDCFPLIVFAFGKKKCETYAMDFISDYFNNGQRATSRPPLQRTYGEEPQALIPQDNQQATQAQPPVIQSLVTPEQTRVIDNIFDAALKCLPEEDRNLRPIVVLRGMLRRGIAVHHSGLLPWAKEIIEILFVEGLVKILYATETFAMGLNLPARAIIFSEFKKFDGLTSRLVTAGEYVQMAGRAGRRGIDKQGMSICMFSTADECDNIVKVIQGTTEPLNSAYRLSFNSVLKLMQIEDTSPEQVIKRSFLQFQQLFRLPRCIDKILALENANAVDKTQLGRLLLSILNVLHRAFGEYEQLAQFFGPDMLQSLANLASWDAQRLYGLLTEYVNLFALKTSYYVDWSRLLSQDSMKQLLVRGRIVHVHADGLDLGWVPVLKVTRLGSDSFVDCLVPCSLGSVPAKYTNASETHLIAFSDTVPSSLSSRGVDKELAHAALINKPYYQEYMSTLQKQDSPADAQDASADESQPPVKRRPLRKVGSKPVEKQKVSHADINDLIYANDSSESITPQNLYEYSFIDPLQPFVRENKASYQMLAPRDVLLSVLTAIDKCGASSKKKQMKGKLHEHLWSEIEATACVIVRVPVRAIRRASGKILKTIPESLSRYDDKSEAMFFYYQMIASLIPSDESHSFPSTLADLMEPHVNLSELAYADVTSEVNDLDCNIKLVEHAITCDNEYGILTRILSSPAHSAPTLHRVLNAVCSPAIYAKISTRMEDTNEQALKEEQLIVYQMVKEYIDNSPHDEDASGQLEVSGMIFSLMLNCMRRDAKKQIFKQYIQEADDLILSSELVKLKNFLRREHFIEEIPGATDSEAAYLLTDKGRVACHVSSANEVILVECLFEAQFTDLTPRVLAGVLASLLGEGTGASGSSKSNQLQMDPKLSQALTKLKQIVSMLLKDCATEDTTLELRCTTVDHIVDDTTAVIAFSWAAGQTFQEILDIDRSQFEGNIVRMFRRLINLVDQLIIAVEVIGDERLKARLTAVHDAIFRDIIKVNSLYVVAEDDV

SEQ ID NO: 16958 - protein, 837 aa, Methanothermobacter thermautotrophicus str. Delta H
MRDIMIVLNRRKRSVDFIPAGNPKKILNTRRKPAYWGRLKIRSTEAGPRISRFTVEKGERETLRKPSEALKILKKQAVILTGRDPEIEDLLSSYGISYRYARVCQHCLHEGYLTVVSSRSSTVHAGQIICSRCVDELIKRELKFAGMDGSTFRNFRRLIRRGVSLDKILEMMSPRFDPLENHELTRYDTVTSESERTPRVPLDKLAVPEKFKRMLKREGNTVLRPVQVLAVDAGLLEGEDLMVVSATASGKTLIAELAGIPRALGGEKFIYLTPLVALANQKYRDFRRRYSPLKLKTAIKVGMSRIRARDELRIPETDVSKADIVVGTYEGMDYILRAGRSGILGDVGVVVIDEIHTLEDEERGSRLKGMIKRIRRLFPDAQIIALSATVKNNLEVASEFGLRLVEYDRRPVPLERHLVFSRGEEDKKNLILRLAEREFSTESEKGFRGQTIVFTNSRRKTRLIADYLTRRGVRAAAYHAGLSYRERQRIERAFASQELAAIVTTAALAAGVDFPASQVVFETLLMGNRWLMPNEFAQMLGRAGRPSYHDRGVVYVLAEVGMEFDGESEEAMALKLLESGPDPVDVNYTEEDVLENILADITSGAIKSESEISPDPSWPLDPEGALDILESHGMIVRDGGLRATGYGVAVSKSFIGVTDAEYIRGHLKGASRRPLDIALELEPFEGAYLSGRLHRALSRAAGARFSMNLMADSTLDILSDGDNLVKLDSKLQEAVLNLQMDFLSCECRDRPFCGCIQRRLSEHIIAERISGRDPVEISRGLLSRYQIQAYPGDIFSWLDTTVRALESIGRIASAFKRRRYLKECSGIVRAIEKGRGA

SEQ ID NO: 16959 - protein, 690 aa, Methanothermobacter thermautotrophicus str. Delta H
MKSLPPEMRQILGDCYPHIRELNPAQRSAIEAGYLESEDNYIIAIPTASGKTLLGIIAALKTVMEGGRVIYTVPLLSIQNEKIKEFRKLEEHGIRVGKDPRTSDIAVMVFESFDSLTRFSWNILREVDLLIVDEFHMIGEYTRGPVIESAITRARTLNPSVRIVALSATLSNMDEIAGWLDARVVEHDYRPVPLHREVLDTEMFGVREKNDVVLKVLERSLEDGSQTLAFVSTRRFTESLASHLADKISGKIPDDMVESFREVAGKVLEVPKSRGSPPTSTCLKLAECLEAGIAFHHAGLFNRQREIIEDEFRDGNILMITATPSLMYGVNLPSRTVVIRDYTRWTSQGPRRIPVFDYEQMSGRAGRPQYDDAGYSYLIARSHDEAMDLEEYYIRGEVERTTSRIIENRDALYRQIIAQVASGLSGTTEELADFFRNTFYGYQMVEGPFSDSFGMDSIQYEVENATEYLMRNRILYPGPEGFSATEFGLLIAKSNYSVETAIKLHQFASEMDEMDIYRLIYEITRTPDMPLISFKGRKSRDPVRDKLMEHGLFLMDVGNEEATAAALIEWINERTEYEIENAFHVYAASTRRSAYEASKIVKFFGKICEIMGVYRHSSQLEILSARLYYGVKEDAIPLVVGVRGLGRVRARKIIKTFGEDLRHVREDELKRIDGIGPKMAGAIRRYCERF

SEQ ID NO: 16960 - protein, 151 aa, Magnetospirillum magnetotacticum
  unsure (1)..(151): unsure at all Xaa locations
GPCSXGDTTINGEAPVVVMTTEVLRNMLYAGSRTLDGLAYVVMDEVHYLADRFRGPVWEEVIIHLPDDVQLVSLSATVSNAEEFGDWLEMVRGDTTVVVSERRPVPLWQHVLVASANPAAGVAHVGAGRAPGAGDPLEGSEPPKQRGQGAQ

SEQ ID NO: 16961 - protein, 730 aa, Methanosarcina acetivorans C2A
MKIESLDLPDEVKRFYENSGIPELYPPQAEAVEKGLLEGKNLLAAIPTASGKTLLAELAMLKSVLAGGKALYIVPLRALASEKFRRFQDFSELGIRVGISTGDYDRRDEGLGINDIIVATSEKTDSLLRNETAWMQEISVVVVDEVHLIDSADRGPTLEVTLAKLRKMNPFCQILALSATVGNADELAAWLDAELVLSEWRPTDLMEGVFFDGTFFCKDKEKLIEQPTKDEAINLVLDTLREGGQCLVFESSRKNCMGFAKKATSAVKKTLSAEDKEKLAGIADEILENSETDTASVLASCVRAGTAFHHAGLTSPLRELVETGFREGYVKLISSTPTLAAGLNLPARRVIIRSYRRYSSDSGMQPIPVLEYKQMAGRAGRPRLDPYGEAVLLAKSYEELLFLFEKYIEAGAEDIWSKLGTENALRTHVLSTISNGFARTKEELMDFLEATFFAYQYSNFGLSVVVDECLNFLRQEGMLEQDSDALISTMFGKLVSRLYIDPLSAALIAKGLREAGTLTELTLLHLVCSTPDMRLMYMRSQDYQDINDFVMAHAEEFSKVPSPFNIVEYEWFLSEVKTSLLLMDWIHEKPENEICLKFGTGEGDIHTTADIAEWIMHVATQLARLLDLKGAKEAAELEKRIHYGAGPELMDLLDIRGIGRVRARKLYGAGFKSTADLAGATPEKVAALVGPKIAERIFRQIGRREAVSEISDSERLEKSSQDGQSTISDF

SEQ ID NO: 16962 - protein, 940 aa, Corynebacterium efficiens YS-314
MSFTPEPGTHLSEFVADLGFDLDDFQIQGCRAVEGDHGVLVCAPTGAGKTIVGEFAVSLALSRGTKCFYTTPIKALSNQKYHDLVAKHGADAVGLLTGDVSINHDAEIVVMTTEVLRNMIYGQSFALERLSHVVMDEIHFLADASRGAVWEEVILNLDESVKIIGLSATVSNSEEFGEWLTTVRGDTQVIVTDHRPVPLDQYMMVQRKVLPLFEPGTDGRLNKQLEATIDRLNSQASEPGRSEYRSGEGFRTRAKGGRDRGRDDGRQNRDTRRSGQVREQDRHRPLGRPEVLRILQGMNMLPAITFIFSRAGCDGALYQCLRSKLILTDQDEAQEIARIIDAGVVGIPEEDLQVLNFKQWRSALMRGFAAHHAGMLPAFRHIVEELFVKGLVRAVFATETLALGINMPARTVVLEKLVKFDGEGHVDLTPGQYTQLTGRAGRRGIDTLGNAVVQWSPAMDPRFVAGLASTRTYPLISTFQPGYNMSVNLLKTIGYEQSLRLLEKSFAQFQADGSVVGDVREIERAERKVEELRAQLDREITATNPAVSPDKTAVESFLEYMELRRELNEEEKTHRRDSMEQRHAEVTTVLSKLQVGEVIAMPGRKRPVLAVVMTPANQARDPRPWVTTESGWSGRIDAESFNNAPIVVGHMRLPRGAAQSPRRFARQVAELFRRGNFKRPNKMRDTARVRPNARINELRTLIRDHEAHHWPDREQLARTAERMLRKQRDLNKLTGTVDRARETLGRTFERILSLLSEMDYVDYADPDNPVITEEGERLAKIHNESDLLVAQCLKRGIWEGLDPAELAGVVSMCTFENRRETGGSPEAVTEAMAEAMNHTERIWSELVDDERRHRLPLTRQPEAGFAMAIHQWAAGAPLGYCMAAAAENGAELTPGDFVRWCRQVIDLLEQVAKTSYSDEMARTARQGIDAIRRGVVAIGS

SEQ ID NO: 16963 - protein, 875 aa, Corynebacterium efficiens YS-314
MVCTGCGGSFRRQACGVPRGDRRWLRWLTVNLSQMLPDLTDVPASLLDESIFDSFLAWTRERGISLYPAQEEASLGILTGDNVILATPTGSGKSMVAIAAHFIALARGQRSFYTAPIKALVSEKFFALCEVFGPENVGMMTGDATVNGRAPIICATAEIVANIALRDGAGAPIDQVVMDEFHYYSEPDRGWAWQVPLLELPRAQFLLMSATLGDTEWLEKDLTSRTGRTTTFVGNTERPVPLEFSYVYTPVHETIENLLKEKKAPVYVVHFTQRDAIERAQAMTSLTVVTKEEKDRIAEEIGDFRFTTTFGRTLSKLVRRGIGVHHAGMLPKYRRLVEKLSQTGLLKVICGTDTLGVGINVPIRTVLMTGLVKFDGSRERVLKSREFHQIAGRAGRAGYDTVGHVVIQAPEHEIENARLRQKAGSDPKKLKKLGLKATRPGEVTWTKSTYERLTTAEPEQLTSQFKVTNSMILNVVARPGDGYEHLRHLLRTNHDTRAKQNRDILTTLELFRGLVNAKIIDKVVDGPDETGRIYALTEDLQRDFALNQPLAPFALAALTLLDKESETYTLDVISVFESILDDPRQILIAQQKARRGEEIEALKAEGVDYSERMAIIEDVTWPKPLEEELEQAFDTFREGHPWAKEFELSPKSVVRDMIEHGMTFSDLVATYGVARSEGVALRYLTDAWRTLRQTLPKEHSTEELEDVIEWLGELVRQVDSSLVDEWAQMADPDAPISRETLERELAFGVEDPTALTANRRAFTIMIRNAMFRLVELFAYEKEEQLTEMTSYLDEQPDFPAAMDAYFDEYADLDTGPAARGPEYFSVEQTGRAWAVRQIIKDPEGDNSFAFVGVVDLDASDEAGEVRFSSLDIQHN

SEQ ID NO: 16964 - protein, 929 aa, Corynebacterium glutamicum ATCC 13032
MSFSAEKGTHLSEFIADLGFDLDEFQIKGCHAVEEDHGVLVCAPTGAGKTIVGEFAVSLALSRGTKCFYTTPIKALSNQKYHDLVAKHGSDAVGLLTGDVSINHDADIVVMTTEVLRNMIYAGSFALERLSHVVMDEIHFLADASRGAVWEEVILNLDDSVNIIGLSATVSNSEEFGEWLTTVRGDTRVIVTDHRPVPLDQYMMVQRKVMPLFEPGTDGRVNKELEATIDRLNSKQSEQGRAAYRSGEGFRARSKGDKQDSRTGKPREQDRHRPLGRPEVLSILKGINMLPAITFIFSRAGCDGALYQCLRSKLVLTDQAESEEIARIVDAGVVGIPEEDLQVLNFKQWRAALMRGFAAHHAGMLPAFRHIVEELFVKGLVRAVFATETLALGINMPARTVVLEKMVKFDGEGHVDLTPGQYTQLTGRAGRRGIDVLGNAVVQWSPALDPRWVAGLASTRTYPLISTFQPGYNMSVNLLKTIGYEPSLRLLEKSFAQFQADGSVVGDVREIERAEAKVAELRAQLNKEIAATNPAVREDQDAVEVFIDYMELRRELNEEEKLNRKQSIEDRNVETVRVLSKLQIGDVIAMPGRKRPVLAVVMTPANQSRDPRPWVTTESGWSGRVDAESFTNPPITIGHMRLPRQAIEEPRRNARRVQELFRREHFKRPNKMREFARVRPNEAVTKLRNAIRDHEAHHWPDREHLARTAERMIRKERDLAKLTGNVDKARETLGRTFERILSLLSEMDYVDYSNPDNPVITDEGERLAKIHSEADLLVAQCLKRGIWDNLDPAELAGVVSMCTFENRRETGGEAQAVTEAMADSMNSVERIWGELVEDERRHRLPITRQPEAGFATAIHQWASGAPLGYCMAAAAENGAELTPGDFVRWCRQVIDLLEQVAKTAYFDETTRNARQAIDAIRRGVVAIGS

SEQ ID NO: 16965 - protein, 889 aa, Thermosynechococcus elongatus BP-1
MSERSPALADFLAQLPFELDAFQAAAIAALDAGRSVVVCAPTGSGKTLIGEYAIHRALTRQQRVFYTTPLKALSNQKWRDFQQQFGAAQVGLLTGDISINRDAPILVMTTEIFRNMLYGTPIGEVGTSLAGVEVVVLDECHYMNDRQRGTVWEESIIYCPKEIQLVALSATIANGEQLTDWIQSVHGDAELIYSDWRPIPLHFYFCNGKGLFPLLDGQRKRLNPKLHGQPELRRRGSKRDFLSIRYVVSQLQQRDMLPAIYFIFSRRGCDQAVQEVLGMNLLTKAEQQALAERVEAFLAQHQDIVAPEMIAPLYQGIAAHHAGVLPVVKTLVETLFQEGLIKLVFATETLAAGINMPARTTVISTLSKRTDSGHRLLTASEFLQMAGRAGRRGMDTVGHVVTLQTPFEGAHEAAFLATAAPDPLMSQFTPSYGMVLNLLQRHTLEEARELVERSFGQYLATLQLTPQRQAIAQLEMELQTVQQRLAGIDRQQLAQYQKLRERLRQDQRLLKILEQQAEQERTQALLPLMMAVPPGTWLHIKSPLREHPPLAAVLCQPVAGSGQLPHWLCLAADGRLRVVGIDDILGVYPDRPPCDPLPPLPEAMKLRRGESYPCHGADHYLGCLPNLPPVLAAPEVAAQAAKIADLEAKLSQLQGSLPQNVHSLLRLVRREERLQTELRDRQQKLHQQSQRHWEQFLALIAALQDFGGLNDLTPTPLGEMAAALRGENELWLALALASGELNDLPPHLLAAAVAALVTETPRSDSWCNYPIPSEVEERLAALSPIRRRLFQVQRRYQIIFPLWYEWDLIGLVEQWALGTPWHELCAQTNLDAGDIVRLLRRTLDFLSQIPHAPHTSPQLRQSAQQARYLLDRFPVNDLLEGVELEVATL

SEQ ID NO: 16966 - protein, 947 aa, Thermobifida fusca
MSTYAARYAEFRRRQKESSPTIEEFQNLYGFDFDDFQIRACKALETGHGVLVAAPTGSGKTVVGEFAVHLALRDGRKCFYTTPIKALSNQKYTDLVRRYGSDKVGLLTGDNSINGEAPVVVMTTEVLRNMLYAGSATLSGLAYVVMDEVHYLADRFRGAVWEEVIIHLPESVQIAALSATVSNAEEFGQWLQQVRGDTSVIVDEKRPVPLWQHMMVGTRIHDLFVEPEGTDTGQEEEKNGRGSRKRRRSRHARQRTVEIEVGGERLHVNPKLIRFAEEDARLTQLAYQRRHPQARARGGAPRPRSRFAPPTRAQIVEQLDREGLLPAITFIFSRAGCDEAVRQCVASGLVLTTPEEAAEIREYAERQCAEIPPADLNVLGYSEWLQALECGIAAHHAGMLPTFKEVVEVLFSRGLIRAVFATETLALGINMPARTVVIEKLDKWNGETHVALTPGEYTQLTGRAGRRGIDVEGHAVVVWQPGTDPEMVAGLAGTRTYPLNSSFQPSYNMAVNLVAQVGRERGRAMLESSFAQFQADRSVVGLVRKLRAQQEALEGYAKAAYDPRGDFMEYAAMRRRLSDLESAAQRNRRTARRKEAERSLRALRTGDIIRIPSGRHAGYAVVLDPGLDKGPLPVPLVLTVNRQVKRVSANDFPIPVEPTGRLRIPKSFSARSAQARRDLASALRSKLETLPTAPIRHRVRDGAPEDPEIAELRARIREHPCHHSEGREDRARWAERYFRLKKETEELERRIESRSHVIARTFDRVCGVLQELDYLEGDTVTEDGRLLSRIYSELDLLAAESLRRGVWDALGPEELAACVSALVYESRRPDEVFARVPSGPVEEALNAMMRLWGELSDIEHRHRVSFLREPDLGFVWPTYRWARGDQLDHILNEAGMPAGDFVRSTKQLIDLLGQIAQAVPEASGVRTTARQAADKLMRGVVAYTSVG

SEQ ID NO: 16967 - protein, 963 aa, Thermobifida fusca
MTDRPGCPRFYQGVPCAAGRKKPTCRPGRVRRSAQAPVLDGPSPPVRRVSPRSPLRGTAPALAPRRTHPDSPDSPGTTLLPACPFPWMAHPLVAPAKALGGIPASFPDSPADTERSGAESRQYGSVSLIDHLPDGTADPDTLFDAFASWAEERGLTLYPHQEEALIEVVSGSNVILNTPTGSGKSLVATGAIFAALARDECSFYTAPIKALVSEKFFDLCEIFGTENVGMMTGDASVNSDAPIVCCTAEVLANIALRDGADADIGTVIMDEFHFYADPDRGWAWQVPLLELPQAQFLLMSATLGDVSRFEEDLTRRTGRDTTVVASAERPVPLYYSYRTTPLHETLEELLESQQAPVYIVHFTQAAAVERAQSLTSINMCSKAEKAAIAKEIGNFRFTTRFGRNLSRYVRHGIGVHHAGMLPKYRRLVERLAQRGLLKVICGTDTLGVGVNVPIRTVLFTALSKYDGSRVRRLTAREFHQIAGRAGRAGFDTVGNVVVQAPEHVVENERALAKAGNDPKKRRKVVRKKPPEGFVGWDEAVFEKLINAQPEPLVSQFKVSHAMLLSVIARPGDCFAAMRRLLTDNHDDPKKQRRHIREAIAIYRSLLDAGIVERLEEPDEEGRTARLTVDLQPDFALNQPLSPFALAAFELLDRDSPHYALDVVSVVESTLDDPRQILAAQLNKARSEELQRLKAEGLDYEERMARLEEVTYPKPLEDLLEHAYETYRRGHPWVGDHPLQVKSVVRDMYERAMTFTDYIGYYELARSEGLVLRYLASAYKALTQTVPEDIKTEELRDLIEWLGEMVRQVDSSLLDEWEQLTNPSQEQDTDAPVETKPKPVTANQRAFRVLVRNEMFRRVELAALRRYAELGELDGEDGWDAEAWEEAMEAYYAEHETLGTGPDARGPHLLLITEHEDHWEVRQIFDDPEGHHDWGITAHVDLTASDEEGRAVVHVVAVDRKDSF

SEQ ID NO: 16968 - protein, 905 aa, Trichodesmium erythraeum IMS101
MSYSTQNSQELALKTLFPFQLDEFQKQAIAALNAGKSVVVCAPTGSGKTLIGEYAIYRALSRGQRVFYTTPLKALSNQKLRDFRKLFGPEKVGLVTGDTSVNREASVLVMTTEIFRNMLYGTHIGEVGASLEKVEAVVLDECHYMNDRQRGTVWEESIIYCPPEIQLLALSATVANSDQLTDWILRVHGPTELIYSDFRPVPLKFNFSNSKGLFSLLNSNQKRINPQLKPKSRQPKTDKKDKKEEPALSTVLSQLQERDMLPAIYFIFSRRGCARAVAEIAQLSNLTLVNPEEAAKLQKLVQKFLQRNPDLGKSQQLEPLTRGIAAHHAGMLPVWKGLVEELFQQGLIKVVFATETLAAGINMPARTTVISSLSKRTDDGHRLLKPSEFLQMAGRAGRRGMDIQGYVVTVQTRFEGVKEAAYLATSGADPLVSQFTPSYGMVLNLLQTHTLQEAKDLVERSFGQYLSTLSLLPERKEIELKEKELKALENKLGIYEDNDWINLEQLLASYEKLRGKVKEEKRLLRILQRQAEETRIREMSLSLSFAILGTVLSLKGKHVPTAKKSTAEPIPAVLVAKVPGSGQSSYSLCLGKDNRWYIVGAMDVMTLQADFPRLAAVDYMEVPEEMGSRLGQCRKGDEISLVLAQQIPAVPLPVDPPEVLAQMQKLAICEAEAEAHPLKEWGNPRTLIKGWRRVEMLRAEIEDRQRELEDKLARHWQEFLHLIEILQYFGCLHGVEPTEVGQACAAIRGDNELWLGLVLMSGSFDELDPHHLATACAGLVTEITRPDSWTRYELSVEVKEAMASLRNLRHQLFQVQHRHQVALPVWLERDLIALVEQWALGVEWEELVNNASLDEGDVVRMLRRTLDFLSQIPHVPCLSDALRRNAHRAMQLIDRFPVNEVVEPE

SEQ ID NO: 16969 - protein, 863 aa, Bifidobacterium longum DJO10A
MARHQHHKGNADSQTLSPSQRYASFQKVQRHRASAAARFAESLPFELDDFQTEANDALEAGSNVLVAAPTGAGKTVVADFAIYLAQERNVKAFYTTPIKALSNQKYHDLVDVYGPDKVGLLTGDTSINSEADIVVMTTEVLRNMLYERSTTLNALRYVILDEVHYLADRFRGPVWEEVIIHLPKTVKIVGLSATVSNVEDFSNWIASVRGDTKLVISEHRPVPLEQHVIVQADEHTEPEVLDLYRRDGNGEQTTKLNAELINRLDQLDRKAARRRGEERPDKRKGFGRGRGGKGAKGHAPKAERHTPRRWAVVDELNFLGMLPGIYFIFSRNGCDQAVEQCINAGLELTTDEEVTKIRRIVDEMVEGQLTQEDLKALQFSKFRFALEEGFASHHAGMIALFRQIVERLFEEGLVKMVFATETLALGINMPARCVVVEKLEKFDGTGHVGLTPGEFTQLTGRAGRRGIDTIGHAIVVDHHGFVPATAAALSSKRVYPLHSSFRPTFNMAVNLLNSSDYETAHVTLDQSFAQWEANESAWQLESQINTLKNALAGYEQAFACEHGDFKQFMTLRMELSDIEKEGRRKLKHEVFLTDQERSRAFQNLDQRIRDLRKAEHEHPCRNCPDLQQHLKWGHRWARETRELQRVTDRYDSRTGSVARQFDRICDILTGLGYLERHVNAAGHIDMTLTEKGSLLRRIYSEHDLELCEALLAGTFDKLDANGLAAVLSSLVYEARRGGDGEPRHYPGGISGSIAIASSKLKGICEDIDILCEDHGLDEMQRPDFGILDIMYEWADGGSLGSCLYGTDMTGGDFVRTAKRLADVLQQIAVAQPLPFDGGERLAGLAHEAADRVNRGVVAYSGVD

SEQ ID NO: 16970 - protein, 884 aa, Bifidobacterium longum DJO10A
MAPPAGGRRRIATEGGSCRRNRPLGRLSIMTGEKEYGSLGRLAPEWDGNERERNLMADDIYERFFGWVEDVKGIEPWPHQEEAIMDLLAGDHVILNTPTGSGKSLVALGMHFAALCTGRRSYYTAPIKALVSEKFFDLVEVFGRDNVGMITGDSHINADAPIICCTAEILANQALREGTHADVGLVAMDEFHYYGDPERGWAWQVPLLTLPQTQFLLMSATLGNVDAIADKLSDLNDTPDVDVIADAPRPVPLSYEYTLDPMEKTVELAFRNGETPIYVVHFSQDAALETAQALASTGVSSKEQRQAIAEAIKGVKFTTAFGKILQRLLRTGVGIHHAGMLPRYRRLVEQLAQQGLLPVICGTDTLGVGINVPIHSVVLTALTKFDGTKMRRLRAREFHQIAGRAGRMGFDTEGLVIAEAPEYEIENQKAIAKAGGDPKKLKKVKRKKAPEGFVTWNQSTFDKLIDAEPETLVPHLKITHSMVLNEVAQGGDARARIDDLIDDSAQTPDQKEHLHQRADEIFQTLFDTEVIETEGRKDGGKDYYMTLDMPDDFALDQPLSPFLLAALELLDPESDTYALDVISMAEATLEDPKQVLRAQERQARDKAMADMKADGLDYDERMDKLQEITYPKPLEDMFEAAFDQYRHDVPWANDYWLSPKSVVRDMVETASDFTGYITRYNIARSEGTLLRYLSDAYRTLARTVPPEKRDEQLEDIISWLRVLVRSIDSSLVDEWENAGDSADQSEAAASLAAPGAKSAVVEDRRGLTVLVRNALFRRVRLMDLDQPDKLGALDKDWGYGVHEWEDVLDDYYDEHEYVGIGAEARSPELFMLDDKHENDEHTWKVRQIIDDSDGDHDWAIEGIVDLDATQDTGEVVFHDYKVSN

SEQ ID NO: 16971 - protein, 863 aa, Bifidobacterium longum NCC2705
MARHQHHKGNADSQTLSPSQRYASFQKVQRHRASAAARFAESLPFELDDFQTEANDALEAGSNVLVAAPTGAGKTVVADFAIYLAQERNVKAFYTTPIKALSNQKYHDLVDVYGPDKVGLLTGDTSINSEADIVVMTTEVLRNMLYERSTTLNALRYVILDEVHYLADRFRGPVWEEVIIHLPKTVKIVGLSATVSNVEDFSNWIASVRGDTKLVISEHRPVPLEQHVIVQADEHTEPEVLDLYRRDGNGEQATKLNAELINRLDQLDRKAARRRGEERPDKRKGFGRDRGGKGAKGHAPKAERHTPRRWAVVDELNFLGMLPGIYFIFSRNGCDQAVEQCINAGLELTTDEEVTKIRRIVDEMVEGQLTQEDLKALQFSKFRFALEEGFASHHAGMIALFRQIVERLFEEGLVKMVFATETLALGINMPARCVVVEKLEKFDGTGHVGLTPGEFTQLTGRAGRRGIDTIGHAIVVDHHGFVPATAAALSSKRVYPLHSSFRPTFNMAVNLLNSSDYETARVTLDQSFAQWEANESAWQLESQINTLKNALAGYEQAFACEHGDFKQFMTLRMELSDIEKEGRRKLKHEVFLTDQERSRAFQNLDQRIRDLRKAEHEHPCRNCPDLQQHLKWGHRWARETRELQRVTDRYDSRTGSVARQFDCICDILTGLGYLERHVNAAGHIDMTLTEKGLLLRRIYSEHDLELCEALLAGTFDKLDANGLAAVLSSLVYEARRGGDSEPRHYPGGISGPIAIASSKLKGICEDIDILCEDHGLDEMQRPDFGILDVMYEWADGGSLGSCLYGTDMTGGDFVRTAKRLADVLQQIAVAQPLPFDGGERLAGLAHEAADRVNRGVVAYSGVD

SEQ ID NO: 16972 - protein, 855 aa, Bifidobacterium longum NCC2705
MTDEKEYGSLGRLAPEWDGDGRERNLTADDIYERFFGWVEDVKGIEPWPHQEEAIMDLLAGDHVILNTPTGSGKSLVALGMHFAALCTGRRSYYTAPIKALVSEKFFDLVEVFGRDNVGMITGDSHINADAPIICCTAEILANQALREGTHADVGLVAMDEFHYYGDPERGWAWQVPLLTLPQTQFLLMSATLGNVDAIADKLSDLNDTPDVDVIADAPRPVPLSYEYTLDPMEKTVELAFRNGETPIYVVHFSQDAALETAQALASTGVSSKEQRQAIAEAIKGVKFTTAFGKILQRLLRTGVGIHHAGMLPRYRRLVEQLAQQGLLPVICGTDTLGVGINVPIHSVVLTALTKFDGTKMRRLRAREFHQIAGRAGRMGFDTEGLVIAEAPEYEIENQKAIAKAGGDPKKLKKVKRKKAPEGFVTWNQSTFDKLIDAEPETLVPHLKITHSMVLNEVAQGGDARARIDDLIDDSAQTPDQKEHLHQRADEIFQTLFDTEVIETEDRKDGGKDYYMTLDMPDDFALDQPLSPFLLAALELLDPESDTYALDVISMAEATLEDPKQVLRAQERQARDKAMADMKADGLDYDERMDKLQEITYPKPLEDMLESAFDQYRHDVPWANDYWLSPKSVVRDMVETASDFTGYITRYNIARSEGTLLRYLSDAYRTLARTVPPEKRDEQLEDIISWLRVLVRSIDSSLVDEWENAGDSADQSEAAASLAAPGAKSAVVEDRRGLTVLVRNALFRRVRLMDLDQPDKLGALDKDWGYGVHEWEDVLDDYYDEHEYVGIGAEARSPELFMLDDKHENDEHTWKVRQIIDDSDGDHDWAIEGIVDLDATQDTGEVVFHDYKVSN

SEQ ID NO: 16973 - protein, 937 aa, Streptomyces avermitilis MA-4680
MTEDLSPAERYAAARQRAAEQATALAPFREMYDFGLDPFQIEACQALEAGKGVLVAAPTGSGKTIVGEFAVHLALQQGKKCFYTTPIKALSNQKYADLARRYGADKVGLLTGDNSVNSDAPVVVMTTEVLRNMLYAGSQTLLGLGYVVMDEVHYLSDRFRGAVWEEVIIHLPESVTLVSLSATVSNAEEFGDWLDTVRGDTQVIVSEHRPVPLFQHVLAGRRMYDLFEEGEGHKKAVNPDLTRLARMEASRPSYQDRKRGRAMREADRERERRQRSRVWTPGRPEVIERLDAEGLLPAITFIFSRAACEAAVQQCLYAGLRLNDEAARDKVRALVEERTASIPTEDLHVLGYYEWLEGLERGIAAHHAGMLPTFKEVVEELFVRGLVKAVFATETLALGINMPARSVVLEKLVKWNGEQHADITPGEYTQLTGRAGRRGIDVEGHAVVLWQRGFSPEHLAGLAGTRTYPLRSSFKPSYNMAVNLVDQFGRHRSRELLETSFAQFQADKSVVGISRQVQRNEEGLEGYKESMTCHLGDFEEYARLRRELKDRETELAKQGAAQRRAEAAVALEKLKPGDVIHVPTGKYAGLALVLDPGLPAGRSNGHRGFEQHDGPRPLVLTAERQVKRLASMDFPVPVEALERMRIPKSFNPRSPQSRRDLASALRTKAGHIVPDRHRKGRSAAADDREIARLRAELRAHPCHGCNDREDHARWAERYYRLMRDTSQLERRIEGRTNTIARTFDRIVALLTELDYLRGDEVTAHGKRLARLYGELDLLASECLRAGVWEGLDPAELAACVSALVYESRVGDDAMAPKLPSGKAKAALGEMVRIWGRLDALEEDFRITQTEGVGQREPDLGFAWAAYMWASGKGLDEVLREAEMPAGDFVRWCKQVIDVLGQISAAAPVRGEGSTVAKNARKAVDELLRGVVAYSSVG

SEQ ID NO: 16974 - protein, 886 aa, Streptomyces avermitilis MA-4680
MALSRPILLLPLPSCPCALTLCRRHSVAFAIFVRASDSPLGCDDRQDGGVTLIDQLPQTADPDALYEAFESWAGERGLTLYPHQEEALIEVVSGANVIVSTPTGSGKSMIAAGAHFAALARDEVTFYTAPIKALVSEKFFELCKLFGTENVGMLTGDASVNADAPVICCTAEVLASIALRDGRQADVGQVVMDEFHFYAEADRGWAWQIPILELPQAQFILMSATHGDVSMFEKDLTRRTGRPTAVVRSATRPVPLSYEYVVTPLTETITELLATKQAPVYIVHFTQAQAVERAQALMSINMCTREEKDKIAELIGNFRFTTKFGRNLSRYVRHGIGVHHAGMLPKYRRLVEKLAQAGLLKVICGTDTLGVGVNVPIRTVLFTALTKYDGTRVRTLRAREFHQIAGRAGRAGFDTAGFVVAQAPEHVVENEKALAKAGDDPKKRRKVVRKKAPEGFVGWTENTFEKLISSDPEPLTSRFRVTHTMLLAVIARPGNAFDAMRHLLEDNHEPRKQQLRHIRRAIAIYRSLLDGGIVEKLDEPDASGRIVRLTVDLQQDFALNQPLSTFALAAFELLDPESPSYALDMVSVVESTLDDPRQILAAQQNKARGEAVAAMKADGVEYEERMERLQDVSYPKPLEELLFHAYDTYRKSHPWVGDHPLSPKSVIRDMYERAMSFTEFVSFYELARTEGIVLRYLASAFKALDHTVPDDLKSEDLEDLIAWLGEMVRQVDSSLLDEWEQLANPEEMTAEEAQEKADQVKPVTANARAFRVLVRNAMFRRVELAALDHVEELGEMDSDSGWDADAWGEAMDKYWDEYEELGTGPDARGPRLLMIEEEPQNGLWRVRQTFADPNGDHDWGISAEVDLAASDAEGRAVVKVTAVGQL

SEQ ID NO: 16975 - protein, 612 aa, Streptomyces avermitilis
MTEDLSPAERYGSSSARCRAGHRARPLPRDVRLRPRPLPDRGLSGTRGGQGGAGGRATGSGKTIVGEFAVHLALQQGKKCFYTTPIKALSNQKYADLARRYGADKVGLLTGDNSVNSDAPVVVMTTEVLRNMLYAGSQTLLGLGYVVMDEVHYLSDRFRGAVWEEVIIHLPESVTLVSLSATVSNAEEFGDWLDTVRGDTQVIVSEHRPVPLFQHVLAGRRMYDLFEEGEGHKKAVNPTSRGWPAWRPAAVVPGPQTRPRHARPTASVTRAAVAGVDAGPARGDRAAGRRRAAARHHVHLQPRRLRGRRPAVPVRGPQAERRGRARQGARLVEERTASIPTEDLHVLGYYEWLEGLERGIAAHHAGMLPTFKEVVEELFVRGLVKAVFATETLALGINMPARSVVLEKLVKWNGEQHADITPGEYTQLTGRAGRRGIGCRGPRGRVVAARFSPEHLAGLAGTRTYLRSSFKPSYNMAVNLVDQFGRHLTRAARDVLRAVPGDKSVVGISRQVQRNEEGLEGYKESMTCHLGDFEEYAAPRTQGPRDRAGQAGRGAAAGQAAVALEKLKPGDVIHVPTASTPDWRSCSTRACPRAAPTAIVASSSTTRRGRWC

SEQ ID NO: 16976 - protein, 1373 aa, Plasmodium falciparum 3D7
MAYNIYSNLSDFWTSDDDEGDEGSNEEEEEKSVSNDKEENNNLKNETYGYDIEDSFNEYNIYKREDMNMMYNDDNSFNKTIDERLHFNINDIMNECSNEISENFTINNLLEKYDINNFIYNDNLLKYCETGVAINDEKPNNEKLILNEDFEFNVKCSFNYVNPPSYGLKINRDVKNEVPQENIKNNNLEMKQVIYNKEEMLVEKKVLDDNENVDMEKIDHPNGKNIDNNKKYDDDDNNNKKYDDDNNNNNNDNNLNEAQILNNNIENTKIKYIRKKWVIEDNESDISNFNKNDLLLNYDFELDDFQKRSIKHLNNFKHVFVAAHTSAGKTLIAEHAIALSIKLQKKAIYTSPIKALSNQKYYEFKNIFKDVGIITGDVKMNVNANCIIMTTEILRNLLYLNDNIINNIHCVIFDEVHYVNDEDRGVIWEESIIMLPHHVQILLLSATVPNYLEFADWVGFTKQKEVISISTKKRPVPLLHYIYVYDSVYLVMDEKNKFYSSAFKEIYVKIREKQEANNKNTKQITSGSNNTSSNLKKNNNYYDSKNKYLTTTNNKENDNTQNNINNNNNNNNNVIGYYEYCKQKRKQKLFANEASMKTEIQKLQTLIKKLDQDNKLPVVLFCFSRIKCETYAKCMPHLNFLDTNKKSKVHLFIKESISKLPKQDRELNQIQSLSKLLEKGIGVHHSGLLPILKEIVEILFSKGLIKVLFATETFAMGINMPTKSVVFTSIYKHDHLRKRILTSSEYTQMSGRAGRRSSDKYGYVYICCCDNIPDQVQLTEMMMQKAVSLKSKFKVTYNMILKLLINKQINIEKMLFSSFLESCRALQIPLFKKDLKRKRKLLQNIKEVQCIYEQENKNAYPPIEQYVQINYRLKYIGLNLHKKLLNTKSSNCFVIGRVMLLNNIHILHSSVYAIYLGCDKSNNKKKNDKVDFAQNSIFFQNNYEDDRSNERFFFLFILPDFMAFEDLPDYIINEADQNMLTSKKKKTTSNNNNNDNNNNNNKSNNNILSNSVSENINLYENYKNVFSKKNNKSDIKIIYHSSFDTDMNKKHFVVCSNVCIENISIITNTVIKLPNVNNAGILNNPKNLLLYTFELDRLIEKNNFEPFVLTKMLKSLKCEFYSVLVNQADYLENLKKSKCYNCNLKEKHYQLICKKNDCLDDIENIERNINAKSLNLYEDLEGKLNVLKHFGFIDDQNNLTVKGKIASYITLTDEITLTQVIFENVLNKLNPAEIAAVLSCFVAPEKKVEESPDLTVNLQEVKAALTNIHSSFEEFYKVIRLRISSEDHWKLCNFKIMFIAYKWTLGVSFAELLEQCELEEGLIVRSILRLDDLCRKVKIAFLYLGNIDLAQKVEKTSHLLRRDIIFTTSLYLQ

SEQ ID NO: 16977 - protein, 1347 aa, Arabidopsis thaliana
MNKVEAGNELGFRVGFSGHGGHLRVEPFYTAERDDALNSLPDFVSPPAFAKETKESIKKHIEEKYLIPRLEPDQFSAEKAENQWDFDWFSRVKMPLQPSLPRSVVVPTWELPFRRQKEDTENGAWEPKSVEVDLSEQMYGDQDSGFFPRMVGPPKDFLRGSVNNRPFRPGGLEDSQSSERVLPEGVSSGQWVQELLNGGPAQTVPPSFKQSLDLGDLMPYPQTWSVYEDHSSHGNASDENSVCRSMSLVYINYFTFNCDHTAGSESPKAEAEPDAKASISNEVSKGLETDVTVLDEILSSAKTAIMSEEAVTGSSDKQLRKEGWATKGDSQDIADRFYELVPDMAIEFPFELDNFQKEAICCLEKGESVFVAAHTSAGKTVVAEYAFALATKHCTRAVYTAPIKTISNQKYRDFCGKFDVGLLTGDVSIRPEASCLIMTTEILRSMLYRGADIIRDIEWVIFDEVHYVNDVERGVVWEEVIIMLPRHINFVLLSATVPNTFEFADWIGRTKQKEIRVTGTTKRPVPLEHCLFYSGELYKVCENEVFLSKGIKDAKDSQKKKNSNAVSVAPKQQMGSSAHQDGSKSQKHEAHSRGKQNKHSSVKDVGKSSYSGNSQNNGAFRRSAASNWLLLINKLSKMSLLPVVVFCFSKNYCDRCADALTGTDLTSSSEKSEIRVFCDKAFSRLKGSDRNLPQVLRLQSLLHRGIGVHHAGLLPIVKEVVEMLFCRGVIKVLFSTETFAMGVNAPARTVVFDALRKFDGKEFRQLLPGEYTQMAGRAGRRGLDKTGTVVVMCRDEVPDESDLRRVIVGSATRLESQFRLTYIMILHLLRVEELKVEDMLKRSFAEFHAQKKLPEKQQLLMIKRSLPTKHIEIDLLIYSSRCIKGEPAIEDYYDMYMEANEYNNKMSEAVMQSPYAQSFLVQGRVVVMKSGMGIDNLLGIVLKGPSNTNRQYVVLVIKSEIPPPEKNMVSIGKKSSDPSQGYFIAPKSKRGFEEEFYTKPSSRKGPVVIKIELPYHGVAAGVGYEVKGFDNKEFLCICDSKIKIDQVRLLEDGNKAAFSQTVQQLLDLKSDGNKFPPALDPVKDLKLKDAELVETYYKWTNLLQKMSMNKCHGCVKLEEHMKLAREIKKHKTDLKDLEFQMSDEALLQMPAFQGRIDVLKNIGCIDDDLVVQIKGRVACEMNSGEELICTVCLFENQFEELEPEEAVAIMSAFVFQQKNTSAPTLTPKLAKAKQRLYDTAIRLGELQAQYNLQIDPEEYAQENLKFGLVEVVYEWAKGTPFAEICELTDVPEGLIVRTIVRLDETCREFKNAAAIMGNSALHKKMDAASNAIKRDIVFAASLYVTGV

SEQ ID NO: 16978 - protein, 476 aa, Glycine max
  unsure (1)..(476): unsure at all Xaa locations
MEMEKEKESLTLGKRREPDLPVTVTETTSMPKKARSSERTCVHEVAVPSGYVSSKDEDLHGTLSNPLHNGPMAKSYPFTLDPFQQVSIACLERNESVLVSAHTSAGKTAVAEYAIAMSFRDKQRVIYTSPLKALSNQKYRELSQEFTDVGLIASDVTPAPNATCLVMTTEILRGMLYRGSEVLKEVAWVIFDEIHYMKDRERGVVWEESIIFLPPAIKMVFLSATMSNATEFAEWICNIHKQPCHVVYTDFRPTPLQHYVFPMGGSGLYLVVDENEQFREDNFLKLQDTFTKQNLGDGKRGGKGAGRGGKGGNASGGSDIYKIVKMIMERKFQPVIIFSFSRRECEQHAMSMSKLDFNSQEEKDTVEHVFQNAVLCLNEEDRNLPAFELMLPLLQRGIAVHHSGLLPVXIKELCRAFFSKEGLGKAPLPPLPXXTFAMGXLNMPAKTVIFTXAVKKWXDGXDSHXRYIXGSGXEYI

SEQ ID NO: 16979 - protein, 325 aa, Glycine max
SEQIVDSFHELVPDMALEFPFELDAFQKEAIYYLEKGESVFVAAHTSAGKTVVAEYAFALASKHCTRAVYTAPIKTISNQKYRDLCGKCPVGLLTGDVSLRPEASCLIMTTEILRSMLYRGADIIRDIEWVIFDEVHYVNDVERGVVWEEVIIMLPRHINIVLLSATVPNTIEFADWIGRTNQKEIRVPGPTKRPVPLEPCLFYSGELSKICESEKFLPQGLKAAKKEASRKKNLTAGGGSGPKPGISPGHDKARVQKRENTSHTKHHGANFYGTGRGYQNNGNGQSNWELRRADASMLLMLINKLSKKSLLPDLIVCELKIFFP

SEQ ID NO: 16980 - protein, 365 aa, Glycine max
  unsure (1)..(365): unsure at all Xaa locations
IFRDNAEGKSKSRPLPPLWPATLNSSSNVTLXXSSSFRFXFPXQQPPLSHSLSFALDPFLFPSNSMLSFKSPTSTLRAFSDAEEDEEDDEEDDEEEDQDHDQDNVSADEYDDVLGEASDDEXPTCSLRTMXXFKWQRVDKLCNEVREFGADLIDVDELASVYDFRIDKFQRQAILAFLRGFSVVVSAPTSSGKTLIAEAAAVATVARGRRIFYTTPLKALSNQKFREFRETFGGSNVGLLTGDSAVNKDAQVLIMTTEILRNMLYQSVGNVSSGSGLVNVDVIVLDEVHYLSDISHGTVWEEIVIYCPKEVKLICLSATVANPDELAGWIGHILIKTYITIVLVMSIKVVECTVLAFCSCKMNQH

SEQ ID NO: 16981 - protein, 163 aa, Glycine max
  unsure (1)..(163): unsure at all Xaa locations
XELISTECLFEKARDELEPEEAVAIMSAFVFQQKNTSEPSLTPKLSEAKHRLYQTAIRLGELQAHFNLPINPAEYAQENLKFGLVEVVYEWAKGTPFADICELTDVPEGLIVRTIVRLDETCREFKNAAAIMGNSALCKKMEIASNAIKRDIVFAASLYITGV

SEQ ID NO: 16982 - protein, 264 aa, Glycine max
  unsure (1)..(264): unsure at all Xaa locations
XKDMDVRDSEIXELVNQVEELEKKLVAHPMHKHXDMDQIKCFERKAEVNHEVQQLXSEMRDSQLQKFREELKNRSRVLKKLGHIDADGVVQLKGRAACLIDTGDELLVTELMFNGTFNDLDHHQVAALASCFIPGDKSTEQIQLRTELARPLQQLQDSARRIAEIQHECKLDINVNEYVDSTVRPFLMDVIYSWSKGANFADVIQMTDIFEGXSIIRSARRLDEFLNQLRAAANAVGEADLEKKFAAASESLRRGIMFANSLYL

SEQ ID NO: 16983 - protein, 156 aa, Glycine max
WIVFDEVHYMRDRERGVVWEESIVLSPKNSRFVFLSATVPNAKEFADWVAKVHQQPCHVVYTDYRPTPLQHYLFPSGGDGLYLVVDEKGKFREDSFQKSLNALIPATEGDKKKENGKWQKGLVLGRSGEESDIFKMVKMIIQRQYDPVILFILAER

SEQ ID NO: 16984 - protein, 370 aa, Glycine max
  unsure (1)..(370): unsure at all Xaa locations
VRFFGSQRVEDMLKRSFAEFHAQKKLPEMQQLLKRKLNQPTKAIECLKGEPTIEEYYDLYLEAETYSNQISEAILQSPSAQQFLNTGRVVIVKSESAQDHLLGVVVETPSPTNKMYIVFVIKPDMPSSVDNASSSGNMQNKSGAFDQGYFVMPKSRRVVVDEYSTSVSARKGKGVITIRLPYSGSACGMGYEVREVDSKEFLCICSSKIKIDRVGLLEDISSSVYSKTVQLLMDLKSDGNKYPPALDPVKDLKLRDVKLVATYHKWTKIIXRRMSQNQCXHGCIKLEEHLKLAKEIKKHKEEVYALQFQMSDEALKQMPDFQGRIDVLKQIGCIDEDLVVQMKGRVACEMNSGEELICTECLFENQMDEL

SEQ ID NO: 16985 - protein, 124 aa, Glycine max
  unsure (1)..(124): unsure at all Xaa locations
XRMPYVSSEFGSRLRQMQECAKRIAKVSAEAKLEIDEETYLSSFKPHLMDVVYTWATGATFAHICKMTDVFEGSIIRCMRRLEELLRQMCQAAKAIGNTELENKFAEGITKIKRDIVFAASLYL

SEQ ID NO: 16986 - protein, 1378 aa, Dictyostelium discoideum
MIELNIDSFLEELNNLENITSTNTTPVNKSNSSIKNNSNNTNVESFDLPNWYVNPTGLSAQPEITPIAPQSSIISPTIPNNCIQLFNFSDKEEILSDIRREYLDFSIESHKLNDDDEQKRQSYLIWPRNIDTDSWDFKLLAERTLSIPCSTVELVIDKIQYSISITNYHEVFLNTEKTSSNSTSLDRPWSNSISKDNFHRGNTSNLPFLPGGIKSPNNNSTNSTNNNNQTPIDWVQFWHSKSLLVKPPGLDNGILDFNENINKQDNKQQQQQQQQQQQQQQQQQQQQEKEKEEEEEVNLRYTLKDLEREIEEERKREEAEEAEVYEDDDQEDDLDIEEEELDELDDIEKTKEEIDDIIKSPPQPTSSSLSTSSSSSSTTLKDKNKIEIEIEEETKRKEEESKKEKQWAFLEQKEITSPLSDLITNPAIEYPFDLDSFQKQAIVHMEQGESVFITAHTSAGKTVIAEYAIAMAAKNMTRAIYTSPIKALSNQKFRDFKNTFNDVGLITGDVSISPSSSCLVLTTEILRSMLYKGADLIRDIEWVIFDEVHYLNDLERGVVWEEVIIMLPPYVKMVFLSATVSNPLEFAQWIGRTKQLPIYVIGTTKRPIPLEHYIHTPSNELFKIVDSNRNFLPSGYNSAYNSLYKTDNNKGGGGGGRGGHNQQQQQRGGSGNNISGWSKLINTLKDKQQLPVIIFSFSKNKCQEYAGSLGQSVNLTQGNEKSQIRVFIEQSLGRLCEDDKSLPQILQMKELLERGIGVHHGGLLPIVKELVEILFSKSLVKVLFATETFAMGVNMPAKTVVYSSTRKHDGITFRDLIPGEYTQMSGRAGRRGLDKVGTVIITYWKDIPEQATIESMILGTPSRLNSQFRLTYNMILNLLRVPDFKVEDMIKRSFSEFSSQKELPGIEKQIEKLQQQQKQLAQVDCILGEPDIDHYYKLFSQAKKYNQQIQNIILNLPNDNHLSIGRVVVLSTSSNIEKEVNDDDDDDDDNNDDDEIFENEKYTIGLILECKSTLIKQYTNTKVDRVFKIFSLKLKIENDIVLCVGNEIITSSGGKEIMKVCNEKLQLKQSDLKSILAGAESGGESEILINSLEQQLLRLIEEYPLPLGPKSIDPIKQLKLKDVDFVSTYDHLQSIEKLIPESKCHKCPRLHDHYEQTEKRYQLQYAIRDAKYTASDENLKLMPQFNIRLDILHELGYIDDENTVTLKGRVSREINTCEDLVITELIFENAFINLEPSEVVSVLSCLIFQEKDAVQPSLTPRLEEAKQNLIKTAEKTYKVESDKGLDVVPDDKLETTLKFGLMQVVYEWARGTPFNDICTLTNVLEGSIVRAITRIGETCQEVRNAARVIGDTKLLQKMEEAMRLIKRDIVFTSSLYVN

SEQ ID NO: 16987 - protein, 319 aa, Oryza sativa
  unsure (1)..(319): unsure at all Xaa locations
SSRNLSRSCIHEVAVPKGYAAAKDEAVHGTLSSPAFHGEMAKAYPFQLDPFQSVSIACLERNESVLVSAHTSAGKTAIAEYAIAMSFRDKQRVIYTSPLKALSNQKYRELSQEFSDVGLMTGDVTLQPNATCLVMTTEILRAMLYRGSEVIKEVAWVIFDEIHYMKDRERGVVWEESIIFLPPAIKMVFLSATMSNATEFAEWICNLHKQPCHVVYTDFRPTPLQHYVFPIGGSGLYLVVDEDGQFREDNFXKLQDTFTKQSNQVDGRKGGGPKASGRIAKGESASGNSDIYRIVKMIMERKFQPVXXXSXSRXSXEGQ

SEQ ID NO: 16988 - protein, 259 aa, Oryza sativa
  unsure (1)..(259): unsure at all Xaa locations
XKPVXNFSFSRRECEHHAMSMSKLDFNTDEEKDNIEQVFSSAILCLSEEDRGLPAIELMLPLLKRGIAVHHSGLLPLIKELVELLFQEGLVKALFATETFAMGLNMPAKTVVFTSVKKWDGDTNRYIASGEYIQMSGRAGRRGKDIRGICVIMIDEKMEMSVIKDMVLGKPAPLVSTFRLSYYTILNLMSRVEGQFTAEHVIRNSFHQFQYEKALPEVVQRLHSLENEATLLDSSGETDLAEYHKLGLDISELEKKKKX

SEQ ID NO: 16989 - protein, 180 aa, Oryza sativa
  unsure (1)..(180): unsure at all Xaa locations
XVPLIRDTLSQLWEDDMLPAIWFIFSRRGCDAAVEYLEDCRLLHDCEASEVELELKRFRMQYPDAIRESAVKGLLRGVAAHHAGCLPLWKSFIEELFQRGLVKVVFATETLAAGINMPARTSVISSLSKRIDAGRQLLTPNELFQMAGRAGRRGIDTVGHSVLVQTTYEGPEECCDVIFX

SEQ ID NO: 16990 - protein, 440 aa, Oryza sativa
  unsure (1)..(440): unsure at all Xaa locations
XNMENEATLLDSSGETDLAEYHKLGLDISELEKKIMSEMIRPERALLYLVPGRLVKVRDGSTDWGWGVVVNVVKNGTLPLALSASRGNNYIVDTLLHCSSSSNENGSRSKPLPPRPGEKGEMHVVPVPLPLLSGLSSVRINIPPDLRPPEARQNILFAVQELGKRYPQGLPKLDPIKDMGLQEPELVELVHKLDDLEQKLCSHPLHKSDQSEQQLSWYQRKAELNHEIQMLKSKMRDSQLQKFRDELRNRSRVLKMLGHIDADGVLQLKGRAACLIDTGDELLITELMFNGTFNDLDHHQVASLASCFIPCEKSSEQIRLRSELSTPMMQLQEAARKIAEVQKECKLEVNVEEYVESTCRPYLMXDVIYCWSKGATFGEVIEMTDIFEGSIIRLARRLDEFLNQLKAAAQAVGEVNLENKFGAASDSLRRGIMFANSLYL

SEQ ID NO: 16991 - protein, 285 aa, Triticum aestivum
  unsure (1)..(285): unsure at all Xaa locations
GPIEEMEEVENSSKRKAPELGSEDSSAAAVLDGQQSLPGSAAKRPNLARSCIHEVAAPNGYDLSKDEAVHGTLSNPVFNGDMAKTYPFQLDPFQTVSIACLERNESVLVSAHTSAGKTAIAEYAIAMSFRDKQRVIYTSPLKALSNQKYRELTHEFSDVGLMTGXDVTLQPNATCLVMTTEILRAMLYRGSEVIKEVGWVIFDEIHYMKDRERGVVWEESIVFLPPAIKMVFLSATMSNATEFAEWICNLHKQPCHEEYTDFRPTPLQHYVFPIGGSSLYLVVDX

SEQ ID NO: 16992 - protein, 351 aa, Triticum aestivum
PRVRVFPAGGDGLYLVVDENGKFREDSFQKSLNVLAPATGSDKKRENGKRQKGLVSAGKTNEESDIFKMVKMIIQRQYDPVILFSFSKRECEFLAMQMAKMDLNGDDEKVNIETIFWSAMDLLSDDDKKLPQVSNMLPLLKRGIGVHHSGLLPILKEVIEILFQEGLIKCLFATETFSIGLNMPAKTVVFTNVRKFDGDRFRWLSSGEYIQMSGRAGRRGIDQRGICILMVDEKMEPSTAKMMLKGGADSLNSAFHLSYNMLLNQLRSEDGDPEKLLRHSFYQFQADRALPDLEKQVRELEIERSSMVIEDEESVKDYYDLLQQYRTLKKDVRDIVLSPKYILPFLQSEGL

SEQ ID NO: 16993 - protein, 482 aa, Triticum aestivum
  unsure (1)..(482): unsure at all Xaa locations
XVRGRVGGRVGDNRXCIKGEPSIEEYYDMFIEAEEHREFVPPAIMQLHTTQQFLAPGRLVVVKSKSDDDHLLGVIVKNPSATLKQYVVLVLTGDCTSSALAPNLSSQNEKGPGDSQGYFITPKGKRGMDDDFFSSSRTRKSSGVINIKLPYTGDASGMGFEVRAVENKEIISICTSKIKIDQVGLLEDISKTAYAKTVQMLIKEQTDGKYPPALDAIKDLKMKDMDQVKRYHAHNNLLEQMSKNKCHGCIKLKERKSMMKDQKVHKDELDQLKYQMSDEALQQMPQFQGRIDVLKEIHYIDSDLVVQLKGRVACEMNSGEELISTECLFENQLDELEPEEAVAIMSAFVFQQRNASEPSLTPKLADAKKRLYDTAINLGQLQKRHEVPVDPEEYARDNLKFGLVEVVYEWAKGTPFADICELTDVSEGLIVRTIVRLDETCREFRNAASIMGNSALYKKMEIASNAIKRDIVFAASLYVTGI

SEQ ID NO: 16994 - protein, 155 aa, Triticum aestivum
  unsure (1)..(155): unsure at all Xaa locations
XVKMIMERKFQPVIIFSFSRRECEHHAMSMSKLDFNTEEEKDSIEQVFRSAIFCLSEEDRGLPAIELMLPLLKRGIAVHHSGLLPIIKELVELLFQEGLVKALFATETFAMGLNMPAKTVVFTSVKKWDGDSNRFIGSGEYIQMSGRAGRRGXDX

SEQ ID NO: 16995 - protein, 103 aa, Triticum aestivum
  unsure (1)..(103): unsure at all Xaa locations
XSLRNQQRVIYTSPIKALSNQKYREFKEEFSDVGLMTGDVTIEPNASCLVMTTEIWRSMQYKGSEVMREVAWVIFDEVHYMRDRERGVVWEESIVMAPKNSRF

SEQ ID NO: 16996 - protein, 320 aa, Triticum aestivum
  unsure (1)..(320): unsure at all Xaa locations
MHVVPVPLPLLSGLSSVRISIPTDLRPPEARQNILFAVQELGKRYPQGLPKLHPITDMGIEEPELXVDLVHKLEDLEQKLCSHPLHKSESEQQLSWYQRKAELNHEIQQLKSKMRDSQLQKFRDELKNRSRVLKMLGHIDADGVLQLKGRAACLIDTGDELLVTELMFNGAFNDLGHHQVAAVGSCFVPVXEKSSEQIRLRNELCKPRPXQLSEAARKIAEVQQECKLDVNVEEYVESTCKPYLMDVIYCWSKGATFGEVIEMTDIFEGSIIRLVRRLDEFLNQLKAAAEAVGEVNLEKKFGLASESLRRGIMFANSLYL

SEQ ID NO: 16997 - protein, 100 aa, Triticum aestivum
  unsure (1)..(100): unsure at all Xaa locations
RXLQIECKIQIDVESFVNSFRPDVMEAVYSWARGSKFHQIMEMTQVFEGSLIRAIRRLEEVLQQLILASQSIGETQLEAKLEEAVSKIKRDIVFAASLYL

SEQ ID NO: 16998 - protein, 1213 aa, Schizosaccharomyces pombe
MSSKLVDAINEVAVSNKDKIELDGIKDDSFDGHLSITEATYDVDTFLKPSPALSKDWIRKLQKKWDREITYKGLYEYPETLARTQIRFQRHGLEGKIMGYKEVPELIEDLNSKNSSSFLRKPSSKNEFVRGSTSNIPFLADDSDVDAIAGEPSVKMALYGEDGLLQVPPGFSRGLSMTATSTTDNLNDEFDPEKWDTKKVKSSNRNFVTIHELNEHLKNVNSKHSEIDDLLPDKRSIVSLPPSTLNLHKQPDYAHVVDSSAPIENFQQLVPEMALDFPFELDNFQKEAIYHLEMGDSVFVAAHTSAGKTVVAEYAIALAQKHMTKAIYTSPIKALSNQKFRDFKHKFEDVGILTGDVQVNPEGSCLLMTTEILRSMLYRGADLIRDVEFVIFDEVHYVNDLERGVVWEEVIIMLPPHVTLILLSATVPNTKEFASWVGRTKKKNIYVISTLKRPVPLEHYLWVKQNMFKIVDQHGRFLMDGYKSANDALKKPDKPVIAKDNKNSARGRGAARGRGVQTNMMRGRGSAKSVERRDANTWVHLIGHLHKQNLLPVIVFVFSKKRCEEYVDTLTNRDLNNHQEKSEVHVVIEKAVARLKKEDRLLPQIGRMREMLSRGLAVHHGGLLPIIKEIVEILFQRGLVKVLFATETFAMGVNMPAKSVVFSGTQKHDGRNFRDLLPGEYTQCSGRAGRRGLDVTGTVIILSRSELPDTASLRHMIMGPSSKLISQFRLTYNMILNLLRVETLRIEDMIKRSFSENVNQTLVPQHEEKIKSFEEKLSALKKEMSDVDLKEIKSCLLSSESFKEYTKKMHFRAITTANGKRIFKDGRVIVFQQLDFTRTVGVLLGTSIRTNASDCTLEVAYLNPQNNLKRPSDLLAFADAFNDVYDNAIFDESNQFKYGLINLSGIERVCNTILRIDSGGIRDRRGGAFRKLSEQFASIKKFSDLLFEEVNWSKVRDFEFCEAFEKRNFLQNKLSGNPIISTPNFLTHFALAYQEYELESNIDNLSSYISDQNLELLPDYEQRIKVLQELGYIDAERTVLLKGRVACEINSTSELVLTELILENSLADFSCEETIALLSAFVFDEKTEVEPTISPHLQKGKEMILSVAEKVNQIQEHYQVLYFNEGNDFESQPRFGLMEVCYEWARGMSFNRITDLTDVLEGSIVRTIIRLDEVLRECRGAARVVGDSSMYTKMEECQNLIRRNIVFCPSLYM

SEQ ID NO: 16999 - protein, 688 aa, Desulfitobacterium hafniense
KALSNQKFKDYKQLFGVDQVGILTGDVVLNSEAPLLIMTTEIFRNQVITNDPSLESVSYIIFDEIHWLNDEERGTVWEESIILAPPHMKLLGLSATIANAQQLVDWIGTIRQEDVALIQENRRIVPLEYYYFSRDTGLVNYEKLWKYYRQQIQSAPPTEGSLFAPTNHLDLIKVIQKQYLPALYFVFSRKQCADKASELAYLTNYLNPQEKRQVEDAFLEHFGPESDWSPSTRLLRRLAVKGIAFHHAGLMPSQKVLVEELFLKRLVHVLYCTETFSVGINYPVRSVCFDTLNKFDGRNFRPLANHEFFQMSGRAGRRGLDERGYSFALVDLNYMEKSPPPRFNINRLEPLTSQFKLSYNTVLNLQATLSYEQIQIYFQKSFAAHSNLHTHGQLIAELAQLEEQFNGKGEHVCRHTDSYACPVKYLPKKKELDRLKRAYQALGPRRQNRVYGREMARKIKNWEKLLATTPQKCPNAKLALCEEESKQRRKLQQRMIEIRKDLKTLPDQNFFFNEFQFKKNQLIQMGYIREDELLPRGECACHIYVQELLVTELIFSGIMETLDDDQLNALLSAIDFEARKNDYFQRLPVLDWTPLQDLVRYIQSVCGPESVRYDPRVAVIVYSWSQGVSFAEVQRLSNLDEGDIISVIRRTIDLLRQMRDAVKEPALLQRLKLCMDKLDRDEAAVLAL

SEQ ID NO: 17000 - protein, 1294 aa, Neurospora crassa
MAYDLNEAMAKLHFDDDAENGDGTTSFDPIDDILFERIPPSELRHGEATDPEAHRVELEKKYLTPSTTFSTEWLNRLQQRWDTPVDHSLLFRIAPTQTRTVTRFQRHGLEGRVTGYRNVTVPASHATAKTSTSMMRKPASKSEFVRGGAGFFPFAPGGLDGIESAAALEDQLRKDAASDEGESKKKLERVITLAEGGLLEVAPGMSRGIDMSKRKKTADAESEKQAKEVEDVLGQEPEDAPDGEGERDEVNGVKREESEDNQDDLEDIDAILPVEFPALEPRGTLAASSARKAGREWAHMVDIRREIPNFRELVPDMAREWPFELDTFQKEAVYHLENGDSVFVAAHTSAGKTVVAEYAIALAAKHMTKAIYTSPIKALSNQKFRDFRQTFDEVGILTGDVQINPEASCLIMTTEILRSMLYRGADLIRDVEFVIFDEVHYVNDYERGVVWEEVIIMLPEHVSLILLSATVPNTYEFASWVGRTKQKDIYVISTPKRPVPLEHYLWAGKKIHKIVDSEKKFIETGWKEANLAIQGKDKPPKAIEASTGPARGGGNQRGRGGAQRGANQPRGGARGGGQQRGRGGPPRASHTPGHMGRTGRPGGFTSAAQDKNLWVHLVQFLKKDNLLPACIFVFSKKRCEENADALSNQDFCTAQEKSHIHMIIERSIARLKPEDRVLPQIIRLRELLSRGIAVHHGGLLPIVKEMVEILFAETLVKVLFATETFAMGLNLPTRTVVFSGYRKHDGHQFRNLLPGEYTQMAGRAGRRGLDTVGSVIIVPPGGDEAPPVTDLRQMILGEPSKLRSQFRLTYNMILNLLRVEALKIEEMIKRSFSEHATQQLLPEHEKAVKLSEADLAKIKRDSCPICDVHMDECHQAGEDFKVATEELYRALLAIPVGRKLFTPGRLIVYMKEGVRTPGILLAEGPSKAGTAANPTLHVLEIKTGRDLRNDTDLLPFTPTLAKWFTPLPAHKKNIYTKTVHIPLSDVVCLTKHITKSIVPELFDGGDGYTKAKEALHQICKSWSAPIWDEMDLSRIKSLSIHEIITRRRDAEIKCTKSSAVDCDLFLKHYAMCHDQWLIKTKIDELRQSLSNQNLQLLPDYEQRIQVLKDLSFIDDASRIQLKGKVACEIHSGDELVLTELILENVLADYEPAEIAALLSAFVFQEKTDMVPNLTSNLERGQKTIIELSEKVNAVQTLHQVILSSDEGSDFASKPRFGLMEVVYEWARGMSFKNITNLTDVLEGTIVRTISRLDETCREVKNAARIIGDPELYQKMATTQELIKRDITAVASLYM

SEQ ID NO: 17001 - protein, 719 aa, Guillardia theta
MDIRCSENVFITFQIIIFNLNNLFIYCTCYNKSILFRKLKNFFKKLLSNLKYNFKLDNFQLICLNLMYFNVDIFVAAHTSSGKTLVGEQVIFSTLKLNKRVIYLSPIKALSNQKFEDFKNIFYNVGIITGDQIINPDANCVIMTTEIFRLYILNNSNWLKNINYIIIDEAHFIFDETRGFVWEEIIIITPGYINIIYLSATISNLMEMSEWIFITRKKILFTIKTDRRIIPLVNYIYLSKIDKIAKLDFFLKNKNLIFNYKKGIKINFRKNSIQDFNQLIRLLKNKNLLPLIYFIFNKKKCILLSKNFMKFSFLSIFEKNILNRLLEMIGKKKKFSIISHELDSYKNFWILLLNGIAVHNSDISIVSKKLIEILFQVNLIKILFATETFSIGLNMPAKTVVFHTLKKFDGNKIRKLRKSEFIQMSGRAGRRGIDHKGFIFTIYRNNNDFDLLNSIINKTDPNPNSIYKLSVYISLKLSCLDNKEKINYFSHLISSYKKDKNSKIFYRNSYVIIKRKNQNLNLFSGNNFSYLFFLFTDLFRYFNNYSKISLQYAFEVTSFCKRKIYRPIYLNEKFFLKIHKFLIFNKTLVMNLIIKLISSSIIYNHSKLTQKNKFFFFKMLNLEYYLNNIFDLKNKNSFLLQFEKISKSLKNMGLIGSNQRLNKKAEVCIKSRLDENLILLELIYNGFFLKKPIEVIVSILSNFELHLGKKKTSILCFPS

SEQ ID NO: 17002 - protein, 1770 aa, Leishmania major
MSSHYRELNQLFVDANGQPDFDATVEISASLPIKQLFQERSLLCPSSSNSEATAASNASPSTVKPVHETTALLRTCNAVLRWAAAEKAGQDQGGAAVAARAAAVGQIDSLQSPDECRMAWKFLATFAGQPAALVCIDKALTEVAVDFHYAMARPRQFDMFVHLSAMEKFFIDGDSLLMAALSSPHVDWDLMQPLHVLHNAQVLLRGLQSRGGHFHIVFFRHTAWFWEPTPQKLFIREALRETLTAVAATNPDSRLVVDTFDSFHSEEFAAYVSKYEPEFLLMSDGEQLGHETELMHLFHNHTEEELLRFEKEGGIGEEGTPASAASATPLTDDEKLELKQRITEDQTMELKRPYRSLVDDESHGDTVAFYYHCFLTWATARRIKVAYSSRIITRENAVVVFAVTVSSGNFARSLVLEPNSTKLAAALERAVPLPTLSDASLALTKDGQLSRREQVVSAAVHAYLHAGDSTPPRTEQQRQLCQVMVTTAYCTALVSAELRAQRSVTSPVVAAFLNEMAPYLLQAFQHCDCATGRGTEFDVYDGHLITIMAHLLRTTPAEQLLDEDGITDVNLSWQDVVGDESAIITGGALSALPDVILAEPKKAMKYPHLTHDLIDQLARAFRVEGHVSNRPYPATLGNANELGGWIVSQPFDELNDVVDAYVERESQRNVTERERRKQLAMEAAFVTDAAQQAESMGIRGFTAGTLAVVCSDSDEDEAAAATDGAAGTSTGKVAKKVKQQHSGQKNKKARSREDIIREEANLRDANKTVQDWTQQVAELCKKTDQASRLTDVADSIGLLTAAITRMTGTSFGRNFDPGEVLKDGSAVPLQLTMWRLLVDASGMREAELAFTITDDDADRSPAADKKRKKSAKDKRATNLYAFGLIADLVEENITNAKSGSHGSDDWGKLERLRKVKKDFTVYDATSYLNWVYLTYVQLHFQCKLMTRVVRLQLMQWKNERERARQAQEAPNINVGVPLFLYCHHKVLACIRDNGVAISTDDLDAVRSALAHFDFPASYYEKVDGAIAKWQNSAVSVLPPSHRPRQKACFETPEMMQLMTMGHLLERPVIPTKDYRVVFNPDGWQRELLDIVDNRGSAVVCAPTSAGKTFISYYCMYSALKTSNTKVVVYVAPNRALINQAVADVCARYGSKKYSFPGRNVYGVHGGADYHRYVDSCQVLVTLPEVLETLLLSPKYKEWAKRLDYVILDEIHTMESSGNGDVWERVLALLPCPFVALSATLGETQQLCGWLNRVQQRLEAQQPEAAKRDFTVHDIPSSGSIQRWNDIKKYMYLPPPGYHPQLKKLTAKYPNRYIHDLHPLSILTLEQLQSGFPPDITLVPSEVVQLYQKMCTLFTEHVFAKWSKVAIVQAMKAQLSMLLPETYFQQEIYITQQRARQYEADVKNAFAYWVYLNKGCDADGLETLSEGEVVAFNTDMRELCETILQSFSQRLREDEAQLDKYATDAALKPEGRPVDTSAAEAEATASDTATAATTAIAQPRKAFFPESKEFIADNIISVLRELNSRDMGPTIVFTFEGEDCDDLTKAIIARLEDAEAAYRQTEEFAQYKATMERKAAAAEAARRQRESTLKQKKLTTDDGGEVDRADRDVDNNMNDDEDYVVPDVLPEFTFIGQYCTVDPIVVKEAVEECIKRGDTLCARAIQRGVGIHHAGVKGKLRRMMEILFRGRHCGVICATETLALGVHSPCRSVVLAGDHVLLNTTQFRQMMGRAGRRGLDYLGHLIFLSVSMKKITRLMTSSMTVIKGNVQVDPI

SEQ ID NO: 17003 - protein, 2211 aa, Leishmania major
MSSHYRELNQLFVDANGQPDFDATVEISASLPIKQLFQERSLLCPSSSNSEATAASNASPSTVKPVHETTALLRTCNAVLRWAAAEKAGQDQGGAAVAARAAAVGQIDSLQSPDECRMAWKFLATFAGQPAALVCIDKALTEVAVDFHYAMARPRQFDMFVHLSAMEKFFIDGDSLLMAALSSPHVDWDLMQPLHVLHNAQVLLRGLQSRGGHFHIVFFRHTAWFWEPTPQKLFIREALRETLTAVAATNPDSRLVVDTFDSFHSEEFAAYVSKYEPEFLLMSDGEQLGHETELMHLFHNHTEEELLRFEKEGGIGEEGTPASAASATPLTDDEKLELKQRITEDQTMELKRPYRSLVDDESHGDTVAFYYHCFLTWATARRIKVAYSSRIITRENAVVVFAVTVSSGNFARSLVLEPNSTKLAAALERAVPLPTLSDASLALTKDGQLSRREQVVSAAVHAYLHAGDSTPPRTEQQRQLCQVMVTTAYCTALVSAELRAQRSVTSPVVAAFLNEMAPYLLQAFQHCDCATGRGTEFDVYDGHLITIMAHLLRTTPAEQLLDEDGITDVNLSWQDVVGDESAIITGGALSALPDVILAEPKKAMKYPHLTHDLIDQLARAFRVEGHVSNRPYPATLGNANELGGWIVSQPFDELNDVVDAYVERESQRNVTERERRKQLAMEAAFVTDAAQQAESMGIRGFTAGTLAVVCSDSDEDEAAAATDGAAGTSAGKVAKKVKQQHSGQKNKKARSREDIIREEANLRDANKTVQDWTQQVAELCKKTDQASRLTDVADSIGLLTAAITRMTGTSFGRNFDPGEVLKDGSAVPLQLTMWRLLVDASGMREAELAFTITDDDADRSPAADKKRKKSAKDKRATNLYAFGLIADLVEENITNAKSGSHGSDDWGKLERLRKVKKDFTVYDATSYLNWVYLTYVQLHFQCKLMTRVVRLQLMQWKNERERARQAQEAPNINVGVPLFLYCHHKVLACIRDNGVAISTDDLDAVRSALAHFDFPASYYEKVDGAIAKWQNSAVSVLPPSHRPRQKACFETPEMMQLMTMGHLLERPVIPTKDYRVVFNPDGWQRELLDIVDNRGSAVVCAPTSAGKTFISYYCMYSALKTSNTKVVVYVAPNRALINQAVADVCARYGSKKYSFPGRNVYGVHGGADYHRYVDSCQVLVTLPEVLETLLLSPKYKEWAKRLDYVILDEIHTMESSGNGDVWERVLALLPCPFVALSATLGETQQLCGWLNRVQQRLEAQQPEAAKRDFTVHDIPSSGSIQRWNDIKKYMYLPPPGYHPQLKKLTAKYPNRYIHDLHPLSILTLEQLQSGFPPDITLVPSEVVQLYQKMCTLFTEHVFAKWSKVAIVQAMKAQLSMLLPETYFQQEIYITQQRARQYEADVKNAFAYWVYLNKGCDADGLETLSEGEVVAFNTDMRELCETILQSFSQRLREDEAQLDKYATDAALKPEGRPVDTSAAEAEATASDTATAATTAIAQPRKAFFPESKEFIADNIISVLRELNSRDMGPTIVFTFEGEDCDDLTKAIIARLEDAEAAYRQTEEFAQYKATMERKAAAAEAARRQRESTLKQKKLTTDDGGEVDRADRDVDNNMNDDEDYVVPDVLPEFTFIGQYCTVDPIVVKEAVEECIKRGDTLCARAIQRGVGIHHAGVKGKLRRMMEILFRGRHCGVICATETLALGVHSPCRSVVLAGDHVLLNTTQFRQMMGRAGRRGLDYLGHLIFLSVSMKKITRLMTSSMTVIKGNVQVDPITQLRLLQLYDYARHRDLKGAEEWSRRALGMAERLYVNPLFFAGRAAMENGNMESFTVEFAQMLLGFLHREGLHFKDRPSSLGSLLVDAMYVFRNAQVGVEGFAFISMITRKVFAKARLARRFRYLAPSDDAVVQEAKAELLAYLFSVNKVCGVPLELHRSALSDPAVIELWSGRRVAKQHRVVLAPLDVCSPATKPFSYVSVFRMISAFYTYLASTLKEPADTRLPYMCAKTKKKHCIFGGTSDMPLMAKLKETAEPYAARDPFVAISGCGDHFVHSEDLVTTLRRGLFCDRRMLPVLDLTDGCRHDGAQVLINACITDFVRCKAQIDSVRSNFRFTLLEELNGLSQSESYAVLNQTERLLSNISGLTRDDKYTPLQVLSALYPERERGENVAEEDLKFYAGTLGVMDFASQLHELRPHIDKELAMVQWMARIAEMRRARK

SEQ ID NO: 17004 - protein, 1350 aa, Plasmodium falciparum
MSNNIDDLFDVFEENEIPEIISIKDEEQQQEKKNHIIQNDNEIITSTNNSKNEDEEEKEETEKNINKQNNNINNIDKDDVNKDNVGNHKKENLYKDINIENYKINVEYLIKNKKAEENIKKQIQEEIYSDIQNFDKTNKNVNKIRKLSLQENNNINNNHINGKNINNNINEDNLTGETYPNDDSIPQENNKITNKLIVEETIIENSKTINNDDVLVLEEFGGDVNCIHKCVRPQSYVHNEIKEPLIPARTYKFELDTFQKKSIECLERNESVLVSAHTSAGKTVIAEYAIALGLRDKQRVIYTSPIKALSNQKYRDLGEEFKDVGLITGDISINPEASIIVMTTEILRSMLYRGSSLTKEVKWVIFDEIHYMRDRDRGVIWEETIILLPLMVRFIFLSATIPNGIQFAEWVSSIKSQACHIVYTDYRPTPLQHYIYPTSSESVFLICDENKDFKKDNFIKAVNVIKEKMNTSEENHHQQHINKYTKKMRKTTYDIEKIVQMCHSRNYTPLIIFAFSKKECEVNATAMHKIDLTSDTEKEVIKELYENAIRILADDDRSLPQVQFILPLLLRGIGIHHGGLLPIIKEIIEIMFQESLLKVLFSTETFSMGINMPAKTVVFTSLTKFDGLEKRLITSGEYIQMAGRAGRRGLDDRGIVIIMLDTPLHWREAHKLFVGEANRLVSQFHLGYNMILNLLRIEGITPEFMIERSFIQYQMKKNLSQKILAKKKVEEHIKQIFNHLTNIHLDENNNEITKDELLTKIMYNNYEQIKNNQNLGTSSELKIKDTSSNDEVILNADKHKEIKEEFKEEYTNYSSYSTQHYNENVINKELLNYSTIFSCISNFYTMKQKLIDVGETYRYILTMKKHITPYLSLGRLLYIIQEDLRWGWCICIEGQLIEHKKANDNQKNKHNNSNNNNNNNHSGDHNNLKQAKSEQETLFVECLVPCNHNMKRKLTINDDDDDNINHNNNNYGEEYQPASDRSKARWKVISFNIKCVYQLSAVVLSIDKPFDKKNEEQIENIKTKYNTMVTCLKGEKNIPVINPNQMGIKNETFISIVKNLKFHENIINKNKLLNNKNLNKYYQMYSKYVALQCEKNILESNIEKCRFIVLKKELKNMLVLLESLNYIEVSYNLENLKNEKDIKTIENSITEHIKNERIMNIKNETYKNNHEEKNYVVTMKGQIASAILSVDELVISELFFSNFFSKYNYDYICAFLSCFVYDESTSKEITINDPILVEGYQQIIKTANHVATKMNECGMNINLKDYIDKFKSAIMPIALLWARGHSFVEILSDSQIYEGSIIRTLRRLDELIRQMICAFRGINNDSMCETLTLATNKLRRGIPFSPSLYL

SEQ ID NO: 17005 - protein, 808 aa, Prochlorococcus marinus subsp. pastoris str. CCMP1378
MTTEIFRNMLYGEFEEFDDPLVNLESVILDECHYMNDPQRGTVWEETIIHCPSRAQIIALSATISNADQLQNWIEKVHGPTVLVNSNKRPVPLDFIFCSAKGLHPLLNNKGNGIHPNCKIWRAPKGQKKKGKVGRIMQPKAPPIAFVVSKLAERNMLPAIYFIFSRRGCDKAVEYIKDLSLVSYSEANLISQRLDVYLKNNEEGIKDKFHCEALKRGIASHHAGLLPAWKELVEELFQQGLIKVVFATETLAAGINMPARTTVISTLSKRTDEGHRLLFSSEFLQMSGRAGRRGKDLQGYVVTLQTRFEGAKEASSLAISEPNPLVSQFTPSYGMVLNLLQNYSLDKSRELIKRSFGSFLYLGESSEETAILYNLGRDLKELKKITSNISWQDFDSYEKLKSRLKEERRLLRILEKQAAEKLSEEITSALTFIKDGSLISIKAPQINRKVVPALICKKIYESKKIKSLLCLTIDNLFILIKPSYIVNIFPDLEEIEILRLEEPKMNFSGEVVRGDNESQTFVDRIFDISEKYDLRTPQYDLSTEVLAQKKLITNLEETITNQPAHKFGDSKKLKRYRKRIIEIEQEIVMKNNLMEEKENHNWIKFTDLIKILNHFGCLNDLELTEVGQSVGAIRSENELWVGLVLLSGYLDDLAPPDLAAIIQAICVDVRRPNLWCNFKPSIKVIDVFNELESLRKLVASKQNKFNINTPIFLETELTGIISEWARGKKWKELIFNTSLDEGDVVRILRRSMDVLSQIQYCVGVSNKLKNKAKLALKAINRFPVSESNDLLKVSDNINPATKRIDNNS

SEQ ID NO: 17006 - protein, 881 aa, Encephalitozoon cuniculi
MSSRNTLGNDEPMNQEKEGVESKDTPRTETKGVEKKHSVLVKQDWLPSDYAQYVDEKILNIGFEPDTFQRQAFYLLSRASSVFVSAHTSSGKTLVAEYAISLSQIHGTRTIYTSPIKALSNQKYHDFKQKYDDVGIITGDVQVNPAAKCLVMTTEILRNLVYRNGDLLRDTEFVVFDEVHYINDSERGVVWEECIIMIPRHINFIMLSATIPNSLEFSEWVGRTKDKTIYVISTSKRAVPLEHVIYCDWCVYSIDDGGGKRNASNFKGDLVPFSKKTRPTGKFKILDVANFVVKKKLTPAIFFCFSKRKCEDYAEILRTLNLNDTKSREEVKLFLSEATRCLSPEDRNLPQVLSMSSMVLNGVAVHHGSLLPFVKECVELLFSMNLVKLLIATETFAMGVNMPAKCCVFLSLSKIDGGVFRYISSGEYIQMSGRAGRRGMDAVGTVMIADPKMPSLSTIQGIIHGTPFSLSSQFRLSFGLILISLRSNIRVEDLMRRSYGEHRSQRNYERDMKKLSELESVEEDVCNVCGDLSKYIGAVEEICARNWKLIAKHHVLKEGSRVLLKNNAVGTVERVSGATVFLKQKDEALDNGTPIPTKFLAYPLGTRKPLDRSKVTFENIFCVLDGEKALWNYETANVMDVLEIRKIKSLYDYLLSEQQVCREFDQHYSNALRVHCKRKEMNDIKIRYNVCSLGMIDEYNRRMEFLKKKGFVEEMITIKGRAAAEIHTVNEVLVVEMIFSNEFRQMDGRKIVSLMSSMIHEEADGQELGKALYDECKRMDECFRELSRDLDELMIPPFTPLNFSLVDAVYDWCNGSSLGKIVSRYNVLEGTFVRLVLRLEECCRELISVSTMIGDKSLEEKIGDASASMKRDIIFLPSLYL

SEQ ID NO: 17007 - protein, 933 aa, Encephalitozoon cuniculi
MIDDKYFDVFNDKSTLQAIAVPERLERRTTVTDRIDRNGTRHEAVVPVGAAYTLLPKQFCKPAAKNYLFELDDFQKISVCSLERDESVLVSAHTSSGKTVVAEYAIAMSLRSNQRVVYTSPIKALSNQKYRELLSEFSDVGLMTGDVTINPTASCLVMTTEILRNMLYRGGEVVREIHWIIFDEIHYMRDKERGVVWEETIILLPKHVRMVFLSATIPNALEFAEWISHIQSQVVHVVYTEKRVTPLVHYFRSNKLYKIKDAKFHKSNFLSAMRSIRKRNVGPREVGEAIGDASLPVVVFSFKRKDCERFAMKLDGRYLTDEEARTVQTIFTNAIMSLRKEDREIPIIQNILPLLMRGIGIHHSGLLPIIKEVVEILFQEGLLKVLFATETFSIGLNMPAKSVVFTALKKFDGEAMRLVSSGEYIQMSGRAGRRGIDSMGIVISIISEPITYKEASRLFSASSDNLVSAFRLTYNMLLNLMRVEGLDPLYLISRSFHHFQSYKKALAEEETLHLMYRRLEDIEPNETACLYRKREEKKVERGKRLVEAFGKYLKKGRVVDLFIPRNGPSITIRNAIVSKAREKVQCMVGTEEGVYMCSFPLHYIDCVYDIRVKLDVRVFTKSFEKIAVRDELDEEIEEIEGKILSMDPEWSFDFCVLCGKSSVGCLVSCSRELIDSEAVIVQMPENTKRYGESLEAARYPSTEMKSNMDGARAFFVNETLRQRYLEKLLELNSLKEIYHMRECKKMIEVLKKLEYCDDTTVLIKGRMACEISSGDELVLTEMIFNGDFAGIPVEHFVPLLSCIVFEEWDSDSFVLSDENKLYYRLLSDSVEKVCKVLKSCGIEIDPAAYLKRFSYELMDVVRMWVCGCTFISICSKTSIFEGSIIRTFKRLEELLRQLSSAARVIGNTELENMFALGIVKIKRDIVFANSLYI

SEQ ID NO: 17008 - protein, 1337 aa, Encephalitozoon cuniculi
MDHEEYFKTSHPVYTNISAQFTGIGHLVVDGGALITNISKRYGVKYESLPLHTYMHGVKFVLSNLRKAGFDNIMMFFRAESGHRKVIREYLMRRFECMDVSGVYEYIENERVALVLGGTEEIELMFLYECLGISLYCSVLDHMEFRVPSVYGFVYRPLEHRVERKAATATILEEESDEGSLGDIDDEIKRINPEMSIGIISDLFESRIKPFGPCEYSVPAGLCKKLIRMFRSETPRSEMNFDGRFLFPEGLVEHGKELTDYSDVVGDKHRDIESRNVGMELDLLVSGKEISPTSAAVHMKNIRKSAQSLFDGKLLYAPIVRAKGGKAPKISQKQRAIIAENERRMKEEKKAKESSWLKNFFGKYKGLDNQGKRNMLEGVKADGSGIYRRILLLKIEFYADMWNLEKRSEDCDEGVIVPCYLSCIEYIREFGRFGLEDQAPDAELGFVLQNLIGCGFEATAKELIEKHGLKGLDLEFFTDDTSAPSEFDICFQLKHTGDKLQRSVNSKKDPRVLFKPDEWQVRLLDLVDQNKSAVISAPTSAGKTFICFYAIEKVLRESDTDVVIFCLPTKALVNQVSADIYARFTPKVNSKTFLQGSLMKEFSIAPWNCQVLIVIPSLLESVLNTPPKGFIERIRYIIVDEVHKIGSEEMGIPIERIVHLSPCPMLVLSATLGNIEGFYGWMKKIEREKGRDCELVSYGERYCELKPYVYSHSFSPKMVPINNLFAYSYSHIKRFGFGNDISFLPEELLHLYDSICAVLRKDQEHLISKITPENFFRSNIVTKKEVGEYGRHLLETFQGMIEGDLLTQKQVKYVYKLQTKETRKAFESVVDYSSEYLLENILDLLMELKERNMFPCIVFNTDRDFASKLALKVHRQLESMDMEKKKDKLIEKMKKEAKRARDLEKTKESWIEESIAAEKSFQMRNDKKNIKYTFLDPLTKLTDYELEEETKFIKNTDFEFIDMLYRGMGVHHAHMNRKYRSLVEILFRQKHLQVLFATETLALGINMPCRTVVFAGDSLQLDPMNYKQMAGRAGRRGFDTLGNVVFMGIPRQRVQNLMVSLLPDIKGAYTYTNTSFVGFDLKDSLIKNPLLESTLYSGQEGLSRSIEKLSISGDDSSLYDLSSVYGSEERRAELVNHQLSLLKPYFLPKSYLCDLVIGNRDSDPEILCFALLLESKILPLDPDSLMTTLAHFFETRPLLFDMGCTLPPLDPAVYAFCGKINSISRSSVSRFYPPILRSLQKESSTPLHIVDSFLSVVNLDKIKNSYLLDFFRHGSWSRIAAENRVGTGELFKSLSVVNSVVLSLIKLHDTYGLCSEDRSKIVRFHSLFEPKFKAMFA

SEQ ID NO: 17009 - protein, 1260 aa, Caenorhabditis elegans
MCSYTISYYKVRVIIFLCNSAKIIFRQNPSAEFYNVADNLDSLLQPIDAPANIIAQVDSNGKIIGFVENERIIVGSANTSMSINRAPYKQRSLHTTAGNSIKGSPGNVPFLPGFLEELDDLLAGETTAKSTSGEESKFLSFKDDATLLNTIPTIGQIVLPNHSSVKKPAETPKSINIEEMDMFDLLDMVTSNEYIIHTVAAPVKKSESIESEETPEDDKKVSENEIDEIEIPIIPGNTEKVIEIFGAATEPTKEKFEFAQRLVLSADEEDEYKRLVPTMARKYPFSLDPFQQSSVLCMERGESLFVAAHTSAGKTVVAEYAIALCQAHKTRAVYTSPIKALSNQKFRDFKQIFGDVGLVTGDIQLHPEAACLIMTTEILRSMLYNGSEVIRDLEWVVFDEVHYINNEERGHVWEEVLIMLPAHVKIVMLSATVPNCVEFADWVGRIKNRKINVISTDRRPVPLEHFLYTGQDGKTQKDLFKIIDRSGQFILKGYNDAKDSKAKIYEKEKAGGAGGRGTQRGGGRGGGGNGGGRNWPGKNDKNIYLNLINYMKCSDQLPMVVFVFSRKRCDENAQMLASMNLTTEVEKQHVRLFFSQCVQRLKGSDKELPQVLTMRDLCLRGFAVHHSGILPILKEVVELLFQKGYVKILFATETFAMGVNMPARCVVFDSIMKHDGTERRMLNPGEYTQMAGRAGRRGLDLTGTVIIICKDSTVPQPDVLKNLISGQALRLESKFRVTYSMILNLLRVEQLKIEDMLQRSYVESDSLRESKEKRKSLVDTKNAIQTMSTIECSTCSPNSQLRDYHDALAVFLRKSEHIWPKLNDENVINKLLCSGRFLIVNSAQQQLQNECVLLIKELNNKTLQILVASADADETTNKNAAAIGFSKLPKSELSWLTEENSLLSTSKFGTRGAAHCSTNIRSFRLCEIPLSGIVAVMKKCAKGVQSGEILQEYNMTQIPRFRDRELSENVKKLLQQITTAVPGLKSGEIETYTWKELGSFCQNLDTSFDTDLLEKLEYNLNLPQSFPARHCTRFDEHFSVLRDRIRIERKIESLEYELSSDALLLSEEYHNRLKVLEALNFVEQKMVSLKGRIGCEIHHQELLITELILDYKFHQRSPAELAALLSTLTCQYNSGREMQFGGDTVFGEISESVKSVLTRLESVASKHKSQISDLGCEIRFDLMEVVYEWANGTPFYQIMEMTDCQEGLIVKCIQRLDEVCKDVRNAGRIVGDPALVEKMEEVSASIRRDIVFAASLYTTV

SEQ ID NO: 17010 - protein, 891 aa, Nostoc punctiforme
MNYPAPSPELDLGAIFPFDLDQFQKDAIASLNAGRSVVVCAPTGSGKTLVGEYAIYRALSRGKRVFYTTPLKALSNQKLRDFREKFGFDQVGLLTGDASIHRDAPILVMTTEIFRNMLYGTPIGQVGISLVDVEAVILDECHYMNDRQRGTVWEESIIYCPREVQLAALSATVANSDQLTDWLNRVHGPTDLIYSDFRPVPLEFHFCNPKGLFPLLNDSKTKINPRLLQKKKRGGERDRGRSGRPEAPGIIYTLSQLEQRDMLPAIYFIFSRRGCDKAVAEVGDLWLVNNEESQILRQQIDDFLARNPEAGRSGQIAPLYRGIAAHHAGILPAWKALVEELFQQGLIKVVFATETLAAGINMPARTTVISTLSKRTDTGHRLLNASEFLQMAGRAGRRGMDKQGHVVTVQTPFEGAKEAAYLGTSKPDPLVSQFTPSYGMVLNLLQTHTLEQTRELIERSFGQYMATLHLRPEYDEIAELEKQLAQLHEQIAAVDENELAIYEKLRQRLKVERQILKTLQEQAQEDRQEELGMMLDFAVSGTLLSLKGKNITVSSPVTAVLVGKSPGSGQAPYLVCLGHDNRWYVATTGDVVDLYAELPRIEVSPDVLPPPEMPLKPGQSRRGNEETFAIATRIPNPIESLHLAPEVAEQLSRTAAVQEQLEAHPLHQSGNAATLFKRRAKYVELEAELEQLQGQVEQQSQRHWEEFLNLILILQHFGALDNLVPTQLGRIAAAIRGENELWLGLVFASGELDNLDPHHLAAAAAGLVMETPRPDSKVNFELSNEVAEALAKLRGIRRQMFQLQRRYNVALPIWLEFELIAIVEQWALGMEWTELCENTTLDEGDVVRILRRTLDLLSQIPHVPHLPDSFQRNAYRAMQLIDRFPVNEVVE

SEQ ID NO: 17011 - protein, 1197 aa, Drosophila melanogaster
MNEIRGEDNLERLRNYILRPELSLHNPLPDVLPRKFDPMRLLHAPRCPGSTKLAPRRDQSGHILEFVELDLEAVGANANNSMSMQREPGLLEDATRGSHSNFPFWPGGFDEQRQQIAALDVSNFQFGDKLLTVPPGFSSGYDFFQSQSVTLPPVVADPSNVDLLENLEQDLDVQEWMKLTRSEETSSTGTPKSPKQSNVQLPSEEFRDVDDHIMKADLKPVLNISTTTKNFKSDWAEMVDISQPINNFKEQIPCPAMDFPFELDVFQKQAILKLEQRQYVFVAAHTSAGKTVVAEYAIALSKRDLTRTIYTSPIKALSNQKYRDFRKTFKDVGLITGDLQIEPTASCLIMTTEILRSMLYCGSDVTRDLEWVIFDEVHYINNPERGHVWEEVIILLPEHVNIIMLSATVPNTLELADWVGSTKKRKVYVISTLKRPVPLTHFLYTGAGGKSRDDIFLLVDAQGKYLQGNYEKAVERKKEMQGKAKGGGGGPRNHLNAKQEQYTWIGLIDFLRRSNMMPVVAFTLSRNRCDSNLAALQSVDLNTEKEKGAVQKFFLQCLAKLKPPDRTIPQVLVLKDALERGIGVHHSGILPILKEIVEMLFQNGLVKLLFATETFAMGVNMPARTVVFDSCKKFDGLEMRNLKPGEYIQMAGRAGRRGHDETGTAIIMCKGSVPPSMELRPMILGLPEKLQSQFILRYAVILTCLRIESIKVEDIMKFSFKEFNLKLQLPTQQKQLRLAEDKFAMLPTLGEHLQPLVNFYDKAVEYWKEKHRIMKFVVTQPKIQKELKAGRVIVITQGKHYNKLAILLNTKSVPGKDTIYKVLVLDHQFKAKDSNSLQQGELYYKILSLTPRNMTFQPVGIGGHTVLDIKAIDIISITKSTLKVDADAIIRNWEQRQLERFKDSPPSGSVVKAVTELNQLNESYIDNPDNIKYVNLSKEIIVNADSEVAMLNYVDHLLRKVGEFLPHTNIAGFEQEFAKVYERRMLEIHIEELRFKNSARNLTLYPDYCNKLKVLRALKYIDELDEVTLKGKVACEMGQNELLITELILCNMFNDLEPAEIAALLSGLVFQAKMQDKPVIPEALKECVAAFEQINDTILAEEQRFQAAIETDNRLNFGLLEVVYEWARNKPFAEIMKLTTVQEGIIVRCIQQLNETLRDVKTAAIRIGNPGLQSKMEEASAAIKRDIVFTASLYTEL

SEQ ID NO: 17012 - protein, 1197 aa, Drosophila melanogaster
MNEIRGEDNLERLRNYILRPELSLHNPLPDVLPRKFDPMRLLHAPRCPGSTKLAPRRDQSGHILEFVELDLEAVGANANNSMSMQREPGLLEDATRGSHSNFPFWPGGFDEQRQQIAALDVSNFQFGDKLLTVPPGFSSGYDFFQSQSVTLPPVVADPSNVDLLENLEQDLDVQEWMKLTRSEETSSTGTPKSPKQSNVQLPSEEFRDVDDHIMKADLKPVLNISTTTKNFKSDWAEMVDISQPINNFKEQIPCPAMDFPFELDVFQKQAILKLEQRQYVFVAAHTSAGKTVVAEYAIALSKRDLTRTIYTSPIKALSNQKYRDFRKTFKDVGLITGDLQIEPTASCLIMTTEILRSMLYCGSDVTRDLEWVIFDEVHYINNPERGHVWEEVIILLPEHVNIIMLSATVPNTLELADWVGSTKKRKVYVISTLKRPVPLTHFLYTGAGGKSRDDIFLLVDAQGKYLQGNYEKAVERKKEMQGKAKGGGGGPRNHLNAKQEQYTWIGLIDFLRRSNMMPVVAFTLSRNRCDSNLAALQSVDLNTEKEKGAVQKFFLQCLAKLKPPDRTIPQVLVLKDALERGIGVHHSGILPILKEIVEMLFQNGLVKLLFATETFAMGVNMPARTVVFDSCKKFDGLEMRNLKPGEYIQMAGRAGRRGHDETGTAIIMCKGSVPPSMELRPMILGLPEKLQSQFILRYAVILTCLRIESIKVEDIMKFSFKEFNLKLQLPTQQKQLRLAEDKFAMLPTLGEHLQPLVNFYDKAVEYWKEKHRIMKFVVTQPKIQKELKAGRVIVITQGKHYNKLAILLNTKSVPGKDTIYKVLVLDHQFKAKDSNSLQQGELYYKILSLTPRNMTFQPVGIGGHTVLDIKAIDIISITKSTLKVDADAIIRNWEQRQLERFKDSPPSGSVVKAVTELNQLNESYIDNPDNIKYVNLSKEIIVNADSEVAMLNYVDHLLRKVGEFLPHTNIAGFEQEFAKVYERRMLEIHIEELRFKNSARNLTLYPDYCNKLKVLRALKYIDELDEVTLKGKVACEMGQNELLITELILCNMFNDLEPAEIAALLSGLVFQAKMQDKPVIPEALKECVAAFEQINDTILAEEQRFQAAIETDNRLNFGLLEVVYEWARNKPFAEIMKLTTVQEGIIVRCIQQLNETVRDVKTAAIRIGNPGLQSKMEEASAAIKRDIVFTASLYTEL

SEQ ID NO: 17013 - protein, 1358 aa, Plasmodium yoelii yoelii
MAYLYSNLSDFWTSDDEEDGERTDEDFDEDSENNYKDDTNKNYINEERKKNNNENNENNKNNEFEKREDEEELQNTWNIHNTNDCSPTSATSNMNTNAVTGGETALDLADLLNDSRNELFDNIPISSILQNYDINNFIYNDNLLKYCEAGVTINNESSCNEPLTLNEEFNFNCYSHFDYINPPNIKSSYTSTKDKESNAMDLISIENGENNFIDMCIQNKDELNHKIKDISVKEISNEMAKEECMQEDEKKISNEIINETMKKLEVIPEKQNVKYIRKKWVIEDNESDVSNFSKNDLLLSYNFELDDFQKRSVKHINNFKHVFVAAHTSAGKTLIAEHAIALSIKLNKKAIYTSPIKALSNQKYYEFKNIFKNVGIITGDVKMNVNANCLIMTTEILRNLLYLNDNIINNIHCVIFDEVHYVNDEFRGVIWEESIIMLPPHVQIVLLSATVPNYLQFADWVGFTKQKEVIAISTKKRPVPLLHYIYAHDSLFLIMDEKNKFYSSAFKEIYIKIREKEEAGKKGKELMGSSHGGKKKMYYSDPKNNKDNQMEKQNKTGTTNNLGDKQNDTVKGYYQYCKQKQKQRMFQNEANMKTEIQKLQALIKKLDEDNKLPVVLFCFSRIKCETYAKSMPHLNFLDNKKKSKVHLFIKESASKLCDQDRELNQIKILSKLLENGIGVHHSGLLPILKEIVEILFSKGLIKVLFATETFAMGINMPAKSVIFTSIYKHDHLKKRILTSSEYTQMSGRAGRRSSDSYGYVYIYCSDNIPDQVQLTEMMMQKAVSLKSKFKVTYNMILKLLINKQINIEKMLFSSFLESCRALQIPLFKKDLKRKKKMLQNIKQVECVYTSDLNQIAPIENYVYIDHKLKNIGLNLHKKLFDMKNSNAFVVGRIMLLNTIDLFRSSVYAVYLGCDKSSNKKKNNKVNFAQNSIFFFQNDKEENEIMERFFFLFILPDFIGYGDLTNNTDSTNVNKNGTNNSTAVSNENTNTEKTQLTSENINMYENYKNVFACTNNKKDINIIYHSTFDSNDMNKKHFVVCSNVGIENISLITNTIIKIPNVSTNALLNNPKNLLLYTLELDRLIKKETFEPFTLTKMLKSLKCEFYSVLINQSDYLDSLKKSLCYNCSLKDEHYELVCKKNDCINDIENIERNINAKSLNLYEDLEGKLNVLKHFSFIDDDNNLTIKGKIASYITLTDEITLTQIIFENVLNNLNPPEIAAVLSCFVSPEKKVEESPDLTLNLQDVKLALTNIHSKFEEFYKVIRLKISTEEHWKLCNFKLMFIAYKWALGVSFSELLEQSEFEEGLIVRSIQRLDNLCRKVRIAFLYLGNVDLAEKTEKASLLLRRDIVFTTSLYLQ

SEQ ID NO: 17014 - protein, 1309 aa, Plasmodium yoelii yoelii
MSENIDDLFNVFEEDETKKNLPNNSKAPDHLNAIVEEQNGQDNIAYPNEGYIMKNEQTINNKTTKAEIKENEIEMEINYESPEYNAPIDYKININNIISNHKSNNKIKEQIKEEIYNEAGSINRSNNLFNNKIRKTNGENSQTKTEIRTNTYKEPVREMLIENSKTINNDDVLVLEEFGSDVNCIHKCVRPQSYVHNKLSESITPARTYKFELDTFQKKSIECLERNESVLVSAHTSAGKTVIAEYAIALGLRDKQRVIYTSPIKALSNQKYRDLSEEFKDVGLITGDISINPEASIIVMTTEILRSMLYRGSSLTKEVKWVIFDEIHYMRDRDRGVIWEETIILLPLMVRFIFLSATIPNGIQFAEWVSSIKNQACHIVYTDYRPTPLQHYIYPTSSESVFLICDENKNFKKDNFIKAVNALKDRSMLDENNQSGGNNKFNKRMRKNTYDIEKIVQMCHSRNYTPLIIFAFSKKECEVNATTLHKVNLTDDSEKEVIKELYENAIQILADDDRALPQVQFILPLLLRGIGIHHGGLLPIIKEIIEIMFQESLLKVLFSTETFSMGINMPAKTVVFTSLKKFDGLEKRLITSGEYIQMAGRAGRRGLDDRGIVIIMLDSPLHWKDAEKLFVGEANRLVSQFHLGYNMILNLLRIEGITPEFMIERSFIQYQMKKNLFEQIFASKKVEQKSQEILNILTNIYLGQNGEEFTKAYLLNQVKTNDVETILKNKNVKNEGTHILLENNDPNDPKTIDDYNNSETSNTVLKNYITTFSEISNYYITRNKLVELGETYRSLLTSKKNITQYLTMGRLLYAVEDDLKWGWCICIEGRIAEEKYNNNHKNNSTGNNRNTGNDNNIIGYDTNHTNSSNDTKFNKKNSVENNRNNTNILVVECLVPYVQNKKRKFPQNNDDDDDNKNSQKRDLEFLPAHDRLKAQWKVMTFYIKCIYQISAVVLNIEKPFDKSSEEEIEKVKNKYNTMVSCLKGEQNIPVIGSNQMNIKDDEFFKIVKNIYYYENILNKNKLLNNKNLNKYYQLYSKYVALQCEKNILDCNIEQCKFIVLKKELNNMLILLESLNYIEITYKTHEKNQTNNDQTNRSDGENDQKQIDTINEKLLTQSDTHNDITNKNNNDEKNYVVTMKGQIASAILSVDELVISELFFSNFFSKYTYDYICAFLSCFVYDESTNKEITINDPILIEGYQQITKTATIIANKMNQCGMNINVKDYLEKFKSAIMPIVLLWARGHSFMEILADSQIYEGSIIRTLRRLDELLRQMICAFRGINNDNMCEILTTATKKLRRGIPFSPSLYL

SEQ ID NO: 17015 - protein, 2237 aa, Plasmodium yoelii yoelii
  unsure (1)..(2237): unsure at all Xaa locations
MILANNVYKVPKLKDLKNLRIAENDSISRYSFVNKFEENELEDIENIINNKDISIDNKIELFYSKLNSSIHDIFRIIADYTSLYIINGEGLLIHVCMLLSKFYLFQNEEDQNILSFNNSLNISSIIYYIEKVLRDFALCNSNFHIIFFNVFNLFFEKETKLFENYNILRNAFIIHCKKNLIPYYIFDNWYNDNNYNIYIIKYKPLFMFVEDSSSFLYLFNKFYVSEVDEKNELDDNITLSKEREVDEKTNNNNDKILDGEKNRKEYLKKKKIYDYYNEEIREISLCFYFLLINNILRDIKSVLFFNVEIEKNTVNAFSINYKMINFKIVEKLNEESTLLFERNVYQNVDIKESIAYENSNYTQINISQSIKDYDLLYNDEKNYSKEELELLELFSVNVKSDNINLKNVVLNVFYSKIKETIIKGDEKKDFTFLAVKLIFMHNYLIEKLNMKNLNCIPDIDKMGKDYCSYNFIKSQIEGYVLSYLNIYNLILKSLQGYMYCDILQNIRNTDILHFFNSSIIHNLISFISYKIRENIYVINYEDFSFEDTDFFEKSFKNVVGNDDMPFFPINFEFLLNCTNLLPKNETNVVEGNDIENSKIENDNKIDENPIKNPNQCKNEISNDNKIFNVNLINIKNEFIENFFHIDNKSNEIERNTNDIINENNKGQEIKYKVNYVDKCIEYDNEFFELCGLLHITQREEVYDIYRRYVKMSKNSRISKVRKEDERNVLRGQQKEERRNAIIAKYFYISSLHHPIIISENHPWLKYYIYNIDKLYNYLKNEENKKVINMRMKRIFEETFLKENTPSICDKKNKKIKNQQNYIKMFEVLDDISGDDSNLDNDGENNKGKKGQKEKEEKKNIKGGNSNQLTRKDEILKRKELSNEKKIYEVDLERYNVLEAKINKLSSNNNYSEMNTWSLDIISGFNRLVDVYNFNNVSNLIKNATLQLKVSMKVLSNMFDIIMHTKLKNVKTNKQKSDAIRSVMLIYKLVNEIFNKFKEHLTEKDIVQLQTVLLSLGFRNSSYNLFEEYIKIRVKQLEEENNNDVEEDKTGKNKKNVKGKEKTKLKGGAKGGKSKDEEKLGLDKIKKKGREESNSEVGVKISDRKELKELYKYKIESVKTYSELKIDEDKEHEFQLYYMYYLLDRTTGNIKDKRVLFTLDTWQYNILNLVDRRKSILVSCPTSSGKTFICYYVMDKVLRLNNDSVVVYVAPNDTLALQVFHEVNGRFNTKSYSKYGENKLCSYLTDKYAQDKALEAQIVIILPSVLENILLSYYSMGENTGLETKVSKFISRIEYIIFDEIHCIGDKEFYGPQIENIIHLTTCPFLALSATIGNIKYFYDWLKNVMIKKGKNEKDLHLIKFYERFSDLVLYVYTNRNLHHLNPLACYNYRDILYKGINKDFYCNPREIYEIIMLLFELARKKQFYDLVEFLEPSFYFKYTRCINKKQFIYYMHSVKEMIIYLIQNKYITSSDYDMFIHMLLSNYLKNTDVSRGEKKEEETQNKKKEVEKREVAKEDDSSSDSDEENKQITSMQSTTKHLYKRKVQDDAPKEKLFQELYKNVVLDEKYYLNKSNDLVKYTETVNVEQEYLDSGNLIELLKHLEDVNFLPCIVFNFERKELEDMTINLINELMRRQHDKYYGTDERAFNTKMENKLRQERYENLLKQREMLLKIKTVSRNQRLEQNLDKDYLDMLNEDEIPEPPIDISEEYDGDFYFCNRKVYHNYVFEIEDLIKDAERAIEGRKNKDILIEGLKRGIGLHYEVLPYKFTIIVESLFRLGYIKIIFSNKNLSLGINIPCKSIIFTGHTYELNSLLFKQTSGRAGRRGFDLYGNIIIWNINFKNLKRLITCPLQTLSGTYCVNFTNICRSMLLYNCLKKYREMEEIAHRNKAIVNKPSXKKKKEETMSECDNNFLLTHLLRKRIIHNLIGDDVFLSYSNSEVSLQKIIDCITFEKNYSRNAIVDDTSRGKFILLFILSHFINKIKENKIALTNILINYNNKSRNRLELFSHKYFPLLHTLPKSVQNHVNNLEKLILNNLINYSIIIISKLKLWSRKKTYLLPYTQLYIFEEHPSSNLVDIFNNTNSEFINYYKEKVDDYNIRSPFLAPLYKNDKFDNLCELLYTSLIDLDMKKNMIPDIMEDYVYFYKFENGLIKEEKACLKNSYMIDYFLHGKYYVLRNKNKLGQYTWYIIDRFIDSLKNIENYLYEIKREKDFSNDVFYTCLSSMKDILQKHFKSINSE

SEQ ID NO: 17016 - protein, 946 aa, Prochlorococcus marinus str. MIT 9313
MLAGANANDGQKWIAGLFRIETMSSVAHVTTAPDVAKLEPDPFAIFSFPLDEFQLEAIAALNHGHSVVVSAPTGSGKTLVGEYAIHRAIAHGQKVFYTTPLKALSNQKLRDFREQFGSQNVGLMTGDLSVNREASIVVMTTEIFRNMLYAEADQADDPLADVEAVVLDECHYMNDSQRGTVWEESIIHCPASVQLVALSATVANAGQLTDWIERVHGPTQLVFSDYRPVPLQFSFCSAKGLHPLLNDAGKGLHPNSKVWRAPKGHKRKGRSPKPPQPEPPPIKFVIAQMAEREMLPAIYFIFSRRGCDKSVKDLGSQCLVSPTQQEQIRQRLRTYSETNPEAVRDGIHADALLRGIAAHHAGVLPAWKELIEELFQQGLVKVVFATETLAAGINMPARSTVISALSKRTERGHRPLMGSEFLQMAGRAGRRGLDSQGYVVTVQSRFEGVREAGQLATSPADPLVSQFTPSYGMVLNLLQRHDLKKARELVERSFGRYLASLDLVYEEESLEQLRLQLGQLQGVAGDVPWQDFEDYEKRRSRLREERRLLRILQQQAEETLANELTLALQFASVGTLVSLKAPQLRGRVTPAVIVDKLEGPGQFPLLLCLTDENVWLLLPCPAVVSLHAELSCLQVTEMNEPDLQRSGELRHGDQHSGSLALAVAHMAKRHDMTTPQYDLAGEVLAQAQRVRGLEEELEQQPAHRWGDRKQLKKHRRRMEELELEICERQQLLHQRANRHWETFLSLIEILQHFGCLDDLEPTEIGRTVAAMRGDNELWLGLSLMSGHLDDLHPANLAAVFEAISTEVNRPDLWSGYPPPASAEEALHDLAGIRRELLRAQERCQVVVPAWWEPELMGLVDAWARGTAWSDLIANTSLDEGDVVRILRRTVDLLAQVPYCEAISEQLRRNARLALKAINRFPVCEAEDLLNAAAVDEELNPATERVA

SEQ ID NO: 17017 - protein, 906 aa, Mycobacterium tuberculosis H37Rv
MTELAELDRFTAELPFSLDDFQQRACSALERGHGVLVCAPTGAGKTVVGEFAVHLALAAGSKCFYTTPLKALSNQKHTDLTARYGRDQIGLLTGDLSVNGNAPVVVMTTEVLRNMLYADSPALQGLSYVVMDEVHFLADRMRGPVWEEVILQLPDDVRVVSLSATVSNAEEFGGWIQTVRGDTTVVVDEHRPVPLWQHVLVGKRMFDLFDYRIGEAEGQPQVNRELLRHIAHRREADRMADWQPRRRGSGRPGFYRPPGRPEVIAKLDAEGLLPAITFVFSRAGCDAAVTQCLRSPLRLTSEEERARIAEVIDHRCGDLADSDLAVLGYYEWREGLLRGLAAHHAGMLPAFRHTVEELFTAGLVKAVFATETLALGINMPARTVVLERLVKFNGEQHMPLTPGEYTQLTGRAGRRGIDVEGHAVVIWHPEIEPSEVAGLASTRTFPLRSSFAPSYNMTINLVHRMGPQQAHRLLEQSFAQYQADRSVVGLVRGIERGNRILGEIAAELGGSDAPILEYARLRARVSELERAQARASRLQRRQAATDALAALRRGDIITITHGRRGGLAVVLESARDRDDPRPLVLTEHRWAGRISSADYSGTTPVGSMTLPKRVEHRQPRVRRDLASALRSAAAGLVIPAARRVSEAGGFHDPELESSREQLRRHPVHTSPGLEDQIRQAERYLRIERDNAQLERKVAAATNSLARTFDRFVGLLTEREFIDGPATDPVVTDDGRLLARIYSESDLLVAECLRTGAWEGLKPAELAGVVSAVVYETRGGDGQGAPFGADVPTPRLRQALTQTSRLSTTLRADEQAHRITPSREPDDGFVRVIYRWSRTGDLAAALAAADVNGSGSPLLAGDFVRWCRQVLDLLDQVRNAAPNPELRATAKRAIGDIRRGVVAVDAG

SEQ ID NO: 17018 - protein, 910 aa, SYNECHOCOCCUS SP. WH 8102
MMAASGLDPSKIFPFPLDDFQLEAIDALNQGHSVVVSAPTGSGKTLVGEYAIHRALAHGQKVFYTTPLKALSNQKLRDFREAYGDDNVGLMTGDLSVNREASIVVMTTEIFRNMLYAEASEQDDPLADVEAVVLDECHYMNDSQRGTVWEESIIHCPPSVQLVALSATVANAGQLTDWIQKVHGPTTLVLSDYRPVPLQFSFCSAKGLHPLLNDAGTGLHPNCKVWRAPKGHKRKGRSAKPPQPEPPPISFVVAQMAERDMLPAIYFIFSRRGCDKAVRDLGIQCLVNKEEQARIRARLKAYSSENPEAVRDGIHADALLRGIAAHHAGVLPAWKELIEELFQQGLVKVVFATETLAAGINMPARTTVIAALSKRTERGHRPLMGSEFLQMAGRAGRRGLDSRGYVVTVQSRFEGVREAGQLATSPADPLVSQFTPSYGMVLNLLQRHDLNKARELVERSFGRYLASLDLVEEEDVLSQLRLQLGQLEGVAGDIPWEDFEEYEKLRGRLREERRLLRILQQQAEETLANELTLALQFASTGTLVSLKSPQLRGRVTPAVIVDKIEGPGQFPLLLCLSDENLWLLLPCQSVVSIHAELSCLQVDGVTAPDLHKAGELRHGDQASGGLALAVAHVARRHDMTMPQYDLAGEVLTQARTVQALEQEQEAHPAHRWGDRKQLKKHRRRMEELEQEIEERQRLLHHRSNRHWETFLALLEILQQFGCLDELTPTEIGRTVAALRGDNELWLGLALMSGHLDDLSAPDLAAVFEAISTEVNRPDLWSGFPPPPAAEEALHDLSGLRRELLRAQERLGVVLPAWWEPELMGLVESWARGTDWSDLIANTSLDEGDVVRIMRRTVDLLAQVPYCEAISEQLRSHARQALRAINRFPVAEAEDLLKQAGDQNPATERAA

SEQ ID NO: 17019 - protein, 1245 aa, Homo sapiens
METERLVLPPPDPLDLPLRAVELGCTGHWELLNLPGAPESSLPHGLPPCAPDLQQEAEQLFLSSPAWLPLHGVEHSARKWQRKTDPWSLLAVLGAPVPSDLQAQRHPTTGQILGYKEVLLENTNLSATTSLSLRRPPGPASQSLWGNPTQYPFWPGGMDEPTITDLNTREEAEEEIDFEKDLLTIPPGFKKGMDFAPKDCPTPAPGLLSLSCMLEPLDLGGGDEDENEAVGQPGGPRGDTVSASPCSAPLARASSLEDLVLKEASTAVSTPEAPEPPSQEQWAIPVDATSPVGDFYRLIPQPAFQWAFEPDVFQKQAILHLERHDSVFVAAHTSAGKTVVAEYAIALAQKHMTRTIYTSPIKALSNQKFRDFRNTFGDVGLLTGDVQLHPEASCLIMTTEILRSMLYSGSDVIRDLEWVIFDEVHYINDVERGVVWEEVLIMLPDHVSIILLSATVPNALEFADWIGRLKRRQIYVISTVTRPVPLEHYLFTGNSSKTQGELFLLLDSRGAFHTKGYYAAVEAKKERMSKHAQTFGAKQPTHQGGPAQDRGVYLSLLASLRTRAQLPVVVFTFSRGRCDEQASGLTSLDLTTSSEKSEIHLFLQRCLARLRGSDRQLPQVLHMSELLNRGLGVHHSGILPILKEIVEMLFSRGLVKVLFATETFAMGVNMPARTVVFDSMRKHDGSTFRDLLPGEYVQMAGRAGRRGLDPTGTVILLCKGRVPEMADLHRMMMGKPSQLQSQFRLTYTMILNLLRVDALRVEDMMKRSFSEFPSRKDSKAHEQALAELTKRLGALEEPDMTGQLVDLPEYYSWGEELTETQHMIQRRIMESVNGLKSLSAGRVVVVKNQEHHNALGVILQVSSNSTSRVFTTLVLCDKPLSQDPQDRGPATAEVPYPDDLVGFKLFLPEGPCDHTVVKLQPGDMAAITTKVLRVNGEKILEDFSKRQQPKFKKDPPLAAVTTAVQELLRLAQAHPAGPPTLDPVNDLQLKDMSVVEGGLRARKLEELIQGAQCVHSPRFPAQYLKLRERMQIQKEMERLRFLLSDQSLLLLPEYHQRVEVLRTLGYVDEAGTVKLAGRVACAMSSHELLLTELMFDNALSTLRPEEIAALLSGLVCQSPGDAGDQLPNTLKQGIERVRAVAKRIGEVQVACGLNQTVEEFVGELNFGLVEVVYEWARGMPFSELAGLSGTPEGLVVRCIQRLAEMCRSLRGAARLVGEPVLGAKMETAATLLRRDIVFAASLYTQ

SEQ ID NO: 17020 - protein, 1246 aa, Homo sapiens
MMETERLVLPPPDPLDLPLRAVELGCTGHWELLNLPGAPESSLPHGLPPCAPDLQQEAEQLFLSSPAWLPLHGVEHSARKWQRKTDPWSLLAVLGAPVPSDLQAQRHPTTGQILGYKEVLLENTNLSATTSLSLRRPPGPASQSLWGNPTQYPFWPGGMDEPTITDLNTREEAEEEIDFEKDLLTIPPGFKKGMDFAPKDCPTPAPGLLSLSCLLEPLDLGGGDEDENEAVGQPGGPRGDTVSASPCSAPLARASSLEDLVLKEASTAVSTPEAPEPPSQEQWAIPVDATSPVGDFYRLIPQPAFQWAFEPDVFQKQAILHLERHDSVFVAAHTSAGKTVVAEYAIALAQKHMTRTIYTSPIKALSNQKFRDFRNTFGDVGLLTGDVQLHPEASCLIMTTEILRSMLYSGSDVIRDLEWVIFDEVHYINDVERGVVWEEVLIMLPDHVSIILLSATVPNALEFADWIGRLKRRQIYVISTVTRPVPLEHYLFTGNSSKTQGELFLLLDSRGAFHTKGYYAAVEAKKERMSKHAQTFGAKQPTHQGGPAQDRGVYLSLLASLRTRAQLPVVVFTFSRGRCDEQASGLTSLDLTTSSEKSEIHLFLQRCLARLRGSDRQLPQVLHMSELLNRGLGVHHSGILPILKEIVEMLFSRGLVKVLFATETFAMGVNMPARTVVFDSMRKHDGSTFRDLLPGEYVQMAGRAGRRGLDPTGTVILLCKGRVPEMADLHRMMMGKPSQLQSQFRLTYTMILNLLRVDALRVEDMMKRSFSEFPSRKDSKAHEQALAELTKRLGALEEPDMTGQLVDLPEYYSWGEELTETQHMIQRRIMESVNGLKSLSAGRVVVVKNQEHHNALGVILQVSSNSTSRVFTTLVLCDKPLSQDPQDRGPATAEVPYPDDLVGFKLFLPEGPCDHTVVKLQPGDMAAITTKVLRVNGEKILEDFSKRQQPKFKKDPPLAAVTTAVQELLRLAQAHPAGPPTLDPVNDLQLKDMSVVEGGLRARKLEELIQGAQCVHSPRFPAQYLKLRERMQIQKEMERLRFLLSDQSLLLLPEYHQRVEVLRTLGYVDEAGTVKLAGRVACAMSSHELLLTELMFDNALSTLRPEEIAALLSGLVCQSPGDAGDQLPNTLKQGIERVRAVAKRIGEVQVACGLNQTVEEFVGELNFGLVEVVYEWARGMPFSELAGLSGTPEGLVVRCIQRLAEMCRSLRGAARLVGEPVLGAKMETAATLLRRDIVFAASLYTQ

SEQ ID NO: 17021 - protein, 1245 aa, Homo sapiens [sequence omitted]

SEQ ID NO: 17022 - protein, 1246 aa, Homo sapiens
MMETERLVLPPPDPLDLPLRAVELGCTGHWELLNLPGAPESSLPHGLPPCAPDLQQEAEQLFLSSPAWLPLHGVEHSARKWQRKTDPWSLLAVLGAPVPSDLQAQRHPTTGQILGYKEVLLENTNLSATTSLSLRRPPGPASQSLWGNPTRYPFWPGGMDEPTITDLNTREEAEEEIDFEKDLLTIPPGFKKGMDFAPKDCPTPAPGLLSLSCLLEPLDLGGGDEDENEAVGQPGGPRGDTVSASPCSAPLARASSLEDLVLKEASTAVSTPEAPEPPSQEQWAIPVDATSPVGDFYRLIPQPAFQWAFEPDVFQKQAILHLERHDSVFVAAHTSAGKTVVAEYAIALAQKHMTRTIYTSPIKALSNQKFRDFRNTFGDVGLLTGDVQLHPEASCLIMTTEILRSMLYSGSDVIRDLEWVIFDEVHYINDVERGVVWEEVLIMLPDHVSIILLSATVPNALEFADWIGRLKRRQIYVISTVTRPVPLEHYLFTGNSSKTQGELFLLLDSRGAFHTKGYYAAVEAKKERMSKHAQTFGAKQPTHQGGPAQDRGVYLSLLASLRTRAQLPVVVFTFSRGRCDEQASGLTSLDLTTSSEKSEIHLFLQRCLARLRGSDRQLPQVLHMSELLNRGLGVHHSGILPILKEIVEMLFSRGLVKVLFATETFAMGVNMPARTVVFDSMRKHDGSTFRDLLPGEYVQMAGRAGRRGLDPTGTVILLCKGRVPEMADLHRMMMGKPSQLQSQFRLTYTMILNLLRVDALRVEDMMKRSFSEFPSRKDSKAHEQALAELTKRLGALEEPDMTGQLVDLPEYYSWGEELTETQHMIQRRIMESVNGLKSLSAGRVVVVKNQEHHNALGVILQVSSNSTSRVFTTLVLCDKPLSQDPQDRGPATAEVPYPDDLVGFKLFLPEGPCDHTVVKLQPGDMAAITTKVLRVNGEKILEDFSKRQQPKFKKDPPLAAVTTAVQELLRLAQAHPAGPPTLDPVNDLQLKDMSVVEGGLRARKLEELIQGAQCVHSPRFPAQYLKLRERMQIQKEMERLRFLLSDQSLLLLPEYHQRVEVLRTLGYVDEVGTVKLAGRVACAMSSHELLLTELMFDNALSTLRPEEIAALLSGLVCQSPGDAGDQLPNTLKQGIERVRAVAKRIGEVQVACGLNQTVEEFVGELNFGLVEVVYEWARGMPFSELAGLSGTPEGLVVRCIQRLAEMCRSLRGAARLVGEPVLGAKMETAATLLRRDIVFAASLYTQ

SEQ ID NO: 17023 - protein, 1246 aa, Homo sapiens [sequence omitted]

SEQ ID NO: 17024 - protein, 1246 aa, Homo sapiens [sequence omitted]

SEQ ID NO: 17025 - protein, 1246 aa, Homo sapiens [sequence omitted]

SEQ ID NO: 17026 - protein, 1246 aa, Homo sapiens
MMETERLVLPPPDPLDLPLRAVELGCTGHWELLNLPGAPESSLPHGLPPCAPDLQQEAEQLFLSSPAWLPLHGVEHSARKWQRKTDPWSLLAVLGAPVPSDLQAQRHPTTGQILGYKEVLLENTNLSATTSLSLRRPPGPASQSLWGNPTRYPFWPGGMDEPTITDLNTREEAEEEIDFEKDLLTIPPGFKKGMDFAPKDCPTPAPGLLSLSCLLEPLDLGGGDEDENEAVGQPGGPRGDTVSASPCSAPLARASSLEDLVLKEASTAVSTPEAPEPPSQEQWAIPVDATSPVGDFYRLIPQPAFQWAFEPDVFQKQAILHLERHDSVFVAAHTSAGKTVVAEYAIALAQKHMTRTIYTSPIKALSNQKFRDFRNTFGDVGLLTGDVQLHPEASCLIMTTEILRSMLYSGSDVIRDLEWVIFDEVHYINDVERGVVWEEVLIMLPDHVSIILLSATVPNALEFADWIGRLKRRQIYVISTVTRPVPLEHYLFTGNSSKTQGELFLLLDSRGAFHTKGYYAAVEAKKERMSKHAQTFGAKQPTHQGGPAQDRGVYLSLLASLRTRAQLPVVVFTFSRGRCDEQASGLTSLDLTTSSEKSEIHLFLQRCLARLRGSDRQLPQVLHMSELLNRGLGVHHSGILPILKEIVEMLFSRGLVKVLFATETFAMGVNMPARTVVFDSMRKHDGSTFRDLLPGEYVQMAGRAGRRGLDPTGTVILLCKGRVPEMADLHRMMMGKPSQLQSQFRLTYTMILNLLRVDALRVEDMMKRSFSEFPSRKDSKAHEQALAELTKRLGALEEPDMTGQLVDLPEYYSWGEELTETQHMIQRRIMESVNGLKSLSAGRVVVVKNQEHHNALGVILQVSSNSTSRVFTTLVLCDKPLSQDPQDRGPATAEVPYPDDLVGFKLFLPEGPCDHTVVKLQPGDMAAITTKVLRVNGEKILEDFSKRQQPKFKKDPPLAAVTTAVQELLRLAQAHPAGPPTLDPVNDLQLKDMSVVEGGLRARKLEELIQGAQCVHSPRFPAQYLKLRERMQIQKEMERLRFLLSDQSLLLFPEYHQRVEVLRTLGYVDEAGTVKLAGRVACAMSSHELLLTELMFDNALSTLRPEEIAALLSGLVCQSPGDAGDQLPNTLKQGIERVRAVAKRIGEVQVACGLNQTVEEFVGELNFGLVEVVYEWARGMPFSELAGLSGTPEGLVVRCIQRLAEMCRSLRGAARLVGEPVLGAKMETAATLLRRDIVFAASLYTQ

SEQ ID NO: 17027 - protein, 1389 aa, Schizosaccharomyces pombe
MAKPALKAAKEALVVKNYELAIEQSKKALSFDANNYNANVFLGVAYFSTKQLSESKEAYLDAIKIDEKAVLAWQGLWNLYESTHDISELHKITPILASKFLELEEQNKCLNTVNKYMEVVKKYGNKADEFKALKLLTPEEGEIYEYLEGRVLPLQTVYMQMVDIQESMDRCYFESEVNKRKTRLGARLEQVMRDVELEIYKDSPLETLYNQIINYAETDEIRRLTESKLLHMYNKLLILSEIKEKSHWRERIWDLIQGMVTLHIPEQAAWTIYFEWQDHSDISFFQSAELQEYIELFPGSPLAQALFAFRNSDLWHKEHPIQLEDSNNSAELAKETKEEDDSENSVDKKENEEDIISSTMMPQDEVLANLTEAYENAPQSTIISECLAKYYIHLKEYEYAIGLSKAALEVLKRLQQDTGVKLDKLTRIFQLCLAIGYSHYEVPRYLFQAMHYYDILLAADPRNYHALLGKGLVQIENEQYSDAVKTLGLLLDDHENDPSLSELSWCYFKTGNLPKAISTVEKCLDVLLSMDVERFKIAEAYYRYGIYILNRKSENYLEDSFSAFVSSLRKDPNYAPAYTSLGLYYRDIHDMVRATKCFQKAFELDASQVEAAEALAKTFAEANEWELVEVISRRVLNTSENDLKRKKKFNWHHTSLGVLELNAKNFHKAIVHFQSALRISPKDTNAWSGLGEAYARSGRYVSALKAFNRASILDPDDWYVKYFIATLEKDMGEYEVAVSTLSEILAVRSKELCVQVSLAETYVRLAKLYHARGFYSRAADSLEKSIQICCNVLKEDITSIFSWEILGDACLSFCQLKNYHNRFPNSLISDILFTTEAMKCANNGRQFENMIYLPDLETSSGAIFIAAVAITCFTIHLSLVADDKLLLPVSWYNLGSSYYRFYECDTTKDATLQVAINCIKQAIKLEAKNYVFWNMLGVLFSQTKAVRSAQHCYIQSLLLNERSSGVWANYGALCIQNHDVECANAAFTRSISIDPDNSQAWLGKAYCSIAVGSIRKAVQIIHHAFEISSGKMPDVNYWYADTMLHAVNTEDFVTTDGDIWSATYAIKRYLGENPTDTFAYYIKASLLEHLGETTDSVPSAIRLCELLEQEYDVSESPVILKRFIDAKALLGRLYLAKKSFENSVEQAGIALDLLEGEEDEDIKRTTLGLNLTCGTASFFLNKLEKSLDCFEKALLVSDSNADVVVLVSKVLWALGSENGKQAAREQLFEALEQSPSHIGSLLCLGAIAIYDEDDAVCSAIEDSIAHLKKDEVLRSGALKQVQIMEVLLTKKIDESMIKSLLQRFLHVYPFAASSWTLLTNRYASKSLANAFATTLYTHPSRPDDLAQSYRLQNSIDRAQVAIHLVPWDSANWKALHGVTHEALVSSDAS

SEQ ID NO: 17028 - protein, 1444 aa, Neurospora crassa
MSTKQLVKAAAEAIKKQQWDDAIEGAKNIIDKDSKSYQGHILLAFALDKKGRLEEAENTYLAATRLKPEEKEAWQGLVKLYPNLDTSKKFKQHQHAVLKLAEIFRDANDLQKCYETVDSFITYARNKAESYQYVDALDLILPGSPIYDAIEGRFGHVWRTYETQAKLVEQNEKKRINTLIGERRTRIGARINEVTLEVKREVYRQSRLSYTYAQLINWTNDDEVRRMYEEKLIQYCHDRLMAWPPGEEKEQELANVLKLANDMVIIKHPYKLAWDIAINWQDHKEIKEWDVTVLRQYCTFFPDSDLNRVVMGFLTSSVSPFPQEKQEQTTEDAAAKSEGSTEESEDDEDGGAATIYAPITEEDRLLMMTEGISGAESLLAFRLMGEYYQHLEEWESNVELMRKALTFLKEERAKTGLDFRFTEDAFSLYLGTALVFYQTPRNHQEAKALFDAVLTHDPTSTPAMIGVGLIYEEEEEYDEAIDFLERALKRDPNNIRVRTEAAWVKALKGDFDMARAELEACIPILSKKGQSKELLSQTQYRLGYCIWNIDTSKAARKDRSGAYALFLESLKNNLNYAPAYTILGIYYADYAKDKKRARRCFQKAVELSPSEVESAERLARSFADDGDWDRVELVAQRVVDSGKVKPPPGSKRKGISWPFAALGVAELNKQEFHKAIVSFQSALRISPNDYHSWVGLGEAYHSSGRYIAATKAILNAQKLEESSEANLTGETWFTKFILADIKRELGDFDESIELYQRVIQERPDEEGVATALMQTLVDNAFDSLNKGFFGKAAGLATETLTFATKAPDAIKDTFNYWKAIGDACSLFSNIQGRISEFPAETVSSLLGTDEDFPAYQILKDIDNVGTGIVSTDGVFPENETVGVDLTKALQATLLAHKRSIHIASNDIHAQSVAYYNLGWAEYRAHACLPPDIRKNSHKKPTNYIKAAMACFKRAIELEAGNSEFWNALGVVTSEVNPAVAQHAFCRSLFLNERGAHVWANLATLALAQGDLALANEAFTRSQSTDPDYSLAWLGQGVVALLTGNEKDARGLFTHAMEISGDTSRVISQRYAVSMFDHILSFSSSESLPTTSLIQPIFALTQLQSLHSSASSSTDLAYNHLLALFLERTGETPRAISILDSLSTTLEQEYETTESPLALKHFAIVKSDLARLQLSARLFNEAIDSADLALQLSSDESADELTAEERRKLRLSAHVTLGLAHYYSHDITAAVTAFDQALSESNTNPDVACLLAQILWATGQEDARERGRDLLFGVIADSEERKEQHVQSVLLLGVIALLDNDAESMDAVVSELQSLRSSDEGISPEQQAQLGEVLRAILTAMGSGEAQPMTDVMLHPFLPHGWSRVAQLAAQHGGEEEAEGASEMALRVARKGVPPRGELSPEDLARAYAGTGRPADAQVGCVVAPWERRGWESLGDAVTAVAAKQ

SEQ ID NO: 17029 - protein, 1233 aa, Drosophila melanogaster
MSAVKESKALIKDIRETIKLGKHAEAIPKCQRLLKSEPENAMGYLLLGAAYQNIDKAEAAKNLRQCIKCTDGPAPAALLGLANCAPSNELPEIYDQLADLQPEQSLNYWEKLFNLASDSNVAPFCFTVLKKRVQDTENGNFTKIQEYLGRIWVSNDFEIAPEDTQLYKTTMEALLQNSEPSARSVVYKRYLKWLYKKQDYETCVRHACNMTESHPKDVYGFEWICKTYCEHHEQSEIVSWQQELRHPIQVYAEQLLELNPNSNLALLVKALDLFAEGQVVASRQLALQAQKSQPAYKVTLELLARIHMELGAYKLALQLWQEIGQENDAYALCLSHEKGVSKLREAVTILQTLENSEGNIKSLARCYFKLGELHLLKDLPLDDLTKAEFVLSPSEALQEIADCKTFEAYLLCGKLHMALKNYSDALNYVLKATRLRPHFAECFDYLGKLYPLATGDFSRARKCYEKCISLNPLAEEAVDALSFIYQEQGEEELNETLLLNTLSHLGSNESIRLQYKLGLHFSHVKKWDSAIQCFRIAIKNDSRCISYWESLGDAYAGRGSYNSAIRVFQKILELSPENNYALLQIASVKTTIRMYTESIEDYDTLLQRNPTYLPGLRGAAEAHIGIANSLKSQNLYGRSKAHFQLALEHLQSAFLQREAQGMVWLWRLSANIFVQTAQLPHSLANLDVAGNLAKREEPIAYLSRKDLLQLAQRFYLCALKLKQNTYLWYELSLASYYSAILIPEDANGHLETATKACKMAIKECSNRWQNWNLLGVINMNSENENLPLAQHCFIQAVVLEKKCYTAWTNLGVLYIKLNEVRLANEAFTRAQQSSPVYANAWIGQAMVAELIGDREEAFDLFRHCQQFDYHPEAALGFAHWVCEMLSTPGSFDKPRIKHAIEHMYADVLALDAINWYVQNEETDATPASLSFQGFLYARKNLYRQAIEAFTRACKLCEPGADRDKLYTNLGYLYLKIDQPEQAAHALNTVAHATFKPIIGLAQAYYLAGQLQESYSIYNSVLGNVVDHGDDKAATILVAMASMIYDFQGEADTKTLLYQCVLLKEVPIQALFSALALGILHRDNALIHTILTELNAYAFKKEYCADISYLTAHYILINEGARRALCYLQTRIRMFPNSRSLRSVVLKFLLDYFSDDQSYRLATSNMGRITLTLGHTKQQNSILASEEALTTIYASQAVSAVDKTCSMKLLQRAILLSPTDQRARQLLSAIIANS

SEQ ID NO: 17030 - protein, 640 aa, Drosophila melanogaster
MYTESIEDYDTLLQRNPTYLPGLRGAAEAHIGIANSLKSQNLYGRSKAHFQLALEHLQSAFLQREAQGMVWLWRLSANIFVQTAQLPHSLANLDVAGNLAKREEPIAYLSRKDLLQLAQRFYLCALKLKQNTYLWYELSLASYYSAILIPEDANGHLETATKACKMAIKECSNRWLNWNLLGVINMNSENENLPLAQHCFIQAVVLEKKCYTAWTNLGVLYIKLNEVRLANEAFTRAQQSSPVYANAWIGQAMVAELIGDREEAFDLFRHCQQFDYHPEAALGFAHWVCEMLSTPGSFDKPRIKHAIEHMYADVLALDAINWYVQNEETDATPASLSFQGFLYARKNLYRQAIEAFTRACKLCEPGADRDKLYTNLGYLYLKIDQPEQAAHALNTVAHATFKPIIGLAQAYYLAGQLQESYSIYNSVLGNVVDHGDDKAATILVAMASMIYDFQGEADTKTLLYQCVLLKEVPIQALFSALALGILHRDNALIHTILTELNAYAFKKEYCADISYLTAHYILINEGARRALCYLQTRIRMFPNSRSLRSVVLKFLLDYFSDDQSYRLATSNMGRITLTLGHTKQQNSILASEEALTTIYASQAVSAVDKTCSMKLLQRAILLSPTDQRARQLLSAIIANS

SEQ ID NO: 17031 - protein, 1564 aa, Homo sapiens
MSSKEVKTALKSARDAIRNKEYKEALKHCKTVLKQEKNNYNAWVFIGVAAAELEQPDQAQSAYKKAAELEPDQLLAWQGLANLYEKYNHINAKDDLPGVYQKLLDLYESVDKQKWCDVCKKLVDLYYQEKKHLEVARTWHKLIKTRQEQGAENEELHQLWRKLTQFLAESTEDQNNETQQLLFTAFENALGLSDKIPSEDHQVLYRHFIQSLSKFPHESARLKKACEGMINIYPTVQYPLEVLCLHLIESGNLTDEGQQYCCRLVEMDSKSGPGLIGLGIKALQDKKYEDAVRNLTEGLKESPVCTSGWYHLAEAQVKMHRPKEAVLSCSQALKIVDNLGASGNSLYQRNLCLHLKAEALIKLSDYDSSEEAIRTLDQISDADNIPGLLVLKSLAYRNKGSFDEAAKIMEDLLSSYPDLAEVHALEALIHFTKKDYLQAEKCFQRALEKDTEVAEYHYQLGLTYWFMGEETRKDKTKALTHFLKAARLDTYMGKVFCYLGHYYRDVVGDKNRARGCYRKAFELDDTDAESGAAAVDLSVELEDMEMALAILTTVTQKASAGTAKWAWLRRGLYYLKAGQHSQAVADLQAALRADPKDFNCWESLGEAYLSRGGYTTALKSFTKASELNPESIYSVFKVAAIQQILGKYKEAVAQYQMIIKKKEDYVPALKGLGECHLMMAKAALVDYLDGKAVDYIEKALEYFTCALQHRADVSCLWKLAGDACTCLYAVAPSKVNVHVLGVLLGQKEGKQVLKKNELLHLGGRCYGRALKLMSTSNTWCDLGINYYRQAQHLAETGSNMNDLKELLEKSLHCLKKAVRLDSNNHLYWNALGVVACYSGIGNYALAQHCFIKSIQSEQINAVAWTNLGVLYLTNENIEQAHEAFKMAQSLDPSYLMCWIGQALIAEAVGSYDTMDLFRHTTELNMHTEGALGYAYWVCTTLQDKSNRETELYQYNILQMNAIPAAQVILNKYVERIQNYAPAFTMLGYLNEHLQLKKEAANAYQRAILLLQTAEDQDTYNVAIRNYGRLLCSTGEYDKAIQAFKSTPLEVLEDIIGFALALFMKGLYKESSKAYERALSIVESEQDKAHILTALAITEYKQGKTDVAKTLLFKCSILKEPTTESLQALCALGLAMQDATLSKAALNELLKHIKHKDSNYQRCLLTSAIYALQGRSVAVQKQISKAVHSNPGDPALWSLLSRVVAQYAQRNAKGGVVAGNVAHILDSNHGKKALLYTAVNQLAMGSSSAEDEKNTALKTIQKAALLSPGDPAIWAGLMAACHADDKLALVNNTQPKRIDLYLALLSAVSASIKDEKFFENYNQSLEKWSLSQAVTGLIDTGRISEAETLCTKNLKSNPDQPAVILLLRQVQCKPLLESQKPLPDAVLEELQKTVMSNSTSVPAWQWLAHVYQSQGMMRAAEMCYRKSLQLASQRGSWSGKLSSLLRLALLALKVCMANISNDHWPSLVQEATTEALKLCFCPLAVLLQALLQFKRKMGARETRRLLERVVYQPGYPKSIASTARWYLLRHLYAKDDYELIDVLVNNAKTHGDTRALELNQRLSSQ

SEQ ID NO: 17032 - protein, 195 aa, Mus musculus
MAPPVRYCIPGERLCNLEEGSPGSGTYTRHGYIFSSLAGCLMKTSENGAVPVVSVMRETESQLLPDVGAVVTCKVSSINSRFAKVHILYVGSTPLKNAFRGTIRKEDIRATEKDKVEIYKSFRPGDIVLAKVISLGDAQSNYLLTTAENELGVVVAHSESGVQMVPISWCEMQCPKTHTKEFRKVARVQPEFLQT

SEQ ID NO: 17033 - protein, 154 aa, Mus musculus
MAPPVRYCIPGERLCNLEEGSPGSGTYTRHGYIFSSLAGCLMKTSENGAVPVVSVMRETESQLLPDVGAVVTCKVEIYKSFRPGDIVLAKVISLGDAQSNYLLTTAENELGVVVAHSESGVQMVPISWCEMQCPKTHTKEFRKVARVQPEFLQT

SEQ ID NO: 17034 - protein, 199 aa, Anopheles gambiae str. PEST
ESEDQTLICVPGQILCAASEFTVAGQGTYEKLGYIHATLAGIVQMKKREKNTFISVVSFGGGATVPVIGDIVTARITAVQNRMARCRILCIGKTALNRTLRGIIRKEDVRATEVDRVEMHKCFRPGDIILARVLHQIELNVFHLSTADNELGVVVAISPSSRATWGADPIPMVPICWTEVQCPVTLVKEPRKVAKVVPE

SEQ ID NO: 17035 - protein, 190 aa, Arabidopsis thaliana
MTTGLVTPGDVIGKATEFKAGKGAYVNDATIYASLTGTCRIVSPLPESIDQRAIVEVTGHKAHGPIPETGSVVIARVTKVMTKMAAVDILCVGSKAVRENFAGVIRQQDVRATEIDKVDMHQSFHAGDIVRAMLSLGDARAYYLSTAKNELGVVSAESAAGETMVPISWTEMQCPLSGQTEQRKVAKVGN

SEQ ID NO: 17036 - protein, 195 aa, Glycine max
MEEEKEAVMVTPGEVLGRTSDVKAGRGAYVHNNTVYASLTGFRHTVPPAPDSSDLRPTVEVTGHKAHGPVPQPGSVVIARVTKVMARSASADIMCVGPKSVREKFTGIIRQQDVRATEIDKVDMHLSFHPGDIVRALVLSLGDARAYFLSTAKNELGVVSAESIAGATMVPVSWTEMQCPLTGQIEQRKVAKAAS

SEQ ID NO: 17037 - protein, 201 aa, Oryza sativa
  unsure (1)..(201): unsure at all Xaa locations
MAATAMDHDGGEVVTPGELLGXXSSLLAGLGAYADGRCVRASITGHRRLVPPPPGSTDQRSTVEVVGHKAHGAVPQPGSVVIARVTKVMARMASADIMCVDSKAVKEKFTGMIRQQDVRATEIDKVDMFQSYRPGDIVRALVLSLGDARAYYLSTAQNELGVVSAQSITGGTLVPISWTEMQCELTGQIEQRKVAKVEXIW

SEQ ID NO: 17038 - protein, 220 aa, Triticum aestivum
  unsure (1)..(220): unsure at all Xaa locations
MAATAMEHDGGAEVVVTPGELLGPSSSLEAGRGAYADGRSVRASVTGRRRFVAPAPGSSDQRSTVEVVGHKAHGAVPQPGSVVIARVTKVMARMASADIMCVDSKAVKEKFTGMIRQQDVRATEIDKVDMYQXSYRPGDIVRALVLSLGDARAYYLSTAKNELGXVVSAQSIPGGTLVPTSWTEMQCELTGQIEQRKVAKVEXILFTLPDRKVFGGVRYV

SEQ ID NO: 17039 - protein, 209 aa, Zea mays
  unsure (1)..(209): unsure at all Xaa locations
MAATAMDHDGGDDVVTPGELLGNSLTLAAGRGAYADGRSVRASVTGRRRIVPPAPASDDQRSTVEVVGHKAHGAVPQPGSVVIARVTKVMARMASADIMCVDSKAIREKFTGMIRQQDVRATEIDKVDMYQSYRPGDIVKAMVLSLGDARAYYLSTAKNELGVVSAQSIAGGTLVPISWTEMQCDLTGQIEQRKVAKVEXMCCGPPDKW

SEQ ID NO: 17040 - protein, 239 aa, Zea mays
  unsure (1)..(239): unsure at all Xaa locations
MAATAMDHDGGDDVVTPGELLGNSLTLAAGRGAYADGRSVRASVTGRRRIVPPAPASDDQRSTVEVVGHKAHGAVPQPGSVVIARVTKVMARMASADIMCVDSKAIREKFTGMIRQQDVRATEIDKVDMYQSYRPGDIVKAMVLSLGDARAYYLSTAKNELGVVSAQSIAGGTLVPISWTEMQCDLTGQIEQRKVAKVEXMCCGPPDKWWWRYTNCGPVTPGPWADYPILRRPTSLQLH

SEQ ID NO: 17041 - protein, 207 aa, Zea mays
  unsure (1)..(207): unsure at all Xaa locations
MAATAMDHDGGDDVVTPGELLGNSLTLAAGRGAYADGRSVRASVTGRRRIVPPAPGSDDQRSTVEVVGHKAHGAVPQPGSVVIARVTKVMARMASADIMCVDSKAIREKFTGMIRQQDVRATEIDKVDMYQSYRPGDIVKAMVVSLIERAYYLSTAKNELGVVSAQSIAGSTLVPISWTEMQCDLTGQIEQRKVAKVEXMCCGPPDK

SEQ ID NO: 17042 - protein, 180 aa, Schizosaccharomyces pombe
NLVLPGQVVARGAPNGEGTVKRGDYIISTRTGIFDPEKNSVTYPRKVEETAVLPNVGSIVLARVSRINARQATVNISVVDDVCTKDEFQGVIHVQDIRATEKNKVKVQNSFRPGDIVRALVISLGDGSSYFLTTARNDLGVIFAQSSETGEQMFPVDYQHMQTKSGYTEMRKCAKPILDE

SEQ ID NO: 17043 - protein, 181 aa, Schizosaccharomyces pombe
MNLVLPGQVVARGAPNGEGTVKRGDYIISTRTGIFDPEKNSVTYPRKVEETAVLPNVGSIVLARVSRINARQATVNISVVDDVCTKDEFQGVIHVQDIRATEKNKVKVQNSFRPGDIVRALVISLGDGSSYFLTTARNDLGVIFAQSSETGEQMFPVDYQHMQTKSGYTEMRKCAKPILDE

SEQ ID NO: 17044 - protein, 214 aa, Neurospora crassa
MASTSSSPSMAIPGQFLGPVSKFQPGPGTHIHESNLYSSLLGVVNITQPAKAPGPAKRLNKIINTQTTPAELPTISVLRSAGSSDKREVLPEVGNIVLCRVIRIMPRQAVVAILICGDTVLEAEWQGLIRVQDVRATEKDRVKIYDSFRPGDIVRAEVISLGDQASYYLSTARNELGVIMATSEAGNTMYPVNWKEYKDPETGLSEPRKVAKPY

SEQ ID NO: 17045 - protein, 204 aa, Drosophila melanogaster
MSEQQDETVVCLPGERLCRTEDSIVLGIGTYEQNGYIYASKSGIVNIEDSGDKCQVVSVHKPGFHLTIPATGDVVTARVLVTTPKFAKCAIFCVRNVLLESSYRGLLRKEDVRETEKDRVDIYKSFRPGDVILARVINQLEQSFLLTTAENELGVVIAYASDYRKTRVPMVPVGWSEMQCPQTTIKEPRKVAKVLPESSINAVK

SEQ ID NO: 17046 - protein, 195 aa, Homo sapiens
MAPPVRYCIPGERLCNLEEGSPGSGTYTRHGYIFSSLAGCLMKSSENGALPVVSVVRETESQLLPDVGAIVTCKVSSINSRFAKVHILYVGSMPLKNSFRGTIRKEDVRATEKDKVEIYKSFRPGDIVLAKVISLGDAQSNYLLTTAENELGVVVAHSESGIQMVPISWCEMQCPKTHTKEFRKVARVQPEFLQT

SEQ ID NO: 17047 - protein, 245 aa, Mus musculus
MAGLELLSDQGYRIDGRRAGELRKIQARMGVFAQADGSAYIEQGNTKALAVVYGPHEIRGSRSRALPDRALVNCQYSSATFSTGERKRRPHGDRKSCEMGLQLRQTFEAAILTQLHPRSQIDIYVQVLQADGGTYAACVNAATLAVMDAGIPMRDFVCACSAGFVDGTALADLSHVEEAAGGPQLALALLPASGQIALLEMDSRLHEDHLEQVLEAAAQAARGVHTLLDLVVRQHVQEASVSLGD

SEQ ID NO: 17048 - protein, 147 aa, Rattus norvegicus
MGLQLRQTFEAAILTQLHPRSQIDIYVQVLQADGGTYAACVNAATLAVMDAGIPMRDFVCACSAGFVDGTALADLSHVEEAAGGPQLALALLPASGQIALLEMDSRLHEDHLEQVLEAAAQAARDVHTLLDRVVRQHVQEASILLGD

SEQ ID NO: 17049 - protein, 247 aa, Sulfolobus tokodaii
MRQKMIQLQKPRLILDNGLRLDGRKPDEMRPIKIELGVLKNADGSAIFEMGNTKVIAAVYGPKEMHPRHLALPDRAVLRVRYHMTPFSTDERKNPAPSRREIELSKVIREALESTILVELFPRTVIDVFMEVLQADAGTRLVSLMAASMALADAGIPMRDLIAGVAVGKADGVLVLDLNEPEDMWGEADMPVAMMPSLKQVALLQLNGNMTPQEFRQALEMAQKGIETIYNLEKEAIRSKYAELKEE

SEQ ID NO: 17050 - protein, 232 aa, Anopheles gambiae str. PEST
MELLSDQGLRLDGRRANELRQIHCKMGVFSQPDGSAYVEQGNTKVLAAVYGPHQASSKRSNFDEAIVNCQYSMATFSTGERKKRPRGDRKSQEMTIHLKQALSASIKMELYPRSQIDVYIEVLQADGGNYCASVNAATLALIDAGICLKEYVCACTASLANGNVPLMDVSHLEETSGGPTLTVASLPSSGKIAFMEMSQRFHLDHLPKVLETALKGCREVQNVIDQTVREHV

SEQ ID NO: 17051 - protein, 245 aa, Anopheles gambiae str. PEST
ELLSDQGLRLDGRRANELRQIHCKMGVFSQPDGSAYVEQGNTKVLAAVYGPHQASSKRSNFDEAIVNCQYSMATFSTGERKKRPRGDRKSQEMTIHLKQALSASIKMELYPRSQIDVYIEVLQADGGNYCASVNAATLALIDAGICLKEYVCACTASLANGNVPLMDVSHLEETSGGPTLTVASLPSSGKIAFMEMSQRFHLDHLPKVLETALKGCREVQNVIDQTVREHVTYLGQAGGWGNVHK

SEQ ID NO: 17052 - protein, 265 aa, Clostridium thermocellum ATCC 27405
MNMLRIDGRGQSDLRPVKITRNYIKHAEGSVLIEMGDTKVICTATVDDKVPPFKKNTGEGWVTAEYSMLPRATAARNPRDISKLKLSGRSQEIQRLIGRALRSVVNLNLLGEREIIIDCDVIQADGGTRTASITGGFVALVDACKKLVDDGIIEKIPVTDFLAAVSVGIVDGEEMLDLCYMEDSNAATDMNVVMTSKGEFIEIQATGEQLPFKKEQFDKLLSFAEKGISQLIEIQKDALGQVASEVGRVTKDEKICNCNEEQGQA

SEQ ID NO: 17053 - protein, 246 aa, Plasmodium falciparum 3D7
MSIVQYINDEGYRIDGRKNDECRLIKISLGNGNELIDVDGFSFFEIGNTKLFAYIQGPNEYRRPDEKCLVKCNVFLSPFNILEKKRKKSKDNVTREISSYIRNICNHIILLDLYKNSEINIFLYIIERDGGLKAAAVNTCILALIDAGIAIKYFISASSVLYLQNNIIVDGNQFEVNSGSPELTLAIDMSSNNIVLLEFDAEVPIDIFQSMLKTCAQACIHVGNIMKLSIKENAIKLLSLNSILNT

SEQ ID NO: 17054 - protein, 241 aa, Arabidopsis thaliana
MEYVNPEGLRLDGRRFNEMRQIVAEVGVVSKADGSAVFEMGNTKVIAAVYGPREIQNKSQQKKNDHAVVLCEYSMAQFSTGDRRRQKFDRRSTELSLVIRQTMEACILTELMPHSQIDIFLQVLQADGGTRSACINAATLALADAGIPMRDLAVSCSAGYLNSTPLLDLNYVEDSAGGADVTVGILPKLDKVSLLQMDAKLPMETFETVFALASEGCKAIAERIREVLQENTKQLEYRRAA

SEQ ID NO: 17055 - protein, 242 aa, Glycine max
  unsure (1)..(242): unsure at all Xaa locations
MEYVSPEGLRLDGRRPMEMRQIRAEIGAVSKADGSAIFEMGNTKVIAAVYGPREVQNRNQQXXSSHALVRCEYSMANFSTGDRMRKPKGDRRSTEISLVIRQTMEACILTHLLPRSQIDIYVQVLQADGGTRSACINAATLALADAGIPMRDLVTSCSAGYLNSTPLLDLNYVEDSAGGPDVTLGILPKLDKVTLLQMDSKLPIDILENVMQLAIEGCKAIANYIREVLLENTKQLEYRRGV

SEQ ID NO: 17056 - protein, 140 aa, Glycine max
  unsure (1)..(140): unsure at all Xaa locations
IALTLRFAFQSHLHTYLYPHSTISIHVSVLSSNGSVLAAAVNACTLALVDAGIPMPGLLCGCTAGMSGSDPLLDVSLPEEQELPFLTVATTSDDMKVSMLTMDSKVHYSYIETKLPVGVDGCKQVHHILDSVIKGSNRRX

SEQ ID NO: 17057 - protein, 117 aa, Glycine max
MEYVNPLTGFRVDGRRPNEMRQLKGEVGVVSRADGSALFEMGNTRVIAAVYGPREIQNRSQQQNSKEALVRCEYRMAEFSTGDRRRKPKGDRRSTEISLVIRQTMEASILTHLMPHS

SEQ ID NO: 17058 - protein, 96 aa, Glycine max
  unsure (1)..(96): unsure at all Xaa locations
MEYVSPEGLRLDGRRPMEMRQIRAEIGAVSKADGSAIFEMGNTKVIAAVYGPREVQNRSQQXXSSHALVRCEYCMANFSTGDRMRKSYDWRSTENX

SEQ ID NO: 17059 - protein, 256 aa, Oryza sativa
  unsure (1)..(256): unsure at all Xaa locations
MEYVNPLTGFRVDGRRPNEMRQLKGEVGVVPRVRGSALFEMGNTRVIAAVYGPREVQNKGQQVNSKDALVRCEYRMADFSTGDRRRKPKGDRRSTEISLVIRQTMEASILTHLMPRSQIDIFVQVLQADGGTRAACINAATLALADAGIPMRDIVTSCSAGYLCSTPLLDLNYIEDSAGGPDVTVGFLTKMDKVTLLQMDAKLPMDTFETVMDLAIEGCKAIANYIREVLLENTRRLECQRGXLTLVGDALQLSHL

SEQ ID NO: 17060 - protein, 252 aa, Triticum aestivum
  unsure (1)..(252): unsure at all Xaa locations
MEYVNPLTGFRVDGRRPNEMRQLKGEVGVVSRADGSALFEMGNTRVIAAVYGPREIQNRSQQQNSKEALVRCEYRMAEFSTGDRRRKPKGDRRSTEISLVIRQTMEASILTHLMPHSQIDIFVQVLQADGGTRSACINAXATLALADAGIPMRDIVTSCSAGYLCSTPLLDLNYIEDSAGGADVTVGILAKMDKVTLLQMDAKLPMDTFETVMDLASEGCKAIATYIREVLLENTKQLECQRGXSNLAGGGH

SEQ ID NO: 17061 - protein, 188 aa, Triticum aestivum
  unsure (1)..(188): unsure at all Xaa locations
TNNASHTSTYSLALLRVDGRRWNELRRLHAQIRTQDAADGSSYLEMGHTKVMCVVTGPSEQQQKRGGQQAPRDMAAINVNVVVAGFSSVDRKKRGRNDKRIQEIETTIENALASNLHTHLFPHSSISISLHVLSQDGSLLAALLNATTLALIDAGFPMTDYIAACTAGSTSTYAAGDDSADPLLDLNX

SEQ ID NO: 17062 - protein, 244 aa, Zea mays
  unsure (1)..(244): unsure at all Xaa locations
MEYVNPLTGFRVDGRRPNEMRQLKGEVGVVARADGSALFEMGNTRVIAAVYGPREVQNKGQQVNSKEALVRCEYRMAEFSTGDRRRKPKGDRRSTEISLVIRQTMEASILTHLMPHSQIDIYVQVLQADGGTRSACINAATLALADAGIPMRDIATSCSAGYLCSTPLLDLNYLEDSAGGSDVTVGILAKMDKVTLLQMDAKLPIDTFENVMGLAIEGCKAIATYIREVLLENTKKLECQRGXP

SEQ ID NO: 17063 - protein, 244 aa, Zea mays; identical to SEQ ID NO: 17062
  unsure (1)..(244): unsure at all Xaa locations

SEQ ID NO: 17064 - protein, 244 aa, Zea mays; identical to SEQ ID NO: 17062
  unsure (1)..(244): unsure at all Xaa locations

SEQ ID NO: 17065 - protein, 244 aa, Zea mays
  unsure (1)..(244): unsure at all Xaa locations
MEYVNPLTGFRVDGRRPNEMRQLKGEVGVVARADGSALFEMGNTRVIAAVYGPREVQSKGQQVNSKEALVRCEYRMAEFSTGDRRRKPKGDRRSTEISLVIRQTMEASILTHLMPHSQIDIYVQVLQADGGTRSACINAATLALADAGIPTRDIATSCSAGYLCSTPLLDLNYLEDSAGGSDVTVGILAKMDKVTLLQMDAKLPIDTFENVMGLAIEGCKAIATYIREVLLENTKKLECQRGXP

SEQ ID NO: 17066 - protein, 240 aa, Zea mays
MMEGGSRADGRNPNQLRPFTCTGNPLHRAHGSARWAQGDTVVLAAVYGPKPGTRKGENPEKASIEVVWKPKTGQIGRQEREYEMTLKRTLQSICLLTVHPNTTTSVVLQVVGDDGSLMSCAINASCAALAFAGIPMKHLAVAISCGVMDNGVVILDTSRAEEQQARSFAHLVFPNSRKSVESKDPTQRDEESERGLITCITHGAMSEDDYFNCIERGVMASSRISDFMRKTLQKEASRDA

SEQ ID NO: 17067 - protein, 240 aa, Zea mays
MMEGGSRADGRNPNQLRPFTCTGNPLHRAHGSARWAQGDTVVLAAVYGPKPGTRKGENPEKASIEVVWKPKTGQIGRQEREYEMTLKRTLQSICLLTVHPNTTTSVVLQVVGDDGSLMPCAINASCAALAFAGIPMKHLAVAISCGVMDNGVVILDTSRAEEQQARSFAHLVFPNSRKSVESKDPTQRDEESERGLITCITHGAMSEDDYFNCIERGVMASSRISDFMRKTLQKEASRDA

SEQ ID NO: 17068 - protein, 240 aa, Zea mays
MMEGGSRADGRNPNQLRPFTCTGNPLHRAHGSARWAQGDTVVLAAVYGPKPGTRKGENPEKASIEVVWKPKTGQIGRQEREYEMTLKRTLQSICLLTVHPNTTTSVVLQVVGDDGSLMSCAINASCAALAFAGIPMKHLAVAISCGVMDNGVVILDTSRAEEQQARSFAHLVFPNSRKSVESKDPTQRDEESERGLITCITHGAMSEDDYFNCIERGVMASSRISDFMRKTLQKEVSRDA

SEQ ID NO: 17069 - protein, 240 aa, Zea mays
MMEGGSRADGRNPNQLRPFTCTGNPLHRAHGSARWAQGDTVVLAAVYGPKPGTRKGENPEKASIEVVWKPKTGQIGRQEREYEMTLKRTLQSICLLTVHPNTTTSVVLQVVGDDGSLMSCAINASCAALAFAGIPMKHLAVAISCGVMDNGVVILDTSRAEEQQARSFAHLVFPNSRKSVESKDTTQRDEESERGLITCITHGAMSEDDYFNCIERGVMASSRISDFMRKTLQKEASRDA

SEQ ID NO: 17070 - protein, 239 aa, Zea mays
MMEGGSRADGRNPNQLRPFTCTGNPLHRAHGSARWAQGDTVVLAAVYGPKSGTRKGENPEKASIEVVWKPKTGQIGRQEREYEMTLKRTLQSICLLTVHPNTTSVVLQVVGDDGSLMSCAINASCAALAFAGIPMKHLAVAISCGVMDNGVVILDTSRAEEQQARSFAHLVFPNSRKSVESKDTTQRDEESERGLITCITHGAMSEDDYFNCIERGVMASSRISDFMRKTLQKEASRDA

SEQ ID NO: 17071 - protein, 239 aa, Zea mays
  unsure (1)..(239): unsure at all Xaa locations
MGRGSRADGRNPNQLRPFTCTGNPLHRAHGSARWAQGDTVVLAAVYGPKSGTRKGENPDNASIEVVWKPKTGQIGRQEREYEMTLKRTLQSICLLTVHPNTTTSVVLQVFFDSAXLSSCAINASCAALAFAGIPMKHLAVAISCGVMDNGVVILDTSRAEEQQARSFAHLVFPNSRKSVESKDTTQRDEESERGLITCITHGAMSEDDYFNCIERGVMASSRISDFMRKTLQKEASRDA

SEQ ID NO: 17072 - protein, 246 aa, Aeropyrum pernix
MAGPAQAGVELIRDGRRHDGRLPEDLRPVRMQVGILHNADGSALVEFGRTRVLAAVYGPREPHQRFYVLPDRAALRVRYHMAPFSTDERKSPAPSRREIELSKVVREALEPVVLAEEFPRTVIDVFLEVLQADGGTRTAAVTAASLALADAGIPMRALVGGVAVGKIQGVLVVDVDELEDMYGEADMPVAAAPDIGEITLLQLNGVLTGEEFRTALAMALRAIDRVVEMEKEAIRKSYLEVGGGQE

SEQ ID NO: 17073 - protein, 252 aa, Trypanosoma brucei
MPVIKEYINPAGLRLDGRRQNEPRRLALEFGKISGCDGCCTVVSGLSHVCATVYGPREVSNRLDGKYNEVTITCDVVVAAFAGERRREQQRYSRLSEDISASVLDVARSVVLLSQYPNSQIHICIEVLKQDGSDKAACINAACLALIDASIAMRDVVYTQTVGLIEGFDVVDLTTEEIHSQCPSICITVQGHDPTNIVWMESNSRLAPEVITRLVKVAQKASTDVFETALRGPLEEHAATVLRLQANLGNIE

SEQ ID NO: 17074 - protein, 209 aa, Encephalitozoon cuniculi
MLVSEEGFREDGRRPNELRRIEATKRRIGEKGRVDMRQGNTQVSVICSGPREIGKLSVGVEFYAVSRQEPVSEKRASEYEGLLLDIFGDVLLPEASVDIQVIVREDGGSLLSTMINCTTLCLSYFGMPLVDMCYSSAVAEGCVDLASTEESQRVPVVTVAYLMNRKSILYLSLSGRVACSRLQASVLDAIGACNAIGECLGNFFSPSLE

SEQ ID NO: 17075 - protein, 240 aa, Caenorhabditis elegans
MNIISEHGFRIDGRRPAQIRNINTRLGLNRNAEGSCYLEHGNTKVLCAVYGPYEGKSSKRIEDKCAIVCQYSATKFSGLERKNRTRGDRKSTEISRLLEKAFESVILTEAFPRSQLDIFCEVIQGDGSNLAACVNATSLALADAGIPMKGIASAATCGVVDGKPIVDLTSREETDLLPRVTLATICGRDEVILVELQNRLHIDHLSTVMDAAKATCADVYECLAVVAQQHLKACAPILGN

SEQ ID NO: 17076 - protein, 241 aa, Caenorhabditis elegans
MPTTRSNLSIPLTHLARIDDDRMETDSEEHKRANTAFRPLCVKCGVFGAQDGSGYAEFGNTRVLAQITGPDGDGKWEEDRAKITIELKGIEDSVKVAEYRAQLASAVSAVIFASKYPGKVIEIEITVLSDDGGVLSTALSAVTLAISHSGIENMGLMASVHVAMNSDGECLTDPSTSESEGAIGGVTFAFVPNLGQTTCVDIYGRIPLKSTSSLLEFAKQRACALVPTIHKAIVNSVRERK

SEQ ID NO: 17077 - protein, 246 aa, Drosophila melanogaster
MSGKYDLLSEQGLRLDGRRPHELRRIKCKLGVFEQPDGSAYMEQGNTKVLAAVYGPHQAKGNQTESVINCQYSQATFSTAERKNRPRGDRKSLEFKLYLQQALSAAIKSELYPRSQIDIYVEVLQDDGANYAVALNAATLALIDAGICLNEFIVACTASLSKSNIPLTDISQFEEVSGGPKLTVAALPTAEKIAFLEMSERFHIDHLETVIETAMAGCREIRDILEAAVKEHLLHMGSASDFAKVG

SEQ ID NO: 17078 - protein, 246 aa, Drosophila melanogaster
MSGKYDLLSEQGLRLDGRRPHELRRIKCKLGVFEQPDGSAYMEQGNTKVLAAVYGPHQAKGNQTESVINCQYSQATFSTAERKNRPRGDRKSLEFKLYLQQALSAAIKSELYPRSQIDIYVEVLQDDGANYAVALNAATLALIDAGICLNEFIVACTASLSKSNIPLTDISQFEEVSGGPKLTVAALPTAEKIAFLEMSERFHIDHLGTVIETAMAGCREIRDILEAAVKEHLLHMGSASDFAKVG

SEQ ID NO: 17079 - protein, 326 aa, Drosophila melanogaster
MLAVNQTKNTLLDGASIEEEPYTTPQESEDFFESLDKPSREPTQLAPRNTFIRAGVLTTVRGSAYMEYGNTKVLAIVAPPKELIRASARRMNMGVLNCYVNFAAFSTGDLDSVPERERHLSSMLTKAMEPVVCRTEFLNFQLDIRVLILDDDGCLLSTAINCCGVALVECGISTYDLITASTACIYRDHVFLNPSAKVEELLWKHRNSSTDSTTSPSSAQEHGLIITASMDTFEQIAQCQQCGYLSPATYVKLLDYTLAINKSLRELVKGVLTKRVKEQHELDLREKAETALEDQRLEEIIEKLKKQGPEEFIQSNIREDPYVKRQ

SEQ ID NO: 17080 - protein, 218 aa, Plasmodium yoelii yoelii
MGYQNISNDADGFAFYEIGNTKILSYIQGPTELKKTDDKCSIKCDVFLSPFNVYDKRKKKTKDNITNEISAYIRNICENIILLDLYKNSEINIFLYIIERDGGIKHAAINTCILALIDAGIAIKYFISACSVLYLQNKIIVDGNQLEINSGSPELTMVIELNTHKIILLEFDAEIPIDIFESMVQTCIDSCINIGRVMKLTVKENAIGLLCLNNLLTN

SEQ ID NO: 17081 - protein, 245 aa, Homo sapiens
MAGLELLSDQGYRVDGRRAGELRKIQARMGVFAQADGSAYIEQGNTKALAVVYGPHEIRGSRARALPDRALVNCQYSSATFSTGERKRRPHGDRKSCEMGLQLRQTFEAAILTQLHPRSQIDIYVQVLQADGGTYAACVNAATLAVLDAGIPMRDFVCACSAGFVDGTALADLSHVEEAAGGPQLALALLPASGQIALLEMDARLHEDHLERVLEAAAQAARDVHTLLDRVVRQHVREASILLGD

SEQ ID NO: 17082 - protein, 426 aa, Mortierella chlamydospora
VVVIGHVDSGKSTTTGHLIYKCGGIDKRTIEKFEKEAAELGKGSFKYAWVLDKLKAERERGITIDIALWKFETPKYYVTVIDAPGHRDFIKNMITGTSQADCAILIIAGGTGEFEAGISKDGQTREHALLAFTLGVKQLIVAVNKMDTTKWSQDRFEEIVKEVSTFVKKVGYNPKAVAFVPISGWHGDNMLEESTNMPWFKGWTKETKAGSQKGKTLLEAIDAIEPPSRPTEKPLRLPLQDVYKIGGIGTVPVGRVETGIIKAGMVVTFAPSNVTTEVKSVEMHHEVLTEGIPGDNVGFNVKNVSVKDIRRGNVCSDSKNDPAKEAASFNAQVIVLNHPGQISNGYAPVLDCHTAHIACKFAEILEKIDRRTGKAMEEFPKFIKSGDAAIVKFIPSKPLCVESFQEYPPLGRFAVRDMRQTVAVGV

SEQ ID NO: 17083 - protein, 426 aa, Mortierella multidivaricata
VVVIGHVDSGKSTTTGHLIYKCGGIDKRTIEKFEKEAAELGKGSFKYAWVLDKLKAERERGITIDIALWKFETPKYYVTVIDAPGHRDFIKNMITGTSQADCAVLIIAGGTGEFEAGISKDGQTREHALLAFTLGVKQLIVAVNKMDTTKWSQDRFEEIVKEVSTFVKKVGYNPKTVAFVPISGWHGDNMLEESTNMPWFKGWTKEIKSGTQKGKTLLEAIDAIEPPSRPTEKPLRLPLQDVYKIGGIGTVPVGRVETGIIKAGMVVTFAPSNVTTEVKSVEMHHEVLTEGIPGDNVGFNVKNVSVKDIRRGNVCSDSKNDPAKEAASFNAQVIVLNHPGQISNGYAPVLDCHTAHIACKFAEILEKIDRRTGKAMEEFPKFIKSGDAAIVKMVPSKPLCVESFQEYPPLGRFAVRDMRQTVAVGV

SEQ ID NO: 17084 - protein, 424 aa, Dissophora decumbens
VVVIGHVDSGKSTTTGHMIYKCGGIDKRTIEKFEKEAAELGKGSFKYAWVLDKLKAERERGITIDIALWKFETPKFYVTVIDAPGHRDFIKNMITGTSQADCAILIIAGGTGEFEAGISKDGQTREHALLAFTLGVKQLIVAVNKMDTTKWSQDRFEEIIKEVSTFVKKVGYNPKSVPFVPISGWHGDNMLEESVNMPWFKGWTKETKTGSFKGKTLLEAIDAIEPPSRPTDKPLRLPLQDVYKIGGIGTVPVGRVETGVIKAGMVVTFAPSNVTTEVKSVEMHHEVLTEGIPGDNVGFNVKNVSVKDIRRGNVCSDSKNDPAKEAASFNAQVIVLNHPGQISNGYAPVLDCHTAHIACKFGEILEKIDRRTGKAMEEFPKFIKSGDAAIVKMIPSKPLCVESFQEYPPLGRFAVRDMRQTVAV

SEQ ID NO: 17085 - protein, 426 aa, Gongronella butleri
VVVIGHVDSGKSTTTGHLIYKCGGIDKRTIEKFEKEAAELGKGSFKYAWVLDKLKAERERGITIDIALWKFETPKYHVTVIDAPGHRDFIKNMITGTSQADCGILIIAAGTGEFEAGISKDGQTREHALLAFTLGVRQLIVAINKMDTTKWSEARFNEIVKEVSSFIKKIGFNPKSVPFVPISGWHGDNMLEESVNMPWYKGWNKETKAGAKSGKTLLDAIDAIDPPTRPSDKPLRLPLQDVYKIGGIGTVPVGRVETGVIKAGMVVTFAPANVTTEVKSVEMHHEQLVEGLPGDNVGFNVKNVSVKDIRRGNVCSDSKNDPAKEAGSFTAQVIVLNHPGQIGAGYAPVLDCHTAHIACKFAELLEKIDRRSGKKLEDAPKFVKSGDSAIVKMVPSRPMCVEAYTDYPPLGRFAVRDMRQTVAVDV

SEQ ID NO: 17086 - protein, 435 aa, Blastocystis hominis
MGKEKPHINLVVIGHVDSGKSTTTGHLIYACGGIDKRTIERFEEGGQRIGKGSFKYAWVLDKMKAERERGITIDISLWKFQTEKYFFTIIDAPGHRDFIKNMITGTSQADVAILIIAAGTGEFEAGYGKNGQTREHALLANTLGVKQMICCVNKMDDKSVNYSEARYKEIKAEMTSFLTKVGYQKVEERIPFIPISGFNGDNMLERSANMPWYKGPTLIEALDNIHPPKRPVDKPLRLPLQDVYKIGGIGTVPVGRVETGILKPGMTVTFAPVGVTTEVKSVEMHHESIPQALPGDNVGFNVKNVSVKDIHRGNVCGDAKNDPPCRVESFTAQVIVMNHPSGIRPGYCPVMDCHTAHIACKFEKIMSEMDKRTGKVLRENPDIVKNGKSMMAELVPSKPLCVESFQDYPPLGRFAVRDMRQTVAVGIIKSTVRAK

SEQ ID NO: 17087 - protein, 447 aa, Saccharum hybrid cultivar CP65-357
MGKEKTHINIVVIGHVDSGKSTTTGHLIYKLGGIDKRVIERFEKEAAEMNKRSFKYAWVLDKLKAERERGITIDIALWKFETTKYYCTVIDAPGHRDFIKNMITGTSQADCAVLIIDFTTGGFEAGIFKDGQTREHALLAFTLGVKQMICCCNKMDATTPKYSKARYDEIVKEVSSYLKKVGYNPDKIHFVPISGFEGDNMIERSTNLDWYKGPTLLEALDLINEPKRPSDKPLRLPLQDVYKIGGIGTVPVGRVETGVIKPGMVVTFGPSGLTTEVKSVEMHHEALQEALPGDNVGFNVKNVAVKDLKRGYVASNSKDDPAKEAASFTSQVIIMNHPGQIGNGYAPVLDCHTSHIAVKFAELVTKIDRRSGKELEKEPKFLKNGDAGMVKMVPTKPMVVETFSEYPPLGRFAVRDMRQTVAVGVIKSVEKKDPTGAKVTKAAAKKK

SEQ ID NO: 17088 - protein, 441 aa, Saccharum hybrid cultivar CP72-2086
HINIVVIGHVDSGKSTTTGHLIYKLGGIDKRVIERFEKEAAEMNKRSFKYAWVLDKLKAERERGITIDIALWKFETTKYYCTVIDAPGHRDFIKNMITGTSQADCAVLIIDSTTGGFEAGISKDGQTREHALLAFTLGVKQMICCCNKMDATTPKYSKARYDEIVKEVSSYLKKVGYNPDKIHFVPISGFEGDNMIERSTNLDWYKGPTLLEALDLINEPKRPSDKPLRLPLQDVYKIGGIGTVPVGRVETGVIKPGMVVTFGPSGLTTEVKSVEMHHEALQEALPGDNVGFNVKNVAVKDLKRGYVASNSKDDPAKEAASFTSQVIIMNHPGQIGNGYAPVLDCHTSHIAVKFAELVTKIDRRSGKELEKEPKFLKNGDAGMVKMVPTKPMVVETFSEYPPLGRFAVRDMRQTVAVGVIKSVEKKDPTGAKVTKAAAKKK

SEQ ID NO: 17089 - protein, 447 aa, Salsola komarovii
MGKEKIHISLVVIGHVDSGKSTTTGHLIYKLGGIDKRVIERFEKEAAEMNKRSFKYAWVLDKLKAERERGITIDIALWKFETNKYYCTVIDAPGHRDFIKNMITGTSQADCAILIIDSTTGGFEAGISKDGQTREHALLAFTLGVKQMICCCNKMDATTPKYSKSRFDEIVKEVSSYLKKVGYNPDKIAFVPISGFEGDNMIERSTNLDWYKGPTLLEALDMINEPKRPSDKPLRLPLQDVYKIGGIGTVPVGRVETGVLKPGMVVTFGPTGLTTEVKSVEMHHESLPEALPGDNVGFNVKNVAVKDIKRGFVASDSKNDPAKEAANFTAQVIIMNHPGQIGNGYAPVLDCHTSHIAVKFAELVTKIDRRSGKELEKEPKFLKNGDAGMIKMVPTKPMVVETFSEYPPLGRFAVRDMRQTVAVGVIKNVEKKDPTGAKVTKAALKKK

SEQ ID NO: 17090 - protein, 304 aa, Campylobacter jejuni
MQTNIEKYLQEHENKELCRFITCGSVDDGKSTLIGRLLYDTKALFSDQLSTLEKDSKKMGNAGDKLDFALLVDGLASEREQGITIDVAYRFFTSNKRKFIIADTPGHEQYTRNMATGASTADIAIILIDARKGVLKQTKRHSYIVSLLGIKNFIIAINKMDLVSYEEKIFNNICKDYEKIIPYLQEDIQTHFIPICALNGENITQKSRNLSWYKGETLLALLDEIKINKIIQNDFIMPVQYVNRPHLNFRSFCGNIASGYVKLQDEIIVLPSMQKSKIKSIITNDIKDLRTLDENEIIPSQNEA

SEQ ID NO: 17091 - protein, 423 aa, Archaeoglobus fulgidus DSM 4304
MAKEKEHINVAFIGHVDHGKSTLIGRLLYETGEIPEHIIEKMRKEAQEKGKATFEFAWVMDRLKEERERGVTIDVAHRKFQTDKYYITIVDCPGHRDFIKNMITGASQADAAVLVMDVVEKVQPQTREHIFLARTLGINQIIVAINKMDRVNYDQKEYEAAKEAVSKLLKMVGYKVDEIPFIPVSAYYGDNVAKKSDKTPWYNGPTLLEAFDLLKPPEKLVDKPLRIPIQDVYSISGVGTVPVGRVESGVLRVGDKVVFEPAGVSGEVKSIEMHHEPIQEAYPGDNIGFNVRGVSKKDIRRGDVAGHPDNPPTVVKDFTAQLVVLQHPTAITVGYTPVVHAHTAQIACRFVELQKKIDPRTGQVKEENPQFLKTGDAAIVKLEPTRPMVIERVKDIPPMGRFAIRDMGMTIGAGMVLDLTPRK

SEQ ID NO: 17092 - protein, 451 aa, Cyanophora paradoxa
MGKQKTHINIVVIGHVDSGKSTTTGHLIYKCGGIDKRTIEKFEKEAAEIGKGSFKYAWVLDKLKAERERGITIDIALWKFETPKYYVTIIDAPGHRDFIKNMITGTSQADCAVLVIPAATGEFEAGISKDGQTREHALLAYTLGVKQMIVAVNKMDEKSVNYGQPRFEEIKKEVSAYLKKIGYNPDKIPFVPISGFNGDNMLEPSSNLGWYKGPTLVEALDQVEEPKRPSEKPLRLPLQDVYKIGGIGTVPVGRVETGVIKPGMTVVFAPSAVTTEVKSVEMHHESMPEALPGDNVGFNVKNVSVKDIRRGYVASDVKNDPAKESESFVAQVIILNHPGQIGAGYSPVVDCHTAHIACKFSELITKIDRRSGKELEASPKFVKSGDACMARLIPNKPMCVEAFTNYPPLGRFAVRDMRQTVAVGVIKEVVKKEPSAKGAAGAAKGGKAGKK

SEQ ID NO: 17093 - protein, 449 aa, Porphyra purpurea
MGKEKQHVSIVVIGHVDSGKSTTTGHLIYKCGGIDKRAIEKFEKEAAEMGKGSFKYAWVLDKLKAERERGITIDIALWKFETDKYNFTIIDAPGHRDFIKNMITGTSQADLAILVIASPPGEFEAGISQNGQTREHALLAYTLGVKQMIVACNKMDDKNVNWSKERYEEVSKEMDLYLKKVGYNPPKVPKVPTSGWTGENLFERTGGDHALGKWYKGPCLLEALDACDPPKRPVDKPLRLPLQDVYKIGGIGTVPVGRVETGVIKPGMVVTFAPSGLSTEVKSVEMHHEALTQAGPGDNVGFNVKNVSVKDLKRGYVCGDSKNDPPKGCASFNAQVIILNHPGEIHAGYAPVLDCHTAHIACKFSELILKMDRRSGKKLEDSPKMIKSGDAAMVKMVASKPMCVEAFTSYPPLGRFAVRDMRQTVAVGVIKSVEKKEVEGKMTKSAAKK

SEQ ID NO: 17094 - protein, 399 aa, Hexamita sp.
NGKSTLTGHLIYKCGGIDQRTLDEYEKRANEMGKGSFKYAWVLDQLKDERERGITINIALWKFETKKFTVTIIDAPGHRDFIKNMITGTSQADVAILVIASGQGEFEAGISKEGQTREHATLAHTLGIKTLIVCVNKMDDPQVNYSEARYKEIKEEMQKNLKQIGYKKWDEFDFIPTSGWTGDSIMEKSPNMPWYSGPCLIDAIDGLKAPKRPTDKPLRLPIQDVYKINGVGTVPAGRVESGLLIPNMTVVFAPSTTTAEVKSVEMHHEELPQAGPGDNVGFNVRGIAAKDIKKGYVVGDTKNDPPVGCKSFTAQVIIMNHPKKIQPGYSPVIDCHTAHIACKFDAFLQKLNARTLKPEMENPTEASRGECIVVRMVPSKPLSCESFNDYAALGRFAVR

SEQ ID NO: 17095 - protein, 447 aa, Vicia faba
MGKEKVHINIVVIGHVDSGKSTTTGHLIYKLGGIDKRVIERFEKEAAEMNKRSFKYAWVLDKLKAERERGITIDIALWKFETSKYYCTVIDAPGHRDFIKNMITGTSQADCAVLIIDSTTGGFEAGISKDGQTREHALLAFTLGVKQMICCCNKMDATTPKYSKGRYEEIVKEVSSYLKKVGYNPDKIPFVPISGFEGDNMIERSTNLDWYKGPTLLDALDNINEPKRPSDKPLRLPLQDVYKIGGIGIVPVGRVETGVVKPGMLVTFAPTGLTTEVKSVEMHHEALTEALPGDNVGFNVKNVAVKDLKRGFVASNSKDDPAKEAANFTSQVIIMNHPGQIGNGYAPVLDCHTSHIAVKFAELITKIDRRSGKEIEKEPKFLKNGDAGMVKMIPTKPMVVETFAEYPPLGRFAVRDMRQTVAVGVIKSVEKKDPTGAKVTKAAAKKK

SEQ ID NO: 17096 - protein, 447 aa, Daucus carota
MGKEKIHISIVVIGHVDSGKSTTTGHLIYKLGGIDKRVIERFEKEAAEMNKRSFKYAWVLDKLKAERERGITIDIALWKFETTKYYCTVIDAPGHRDFIKNMITGTSQADCAVLIIDSTTGGFEAGISKDGQTREHALLAFTLGVKQMICCCNKMDATTPKYSKSRFEEIVKEVSSYLKKVGYNPDKIAFIPISGFEGDNMIDRSTNLDWYKGPTLLEALDQISEPKRPSDKPLRLPLQDVYKIGGIGTVPVGRVETGVIKPGMVVTFGPSGLTTEVKSVEMHHEALQEALPGDNVGFNVKNVAVKDLKRGYVASNSKDDPAKEAANFTAQVIIMNHPGQIGNGYAPVLDCHTSHIAVKFAEIQTKIDRRSGKELEKEPKFLKNGDAGFVKMIPTKPMVVETFMSYPPLGRFAVRDMRQTVAVGVIKSVEKKDPTGAKVTKAAIKKK

SEQ ID NO: 17097 - protein, 515 aa, Nicotiana tabacum
MVNVEDGKPEEAIKPEKTNGEDSAMAEEGEAGDDEKPDIPEDELKDEAHPDLEPKNVEPKGIAGKEASPPEDIQDEVEVNKKRHLNVVFIGHVDAGKSTIGGQILLLSGQVDDRTIQKYEREAKDKNRESWYMAYIMDTNEEERVKGITVEVGRAHFETDTTRFTILDAPGHKSYVPNMISGRSQADIGLLVISARKGEFETGYERGGQTREHVQLAKTLGVTKFLVVVNKMDDPTVNWSKERYDEIESKMVPFLRSSGYNVKKDVQFLPISGLLGSNLKTRMEKSVCPWWNGPCLFETLDAVEVPPRDPNGPLRMPIIDKFKDMGTVVMGKIESGSIHEGDNLLIIPNKAAVKVLAIFCDEDKVRHVGPGENVRVRLSGVEEDDILSGFVLCSVAKPIHAVTEFVAQLQILELLDNAIFTAGYKAVLHIHSVVEECEIVELMQQIDLKTKKPMKKKPLFVKNGAIVLCRVQVNNLICVEKFSDFAQLGRFTLRTEGKTVAVGKITALPTVADNA

SEQ ID NO: 17098 - protein, 426 aa, Mortierella polycephala
VVVIGHVDSGKSTTTGHLIYKCGGIDKRTIEKFEKEAAELGKGSFKYAWVLDKLKAERERGITIDIALWKFETPKYHVTVIDAPGHRDFIKNMITGTSQADCAILIIAGGTGEFEAGISKDGQTREHALLAFTLGVKQLIVAVNKMDTTKWSQDRFEEIIKEVSTFVKKVGYNPKSVAFVPISGWHGDNMLLESTNMPWFKGWTKEGKNGSYKGKTLLEAIDAIEPPSRPTEKPLRLPLQDVYKIGGIGTVPVGRVETGIIKAGMVVTFAPSNVTTEVKSVEMHHEVLVQGIPGDNVGFNVKNVSVKDIRRGNVCSDSKNDPAKEAASFNAQVIVLNHPGQISNGYAPVLDCHTAHIACKFSEILEKIDRRTGKAIEEFPKFIKSGDAAIVKMIPSKPLCVESFQEYPPLGRFAVRDMRQTVAVGV

SEQ ID NO: 17099 - protein, 447 aa, Lilium longiflorum
MGKEKVHINIVVIGHVDSGKSTTTGHLIYKLGGIDKRVIERFEKEAAEMNKRSFKYAWVLDKLKAERERGITIDIALWKFETTRYYCTVIDAPGHRDFIKNMITGTSQADCAVLIIDSTTGGFEAGISKDGQTREHALLAFTLGVKQMICCCNKMDATTPKYSKARYDEIIKEVSSYLKKVGYNPDKIPFVPISGFEGDNMIERSNNLDWYKGPTLLEALDLINEPKRPTDKPLRLPLQDVYKIGGIGTVPVGRVETGIVKPGMVVTFGPTGLTTEVKSVEMHHEALLEALPGDNVGFNVKNVAVKDLKRGFVASNSKDDPAKEAANFTSQVIIMNHPGQIGNGYAPVLDCHTSHIAVKFAEILTKIDRRSGKEIEKEPKFLKNGDAGFVKMIPTKPMVVETFSEYPPLGRFAVRDMRQTVAVGVIKSVEKKDPTGAKVTKAAIKKK

SEQ ID NO: 17100 - protein, 447 aa, Lilium longiflorum
MGKEKVHINIVVIGHVDSGKSTTTGHLIYKLGGIDKRVIERFEKEAAEMNKRSFKYAWVLDKLKAERERGITIDIALWKFETTKYYCTVIDAPGHRDFIKNMITGTSQADCAILIIDSTTGGFEAGISKDGQTREHALLAFTLGVKQMICCCNKMDATTPKYSKARYDEIVKEVSSYLKKVGYNPDKIPFVPISGFEGDNMIERSINLDWYKGPTLLEALDMINEPKRPSDKPLRLPLQDVYKIGGIGTVPVGRVETGVLKPAMVVTFGPTGLTTEVKSVEMHHEALVEALPGDNVGFNVKNVAVKDLKRGFVASNSKDDPAKEAANFTSQVIIMNHPGQIGNGYAPVLDCHTSHIAVKFNEILTKIDRRSGKELEKEPKFLKNGDAGMIKMIPTKPMVVETFSEYPPLGRFAVRDMRQTVAVGVIKNVEKKEPTGAKVTKSAVKKK

SEQ ID NO: 17101 - protein, 629 aa, Pneumocystis carinii
MNSEANNSDKEGTWEDKIDLEEIPRKIGQLRMSAEAEEFRPRNMYYGPQDCTMNCDANNMPYGHFMGYNQRYDDRKYEPCNRDYSRQGMNIRGIEKGMTTPESKGSATSGQRTSAKVIRVDDAPKVSGLDGSVVGRNGNRVNKVDKRVPSMDMENLSLAASKQEKNHVSVTGDEERKDLDIASQFQEEIDEEVLQDIYGKEHVNVVFIGHVDAGKSTLGGNILYMTGMVDKRTMEKYEKDAKEAGRESWYLSWALDSTKEERSKGKTVELGRAYFETEKRRYTILDAPGHKSYVPNMIEGTAQAEVAVLVISARKGEYETGFEKGGQTREHAMLSKTQGVSKLIVAINKMDDPTVEWSKERYDECTNGITTFLRKEVGYNPKTDFVFMPISAFTGINIKERIDKKICPWYNGPSLLEYLDEMDTFERKLNTPLIIPIQAKYKDMGLVIEGKIESGYVKKGSNVILMPNKTVVEVVGLYNELEEIRVGRCGEQIKLRIKGVEEEDVMTGHILSSLESPVSTAKIFEAQIAILEVKSLLTAGYSCIIHIHSAVQEVTFLKLLYKLDKLTNRRSKKPPAFATKGMKIVALLEVASPLCLETFDKYKQLGRFILRNEGLTVAIGKVTKLISEE

SEQ ID NO: 17102 - protein, 461 aa, Podospora curvicolla
MGKEDKTHINVVVIGHVDSGKSTTTGHLIYKCGGIDKRTIEKFEKEAAELGKGSFKYAWVLDKLKAERERGITIDIALWKFETPKYYVTVIDAPGHRDFIKNMITGTSQADCAILIIAAGTGEFEAGISKDGQTREHALLAYTLGVKQLIVAINKMDTTKWSEARFNEIIKETSNFIKKVGYNPKTVAFVPISGFNGDNMLEASTNCPWYKGWEKEVKGGKATGKTLLEAIDSIEPPKRPTDKPLRLPLQDVYKIGGIGTVPVGRIETGILKPGMVVTFAPSNVTTEVKSVEMHHEQLSEGVPGDNVGFNVKNVSVKEIRRGNVAGDSKNDPPLGAASFDAQVIVLNHPGQVGAGYAPVLDCHTAHIACKFAELLQKIDRRTGKAVEESPKFIKSGDAAIVKMIPSKPMCVEAFTEYPPLGRFAVRDMRQTVAVGVIKKVEKAAAGSGKVTKSAAKAGGKK

SEQ ID NO: 17103 - protein, 458 aa, Mucor racemosus
MGKEKTHVNVVVIGHVDSGKSTTTGHLIYKCGGIDKRTIEEFEKEAAELGKGSFKYAWVLDKLKAERERGITIDIALWKFETPKYNVTVIDAPGHRDFIKNMITGTSQADCAILIIAGGTGEFEAGISKDGQTREHALLAFTLGFRQLIVAINKMDTTKWSQDRYNEIVKEVSGFIKKIGFNPKSVPFVPISGWHGDNMLDESTNMPWFKGWNKETKAGSKTGKTLLEAIDAIEPPVRPSDKPLRLPLQDVYKIGGIGTVPVGRVETGTIKAGMVVNFAPAAVTTEVKSVEMHHETLTEGLPGDNVGFNVKNVSVKDIRRGNVCSDSKNDPAKESASFTAQVIILNHPGQISAGYAPVLDCHTAHIACKFSELIEKIDRRSGKKMEDSPKFVKSGDSAIVKMVPSKPMCVEAYTDYPPLGRFAVRDMRQTVAVGVIKAVEKVDKAGKVTKAAAKASKK

SEQ ID NO: 17104 - protein, 458 aa, Mucor racemosus
MGKEKTHVNVVVIGHVDSGKSTTTGHLIYKCGGIDKRTIEKFEKEAAELGKGSFKYAWVLDKLKAERERGITIDIALWKFETPKYNVTVIDAPGHRDFIKNMITGTSQADCAILIIAGGTGEFEAGISKDGQTREHALLAFTLGFRQLIVAINKMDTTKWSQDRYNEIVKEVSGFIKKIGFNPKSVPFVPISGWHGDNMLDESTNMPWFKGWNKETKAGSKTGKTLLEAIDAIEPPVRPSDKPLRLPLQDVYKIGGIGTVPVGRVETGTIKAGMVVNFAPAAVTTEVKSVEMHHETLTEGLPGDNVGFNVKNVSVKDIRRGNVCSDSKNDPAKESASFTAQVIILNHPGQISAGYAPVLDCHTAHIACKFSELIEKIDRRSGKKMEDSPKFVKSGDSAIVKMVPSKPMCVEAYTDYPPLGRFAVRDMRQTVAVGVIKAVEKVDKAGKVTKAAAKASKK

SEQ ID NO: 17105 - protein, 592 aa, Schizosaccharomyces pombe
MSRHRDVKNLDLDDYELDEEPGEEELTEEQEEEFRSAVATVRETLLGVPISEKEIADTVWYYYFDVEKSVNYLLQKASSKAGAKEKQNTDSQKEKKQNKSKEALADAKDPLDESSNGIKNLSLNKNDEPAFQTNGEVKMKNSSESDNQPEKKKIKKQNPTDLVSVPEIFEQSNPKPVVHLVVTGHVDSGKSTMLGRIMFELGEINSRSMQKLHNEAANSGKGSFSYAWLLDTTEEERARGVTMDVASTTFESDKKIYEIGDAPGHRDFISGMIAGASSADFAVLVVDSSQNNFERGFLENGQTREHAYLLRALGISEIVVSVNKLDLMSWSEDRFQEIKNIVSDFLIKMVGFKTSNVHFVPISAISGTNLIQKDSSDLYKWYKGPTLLSALDQLVPPEKPYRKPLRLSIDDVYRSPRSVTVTGRVEAGNVQVNQVLYDVSSQEDAYVKNVIRNSDPSSTWAVAGDTVTLQLADIEVNQLRPGDILSNYENPVRRVRSFVAEIQTFDIHGPILSGSTLVLHLGRTVTSVSLKIVTVNNKRSRHIASRKRALVRISFLDGLFPLCLAEECPALGRFILRRSGDTVAAGIVKELC

SEQ ID NO: 17106 - protein, 695 aa, Schizosaccharomyces pombe
MSRLSQLLNSKKAKQKPPSEHPIGLSSILKQDSSSSSDSPNFFPSSSTNDHQERDTINDTNFVVPEKQKTSKLALLAAERKKLHSSFPSTQQQPPKTEKEKEKEPIQAKHKKNVENDFLLQRFRKVRIAEKKDSEQPSSHEIHLTDDDDKTTLQKQMVESDQLKKNPQEVKLAPPSSFAKCLTGAKKRVFEDQIEIHLSKSSLLGFNAPSPDDIVLMAQSKSKSFQKHKRLDEQLLNSVKSMKKVSQQLKPQKNTNDSNNDHTLLSQDQLIELSKLVKPRTKLLLLGPPKSGKKTLLSRLFFQIGSFDPKTMQKCTVLNAKKESLSSVLKSTKTKWYDFETFSNSYSSTIIDFPLGIFTTNASSRDNFLKHSSLFQVMNTAIFTIDCLNPLEGLDGISSILQLMNGLSISSYMFAITKMDEIEWDENKFINLVNSIQSFLKESCGIIEKSKFIPISGLKGTNLTSISQEKLSQWYKSDTLLGKIDKEADTNHGTWNFLLNLPLSLTISHITPLPENQSHIYCSIHSGMLQDSQKLYVGTGRLETQITGLSSDENPKGFNVAGDMIQAKIPTLPNLCPGILIADSIDAFTSSKTAYVNATWFHGSLEKGKSMHVIALFGCHAVLTKLYCFTDSQEKAPNAIGNDLERNRTSLVKIELENAFPLVKESYINTLSRVLFVSEKWNSLIAFGTVLSLHD

SEQ ID NO: 17107 - protein, 741 aa, Pichia pinus
MSQDQQQQQQFNANNLAGNVQNINLNAPAYDPAVQSYIPNTAQAFVPSAQPYIPGQQEQQFGQYGQQQQNYNQGGYNNYNNRGGYSNNRGGYNNSNRGGYSNYNSYNTNSNQGGYSNYNNNYANNSYNNNNNYNNNYNQGYNNYNSQPQGQDQQQETGSGQMSLEDYQKQQKESLNKLNTKPKKVLKLNLNSSTVKAPIVTKKKEEEPVNQESKTEEPAKEEIKNQEPAEAENKVEEESKVEAPTAAKPVSESEFPASTPKTEAKASKEVAAAAAALKKEVSQAKKESNVTNADALVKEQEEQIDASIVNDMFGGKDHMSIIFMGHVDAGKSTMGGNLLFLTGAVDKRTVEKYEREAKDAGRQGWYLSWIMDTNKEERNDGKTIEVGKSYFETDKRRYTILDAPGHKLYISEMIGGASQADVGVLVISSRKGEYEAGFERGGQSREHAILAKTQGVNKLVVVINKMDDPTVNWSKERYEECTTKLAMYLKGVGYQKGDVLFMPVSGYTGAGLKERVSQKDAPWYNGPSLLEYLDSMPLAVRKINDPFMLPISSKMKDLGTVIEGKIESGHVKKGQNLLVMPNKTQVEVTTIYNETEAEADSAFCGEQVRLRLRGIEEEDLSAGYVLSSINHPVKTVTRFEAQIAIVELKSILSTGFSCVMHVHTAIEEVTFTQLLHNLQKGTNRRSKKAPAFAKQGMKIIAVLETTEPVCIESYDDYPQLGRFTLRDQGQTIAIGKVTKLL

SEQ ID NO: 17108 - protein, 460 aa, Yarrowia lipolytica
MGKEKTHVNLVVIGHVDAGKSTTTGHLIYKCGGIDKRTIEKFEKEADELGKGSFKYAWVLDKLKAERERGITIDIALWKFQTPKYYVTVIDAPGHRDFIKNMITGTSQADCAILIIAGGVGEFEAGISKDGQTREHALLAFTLGVKQLIVAINKMDSVKWSQDRYNEICKETANFVKKVGYNPKSVPFVPISGWNGDNMIEASTNCDWYKGWTKETKAGEVKGKTLLEAIDAIEPPVRPSDKPLRLPLQDVYKIGGIGTVPVGRVETGVIKAGMVVTFAPANVTTEVKSVEMHHEILPDGGFPGDNVGFNVKNVSVKDIRRGNVAGDSKNDPPNGCDSFNAQVIVLNHPGQIGAGYAPVLDCHTAHIACKFDTLIEKIDRRTGKKMEDSPKFIKSGDAAIVKMVPSKPMCVEAFTEYPPLGRFAVRDMRQTVAVGVIKSVEKSDKAGGKVTKAAQKAAKK

SEQ ID NO: 17109 - protein, 460 aa, Ajellomyces capsulatus
MGKEDKTHINLVVIGHVDSGKSTTTGHLIYKCGGIDSRTIEKFEKEAEELGKKSFKYAWVLDKLKSERERGITIDIALWKFETPKYSVTVIDAPGHRDFIKNMITGTSQADCAILIIAAGTGEFEAGISKDGQTREHALLAFTLGVRQLIVAINKMDTTKWSESRFNEIIKEVSNFIKKVGYNPKAVPFVPISGFEGDNMIEPSPNCTWYKGWNKETASGKSSGKTLLDAIDAIEPPTRPTDKPLRLPLQDVYKISGIGTVPVGRVETGVIKPGMVVTFAPSNVTTEVKSVEMHHQQLQAGYPGDNVGFNVKNVSVKEVRRGNVAGDSKNDPPKGCESFNAQVIVLNHPGQVGAGYAPVLDCHTAHIACKFSELIEKIDRRTGKSVENNPKFIKSGDAAIVKMVPSKPMCVEPFTDYPPLGRFAVRDMRQTVAVGVIKSVIKSDKTAGKVTKAAQKATKK

SEQ ID NO: 17110 - protein, 779 aa, Neurospora crassa
MARHQNIRNLDYEAELEEYGAFSDEEEEELSPEDQVRMREGTAQVLEALGVEAHKVPKTQIEESLWHYYWDVDKTITYLISKYIDPPKKPAKTAPPKTAPKQDAAIASASRQSFAHLFRDLPWGNIPPERQAVLIPPPQLPAGLLGGSGAPPKMSKLQQLAAARKKKAEEKSASGEVEQTQVKMTELTVNDNQASKENRPLAGVFGKRVKISETTAQGRIPLTMAEPTRPEIPQAQAPEATPSQHQEEDPIDPEPAVAPPKAQPSAFASTLFGPSSDSPKRRPREVFALPYMAISSYSPDAFGKPSPDDVVLAAQAKAGKKSANVHNKKGSSSADGVTNQVSQLKIDDTPLPKSRNLNVLSEFEKQKGKKTASFVVVGHVDAGKSTMMGRLLLDLNVVDQRTVDKLRKEAEKIGKTSFALAWVLDQRHEERSRGVTIDIATNRFETETTSFTILDAPGHRDFIPNMIAGASQADFAILVIDASTGAFESGLKGQTREHSLLIRSMGVSRIIVAVNKLDTVNWSQERFDEITHQVSGFLTATGFQPKNIAFVPVSGLHGDNLVRKSTDPAASWYTGKTLVEELEASEPSARALAKPLRMTISEVMRTPQSSISITGRIDAGSLQMGDALLVQPSGEKAYVKSLQVDDGEPADWAVAGQNVVLHLSNIDPIHVRVGDIVCDPAKPIQCVDTFTLKALAFDILMPMQVDVHRGRLHAAGKIEAIDAILDKVTGKVTKKKPMIVKPGTVSRVRVTLHSKVPLEAGQRVVLRSGGQTVAAGLLE

SEQ ID NO: 17111 - protein, 460 aa, Podospora anserina
MGKEDKTHINVVVIGHVDSGKSTTTGHLIYKCGGIDKRTIEKFEKEAAELGKGSFKYAWVLDKLKAERERGITIDIALWKFETPKYYVTVIDAPGHRDFIKNMITGTSQADCAILIIAAGTGEFEAGISKDGQTREHALLAYTLGVKQLIVAINKMDTTKWSEARFNEIIKETSNFIKKVGYNPKTVAFVPISGFNGDNMLEASTNCPWYKGWEKEVKGGKATGKTLLEAIDSIEPPKRPTDKPLRLPLQDVYKIGGIGTVPVGRIETGILKPGMVVTFAPSNVTTEVKSVEMHHEQLAEGVPGDNVGFNVKNVSVKEIRRGNVAGDSKNDPPMGAASFDAQVIVLNHPGQVGAGYAPVLDCHTAHIACKFSELLQKIDRRTGKAVEESPKFIKSGDAAIVKMVPSKPMCVEAFTEYPPLGRFAVRDMRQTVAVGVIKKVEKAAAGSGKVTKSAAKAGKK

SEQ ID NO: 17112 - protein, 460 aa, Coccidioides immitis
MGKEEKTHINLVVIGHVDSGKSTTTGHLIYKCGGIDNRTIEKFEKEAEELGKKSFKYAWVLDKLKAERERGITIDIALWKFETPKYHVTVIDAPGHRDFIKNMITGTSQADCAILIIAAGTGEFEAGISKDGQTREHALLAFTLGVKQLIVAINKMDSTNWSEPRFNEIVKEVSNFIKKVGYNPKAVPFVPISGFEGDNMIQPSTNAPWYKGWNKETASGKHTGKTLLDAIDAIDPPTRPTEKPLRLPLQDVYKISGIGTVPVGRVETGVIKPGMVVTFAPSNVTTEVKSVEMHHQQLTQGNPGDNVGFNVKNVSVKEVRRGNVAGDSKNDPPKGCDSFNAQVIVLNHPGQVGAGYAPVLDCHTAHIACKFSELLEKIDRRTGKSVENNPKFIKSGDAAIVKMVPSKPMCVEAFTDYPPLGRFAVRDMRQTVAVGVIKSVEKSEKTGGKVTKAAQKAAKK

SEQ ID NO: 17113 - protein, 449 aa, Stevia rebaudiana
MGKEKIHISIVVIGHVDSGKSTTTGHLIYKLGGIDKRVIERFEKEAAEMNKRSFKYAWVLDKLKAERERGITIDIALWKFETTKYYCTVIDAPGHRDFIKNMITGTSQADCAVLIIDSTTGGFEAGISKDGQTREHALLAFTLGVKQMICCCNKMDATTPKYSKARYEEIVKEVSSYLKKVGYNPDKIPFVPISGFEGDNMIERSTNLDWYKGPTLLEALDQINEPKRPSDKPLRLPLQDVYKIGGIGTVPVGRVETGVIKPGMVVTFGPSGLTTEVKSVEMHHEALTEALPGDNVGFNVKNVAVKDLKRGYVASNSKDDPAKGAASFTSQVIIMNHPGQIGNGYAPVLDCHTSHIAVKFSEILTKIDRRSGKELEKEPKFLKNGDAGMVKMLPTKPMVVETFAEYPPLGRFAVRDMRQTVAVGVIKSVDKKDPTGAKVTKAAVKKGAK

SEQ ID NO: 17114 - protein, 459 aa, Aureobasidium pullulans
MGKEKSHINVVVIGHVDSGKSTTTGHLIYKCGGIDKRTIEKFEKEAAELGKGSFKYAWVLDKLKSERERGITIDIALWKFETPKYMVTVIDAPGHRDFIKNMITGTSQADCAILIIAAGTGEFEAGISKDGQTREHALLAYTLGVKQLIVAINKMDTTKWSEARYQEIIKETSGFIKKVGYNPKHVPFVPISGFNGDNMIEVSSNCPWYKGWEKETKAKATGKTLLEAIDAIDPPSRPTDKPLRLPLQDVYKIGGIGTVPVGRVETGTIKGGMVVTFAPAGVTTEVKSVEMHHEQLSEGLPGDNVGFNVKNVSVKEIRRGNVAGDSKNDPPKGCDSFNAQVIVLNHPGQVGAGYAPVLDCHTAHIACKFSELVEKIDRRTGKSVEAAPKFIKSGDAAIVKMVPSKPMCVEAFTDYPPLGRFAVRDMRQTVAVGVIKSVAKSDKQGAGKVTKAAVKAGKK

SEQ ID NO: 17115 - protein, 276 aa, Naegleria andersoni
AGKSTTTGHLIYKCGGIDKRVIEKFEKEAAEMGKSSFKYAWVLDKLKAERERGITIDIALWKFESKKYVFTIIDAPGHRDFIKNMITGTSQADVAILVVDSTNGGFEAGFSKDGQTREHALLAYTLGIKQMIVCMNKFDDTSVSYKEDRYNEIKSEVGRYLKGLGFNVDAADKPNLVQFVPISGWTGDNMIEKTDKMPWYKGPCLLDALDNLVEPVRPTDKPLRLPFQDVYKIGGIGTVPVGRVETGKLKPGMMIHFAPGQAADTEVKSVEMHHTS

SEQ ID NO: 17116 - protein, 405 aa, Naegleria andersoni
AGKSTTTGHLIYKCGGIDKRVIEKFEKEAAEMGKSSFKYAWVLDKLKAERERGITIDIALWKFESKKYVFTIIDAPGHRDFIKNMITGTSQADVAILVVDSTNGGFEAGFSKDGQTREHALLAYTLGIKQMIVCMNKFDDTSVSYKEDRYNEIKSEVGRYLKGLGFNVDAADKPNLVQFVPISGWTGDNMIEKTDKMPWYKGPCLLDALDNLVEPVRPTDKPLRLPLQDVYKIGGIGTVPVGRVETGKLKPGMMIHFAPGQAADTEVKSVEMHHTSVPEAGPGDNVGFNVKGLSTTDIKRGYVASDAKSDPSREAVSFNAQVIIMNHPGEIRAGYTPVLDCHTSHIACKFDKLIDKIDRRTGKSQEANPEKIKKGDSAIVQVIPTKPMCVEGFTEYPPLGRFAVR

SEQ ID NO: 17117 - protein, 435 aa, Cryptosporidium parvum
MGKEKTHINLVVIGHVDSGKSTTTGHLIYKLGGIDKRTIEKFEKESSEMGKGSFKYAWVLDKLKAERERGITIDIALWQFETPKYHYTVIDAPGHRDFIKNMITGTSQADVALLVVPADRFEGAFSKEGQTREHALLAFTLGVRQMIVGINKMDTCEYKQSRFDEIFNEVDGYLKKVGYNTEKIPFVAISGFVGDNMVERSDKMPWYKGKTLVEALDTMEPPKRPTDKPLRLPLQDVYKIGGVGTVPVGRVETGIIRPGMNVTFAPAGVTTEVKSVEMHHEQMPEAVPGDNVGFNVKNVSIKDIKRGFVASDAKNDPAKGCEDFTAQVIVLNHPGEIKNGYSPVVDCHTAHISCKFQTITAKMDKRSGKVLEENPKLIKSGDAALVVMQPLKPLCVEAFTDYPPLGRFAVRDMKQTVAVGVIKSVTKKEATSKKK

SEQ ID NO: 17118 - protein, 404 aa, Cryptosporidium parvum
MGKEKTHINLVVIGHVDSGKSTTTGHLIYKLGGIDKRTIEKFEKESSEMGKGSFKYAWVLDKLKAERERGITIDIALWQFETPKYHYTVIDAPGHRDFIKNMITGTSQADVALLVVPADRFEGAFSKEGQTREHALLAFTLGVRQMIVGINKMDTCEYKQSRFDEIFNEVDGYLKKVGYNTEKIPFVAISGFVGDNMVERSDKMPWYKGKTLVEALDTMEPPKRPTDKPLRLPLQDVYKIGGVGTVPVGRVETGIIRPGMNVTFAPAGVTTEVKSVEMHHEQMPEAVPGDNVGFNVKNVSIKDIKRGFVASDAKNDPAKGCEDFTAQVIVLNHPGEIKNGYSPVVDCHTAHISCKFQTITAKMDKRSGKVLEENPKLIKSGDAALVVMQPLKPLCVEASLTTHF

SEQ ID NO: 17119 - protein, 435 aa, Tetrahymena pyriformis
MARGDKVHINLVVIGHVDSGKSTTTGHLIYKCGGIDKRVIEKFEKESAEQGKGSFKYAWVLDKLKAERERGITIDISLWKFETAKYHFTIIDAPGHRDFIKNMITGTSQADVAILMIASPQGEFEAGISKDGQTREHALLAFTLGVKQMIVCLNKMDEKTVNFSEERYQEIKKELSDYLKKVGYKPDTIPFIPISGFNGDNMLERSTNAPWYKGPILVEALDALEPPKRPVDKPLRLPLQDVYKIGGIGTVPVGRVETGVIKPGMSIQFAPNKVIAECKSVEMHHEQLPEAVPGDNVGFNIKGVSVKDIRRGNVASDAKNDPAKEAATFYSQVIIMNHPGQIQAGYTPVLDCHTAHIACKFETIHDKIDRRTGKSQEENPKFIKNGDAALVTLIPTKALCVEVFQEYPPLGRYAVRDMKQTVAVGVIKKVEKKDK

SEQ ID NO: 17120 - protein, 409 aa, Colpoda inflata
VDSGKSTSTGHLIYKCGGIHKRTIEKFEKEANELGKGSFKYAWVLDKLKAERERGITIDISLWKFETAKFHFTIIDAPGHRDFIKNMITGTSQADVALLMIASPPGEFEAGISKEGQTREHALLAFTLGVKQMIVCVNKMDEKTVAWSQSRFEEIQKEVQEYLKKVGYNPDKIPFVPISGWHGDNMLEKSPNLTWFKGPTLLEALDAIVPPKRPLDKPLRLPLQDVYKIGGVGTVPVGRVETGVLKPGMTVYFAPSNVSTEVKSVEMHHEAVQEAIPGDNVGFNVKNVAVKDIRRGNVCSDAKNDPAKESASFYAQVIVLNHPGQIGNGYCPVLDCHTAHIACKFQEIKEKIDRRTGTVLEREPKSVKSGDCAMVTLTPNKPMCVEAFSDYPPLGRFAVRDMKQTVAVG

SEQ ID NO: 17121 - protein, 426 aa, Umbelopsis nana
VVVIGHVDSGKSTTTGHLIYKCGGIDKRTIEKFEKEAAELGKGSFKYAWVLDKLKAERERGITIDIALWKFETPKYHVTVIDAPGHRDFIKNMITGTSQADCGILIIAAGTGEFEAGISKDGQTREHALLAFTLGVRQLIVAINKMDTTKWSGDRYEEIVKEVSSFIKKIGFNPKSVPFVPISGWHGDNMLEESTNMPWFKGWTKETKAGSKAGKTLLEAIDAIDPPTRPTDKPLRLPLQDVYKIGGIGTVPVGRVETGIIKAGMVVTFAPTMVSTEVKSVEMHHEQLVEGVPGDNVGFNVKNVSVKDIRRGNVCSDSKNDPAKEAASFTAQVIVLNHPGQIGAGYAPVLDCHTAHIACKFAELVEKIDRRSGKKLEDNPKFVKSGDSAIVKMVPSKPMCVEAYTDYPPLGRFAVRDMRQTVAVGV

SEQ ID NO: 17122 - protein, 426 aa, Mortierella verticillata
VVVIGHVDSGKSTTTGHLIYKCGGIDKRTIEKFEKEAAELGKGSFKYAWVLDKLKAERERGITIDIALWKFETPKYYVTVIDAPGHRDFIKNMITGTSQADCAILIIAGGTGEFEAGISKDGQTREHALLAFTLGVKQLIVAVNKMDTTKWSQDRFEEIIKEGLHFVKKVGYNPKSVAFVPISGWHGDNMLEESTNMPWFKGWTKETKGGSFKGKTLLEAIDAIEPPSRPTEKPLRLPLQDVYKIGGIGTVPVGRVETGIIKAGMVVTFAPSNVTTEVKSVEMHHEVLTEGIPGDNVGFNVKNVSVKDIRRGNVCSDSKNDPAKEAASFNAQVIVLNHPGQISNGYAPVLDCHTAHIACKFGEILEKIDRRTGKAMEEFPKFIKSGDAAIVKMIPSKPLCVESFQEYPPLGRFAVRDMRQTVAVGV

SEQ ID NO: 17123 - protein, 426 aa, Cunninghamella bertholletiae
VVVIGHVDSGKSTTTGHLIYKCGGIDKRTIEKFEKEAAELGKGSFKYAGVLDKLKAERERGITMDIALWKFETPKYHVTVIDAPGHRDFIKNMITGTSQADCGILIIASGTGEFEAGISKDGQTREHALLAFTLGVRQLIVALNKMDTCKWSQDRYNEIVKEVSSFIKKIGYNPKSVPFVPISGWHGDNMLEASTDMPWYKGWTKETKAGSSTGKTLLEAIDSIEPPTRPSDKPLRLPLQDVYKIGGIGTVPVGRVETGVIKAGMVVTFAPANVTTEVKSVEMHHEQLEQGVPGDNVGFNVKNVSVKDIRRGNVCSDSKNDPAKESASFNAQVIVLNHPGQIGAGYAPVLDCHTAHIACKFAELLEKIDRRSGKKLEDAPKFVKSGDSAIVKMVPSKPMCVEAYTEYPPLGRFAVRDMRQTVAVGV

SEQ ID NO: 17124 - protein, 425 aa, Umbelopsis isabellina
VVIGHVDSGKSTTTGHLIYKCGGIDKRTIEKFEKEAAELGKGSFKYAWVLDKLKAERERGITIDIALWKFETPKYHVTVIDAPGHRDFIKNMITGTSQADCGILIIAAGTGEFEAGISKDGQTREHALLAFTLGVRQLIVAINKMDTTKWSGDRYEEIVKEVSSFIKKIGFNPKSVPFVPISGWHGDNMLEESTNMPWFKGWTKETKAGAKSGKTLLEAIDAIDPPTRPTDKPLRLPLQDVYKIGGIGTVPVGRVETGIIKAGMVVTFAPANVTTEVKSVEMHHEQLVEGVPGDNVGFNVKNVSVKDIRRGNVCSDSKNDPAKEAGSFTAQVIVLNHPGQIGAGYAPVLDCHTAHIACKFAELIEKIDRRSGKKLEDNPKFVKSGDSAIVKMVPSKPMCVEAYTDYPPLGRFAVRDMRQTVAVGV

SEQ ID NO: 17125 - protein, 449 aa, Bruguiera sexangula
MGKEKIHINIVVIGHVDSGKSTTTGHLIYKLGGIDKRVIERFEKEAAEMNKRSFKYAWVLDKLKAERERGITIDIALWKFETTKYYCTVIDAPGHRDFIKNMITGTSQADCAVLIIDSTTGGFEAGISKDGQTREHALLAFTLGVKQMICCCNKMDATTSKYSKARYDEIVKEVSSYLKKVGYNPEKIPFVPISGFEGDNMIERSTNLDWYKGPTLLEALDMIQEPKRPSDKPLRLPLQDVYKIGGIGTVPVGRVETGVLKPGMVVTFGPSGLTTEVKSVEMHHEALQEALPGDNVGFNVKNVSVKDLKRGYVASNSKDDPAKEASSFTSQVIIMNHPGQIGNGYAPVLDCHTSHIAVKFSEILTKIDRRSGKELEKEPKFLKNGDAGFVKMIPTKPMVVETFSEYPPLGRFAVRDMRQTVAVGVIKSVEKKEPSGAKVTKSAAKKGGK

SEQ ID NO: 17126 - protein, 600 aa, Mus musculus
MREVLGDAVPDDILTEAILKHKFDVQKALSVVLEQDGVQPWKEKSERAVCAGQPSKGKSVISRSSQSESEIVPKVAKMTVSGKKQTMGFEVPGLTSEENGLSVRAPHKGPPGDDVSVRSPNIPETGTPKSALPPPSLQTSEELGSTPTPVRKSGKLRQQIDVKAELENAVQGGKQLLNLVVIGHVDAGKSTLMGHMLYLLGNVNKRTMHKYEQESKKAGKASFAYAWVLDETGEERERGVTMDVGMTKFETTTKVITLMDAPGHKDFIPNMITGAAQADVAVLVVDASRGEFEAGFETGGQTREHGLLVRSLGVTQLAVAVNKMDQVNWQQERFQEITGKLGHFLKQAGFKESDVAFIPTSGLSGENLTARSQSSDLTTWYKGMCLLEQIDSFKPPQRSIDKPFRLCVSDVFKDQGSGFCVTGKIEAGYIQTGDRLLAMPPNETCTAKGITLHDEPVDWAAAGDHVNLTLVGMDIIKINVGCIFCGPKEPIKACTRFRARILVFNIEVPITKGFPVLLHYQTVSEPAVIKRLISVLNKSTGEVTKKKPKLLTKGQNALVELQTQRPVALELYKDFKELGRFMLRYGGSTVAAGVVTEIKE

SEQ ID NO: 17127 - protein, 682 aa, Mus musculus
MARHRNVRGYNYDEDFEDDDLYGQSVEDDYCISPSTAAQFIYSRRDNPEEEYGYEDLRESSNSLLNHQLSEIDQARLYSCLDHMREVLGDAVPDDILTEAILKHKFDVQKALSVVLEQDGVQPWKEKSERAVCAGQPSKGKSVISRSSQSESEIVPKVAKMTVSGKKQTMGFEVPGLTSEENGLSVRAPHKGPPGDDVSVASPNIPETGTPKSALPPPSLQTSEELGSTPTPVRKSGKLRQQIDVKAELEKRQGGKQLLNLVVIGHVDAGKSTLMGHMLYLLGNVNKRTMHKYEQESKKAGKASFAYAWVLDETGEERERGVTMDVGMTKFETTTKVITLMDAPGHKDFIPNMITGAAQADVAVLVVDASRGEFEAGFETGGQTREHGLLVRSLGVTQLAVAVNKMDQVNWQQERFQEITGKLGHFLKQAGFKESDVAFIPTSGLSGENLTARSQSSDLTTWYKGMCLLEQIDSFKPPQRSIDKPFRLCVSDVFKDQGSGFCVTGKIEAGYIQTGDRLLAMPPNETCTAKGITLHDEPVDWAAAGDHVNLTLVGMDIIKINVGCIFCAPKEPIKACTRFRARILVFNIEVPITKGFPVLLHYQTVSEPAVIKRLISVLNKSTGEVTKKKPKLLTKGQNALVELQTQRPVALELYKDFKELGRFMLRYGGSTVAAGVVTEIKE

SEQ ID NO: 17128 - protein, 412 aa, Chaetocladium brefeldii
VVVIGHVDSGKSTTTGHLIYKCGGIDKRTIEKFEKEAAELGKSSFKYAWVLDKLKAERERGITIDIALWKFETPKYMVTVIDAPGHRDFIKNMITGTSQADCAILIIAGGTGEFEAGISKDGQTREHALLAFTLGVRQLIVAINKMDTTKYSEARYTEIVKEVSNFIKKIGFNPKSVPFVPISGWHGDNMIDESKNMPWFKGWNKETKAGVKTGKTLLEAIDAIEPPTRPTDKPLRLPLQDVYKIGGIGTVPVGRVETGVIKAGMVVNFAPAAVTTEVKSVEMHHETLAEGLPGDNVGFNVKNVSVKDIRRGNVCSDSKNDPAQEAGSFQAQVIILNHPGQISSGYSPVLDCHTAHIACKFAEIIEKIDRRSGKKMEDAPKFIKSGDSAIVKMVPSKPMSVEAYTDYPPLGR

SEQ ID NO: 17129 - protein, 374 aa, Chaetocladium jonesii
VVVIGHVDSGKSTTTGHLIYKCGGIDKRTIEKFEKEAAELGKGSFKYAWVLDKLKAERERGITIDIALWKFETPKFNVTVIDAPGHRDFIKNMITGTSQADCAILIIAAGTGEFEAGISKDGQTREHALLAFTLGVRQLIVAINKMDTTKWSEARYNEIVKEVSGFIKKIGFNPKSVPFVPISGWHGDNMLEESANMGWFKQWTKETKAGNKAGKTLLEAIDAIDPPSRPSDKPLRLPLQDVYKIGGIGTVPVGRVETGVIKAGMVVNFAPAAVTTEVKSVEMHHETLVEGLPGDNVGFNIKNVSVKDIRRGNVCSDSKNDPAKEAGSFVAQVIILNHPGQISNGYSPVLDCHTAHIACKFAELVEKIDRRSGK

SEQ ID NO: 17130 - protein, 408 aa, Choanephora cucurbitarum
GKSTTTGHLIYKCGGIDKRTIEKFEKEAAELGKGSFKYAWVLDKLKAERERGITIDIALWKFETPKYHVTVIDAPGHRDFIKNMITGTSQADCAILIIAGGTGEFEAGISKDGQTREHALLAFTLGVRQLIVAINKMDTTKWSEARYTEIVKEVSSFIKKIGFNPKAVPFVPISGWHGDNMLDESTNMPWFKGWKKETKAGEKTGKTLLEAIDAIEPPVRPSDKPLRLPLQDVYKIGGIGTVPVGRVETGVIKAGMVVTFAPAAVTTEVKSVEMHHETLTEGLPGDNVGFNVKNVSVKDIRRGNVCSDSKNDPAKEAGSFTAQVIILNHPGQIGAGYAPVLDCHTAHIACKFSELIEKIDRRSGKKLEDAPKFVKSGDSAIVKMVPSKPMCVEAYTDYPPLGRFAVRD

SEQ ID NO: 17131 - protein, 403 aa, Poitrasia circinans
GKSTTTGHLIYKCGGIDKRTIEKFEKEAAELGKGSFKYAWVLDKLKAERERGITIDIALWKFETPKYHVTVIDAPGHRDFIKNMITGTSQADCAILIIAGGTGEFEAGISKDGQTREHALLAFTLGVRQLIVAINKMDTTKWSEARYTEIVKEVSSFIKKIGFNPKAVPFVPISGWHGDNMLEESTNMPWFKGWKKETKAGEKSGKTLLEAIDAIEPPVRPSDKPLRLPLQDVYKIGGIGTVPVGRVETGVIKAGMVVTFAPAAVTTEVKSVEMHHETLTEGLPGDNVGFNVKNVSVKDIRRGNVCPDSKNDPAKEAGSFTAQVIILNHPGQIGAGYAPVLDCHTAHIACKFSELIEKIDRRSGKKLEDAPKFVKCGDSAIVKMIPSKPMCVEAYTDYPPLGR

SEQ ID NO: 17132 - protein, 403 aa, Gilbertella persicaria
GKSTTTGHLIYKCGGIDKRTIEKFEKEAAELGKGSFKYAWVLDKLKAERERGITIDIALWKFETPKYHVTVIDAPGHRDFIKNMITGTSQADCAILIIAGGTGEFEAGISKDGQTREHALLAFTLGVRQLIVAINKMDTTKWSEARYNEIVKEVSSFIKKIGFNPKAVPFVPISGWHGDNMLDESTNMPWFKGWNKETKAGAKTGKTLLEAIDAIEPPVRPSDKPLRLPLQDVYKIGGIGTVPVGRVETGVIKAGMVVTFAPAAVTTEVKSVEMHHETLTEGLPGDNVGFNVKNVSVKDIRRGNVCSDSKNDPAKEAGSFTAQVIILNHPGQIGAGYAPVLDCHTAHIACKFAELIEKIDRRSGKKMEDAPKFIKSGDSAIVKMIPSKPMCVEAYTDYPPLGR

SEQ ID NO: 17133 - protein, 396 aa, Circinella umbellata
GKSTTTGHLIYKCGGIDKRTIEKFEKEAAELGKGSFKYAWVLDKLKAERERGITIDIALWKFETPKYHVTIIDAPGHRDFIKNMITGTSQADCGILIIAAGTGEFEAGISKDGQTREHALLAFTLGVRQLIVALNKMDATKYSEARYNEIVKEVSTFIKKIGFNPKTVPFVPISGWNGDNMLEESPNMPWFKGWTKENKAGSKTGKTLLEAIDNIDPPVRPSDKPLRLPLQDVYKIGGIGTVPVGRVETGVIKAGMIVTFAPANVTTEVKSVEMHHEQLAEGTPGDNVGFNVKNVSVKDIRRGNVCSDSKNDPAKESGSFTAQVIVLNHPGQISAGYSPVLDCHTAHIACKFAELLEKIDRRSGKKLEDAPKFVKSGDSAIVKLVPSKPMCVEAYT

SEQ ID NO: 17134 - protein, 426 aa, Halteromyces radiatus
VVVIGHVDSGKSTTTGHLIYKCGGIDKRTIEKFEKEAAELGKGSFKYAWVLDKLKAERERGIAIDIALWKFETPKYHVTVIDAPGHRDFIKNMITGTSQADCGILIIAAGTGEFEAGISKDGQTREHALLAFTLGVRQLIVAINKMDSTKWSEARFNEIIKEVSGFIKKIGFNPKSVPFVPISGWHGDNMLDESTNMPWYKGWKKETKAGEKSGKTLLDAIDAIDPPTRPSDKPLRLPLQDVYKIGGIGTVPVGRVETGIIKAGMVVTFAPANVTTEVKSVEMHHEQLTEGLPGDNVGFNVKNVSVKDIRRGNVCSDSKNDPAKESASFTAQVIVLNHPGQIGAGYAPVLDCHTAHIACKFAELLEKIDRRSGKKLEDAPKFVKSGDSAIVKMIPSKPMCVEAYTDYPPLGRFAVRDMRQTVAVGV

SEQ ID NO: 17135 - protein, 365 aa, Hyphomucor assamensis
GKSTTTGHLIYKCGGIDKRTIEKFEKEAAELGKGSFKYAWVLDKLKAERERGITIDIALWKFETPKYNVTVIDAPGHRDFIKNMITGTSQADCAILIIAGGTGEFEAGISKDGQTREHALLAFTLGVRQLIVAINKMDTTKWSEARYNEIVKEVSSFIKKIGFNPKAVPFVPISGWHGDNMLDESTNMPWFKGWNKETKAGAKTGKTLLEAIDAIEPPTRPSDKPLRLPLQDVYKIGGIGTVPVGRVETGTIKAGMVVNFAPAGVTTEVKSVEMHHETLSEGLPGDNVGFNVKNVSVKDIRRGNVCSDSKNDPAKESASFTAQVIILNHPGQISAGYAPVLDCHTAHIACKFAELIEKIDRRSGK

SEQ ID NO: 17136 - protein, 365 aa, Mucor recurvus var. indicus
GKSTTTGHLIYKCGGIDKRTIEKFEKEAAELGKGSFKYAWVLDKLKAERERGITIDIALWKFETPKYNVTVIDAPGHRDFIKNMITGTSQADCAILIIAGGTGEFEAGISKDGQTREHALLAFTLGVRQLIVAINKMDTTKWSEARYNEIVKEVSSFIKKIGFNPKSVPFVPISGWHGDNMLEESQNMPWFKGWTKETKAGSKTGKTLLEAIDNIDPPTRPVDKPLRLPLQDVYKIGGIGTVPVGRVETGVIKAGMVVTFAPANVTTEVKSVEMHHETLPEGLPGDNVGFNVKNVSVKDIRRGNVTSDSKNDPAKEAASFTAQVIILNHPGQIGAGYAPVLDCHTAHIACKFSELIEKIDRRSGK

SEQ ID NO: 17137 - protein, 417 aa, Protomycocladus faisalabadensis
GKSTTTGHLIYKCGGIDKRTIEKFEKEAAELGKGSFKYAWVLDKLKAERERGITIDIALWKFETPKYQVTVIDAPGHRDFIKNMITGTSQADCGILIIAAGTGEFEAGISKDGQTREHALLAFTLGVRQLIVAINKMDSTKYSEARYNEIVKEVSGFIKKIGFNPKAVPFVPISGWNGDNMLEESPNMPWFKGWNKETKAGAKTGKTLLEAIDAIEPPVRPSDKPLRLPLQDVYKIGGIGTVPVGRVETGTIKAGMVVTFAPANVTTEVKSVEMHHEQLAEGVPGDNVGFNVKNVSVKDIRRGNVCSDSKNDPAKEAASFTAQVIVLNHPGQIGAGYSPVLDCHTAHIACKFAELLEKIDRRSGKKLEDSPKFVKSGDSAIVKMVPSKPMCVEAYTEYPPLGRFAVRDMRQTVAVGV

SEQ ID NO: 17138 - protein, 416 aa, Spinellus fusiger
GKSTTTGHLIYKCGGIDKRTIEKFEKEAAELGKGSFKYAWVLDKLKAERERGITIDIALWKFETPKFMVTVIDAPGHRDFIKNMITGTSQADCGVLIIAAGTGEFEAGISKDGQTREHALLAFTLGVRQLIVAINKMDTTKWSEARYNEIVKEVSSFIKKIGFNPKSVPFVPISGWHGDNMLEESVNMGWFKGWTKETKAGSKTGKTLLEAIDNIEPPVRPSDKPLRLPLQDVYKIGGIGTVPVGRVETGVIKAGMIVNFAPSNVTTEVKSVEMHHEQLVEGLPGDNVGFNVKNVSVKDIRRGNVCSDSKNDPAKESGSFTAQVIVLNHPGQIGAGYSPVLDCHTAHIACKFAELLEKIDRRSGKKLEDAPKFIKSGDSAIVKMVPSKPMCVEAYTDYPPLGRLAVRDMRQTVAVG

SEQ ID NO: 17139 - protein, 417 aa, Sporodiniella umbellata
GKSTTTGHLIYKCGGIDKRTIEKFEKEAAELGKGSFKYAWVLDKLKAERERGITIDIALWKFETPKYQITVIDAPGHRDFIKNMITGTSQADCAILIIAGGTGEFEAGISKDGQTREHALLAFTLGVRQLIVAVNKMDTTKWSEARFNEIVKEVSSFIKKIGYNPKSVPFVPISGWHGDNMLEESQNMSWYKGWNKETKAGAKSGKTLLEAIDNIDPPTRPSDKPLRLPLQDVYKIGGIGTVPVGRVETGVIKAGMVVTFAPAAVTTEVKSVEMHHETLSEGAPGDNVGFNVKNVSVKDIRRGNVCSDSKNDPAKEAGSFTAQVIILNHPGQIGAGYAPVLDCHTAHIACKFSELIEKIDRRSGKSLEAEPKFVKSGDSAIVKMTPSKPMCVEAYTDYPPLGRFAVRDMRQTVAVGV

SEQ ID NO: 17140 - protein, 417 aa, Syzygites megalocarpus
GKSTTTGHLIYKCGGIDKRTIEKFEKEAAELGKGSFKYAWVLDKLKAERERGITIDIALWKFETPKYQITVIDAPGHRDFIKNMITGTSQADCAILIIAGGTGEFEAGISKDGQTREHALLAFTLGVRQLIVAVNKMDTTKWSEARFNEIIKEVSSFIKKIGYNPKSVPFVPISGWHGDNMLEESTNMPWYKGWAKETKAGAKSGKTLLEAIDNIDPPTRPSDKPLRLPLQDVYKIGGIGTVPVGRVETGVIKAGMVVTFAPAAVTTEVKSVEMHHETLSEGAPGDNVGFNVKNVSVKDIRRGNVCSDSKNDPAKEAGSFTAQVIILNHPGQIGAGYAPVLDCHTAHIACKFSELIEKIDRRSGKSLEAEPKFVKSGDSAIVKMVPSKPMCVEAYTDYPPLGRFAVRDMRQTVAVGV

SEQ ID NO: 17141 - protein, 426 aa, Thermomucor indicae-seudaticae
VVVIGHVDSGKSTTTGHLIYKCGGIDKRTIEKFEKEAAELGKGSFKYAWVLDKLKAERERGITIDIALWKFETPKYYVTVIDAPGHRDFIKNMITGTSQADCGILIIAAGTGEFEAGISKDGQTREHALLAFTLGVRQLIVAINKMDSTKYSEARYNEIVKEVSIFIKKIGYNPKAVPFVPISGWNGDNMLEESPNMPWFKGWTKETKAGEKTGKTLLEAIDSIEPPVRPVDKPLRLPLQDVYKIGGIGTVPVGRVETGTIKAGMVVTFAPANVTTEVKSVEMHHEQLAEGVPGDNVGFNVKNVSVKDIRRGNVCSDSKNDPAKEAASFTAQVIVLNHPGQISAGYSPVLDCHTAHIACKFAELLEKIDRRSGKKLEDNPKSIKSGDSAIVKMVPTKPMCVESYTEYPPLGRFAVRDMRQTVAVGV

SEQ ID NO: 17142 - protein, 417 aa, Zygorhynchus heterogamus
GKSTTTGHLIYKCGGIDKRTIEKFEKEAAELGKGSFKYAWVLDKLKAERERGITIDIALWKFETPKYNVTVIDAPGHRDFIKNMITGTSQADCAILIIAGGTGEFEAGISKDGQTREHALLAFTLGVRQLIVAINKMDTTKWSEARYNEIVKEVSSFIKKIGFNPKSVPFVPISGWHGDNMLEESKNMPWFKGWNKETKAGAKTGKTLLEAIDAIDPPTRPSDKPLRLPLQDVYKIGGIGTVPVGRVETGIIKAGMVVNFAPAAVTTEVKSVEMHHETLVEGLPGDNVGFNVKNVSVKDIRRGNVCSDSKNDPAKESASFLAQVIILNHPGQISAGYAPVLDCHTAHIACKFAELVEKIDRRSGKKMEDAPKFVKSGDSAIVKMIPSKPMCVEAYTDYPPLGRFAVRDMRQTVAVGV

SEQ ID NO: 17143 - protein, 370 aa, Pilobolus umbonatus
GHVDSGKSTTTGHLIYKCGGIDKRTIEKFEKEASELGKGSIKYAWVLDKLKAERERGITIDIALWKFETPKYNVTVIDAPGHRDFIKNMITGTSQADCAILIIAGGTGEFEAGISKDGQTREHCLLAFTLGVRQLIVAINKMDTTKWSEARYNEIVKEVSSFIKKIGFNPKAVPFVPISGWHGDNMLEESKNMPWFKGWTKESKAGNKAGKTLLEAIDAIEPPSRPSDKPLRLPLQDVYKIGGIGTVPVGRVETGVIKAGMVVTFAPAAVTTEVKSVEMHHETLTEGLPGDNVGFNVKNVSVKDIRRGNVCSDSKNDPAKEAGSFTAQVIILNHPGQIGAGYAPVLDCHTAHIACKFAELLEKIDRRSGK

SEQ ID NO: 17144 - protein, 416 aa, Utharomyces epallocaulus
GKSTTTGHLIYKCGGIDKRTIEKFEKEAAELGKGSFKYAWVLDKLKAERERGITIDIALWKFETPKYHVTVIDAPGHRDFIKNMITGTSQADCAILIIAGGTGEFEAGISKDGQTREHALLAFTLGVRQLIVAINKMDTTKWSEARYNEIVKEVSSFIKKIGFNPKSVPFVPISGWHGDNMLEESKNMPWFKGWNKETKAGAKTGKTLLEAIDAIDPPTRPSDKPLRLPLQDVYKIGGIGTVPVGRVETGTIKAGMVVTFAPANVTTEVKSVEMHHETLTEGLPGDNVGFNVKNVSVKDIRRGNVCSDSKNDPAKEAGSFTAQVIILNHPGQIGAGYAPVLDCHTAHIACKFAELIEKIDRRSGKKLEDNPKFVKSGDSAIVKMVPSKPMCVEAYTEYPPLGRLAVRDMRQTVAVG

SEQ ID NO: 17145 - protein, 417 aa, Hesseltinella vesiculosa
GKSTTTGHLIYKCGGIDKRTIEKFEKEAAELGKGSFKYAWVLDKLKAERERGITIDIALWKFETPKYHVTVIDAPGHRDFIKNMITGTSQADCGILIIAAGTGEFEAGISKDGQTREHALLAFTLGVRQLIVAINKMDSTKWSEARFNEIVKEVSAFIKKIGFNPKSVPFVPISGWHGDNMLEESGNMPWYKGWNKETKAGAKSGKTLLDAIDAIDPPTRPSDKPLRLPLQDVYKIGGIGTVPVGRVETGVIKAGMVVNFAPANVTTEVKSVEMHHEQLVEGVPGDNVGFNVKNVSVKDIRRGNVCSDSKNDPAKEAGSFTAQVIVLNHPGQIGAGYAPVLDCHTAHIACKFAELLEKIDRRSGKKLEDAPKFVKSGDSAIVKMIPSKPMCVEAYTDYPPLGRFAVRDMRQTVAVGV

SEQ ID NO: 17146 - protein, 417 aa, Syncephalastrum monosporum var. pluriproliferum
GKSTTTGHLIYKCGGIDKRTIEKFEKEAAELGKGSFKYAWVLDKLKAERERGITIDIALWKFETPKYHVTVIDAPGHRDFIKNMITGTSQADCGILIIAAGTGEFEAGISKDGQTREHALLAFTLGVRQLIVAINKMDSTKYSEARYNEIVKEVSTFIKKIGFNPKSVPFVPISGWNGDNMLEESSNMPWFKGWKKETKAGEKSGKTLLEAIDNIDPPVRPSDKPLRLPLQDVYKIGGIGTVPVGRVETGVIKAGMVVTFAPANVTTEVKSVEMHHEQLVEGVPGDNVGFNVKNVSVKDIRRGNVCSDSKNDPAKESASFTAQVIVLNHPGQIGAGYAPVLDCHTAHIACKFAELLEKIDRRSGKKLEESPKFVKSGDSAIVKMVPSKPMCVEAYTEYPPLGRFAVRDMRQTVAVGV

SEQ ID NO: 17147 - protein, 417 aa, Dichotomocladium elegans
GKSTTTGHLIYKCGGIDKRTIEKFEKEAAELGKGSFKYAWVLDKLKAERERGITIDIALWKFETPKYFVTVIDAPGHRDFIKNMITGTSQADCGILIIAAGTGEFEAGISKDGQTREHALLAFTLGVRQLIVAINKMDSTKYSEARYNEIVKEVSGFIKKIGFNPKSVPFVPISGWNGDNMLEESPNMPWFKGWTKETKAGSKAGKTLLEAIDAIDPPVRPSDKPLRLPLQDVYKIGGIGTVPVGRVETGVIKAGMIVNFAPANVTTEVKSVEMHHEQLVEGVPGDNVGFNVKNVSVKDIRRGNVCSDSKNDPAKEAGSFTAQVIVLNHPGQIGAGYSPVLDCHTAHIACKFAELLEKIDRRSGKKLEDAPKFIKSGDSAIVKMIPSKPMCVEAYTEYPPLGRFAVRDMRQTVAVGV

SEQ ID NO: 17148 - protein, 365 aa, Dicranophora fulva
GKSTTTGHLIYKCGGIDKRTIEKFEKEAAELGKGSFKYAWVLDKLKAERERGITIDIALWKFETPKFNVTVIDAPGHRDFIKNMITGTSQADCAILIIAGGTGEFEAGISKDGQTREHALLAFTLGVRQLIVAINKMDTTKWSEARYNEIVKEVSSFIKKIGFNPKSVPFVPISGWHGDNMLEESVNMPWFKGWNKETKAGAKSGKTLLEAIDSIEPPTRPSDKPLRLPLQDVYKIGGIGTVPVGRVETGVIKAGMIVNFAPAAVTTEVKSVEMHHETLTEGLPGDNVGFNVKNVSVKDIRRGNVCSDSKNDPAKESASFLAQVIILNHPGQISSGYSPVLDCHTAHIACKFAELVEKIDRRSGK

SEQ ID NO: 17149 - protein, 365 aa, Ellisomyces anomalus
GKSTTTGHLIYKCGGIDKRTIEKFEKEAAELGKGSFKYAWVLDKLKAERERGITIDIALWKFETPKYNVTVIDAPGHRDFIKNMITGTSQADCAILIIAGGTGEFEAGISKDGQTREHALLAFTLGVRQLIVAINKMDTTKWSQDRYNEIVKEVSGFIKKIGFNPKSVPFVPISGWHGDNMLEESNNMPWFKGWNKETKAGSKTGKTLLEAIDAIDPPVRPSDKPLRLPLQDVYKIGGIGTVPVGRVETGTIKAGMVVNFAPAAVTTEVKSVEMHHETLTEGLPGDNVGFNVKNVSVKDIRRGNVCPDSKNDPAKESASFTAQVIILNHPGQISAGYAPVLDCHTAHIACKFSELIEKIDRRSGK

SEQ ID NO: 17150 - protein, 364 aa, Fennellomyces linderi
GKSTTTGHLIYKCGGIDKRTIEKFEKEAAELGKGSFKYAWVLDKLKAERERGITIDIALWKFETPKYHVTVIDAPGHRDFIKNMITGTSQADCGILIIAAGTGEFEAGISKDGQTREHALLAFTLGVRQLIVAINKMDSTKYSEARYNEIVKEVSTFIKKIGYNPKSVPFVPISGWNGDNMLEESPNMPWFKGWTKETKAGAKSGKTLLEAIDNIDPPVRPSDKPLRLPLQDVYKIGGIGTVPVGRVETGVIKAGMVVTFAPANVTTEVKSVEMHHEQLAEGVPGDNVGFNVKNVSVKDIRRGNVCSDSKNDPAKEAGSFTAQVIVLNHPGQIGAGYSPVLDCHTAHIACKFAELLEKIDRRSG

SEQ ID NO: 17151 - protein, 365 aa, Helicostylum elegans
GKSTTTGHLIYKCGGIDKRTIEKFEKEAAELGKGSFKYAWVLDKLKAERERGITIDIALWKFETPKYMVTVIDAPGHRDFIKNMITGTSQADCAILIIAGGTGEFEAGISKDGQTREHALLAFTLGVRQLIVAINKMDTTKWSEARYTEIVKEVSSFIKKIGFNPKSVPFVPISGWHGDNMLEESKNMGWFKGWTKETKAGSKTGKTLLEAIDAIEPPVRPSDKPLRLPLQDVYKIGGIGTVPVGRVETGIIKAGMVVNFAPAAVTTEVKSVEMHHETLTEGLPGDNVGFNVKNVSVKDIRRGNVCPDSKNDPAKEAGSFTAQVIILNHPGQISNGYSPVLDCHTAHIACKFAELIEKIDRRSGK

SEQ ID NO: 17152 - protein, 365 aa, Kirkomyces cordense
GKSTTTGHLIYKCGGIDKRTIEKFEKEAAELGKGSFKYAWVLDKLKAERERGITIDIALWKFETPKYNVTVIDAPGHRDFIKNMITGTSQADCAILIIAGGTGEFEAGISKDGQTREHALLAFTLGVRQLIVAINKMDTTKWSEARYNEIVKEVSSFIKKIGFNPKSVPFVPISGWHGDNMLDESTNMPWFKGWTKETKAGSKTGKTLLEAIDAIDPPSRPIDKPLRLPLQDVYKIGGIGTVPVGRVETGVIKAGMVVTFAPAAVTTEVKSVEMHHETLSEGLPGDNVGFNVKNVSVKDIRRGNVCSDSKNDPAKESASFTAQVIILNHPGQISAGYAPVLDCHTAHIACKFSELIEKIDRRSGK

SEQ ID NO: 17153 - protein, 365 aa, Thamnidium elegans
GKSTTTGHLIYKCGGIDKRTIEKFEKEAAELGKGSFKYAWVLDKLKAERERGITIDIALWKFETPKYMVTVIDAPGHRDFIKNMITGTSQADCAILIIAGGTGEFEAGISKDGQTREHALLAFTLGVRQLIVAINKMDTTKWSEARYTEIVKEVSSFIKKIGFNPKSVPFVPISGWHGDNMLDESKNMGWFKGWTKETKAGSKTGKTLLEAIDAIEPPVRPSDKPLRLPLQDVYKIGGIGTVPVGRVETGTIKAGMVVNFAPAAVTTEVKSVEMHHETLTEGLPGDNVGFNVKNVSVKDIRRGNVCSDSKNDPAKEAGSFTAQVIILNHPGQISNGYSPVLDCHTAHIACKFAELVEKIDRRSGK

SEQ ID NO: 17154 - protein, 417 aa, Thamnostylum piriforme
GKSTTTGHLIYKCGGIDKRTIEKFEKEAAELGKGSFKYAWVLDKLKAERERGITIDIALWKFETPKYHVTVIDAPGHRDFIKNMITGTSQADCGILIIAAGTGEFEAGISKDGQTREHALLAFTLGVRQLIVAINKMDSTKYSEARYTEIVKEVSTFIKKIGFNPKSVPFVPISGWNGDNMLEESPNMPWFKGWTKETKAGSKTGKTLLEAIDAIDPPVRPSDKPLRLPLQDVYKIGGIGTVPVGRVETGVIKAGMIVTFAPANVTTEVKSVEMHHEQLVEGVPGDNVGFNVKNVSVKDIRRGNVCSDSKNDPAKEAGSFTAQVIVLNHPGQIGAGYSPVLDCHTAHIACKFAELLEKIDRRSGKKLEDAPKFVKSGDSAIVKMVPSKPMCVEAYTEYPLLGRFAVRDMRQTVAVGV

SEQ ID NO: 17155 - protein, 365 aa, Backusella ctenidia
GKSTTTGHLIYKCGGIDKRTIEKFEKEAAELGKGSFKYAWVLDKLKAERERGITIDIALWKFETPKYNVTVIDAPGHRDFIKNMITGTSQADCAILIIAGGTGEFEAGISKDGQTREHALLAFTLGVRQLIVAINKMDTTKWSQDRYNEIVKEVSGFIKKIGFNPKSVPFVPISGWHGDNMLDESTNMPWFKGWNKETKAGSKTGKTLLEAIDAIEPPVRPSDKPLRLPLQDVYKIGGIGTVPVGRVETGTIKAGMVVNFAPAAVTTEVKSVEMHHETLSEGLPGDNVGFNVKNVSVKDIRRGNVCSDSKNDPAKESASFTAQVIILNHPGQISAGYAPVLDCHTAHIACKFSELIEKIDRRSGK

SEQ ID NO: 17156 - protein, 401 aa, Circinomucor circinelloides
GKSTTTGHLIYKCGGIDKRTIEKFEKEAAELGKGSFKYAWVLDKLKAERERGITIDIALWKFETPKYNVTVIDAPGHRDFIKNMITGTSQADCAILIIAGGTGEFEAGISKDGQTREHALLAFTLGVRQLIVAINKMDTTKWSQDRYNEIVKEVSGFIKKIGFNPKSVPFVPISGWHGDNMLDESTNMPWFKGWNKETKAGSKTGKTLLEAIDAIEPPVRPSDKPLRLPLQDVYKIGGIGTVPVGRVETGTIKAGMVVNFAPAAVTTEVKSVEMHHETLSEGLPGDNVGFNVKNVSVKDIRRGNVCSDSKNDPAKESASFTAQVIILNHPGQISAGYAPVLDCHTAHIACKFSELIEKIDRRSGKKMEDAPKFVKSGDSAIVKMVPSKPMCVEAYTDYPPL

SEQ ID NO: 17157 - protein, 405 aa, Absidia blakesleeana
GKSTSTGHLIYKCGGIDKRTIEKFEKEAAELGKGSFKYAWVLDKLKAERERGITIDIALWKFETPKYHVTVIDAPGHRDFIKNMITGTSQADCGILIIAAGTGEFEAGISKDGQTREHALLAFTLGVRQLIVAINKMDSTKYSEARYNEIVKEVSTFIKKIGFNPKSVPFVPISGWNGDNMLEESTNMPWFKGWNKETKAGAKTGKTLLEAIDNIDPPVRPSDKPLRLPLQDVYKIGGIGTVPVGRVETGVIKPGMVVTFAPANVTTEVKSVEMHHEQLAEGVPGDNVGFNVKNVSVKDIRRGNVCSDSKNDPAKESASFTAQVIVLNHPGQIGAGYSPVLDCHTAHIACKFSELLEKIDRRSGKKLEDSPKFVKCGDSAIVKMVPSKPMCVEAYTEYPPLGRFA

SEQ ID NO: 17158 - protein, 413 aa, Hyles lineata
HVDSGKSTTTGHLIYKCGGIDKRTIEKFEKEAQEMGKGSFKYAWVLDKLKAERERGITIDIALWKFETAKYYVTIIDAPGHRDFIKNMITGTSQADCAVLIVAAGTGEFEAGISKNGQTREHALLAFTLGVKQLIVGVNKMDSTEPPYSESRFEEIKKEVSSYIKKIGYNPAAVAFVPISGWHGDNMLEPSTKMPWFKGWQVERKEGKADGKCLIEALDAILPPARPTDKALRLPLQDVYKIGGIGTVPVGRVETGILKPGTIVVFAPANITTEVKSVEMHHEALQEAVPGDNVGFNVKNVSVKELRRGYVAGDSKNNPPKGAADFTAQVIVLNHPGQISNGYTPVLDCHTAHIACKFAEIKEKVDRRTGKSTEDNPKSIKSGDAAIVNLVPSKPLCVESFQEFPPLGRFAVR

SEQ ID NO: 17159 - protein, 411 aa, Oikopleura longicauda
DSGKSTTTGHLIYKCGGIDKRTIEKFEKEAQEMGKGSFKYAWVLDKLKAERERGITIDIALWKFETNKYYVTIIDAPGHRDFIKNMITGTSQADCAVLIVAAGVGEFEAGISKNGQTREHALLAFTLGVKQLIIGVNKMDSNEPPYSEKRFSEISSEVSNYVKKVGYNPKAVAFVPISGWHGDNMIEPSTNMSWYKGWSKEVKEGKFSGKTMFEALDSIIPPTRPSDKPLRLPLQDVYKIGGIGTVPVGRVETGLIKPGMVVTFAPVNVTTEVKSVEMHHESLPEAGPGDNVGFNVKNVSVKDIRRGNVASDSKNDPAKEAKTFNAQVIVLNHPGEIGNGYSPVLDCHTAHIACKFTELLEKIDRRSGKKMEDFPKKVKSGDAAIVKMTPSKPMCVEAFSAYPPLGRFAVR

SEQ ID NO: 17160 - protein, 377 aa, Eumesocampa frigilis
QEMGKGSFKYAWVLDKLKAERERGITIDIALWKFETAKYYITIIDAPGHRDFIKNMITGTSQADCAVLIVAAGTGEFEAGISKNGQTREHALLAYTLGVKQLIVGVNKMDSTEPPYNEARYEEIKKEVSSYIKKIGYNPATVAFVPISGWNGDNMLEPSDKMGWFKGWKVERKEGNAEGKCLIEALDAILPPSRPTDKALRLPLQDVYKIGGIGTVPVGRVETGILKPGMVVVFAPANITTEVKSVEMHHEALTEAVPGDNVGFNVKNVSVKELRRGYVCGDSKNNPPKAAQDFTAQVIVLNHPGQICNGYTPVLDCHTAHIACKFAEIKEKCDRRTGKTTEENPKAIKSGDAAIVTLVPSKPMCVEAFTEFPPLGR

SEQ ID NO: 17161 - protein, 377 aa, Metajapyx subterraneus
QEMGKGSFKYAWVLDKLKAERERGITIDIALWKFETGKYYITIIDAPGHRDFIKNMITGTSQADCAVLIVAAGTGEFEAGISKNGQTREHALLAYTLGVKQLIVGVNKMDSTEPPYSDSRYEEIKKEVSNYIKKIGYNPAAVAFVPISGWNGDNMLEPSEKMPWFKGWKVERKEGNAEGKCLIEALDAILPPSRPTDKALRLPLQDVYKIGGIGTVPVGRVETGILKPGMVVTFAPNNLTTEVKSVEMHHEALTEAMPGDNVGFNVKNVSVKELRRGYVCGDSKGNPPKAASDFTAQVIVLNHPGQISNGYTPVLDCHTAHIACKFAEIKEKCDRRTGKTTEENPKSIKSGDAAIITLVPTKPMCVEAFTEFPPLGR

SEQ ID NO: 17162 - protein, 377 aa, Machiloides banksi
QEMGKGSFKYAWVLDKLKAERERGITIDIALWKFETSKYYVTIIDAPGHRDFIKNMITGTSQADCAVLIVAAGTGEFEAGISKNGQTREHALLAFTLGVKQLIVGVNKMDSTEPPYSESRYEEIKKEVSNYIKKIGYNPVAVPFVPISGWHGDNMLEQSEKMSWFKGWKIERKEGNADGKCLIDALDAILPPARPTDKPLRLPLQDVYKIGGIGTVPVGRVETGLLKPGMVVTFAPANITTEVKSVEMHHEALTEAVPGDNVGFNVKNVSVKELRRGYVCGDSKNNPPKGAQDFIAQVIVLNHPGQISNGYTPVLDCHTAHIACKFAEIKEKCDRRTGKTVEENPKAIKSGDAAIINLVPSKPMCVESFQEFPPLGR

SEQ ID NO: 17163 - protein, 377 aa, Scutigerella sp. 'Scu2'
QEMGKGSFKYAWVLDKLKAERERGITIDISLWKFETPKYYITIIDAPGHRDFIKNMITGTSQADCAVLVVAAGTGEFEAGISKNGQTREHALLAYTLGVKQLIVAVNKMDSTEPPYNQGRFEEIQKEVCSYIKKIGYNPVAVAFVPISGWNGDNMLEASPNMTWHKGWEIDRKEGKASGKTLLEALDAIIPPARPTDKPLRLPLQDVYKIGGIGTVPVGRVETGVIKPGMVVTFAPANITTEVKSVEMHHEALQEAVPGDNVGFNVKNVSVKELRRGFVAGDSKTNPPKAVADFTAQVIVLNHPGQISNGYTPVLDCHTAHIACKFAEIKEKCDRRTGKTTEENPKAIKSGDAAIITLIPSKPMCVESFSDFPPLGR

SEQ ID NO: 17164 - protein, 377 aa, Peripatus sp. 'Per2'
QEMGKGSFKYAWVLDKLKAERERGITIDIALWKFETPKFYITIIDAPGHRDFIKNMITGTSQADCAVLIVAAGTGEFEAGISKNGQTREHALLAYTLGVKQLIVGVNKMDSTEPPFSQVRFDEIVKEVSNYIKKIGYNPKTVPFVPISGWHGDNMLEGSANMAWHKGWEVEKGDKKFSGKTLLEALDSIQPPSRPTEKPLRLPLQDVYKIGGIGTVPVGRVETGILKPGMVVTFAPVGLTTEVKSVEMHHEALTEACPGDNVGFNVKNVSVKELRRGFVAGDSKNEPPKEAADFLAQVIVLNHPGQISNGYTPVLDCHTAHIACKFAEIKEKCDRRTGKTLEENPKSIKSGDAAIVSLVPTKPLCVEAFSDFPPLGR

SEQ ID NO: 17165 - protein, 359 aa, Harpochytrium sp. JEL94
KYAWVLDKLKAERERGITIDIALWKFETPKLYVTVIDAPGHRDFIKNMITGTSQADCAVLIVPAGTGEFEAGISKDGQTREHALLAYTLGVKQMIVAVNKMDSAKWSEERYNEIVKEVSSYIKKVGYNPAAVPFVPISGWHGDNMIEASDNMPWFKSWQKETKGGKFTGKTLLEAIDSIEPPSRPTDKPLRLPLQDVYKIGGIGTVPVGRVETGIIKPGMVVTFAPTGVTTEVKSVEMHHEALPEALPGDNVGFNVKNVSVKDIRRGNVAGDSKNDPPRETASFNAQVIILNHPGQIGAGYAPVLDCHTAHIACKFAELVEKIDRRSGKKMEDAPKFVKSGDACIAKMVPSKPMCGESF

SEQ ID NO: 17166 - protein, 390 aa, Monoblepharis insignis
IEKFEKEAAELGKGSFKYAWVLDKLKAERERGITIDIALWRFETPKYNVTVIDAPGHRDFIKNMITGTSQADCAILIIAGGTGEFEAGISKDGQTREHALLSFTLGVRQLIVAVNKMDSTGYSEERFNEIVREVSNFVKKVGYNPKTVAFVPISGWNGDNMIEATTNMPWYKGWEKETKSGKATGKTLVDAIDAIEPPTRPTDKPLRLPLQDVYKIGGIGTVPVGRVETGVIKPGMVVTFAPSNVTTEVKSVEMHHESLAEGLPGDNVGFNVKNVSVKDIRRGNVASDSKNDPAQESASFNAQVIVMNHPGQISNGYSPVLDCHTAHIACRFNNILQKIDRRSGKVLEENPKFIKSGDAAMVEMIPTKPMCVESFNEYPPLGRFAVRDMR

SEQ ID NO: 17167 - protein, 390 aa, Rhizophlyctis harderi
IEKFEKEAAEMGKGSFKYAWVLDKLKAERERGITIDIALWKFETPKYYVTVIDAPGHRDFIKNMITGTSQADCAILVIASGVGEFEAGISKDGQTREHALLANTLGVKQMIIAVNKMDTNKWSEARFNEIVKELSSFIKKVGFNPKAVPFIPISGWHGDNMLEPSENTPWFKGWTKETKAGALKGTTLLQAIDAIDLPTRPTDKPLRLPLQDVYKIGGIGTVPVGRVETGTIKAGMIVNFSPANVTTEVKSVEMHHETLEAGLPGDNVGFNIKNVSVKEIRRGMVCSDTKNDPAKEAASFNAQIIVLNHPGQISAGYSPVLDCHTAHIACKFAELLEKLDRRTSKKLEDNPKFIKSGDSAIVKMVPSKPMCVESFTEYPPLGRFAVRDMR

SEQ ID NO: 17168 - protein, 331 aa, Iphiclides podalirius
KSTTTGHLIYKCGGIDKRTIEKFEKEAQEMGKGSFKYAWVLDKLKAERERGITIDIALWKFETSKYYVTIIDAPGHRDFIKNMITGTSQADCAVLIVAAGTGEFEAGISKNGQTREHALLAFTLGVKQLIVGVNKMDSTEPPYSEPRFEEIKKEVSSYIKKIGYNPAAVAFVPISGWHGDNMLEPSTKMPWFKGWQVERKEGKAEGKCLIEALDAILPPARPTDKALRLPLQDVYKIGGIGTVPVGRVETGVLKPGTIVVFAPANITTEVKSVEMHHEALQEAVPGDNVGFNVKNVSVKELRRGYVAGDSKNNPPKGASDFTAQVIVLNHP

SEQ ID NO: 17169 - protein, 373 aa, Pachymerium ferrugineum
  unsure (1)..(373): unsure at all Xaa locations
KXSFKYAWXLDKLKAERERGITIDISLWKFETAKYYITIIDAPGHRDFIKNMITGTSQADCAVLIVAAGTGEFEAGISKNGQTREHALLAYTLGVKQLIVAVNKMDSTEPPYSQPRFEEIQKEVRGYIKKIGYNPAGVPFVPISGWNGDNMLDASPNMPWHKGWDIERKEGKASGKTLLEALDAIIPPTRPTDKPLRLPLQDVYKIGGIGTVPVGRVETGTLKPGMVVTFAPANLTTEVKSVEMHHEALQEALPGDNVGFNIKNVSVKELRRGYVAGDTKNNPPKAVSDFTAQVIVLNHPGQISNGYTPVLDCHTAHIACKFAEIMEKCDRRSGKTVEASPKSIKSGDAAIINLVPSKPMCVESFADFPPLGR

SEQ ID NO: 17170 - protein, 363 aa, Panorpa acuta
ERERGITIDIALWKFETAKYYVTIIDAPGHRDFIKNMITGTSQADCAVLIVAAGTGEFEAGISKNGQTREHALLAFTLGVKQLIVGVNKMDSTEPPYSESRFEEIKKEVSSYIKKIGYNPAAVAFVPISGWHGDNMLEVSSKMGWFKGWNVERKEGKADGKCLIEALDAILPPARPTDKPLRLPLQDVYKIGGIGTVPVGRVETGVLKPGTVVVFAPANLTTEVKSVEMHHEALQEAVPGDNVGFNVKNVSVKELRRGYVAGDSKANPPKGAADFTAQVIVLNHPGQISNGYTPVLDCHTAHIACKFAEIKEKVDRRTGKSTEDNPKAIKSGDAAIVVLVPSKPMCVESFQEFPPLGRFAVRD

SEQ ID NO: 17171 - protein, 363 aa, Panorpa cognata
ERERGITIDIALWKFETAKYYVTIIDAPGHRDFIKNMITGTSQADCAVLIVAAGTGEFEAGISKNGQTREHALLAFTLGVKQLIVGVNKMDSTEPPYSESRFEEIKKEVSSYIKKIGYNPAAVAFVPISGWHGDNMLEVSSKMGWFKGWAVERKEGKADGKCLIEALDAILPPARPTDKPLRLPLQDVYKIGGIGTVPVGRVETGVLKPGTVVVFAPANLTTEVKSVEMHHEALQEAVPGDNVGFNVKNVSVKELRRGYVAGDSKANPPKGAADFTAQVIVLNHPGQISNGYTPVLDCHTAHIACKFAEIKEKVDRRTGKSTEDNPKAIKSGDAAIVVLVPSKPMCVESFQEFPPLGRFAVRD

SEQ ID NO: 17172 - protein, 377 aa, Abacion magnum
AELGKGSFKYAWVLDKLKAERERGITIDISLWKFETPKFYITIIDAPGHRDFIKNMITGTSQADCAVLIVAAGTGEFEAGISKNGQTREHALLAYTLGVKQLIVGVNKMDTTEPPYSSPRFEEIQKEVSSYIKKIGYNPAAVAFVPISGWNGDNMLEPSSNMPWHKGWSIERKEGNASGKTLLEALDAIIPPQRPTDKALRLPLQDVYKIGGIGTVPVGRVETGVLKPGMVVTFAPTALTTEVKSVEMHHEALQEAVPGDNVGFNVKNVSVKELRRGFVAGDSKANPPKAVSEFTAQVIVLNHPGQISNGYTPVLDCHTAHIACKFAEIKEKCDRRTGKTVEENPKAIKSGDAAIITLIPTKPMCVESFSDFPPLGR

SEQ ID NO: 17173 - protein, 377 aa, Cryptops hyalinus
QEMGKGSFKYAWVLDKLKAERERGITIDISLWKFETAKYYITIIDAPGHRDFIKNMITGTSQADCAVLIVAAGTGEFEAGISKNGQTREHALLAYTLGVKQLIVGVNKMDSTEPPYSQSRFEEIQKEVSSYIKKIGYNPASVAFVPISGWNGDNMLEPSTNMTWHKGWDIERKEGKASGKTLLEALDAIIPPTRPTDKPLRLPLQDVYKIGGIGTVPVGRVETGVLKPGMVVTFAPANITTEVKSVEMHHEALQEAVPGDNVGFNVKNVSVKELRRGYVAGDSKNNPPRAVADFTAQVIVLNHPGQISNGYTPVLDCHTAHIACKFAEIKEKCDRRTGKTVEENPKSIKSGDAAIVNLVPSKPMCVESFSDFPPLGR

SEQ ID NO: 17174 - protein, 377 aa, sphaerotheriid 'Glo2'
AELGKGSFKYAWVLDKLKAERERGITIDISLWKFETPKFYITIIDAPGHRDFIKNMITGTSQADCAVLIVAAGTGEFEAGISKNGQTREHALLAYTLGVKQLIVGVNKMDTTEPPYSESRFDEIKKEVSNYIKKIGYNPAAVAFVPISGWNGDNMLEPSPSMTWHKGWTIERKEGNANGKTLLEALDAIVPPARPTDKALRLPLQDVYKIGGIGTVPVGRVETGVLKPGMVVTFAPTALTTEVKSVEMHHEALVEAVPGDNVGFNVKNVSVKELRRGFVCGDSKSNPPKAVSEFTAQVIVLNHPGQIQNGYTPVLDCHTAHIACKFADIKEKCDRRTGKTVEDNPKFIKSGDAAIIALVPTKPMCVESFSDFPPLGR

SEQ ID NO: 17175 - protein, 377 aa, Geophilus vittatus
QEMGKGSFKYAWVLDKLKAERERGITIDISLWKFETPKYYITIIDAPGHRDFIKNMITGTSQADCAVLIVAAGTGEFEAGISKNGQTREHALLAYTLGVKQLIVGVNKMDSTEPPYSQGRFEEIQKEVSSYIKKIGYNPAAVPFVPISGWNGDNMLDASPNMPWHKGWDIERKEGKASGKTLLEALDSIIPPTRPTDKPLRLPLQDVYKIGGIGTVPVGRVETGTLKPGMVVTFAPVNLTTEVKSVEMHHEALQEALPGDNVGFNVKNVSVKELRRGYVAGDSKNNPPKAVSDFTAQVIVLNHPGQISNGYTPVLDCHTAHIACKFAEIKEKCDRRSGKTVEENPKSIKSGDAAIVNLVPSKPMCVESFSDFPPLGR

SEQ ID NO: 17176 - protein, 377 aa, Hiltonius sp. 'Hil'
AELGKGSFKYAWVLDKLKAERERGITIDISLWKFETAKFYITIIDAPGHRDFIKNMITGTSQADCAVLIVAAGTGEFEAGISKNGQTREHALLAYTLGVKQLIVGVNKMDTTEPPYSEARFDEIKKEVSSYIKKIGYNPVAVAFVPISGWNGDNMLEPSPNMTWHKGWNIERKEGNASGKTLLEALDAIVAPSRPTDKALRLPLQDVYKIGGIGTVPVGRVETGVLKPGMVVTFAPANLTTEVKSVEMHHEALTEAVPGDNVGFNVKNVSVKELRRGFVAGDSKANPPKAVSEFTAQVIVLNHPGQISNGYTPVLDCHTAHIACKFAEIKEKCDRRTGKTVEQNPKAIKSGDAAIVNLIPTKPMCVESFADFPPLGR

SEQ ID NO: 17177 - protein, 377 aa, Ophyiulus pilosus
AELGKGSFKYAWVLDKLKAERERGITIDISLWKFETAKFYITIIDAPGHRDFIKNMITGTSQADCAVLIVAAGTGEFEAGISKNGQTREHALLAYTLGVKQLIVGVNKMDTTEPPYNEGRFDEIKKEVSSYIKKIGYNPATVAFVPISGWNGDNMLEPSPSMTWHKGWAIERKEGNANGKTLLEALDAIIPPARPTDKALRLPLQDVYKIGGIGTVPVGRVETGVLKPGMVVTFAPAALTTEVKSVEMHHEALLEAVPGDNVGFNVKNVSVKELRRGFVAGDSKANPPKAVSEFTAQVIVLNHPGQISNGYTPVLDCHTAHIACKFAEIKEKCDRRTGKTVEDNPKAIKSGDAAIVNLVPTKPMCVESFSDFPPLGR

SEQ ID NO: 17178 - protein, 377 aa, Nemasoma varicorne
AELGKGSFKYAWVLDKLKAERERGITIDISLWKFETAKFYITIIDAPGHRDFIKNMITGTSQADCAVLIVAAGTGEFEAGISKNGQTREHALLAYTLGVKQLIVGVNKMDTTEPPYNEGRFDEIKKEVSSYIKKIGYNPATVAFVPISGWNGDNMLEPSPNMTWHKGWAIERKDGNASGKTLLEALDAIIPPARPTDKALRLPLQDVYKIGGIGTVPVGRVETGVLKPGMVVTFAPAALTTEVKSVEMHHEALTEAVPGDNVGFNVKNVSVKELRRGFVAGDSKANPPKAVSEFTAQVIVLNHPGQISNGYTPVLDCHTAHIACKFAEIKEKCDRRTGKTVEENPKAIKSGDAAIVNLVPTKPMCVESFSDFPPLGR

SEQ ID NO: 17179 - protein, 377 aa, Oxidus gracilus
AELGKGSFKYAWVLDKLKAERERGITIDISLWKFETPKYYITIIDAPGHRDFIKNMITGTSQADCAVLIVAAGTGEFEAGISKNGQTREHALLAYTLGVKQLIVGVNKMDTTEPPYNEARFDEIKKEVSSYIKKIGYNPAAVAFVPISGWNGDNMLEPSPNMTWHKGWAVERKEGNASGKTLLEALDAVVPPQRPTDKALRLPLQDVYKIGGIGTVPVGRVETGVIKPGMVVTFAPVNLTTEVKSVEMHHEALLEAVPGDNVGFNVKNVSVKELRRGFVAGDSKNNPPKAVSEFTAQVIVLNHPGQISNGYTPVLDCHTAHIACKFAEIKEKCDRRTGKTVEDAPKAIKSGDAAIVNLVPTKPMCVESFSDFPPLGR

SEQ ID NO: 17180 - protein, 377 aa, Orthoporus ornata
AELGKGSFKYAWVLDKLKAERERGITIDISLWKFETPKFYITIIDAPGHRDFIKNMITGTSQADCAVLIVAAGTGEFEAGISKNGQTREHALLAYTLGVKQLIVGVNKMDTTEPPYSEGRFDEIKKEVSSYIKKIGYNPAAVAFVPISGWNGDNMLEPSPNMSWHKGWSVERKEGNASGKTLLEALDAIIPPTRPTDKPLRLPLQDVYKIGGIGTVPVGRVETGVLKPGMVVTFAPSALTTEVKSVEMHHEALTEALPGDNVGFNVKNVAVKELRRGFVAGDSKANPPKAVSEFTAQVIVLNHPGQISNGYTPVLDCHTAHIACKFAEIKEKCDRRTGKTVEQNPKAIKSGDAAIINLVPTKPMCVESFSDFPPLGR

SEQ ID NO: 17181 - protein, 377 aa, Uroblaniulus canadensis
AELGKGSFKYAWVLDKLKAERERGITIDISLWKFETQKFYITIIDAPGHRDFIKNMITGTSQADCAVLIVAAGTGEFEAGISKNGQTREHALLAYTLGVKQLIVGVNKMDTTEPPYNEGRFDEIRKEVSNYIKKIGYNPATVAFVPISGWNGDNMLEPSPNMTWHKGWAIERKDGNANGKTLLEALDAIIPPARPTDKALRLPLQDVYKIGGIGTVPVGRVETGVLKPGMVVTFAPAALTTEVKSVEMHHEALQEAVPGDNVGFNVKNVSVKELRRGFVAGDSKANPPKAVSEFTAQVIVLNHPGQISNGYTPVLDCHTAHIACKFAEIKEKCDRRTGKTVEENPKAIKSGDAAIVNLVPTKPMCVESFSDFPPLGR

SEQ ID NO: 17182 - protein, 377 aa, Pokabius bilabiatus
QEMGKGSFKYAWVLDKLKAERERGITIDISLWKFETAKYYITIIDAPGHRDFIKNMITGTSQADCAVLIVAAGTGEFEAGISKNGQTREHALLAYTLGVKQLIVGVNKMDSTEPPYSQARFEEIQKEVSSYIKKIGYNPVAVAFVPISGWNGDNMLESSPNMPWHKGWDIERKEGKASGKTLLEALDAIVPPTRPTDKALRLPLQDVYKIGGIGTVPVGRVETGVLKPGMVVTFAPANLTTEVKSVEMHHEALQEAVPGDNVGFNVKNVSVKELRRGYVAGDSKSNPPKAVADFTAQVIVLNHPGQISNGYTPVLDCHTAHIACKFSEIKEKCDRRTGKTVEENPKSIKSGDAAIVNLIPSKPMCVESFADFPPLGR

SEQ ID NO: 17183 - protein, 365 aa, Polyzonium germanicum
AELGKGSFKYAWVLDKLKAERERGITIDISLWKFETAKFYITIIDAPGHRDFIKNMITGTSQADCAVLIVAAGTGEFEAGISKNGQTREHALLAYTLGVKQLIVGVNKMDTTEPPFHEARFDEIKKEVISYIKKVGYNAATVNFVPISGWNGDNMLEPSPNMTWHKGKTLLEALDSVVPPTRPTDKALRLPLQDVYKIGGIGTVPVGRVETGVLKPGMVVTFAPSALTTEVKSVEMHHEALTEALPGDNVGFNVKNVSVKELRRGFVAGDSKVNPPKAVSEFTAQVIVLNHPGQISNGYTPVLDCHTAHIACKFAEIKEKCDRRTGKALEENPKSIKSGDAAIINLVPTKPMCVESFSDFPPLGR

SEQ ID NO: 17184 - protein, 377 aa, Platydesmus sp. 'Pla'
AELGKGSFKYAWVLDKLKAERERGITIDISLWKFETPKYYITIIDAPGHRDFIKNMITGTSQADCAVLIVAAGTGEFEAGISKNGQTREHALLAYTLGVKQLIVGVNKMDTTEPPYNEGRFDEIKKEVSSYIKKIGYNPAAVAFVPISGWNGDNMLEPSANMTWHKGWAVERKEGNANGKTLLEALDAVIPPARPTDKALRLPLQDVYKIGGIGTVPVGRVETGVLKPGMVVTFAPSNLTTEVKSVEMHHEALQEAVPGDNVGFNVKNVSVKELRRGFVAGDSKANPPKAVSEFTAQVIVLNHPGQISNGYTPVLDCHTAHIACKFAEIKEKCDRRTGKTVEENPKAIKSGDAAIINLVPTKPMCVESFSDFPPLGR

SEQ ID NO: 17185 - protein, 377 aa, Sphaerotherium punctulatum
AELGKGSFKYAWVLDKLKAERERGITIDISLWKFETAKFYITIIDAPGHRDFIKNMITGTSQADCAVLIVAAGTGEFEAGISKNGQTREHALLAYTLGVKQLIVGVNKMDTTEPPYSESRFDEIRKEVSNYIKKIGYNPAAVAFVPISGWNGDNMLEPSPSMSWHKGWSIERKEGNANGKTLLEALDAIVPPARPTDKALRLPLQDVYKIGGIGTVPVGRVETGVLKPGMVVTFAPTALTTEVKSVEMHHEALVEAVPGDNVGFNVKNVSVKELRRGFVCGDSKSNPPKAVSEFTAQVIVLNHPGQIQNGYTPVLDCHTAHIACKFADIKEKCDRRTGKTVEENPKFIKSGDAAIIALVPTKPMCVESFSDFPPLGR

SEQ ID NO: 17186 - protein, 377 aa, Orthocricus sp. 'Spi1'
AELGKGSFKYAWVLDKLKAERERGITIDISLWKFETAKFYITIIDAPGHRDFIKNMITGTSQADCAVLIVAAGTGEFEAGISKNGQTREHALLAYTLGVKQLIVGVNKMDTTEPPYSESRFDEIKKEVSSYIKKIGYNPAAVAFVPISGWNGDNMLEPSPNMTWHKGWSIERKEGNASGKTLLEALDAIVPPTRPTDKALRLPLQDVYKIGGIGTVPVGRVETGVLKPGMVVTFAPANLTTEVKSVEMHHEALTEAVPGDNVGFNVKNVSVKELRRGFVAGDSKANPPKAVSEFTAQVIVLNHPGQISNGYTPVLDCHTAHIACKFAEIKEKCDRRTGKTVEENPKAIKSGDAAIVNLVPTKPMCVESFSDFPPLGR

SEQ ID NO: 17187 - protein, 377 aa, Scolopocryptops sexspinosus
QEMGKGSFKYAWVLDKLKAERERGITIDISLWKFETSKYYITIIDAPGHRDFIKNMITGTSQADCAVLIVAAGTGEFEAGISKNGQTREHALLAYTLGVKQLIVGVNKMDSTEPAYSQSRFEEIQKEVSSYIKKIGYNPASVPFVPISGWHGDNMLEASPNMTWHKGWEIERKEGKASGKTLLEALDSIIAPTRPTDKPLRLPLQDVYKIGGIGTVPVGRVETGLLKPGMVVTFAPANLTTEVKSVEMHHEALQEAVPGDNVGFNVKNVSVKELRRGFVAGDSKNNPPRAVADFTAQVIVLNHPGQIANGYTPVLDCHTAHIACKFAEIKEKCDRRTGKTVEENPKSIKSGDAAIVNLVPSKPMCVESFSDFPPLGR

SEQ ID NO: 17188 - protein, 377 aa, Striaria sp. 'Str2'
AELGKGSFKYAWVLDKLKAERERGITIDISLWKFETPRYYITIIDAPGHRDFIKNMITGTSQADCAVLIVAAGTGEFEAGISKNGQTREHALLAYTLGVKQLIVGVNKMDTTEPPYNEGRFDEIKKEVSSYIKKIGYNPVSVPFVPISGWNGDNMLEPSPSMTWHKGWSVERKEGNANGKTLLEALDAIVPPTRPTDKALRLPLQDVYKIGGIGTVPVGRVETGLLKPGMVVTFAPCNLTTEVKSVEMHHEALTEAVPGDNVGFNVKNVSVKELRRGYVAGDSKANPPKAVSEFTAQVIVLNHPGQISNGYTPVLDCHTAHIACKFAEIKEKCDRRTGKTTEENPKAIKSGDAAIVNLIPTKPMCVESFADFPPLGR

SEQ ID NO: 17189 - protein, 377 aa, Scolopendra viridis
QEMGKGSFKYAWVLDKLKAERERGITIDISLWKFETPKYYITIIDAPGHRDFIKNMITGTSQADCAVLIVAAGTGEFEAGISKNGQTREHALLAYTLGVKQLIVGVNKMDSTEPPYSQARFEEIQKEVSSYIKKIGYNPASVPFVPISGWNGDNMLDASANMTWHKGWEIERKEGKASGKTLLEALDSIIPPTRPTDKPLRLPLQDVYKIGGIGTVPVGRVETGVLKPGMVVTFAPVNLTTEVKSVEMHHEALQEAVPGDNVGFNVKNVSVKELRRGYVAGDSKNNPPKAVSDFTAQVIVLNHPGQISNGYTPVLDCHTAHIACKFAEIKEKCDRRTGKTVEENPKSIKSGDAAIVNLIPSKPMCVESFSDFPPLGR

SEQ ID NO: 17190 - protein, 377 aa, Symphylella sp. 'Sym'
  unsure (1)..(377): unsure at all Xaa locations
QEMGKGSFKYAWVLDKLKAERERGITIDIALWKFETPXYYVTIIDAPGHRDFIKNMITGTSQADCAVLVVAAGTGEFEAGISKNGQTREHALLAYTLGVKQLIVAVNKMDSTEPPYSQXRFEEIKKEVSGYIKKIGYNPATVAFVPISGWNGDNMLEGSTNMPWHKSWEIERKEGKASGKTLLEALDAILPPARPTDKPLRLPLQDVYKIGGIGTVPVGRVETGTIKPGVVVCFAPVNITTEVKSVEMHHEALLEAVPGDNVGFNVKNVSVKELRRGYVAGDTKNNPPKGVADFTAQVIVLNHPGQITNGYTPVLDCHTAHIACKFAEIKEKCDRRTGKTTEENPKBIKSGDAAIVTLVPSKPMCVESFSDFPPLGR

SEQ ID NO: 17191 - protein, 377 aa, Pseudopolydesmus serratus
AELGKGSFKYAWVLDKLKAERERGITIDISLWKFETPKYYITIIDAPGHRDFIKNMITGTSQADCAVLIVAAGTGEFEAGISKNGQTREHALLAYTLGVKQLIVGVNKMDTTEPPYSEARFDEIKKEVSSYIKKIGYNPAAVAFVPISGWNGDNMLEPSPNMSWHKGWAVERKDGNANGKTLLEALDAVIPPSRPTDKALRLPLQDVYKIGGIGTVPVGRVETGVLKPGMVVTFAPVNLTTEVKSVEMHHEALQEAVPGDNVGFNVKNVSVKELRRGYVAGDSKANPPKAVSEFTAQVIVLNHPGQISNGYTPVLDCHTAHIACKFAEIKEKCDRRTGKTVEDAPKAIKSGDAAIVNLVPTKPMCVESFSDFPPLGR

SEQ ID NO: 17192 - protein, 377 aa, Calyptophthiracarus olivaceus
QEMGKGSFKYAWVLDKLKAERERGITIDITLWKFETPKYYVTVIDAPGHRDFIKNMITGTSQADVAVLIVAAGTGEFEAGISKNGQTREHALLAYTLGVKQLIVGVNKMDTTEPPYSQPRFEEILKEVSAYVKKIGYNPAAVPFVPISGWNGDNMLEPSANMPWFKGWTLERKGAKLEGKTLLQALDAMEPPSRPLEKPLRLPLQDVYKIGGIGTVPVGRVETGILKPGTVVTFAPVNLTTEVKSVEMHHEALVEAVPGDNVGFNVKNVSVKELRRGYVAGDSKDNPPKATEEFTAQVIVLNHPGQISNGYTPVLDCHTAHIACKFKEIKEKCDRRSGKKIEDNPKSIKSGDAAIIDLVPSKPMCVETFTDFPPLGR

SEQ ID NO: 17193 - protein, 377 aa, Chthonius tetrachelatus
  unsure (1)..(377): unsure at all Xaa locations
QEMGKGSFKYAWVLDKLKAERERGITIDISLWKFETSKYYVTVIDAPGHRDFIKNMITGTSQADCAILVVAXGTGEFEAGISKNGQTREHALLAYTLGVKQMIVGVNKMDTTEPPYSQNRFEEIKKEVSTYIKKIGXNPATVPFVPISGFNGDNMLEQSTNMAWWKGWBIERKGVKAXGTTLLNALDXMEPPXRPTNKPLRVPLQDVYKIGGIGTVPVGRVETGILKPGCVVTFAPANITTEVKSVEMHHEALTEAVPGDNVGFNVKNVSVKEIRRGNVAGDSKDCPPKATESFTAQVIVLNHPGQISQGYTPVLDCHTAHIACRFXQIKEKCDRRSGKKLEDXPKFIKSGDAAIIXLTPSKPMCVEXFTEFPPLGR

SEQ ID NO: 17194 - protein, 377 aa, Heterometrus spinifer
  unsure (1)..(377): unsure at all Xaa locations
QEMGKGSFKYAWVLDKLKAERERGITIDITLWKFETQKYYITVIDAPGHRDFIKNMITGTSQADCAXLIVAAGTGEFEAGISKNGQTREHALLAYTLGVKQMIVGVNKMDTTEPPFSEXRFEEIKKEVSAYIKKIGYNPAXVPFVPISGWNGDNMLEPSXNXPWYKGWXXZRKXXKXEGKTLLQALDAMEPPTRPXDKPLRLPLQDVYKIGGIGTVPVGRVETGXLKPGXVVTFAPVNXTTEVKSVEMHHEAXTEAVPGDNVGFNVKNVSVKELRRGYVCGDSKDTPPKCTEEFTAQVIVLNHPGQISNGYTPVLDCHTAHIACKFREIKEKCDRRSGKKLEDNPKFIKSGDAAIIXLAPTKPMCVETFTEFPPLGR

SEQ ID NO: 17195 - protein, 377 aa, Heterophrynus sp. 'Het'
QEMGKGSFKYAWVLDKLKAERERGITIDITLWKFETQKYYITVIDAPGHRDFIKNMITGTSQADCAVLIVAAGTGEFEAGISKNGQTREHALLAYTLGVKQMIVGVNKMDTTEPPFSEARFEEIKKEVSAYIKKIGYNPATVPFVPISGWNGDNMLEPSSNMPWYKGWTIERKSGKSDGKTLLQALDAMEPPTRPVDKPLRLPLQDVYKIGGIGTVPVGRVETGVLKPGMVVTFAPVSITTEVKSVEMHHEALSEALPGDNVGFNVKNVSVKELRRGYVCGDSKDTPPKCTEEFTAQVIVLNHPGQIANGYTPVLDCHTAHIACKFREIKEKCDRRSGKKLENNPKFIKSGDAAIIDLVPSKPMCVETFTEFPPLGR

SEQ ID NO: 17196 - protein, 374 aa, Idiogaryops paludis
QEMGKGSFKYAWVLDKLKAERERGITIDITLWKFETSKYYATVIDAPGHRDFIKNMITGTSQADCAVLIVAAGTGEFEAGISKNGQTREHALLAYTLGVKQMIVGVNKMDSTEPPFSESRFEEIKKEVSAYIKKIGYNPATVPFVPISGFHGDNMIEPSSNMTWYKGWTIERKSGKVEGKTLLNALDAMEPPSRPVDKPLRLPLQDVYKIGGIGTVPVGRVETGVLKPGMVVTFAPANITTEVKSVEMHHEALTEAVPGDNVGFNVKNVSVKELRRGYVAGDSKDNPPKATEEFTAQVIVLNHPGQIANGYTPVLDCHTAHIACKFREIKEKCDRRSGKKLEDNPKFIKTGDAAIVDLVPSKPMCVESFTTFPP

SEQ ID NO: 17197 - protein, 377 aa, Neacarus texanus
QEMGKGSFKYAWVLDKLKAERERGITIDITLWKFETPKYYVTVIDAPGHRDFIKNMITGTSQADCAVLIVAAGTGEFEAGISKNGQTREHALLAYTLGVKQMIVGVNKMDTTEPPFSQARFEEIQKEVSAYIKKIGYNPATVPFVPISGWNGDNMLDASSNMPWFKGWSIERKSGKSEGKTLLQALDAMEPPTRPTDKPLRLPLQDVYKIGGIGTVPVGRVETGVLKPGMVVTFAPCNLTTEVKSVEMHHEALQEAVPGDNVGFNVKNVSVKELRRGYVCGDSKDSPPRCTEEFTAQVIVLNHPGQISNGYTPVLDCHTAHIACKFKEIKEKCDRRSGKKLEDNPKNIKSGDAAIIDLVPSKPMCVETFTDFPPLGR

SEQ ID NO: 17198 - protein, 377 aa, Phrynus marginemaculatus
  unsure (1)..(377): unsure at all Xaa locations
QEMGKGSFKYAWVLDKLKAERERGITIDITLWKFETQKYYITVIDAPGHRDFIKNMITGTSQADCAVLIVAAGTGEFEAGISKNGQTREHALLAYTLGVKQMIVGVNKMDTTEPPFSEARFEEIKKEVSAYIKKIGYNPATVPFVPISGWNGDNMLEPSSNMPWYKGWTIERKSGKSDGKTLLQALDAMEPPTRPVDKPLRLPLQDVYKIGGIGTVPVGRVETGVLKPGTVVTFAPVNITTEVKSVEMHHEALSEALPGDNVGFNVKNVSVKELRRGYVCGDSKDTPPKCTEEFTAQVIVLNHPGQIANGYTPVLDCHTAHIACKFREIKEKCDRXSGKKLENNPKFIKSGDAAIIDLXPSKPMCVETFTEFPPLGR

SEQ ID NO: 17199 - protein, 377 aa, Sejus sp. 'Sej'
QEMGKGSFKYAWVLDKLKAERERGITIDITLWKFETPKYYVTVIDAPGHRDFIKNMITGTSQADCAVLIVAAGVGEFEAGISKNGQTREHALLAYTLGVKQMIVGVNKMDTSEPPFSEKRFDEIKKEVTNYIKKIGYNPATVPFVPISGWNGDNMLEPSSNMPWYKGWSIERKGQKFEGKTLLQALDAMEPPTRPTDKPLRLPLQDVYKIGGIGTVPVGRVETGVLKPGMVVTFAPANLTTEVKSVEMHHEALPEAVPGDNVGFNVKNVSVKDLKRGFVCGDSKDNPPKATEEFTAQVIVLNHPGQISNGYSPVLDCHTAHISCRFKELKEKIDRRSGKTMEENPKSIKSGDAAIVDLVPQKPMCVETFTEFPPLGR

SEQ ID NO: 17200 - protein, 377 aa, Siro acaroides
QEMGKGSFKYAWVLDKLKAERERGITIDITLWKFETPRYYVTVIDAPGHRDFIKNMITGTSQADCAVLIVAAGTGEFEAGISKNGQTREHALLAYTLGVKQMIVGVNKMDTTEPPYSQSRFEEIQKEVSAYIKKIGYNPATVPFVPISGWNGDNMLEPSSNMPWFKGWNLERKGSKADGKTLLQALDAMEPPSRPLDKPLRLPLQDVYKIGGIGTVPVGRVETGILKPGVVVTFAPVMITTEVKSVEMHHEALVEAVPGDNVGFNVKNVSVKELRRGYVCGDSKDNPPKATEEFTAQVIVLNHPGQITNGYTPVLDCHTAHIACKFREIKEKCDRRTGKKIEDNPKAIKSGDAAIIELVPSKPMCVETFTDFPPLGR

SEQ ID NO: 17201 - protein, 377 aa, Zercon sp. 'Zer'
  unsure (1)..(377): unsure at all Xaa locations
QEMGKGSFKYAWVLDKLKAERERGITIDITLWKFETPKYYVTVIDAPGHRDFIKNMITGTSQADCAILVCPAGTGEFEAGISKNGQTREHALLAYTLGVKQMIVGVNKMDNSEPPFSEXRFEEIKKEVAAYIKKIGYNPAAVPFVPISGWAGDNMLEPSDNMPWYKGWHIERKGQKFDGKTLLQALDVMEPPTRPTDKALRLPLQDVYKIGGIGTVPVGRVETGIIKPGMVVTFAPVNLTTEVKSVEMHHESLAEAVPGDNVGFNVKNVSVKEIKRGYVAGDSKDNPPKXTEEFAAQVIVLNHPGQIQNGYXPVLDCHTAHIACXFKEIKEKIDRRSGKKLEDNPKFXKSGDAAIVDLVPXKPMCVESFXDFPPLGR

SEQ ID NO: 17202 - protein, 377 aa, parasitid 'Pas'
QEMGKGSFKYAWVLDKLKAERERGITIDITLWKFETPKYYVTVIDAPGHRDFIKNMITGTSQADCAILVCPAGTGEFEAGISKNGQTREHALLAYTLGVKQMIVGVNKMDTSEPPYSESRFEEIKKEVSSYIKKIGYNPLTVPFVPISGWAGDNMLEPSPNMTWYKGWQIERKGTKFDGKTLLQALDVMEPPTRPTDKALRLPLQDVYKIGGIGTVPVGRVETGIIKPGMVVTFAPSNLTTEVKSVEMHHEALPEAVPGDNVGFNVKNVSVKELKRGFVCGDSKDNPPKETGEFAAQVIVLNHPGQIQNGYSPVLDCHTAHIACRFKEIKEKCDRRSGKKLEDNPKFIKSGDAAIVDLVPQKPMCVESFTDFPPLGR

SEQ ID NO: 17203 - protein, 377 aa, solifugid 'Sol'
QEMGKGSFKYAWVLDKLKAERERGITIDITLWKFETPKYYVTVIDAPGHRDFIKNMITGTSQADVAVLIVAAGTGEFEAGISKNGQTREHALLAYTLGVKQMIVGVNKMDTTEPPYSQARFEEIQKEVSAYIKKIGYNPATVPFVPISGWNGDNMLEPSTNMPWFKGWTIERKSGKNEGKTLLQALDAMEPPSRPVDKSLRLPLQDVYKIGGIGTVPVGRVETGVLRPGMVVTFAPANITTEVKSVEMHHEALQEALPGDNVGFNVKNVSVKELRRGYVCGDSKDTPPKATEEFTAQVIVLNHPGQISNGYTPVLDCHTAHIACKFKEIKEKNDRRSGKKLEDNPKSIKSGDAAIIDLVPSKPMCVETFTDFPPLGR

SEQ ID NO: 17204 - protein, 376 aa, Dicranolasma scabrum
EMGKGSFKYAWVLDKLKAERERGITIDITLWKFETPKYYVTVIDAPGHRDFIKNMITGTSQADCAVLIVAAGTGEFEAGISKNGQTREHALLAYTLGVKQMIVGVNKMDTTEPPFSQGRFEEIQKEVSTYIKKIGYNPATVPFVPISGWNGDNMLEASTNMPWFKGWAIEKKGSKTDGKTLLQALDAMDPPSRPLDKPLRLPLQDVYKIGGIGTVPVGRVETGILKPGVVVTFAPVAITTEVKSVEMHHEALTEAVPGDNVGFNVKNVSVKELRRGYVCGDSKDNPPKATEEFTAQVIVLNHPGQIANGYTPVLDCHTAHIACKFREIKEKCDRRSGKKLEDNPKFLKSGDAAIIDLAPSKPMCVEVFTEFPPLGR

SEQ ID NO: 17205 - protein, 377 aa, Hesperonemastoma modestum
QEMGKGSFKYAWVLDKLKAERERGITIDITLWKFETPKYYVTVIDAPGHRDFIKNMITGTSQADCAILVVAGGTGEFEAGISKNGQTREHALLAWTLGVRQMIVGVNKMDTTEPPFAQSRFEEIQKEVSTYIKKIGYNPATVPFVPISGWNGDNMLEASANTPWFKGWTLERKTSKLEGKTLLQALDAMEPPSRPTDKPLRLPLQDVYKIGGIGTVPVGRVETGILKPGVVVTFAPVAITTEVKSVEMHHEALVEAVPGDNVGFNVKNVSVKELRRGFVCGDSKDNPPKSIEEFTAQVIVLNHPGQISNGYTPVLDCHTAHIACKFREIKEKCDRRSGKKLEDNPKFLKSGDAAIVDLAPSKPMCVEVFTEFPPLGR

SEQ ID NO: 17206 - protein, 413 aa, Aellopos tantalus
  unsure (1)..(413): unsure at all Xaa locations
HVDSGKSTTTGHLIYKCGGIDKRTIEKFEKEAQEMGKGSFKYAWVLDKLKAERERGITIDIALWKFETSKYYVTIIDAPGHRDFIKNMITGTSQADCAVLIVAAGTGEFEAGISKNGQTREHALLAFTLGVKQLIVGVNKMDSTEPPYSESRFEEIKKEVSSYIKKIGYNPAAVAFVPISGWHGDNMLEPSTKMPWFKGWLXERKEGKAEGKCLIEALDAILPPARPTDKPLRLPLQDVYKIGGIGTVPVGRVETGILKPGTIVVFAPANITTEVKSVEMHHEALQEAVPGDNVGFNVKNVSVKELRRGYVAGDSKNNPPKGAADFTAQVIVLNHPGQISNGYTPVLDCHTAHIACKFAEIKEKVDRRTGKSTEDNPKSIKSGDAAIVNLVPSKPLCVESFQEFPPLGRFAVR

SEQ ID NO: 17207 - protein, 413 aa, Ceratomia catalpae
HVDSGKSTTTGHLIYKCGGIDKRTIEKFEKEAQEMGKDSFKYAWVLDKLKAERERGITIDIALWKFETSKYYVTIIDAPGHRDFIKNMITGTSQADCAVLIVAAGTGEFEAGISKNGQTREHALLAFTLGVKQLIVGVNKMDSTEPPYSESRFEEIKKEVSSYIKKIGYNPAAVAFVPISGWHGDNMLEASTKMPWFKGWLVERKEGKAEGKCLIEALDAILPPARPTDKALRLPLQDVYKIGGIGTVPVGRVETGILKPGTIVVFAPANITTEVKSVEMHHEALQEAVPGDNVGFNVKNVSVKELRRGYVAGDSKNNPPKGAADFTAQVIVLNHPGQISNGYTPVLDCHTAHIACKFAEIKEKVDRRTGKSTEDNPKSIKSGDAAIVNLVPSKPMCVESFQEFPPLGRFAVR

SEQ ID NO: 17208 - protein, 413 aa, Ceratomia sp. 'Cundu'
HVDSGKSTTTGHLIYKCGGIDKRTIEKFEKEAQEMGKGSFKYAWVLDKLKAERERGITIDIALWKFETSKYYVTIIDAPGHRDFIKNMITGTSQADCAVLIVAAGTGEFEAGISKNGQTREHALLAFTLGVKQLIVGVNKMDSTEPPYSESRFEEIKKEVSSYIKKIGYNPAAVAFVPISGWHGDNMLEPSTKMPWFKGWLVERKEGKAEGKCLIEALDAILPPARPTDKALRLPLQDVYKIGGIGTVPVGRVETGILKPGTIVVFAPANITTEVKSVEMHHEALQEAVPGDNVGFNVKNVSVKELRRGYVAGDSKNNPPKGAADFTAQVIVLNHPGQISNGYTPVLDCHTAHIACKFAEIKEKVDRRTGKSTEDNPKSIKSGDAAIVNLVPSKPMCVESFQEFPPLGRFAVR

SEQ ID NO: 17209 - protein, 413 aa, Darapsa sp. 'Dmyr'
HVDSGKSTTTGHLIYKCGGIDKRTIEKFEKEAQEMGKGSFKYAWVLDKLKAERERGITIDIALWKFETAKYYVTIIDAPGHRDFIKNMITGTSQADCAVLIVAAGTGEFEAGISKNGQTREHALLAFTLGVKQLIVGVNKMDSTEPPYSESRFEEIKKEVSSYIKKIGYNPAAVAFVPISGWHGDNMLEPSTKMPWFKGWLVERKEGKAEGKCLIEALDAILPPARPTDKALRLPLQDVYKIGGIGTVPVGRVETGILKPGTIVVFAPANITTEVKSVEMHHEALQEAVPGDNVGFNVKNVSVKELRRGYVAGDSKNNPPKGAADFTAQVIVLNHPGQISNGYTPVLDCHTAHIACKFAEIKEKVDRRTGKSTEDNPKSIKSGDAAIVNLVPSKPLCVESFQEFPPLGRFAVR

SEQ ID NO: 17210 - protein, 413 aa, Dolba hyloeus
HVDSGKSTTTGHLIYKCGGIDKRTIEKFEKEAQEMGKGSFKYAWVLDKLKAERERGITIDIALWKFETAKYYVTIIDAPGHRDFIKNMITGTSQADCAVLIVAAGTGEFEAGISKNGQTREHALLAFTLGVKQLIVGVNKMDSTEPPYSESRFEEIKKEVSSYIKKIGYNPAAVAFVPISGWHGDNMLEPSTKMPWFKGWLVERKEGKAEGKCLIEALDAILPPARPTDKPLRLPLQDVYKIGGIGTVPVGRVETGILKPGTIVVFAPANITTEVKSVEMHHEALQEAVPGDNVGFNVKNVSVKELRRGYVAGDSKNNPPKGAADFTAQVIVLNHPGQISNGYTPVLDCHTAHIACKFAEIKEKVDRRTGKSTEDNPKSIKSGDAAIVNLVPSKPMCVESFQEFPPLGRFAVR

SEQ ID NO: 17211 - protein, 413 aa, Dryocampa rubicunda
  unsure (1)..(413): unsure at all Xaa locations
HVDSGKSTTTGHLIYKCGGIDKRTIEKFEKEAQEMGKGSFKYAWVLDKLKAERERGITIDIALWKFETSKYYVTIIDAPGHRDFIKNMITGTSQADCXVLIVAAGTGEFEAGISKNGQTREHALLAFTLGVKQLIVGVNKMDSTEPPYSESRFEEIKKEVSSYIKKIGYNPXAVAFVPISGWHGDNMLEPSTKMPWFKGWLVERKEGKAEGKCLIEALDAILPPARPTDKALRLPLQDVYKIGGIGTVPVGRVETGILKPGTVVVFAPANITTEVKSVEMHHEALQEAVPGDNVGFNVKNVSVKELRRGYVAGDSKNNPPKGAADFTAQVIVLNHPGQISNGYTPVLDCHTAHIACKFAEIKEKVDRRTGKSTEDNPKSIKSGDAAIVNLVPSKPLCVESFQEFPPLXRFAVR

SEQ ID NO: 17212 - protein, 413 aa, Eumorpha pandorus
HVDSGKSTTTGHLIYKCGGIDKRTIEKFEKEAQEMGKGSFKYAWVLDKLKAERERGITIDIALWKFETSKYYVTIIDAPGHRDFIKNMITGTSQADCAVLIVAAGTGEFEAGISKNGQTREHALLAFTLGVKQLIVGVNKMDSTEPPYSEPRFEEIKKEVSSYIKKIGYNPAAVAFVPISGWHGDNMLEPSTKMPWFKGWLVERKEGKAEGKCLIEALDAILPPARPTDKPLRLPLQDVYKIGGIGTVPVGRVETGILKPGTIVVFAPANITTEVKSVEMHHEALQEAVPGDNVGFNVKNVSVKELRRGYVAGDSKNNPPKGAADFTAQVIVLNHPGQISNGYTPVLDCHTAHIACKFAEIKEKVDRRTGKSTEDNPKSIKSGDAAIVNLVPSKPLCVESFQEFPPLGRFAVR

SEQ ID NO: 17213 - protein, 413 aa, Endromis versicolora
HVDSGKSTTTGHLIYKCGGIDKRTIEKFEKEAQEMGKGSFKYAWVLDKLKAERERGITIDIALWKFETAKYYVTIIDAPGHRDFIKNMITGTSQADCAVLIVAAGTGEFEAGISKNGQTREHALLAFTLGVKQLIVGVNKMDSTEPPYSEPRFEEIKKEVSSYIKKIGYNPAAVAFVPISGWHGDNMLEPSTKMPWFKGWQVERKEGKAEGKCLIEALDAILPPARPTDKALRLPLQDVYKIGGIGTVPVGRVETGILKPGTIVVFAPANITTEVKSVEMHHEALQEAVPGDNVGFNVKNVSVKELRRGYVAGDSKNNPPKGAADFTAQVIVLNHPGQISNGYTPVLDCHTAHIACKFAEIKEKVDRRTGKSTEDNPKSIKSGDAAIVNLVPSKPLCVESFQEFPPLGRFAVR

SEQ ID NO: 17214 - protein, 409 aa, Lemonia dumi
HVDSGKSTTTGHLIYKCGGIDKRTIEKFEKEAQEMGKGSFKYAWVLDKLKAERERGITIDIALWKFETSKYYVTIIDAPGHRDFIKNMITGTSQADCAVLIVAAGTGEFEAGISKNGQTREHALLAFTLGVKQLIVGVNKMDSTEPPYSESRFEEIKKEVSSYIKKIGYNPAAVAFVPISGWHGDNMLEPSTKMPWFKGWQVERKEGKADGKCLIEALDAILPPARPTDKALRLPLQDVYKIGGIGTVPVGRVETGILKPGTIVVFAPANITTEVKSVEMHHEALQEAVPGDNVGFNVKNVSVKELRRGYVAGDSKNNPPKGAADFTAQVIVLNHPGQISNGYTPVLDCHTAHIACKFAEIKEKVDRRTGKSTEDNPKSIKSGDAAIVNLVPSKPLCVESFQEFPPLGR

SEQ ID NO: 17215 - protein, 413 aa, Paonias excaecatus
HVDSGKSTTTGHLIYKCGGIDKRTIEKFEKEAQEMGKGSFKYAWVLDKLKAERERGITIDIALWKFETGKYYVTIIDAPGHRDFIKNMITGTSQADCAVLIVAAGTGEFEAGISKNGQTREHALLAFTLGVKQLIVGVNKMDSTEPPYSESRFEEIKKEVSSYIKKIGYNPAAVAFVPISGWHGDNMLEASTKMPWFKGWLVERKEGKAEGKCLIEALDAILPPARPTDKALRLPLQDVYKIGGIGTVPVGRVETGVLKPGTVVVFAPANITTEVKSVEMHHEALQEAVPGDNVGFNVKNVSVKELRRGYVAGDSKNNPPRGAADFTAQVIVLNHPGQISNGYTPVLDCHTAHIACKFAEIKEKVDRRTGKSTEDNPKSIKSGDAAIVNLVPSKPMCVESFQEFPPLGRFAVR

SEQ ID NO: 17216 - protein, 413 aa, Pachysphinx modesta
HVDSGKSTTTGHLIYKCGGIDKRTIEKFEKEAQEMGKGSFKYAWVLDKLKAERERGITIDIALWKFETSKYYVTIIDAPGHRDFIKNMITGTSQADCAVLIVAAGTGEFEAGISKNGQTREHALLAFTLGVKQLIVGVNKMDSTEPPYSESRFEEIKKEVSSYIKKIGYNPAAVAFVPISGWHGDNMLEVSTKMPWFKGWLVERKEGKAEGKCLIEALDAILPPARPTDKALRLPLQDVYKIGGIGTVPVGRVETGVLKPGTVVVFAPANITTEVKSVEMHHEALQEAVPGDNVGFNVKNVSVKELRRGYVAGDSKNNPPRGAADFTAQVIVLNHPGQISNGYTPVLDCHTAHIACKFAEIKEKVDRRTGKSTEDNPKSIKSGDAAIVNLVPSKPMCVESFQEFPPLGRFAVR

SEQ ID NO: 17217 - protein, 413 aa, Smerinthus cerisyi
  unsure (1)..(413): unsure at all Xaa locations
HVDSGKSTTTGHLIYKCGGIDKRTIEKFEKEAQEMGKGSFKYAWVLDKLKAERERGITIDIALWKFETGKYYVTIIDAPGHRDFIKNMITGTSQADCAVLIVAAGTGEFEAGISKNGQTREHALLAFTLGVKQLIVGVNKMDSTEPPYSESRFEEIKKEVSSYIKKIGYNPAAVAFVPISGWHGDNMLEVSTKMPWFKGWLVERKEGXAEGKCLIEALXAILPPXRPTDKALRLPLQDVYKIGGIGTVPVGRVETGVLKPGTVVVFAPANITTEVKSVEMHHEALQEAVPGDNVGFNVKNVSVKELRRGYVAGDSKNNPPRGAADFTAQVIVLNHPGQISNGYTPVLDCHTAHIACKFAEIKEKVDRRTGKSTEDNPKSIKSGDAAIVNLVPSKPMCVESFQEFPPLGRFAVR

SEQ ID NO: 17218 - protein, 413 aa, Sphinx chersis
HVDSGKSTTTGHLIYKCGGIDKRTIEKFEKEAQEMGKGSFKYAWVLDKLKAERERGITIDIALWKFETSKYYVTIIDAPGHRDFIKNMITGTSQADCAVLIVAAGTGEFEAGISKNGQTREHALLAFTLGVKQLIVGVNKMDSTEPPYSESRFEEIKKEVSSYIKKIGYNPAAVAFVPISGWHGDNMLEASTKMPWFKGWLVERKEGKAEGKCLIEALDAILPPARPTDKALRLPLQDVYKIGGIGTVPVGRVETGILKPGTIVVFAPANITTEVKSVEMHHEALQEAVPGDNVGFNVKNVSVKELRRGYVAGDSKNNPPKGAADFTAQVIVLNHPGQISNGYTPVLDCHTAHIACKFAEIKEKVDRRTGKSTEDNPKSIKSGDAAIVNLVPSKPMCVESFQEFPPLGRFAVR

SEQ ID NO: 17219 - protein, 366 aa, Arctopsyche grandis
  unsure (1)..(366): unsure at all Xaa locations
QEMGKGSFKYAWVLDKLKAERERGITIDIALWKFETTRYYVTIIDAPGHRDFIKNMITGTSQADCAVLIVAAGTGEFEAGISKNGQTREHALLAFTLGVKQLIVGVNKMDSTEPHYSESRFEEIKKEVSSYIKKIGYNPAAVAFVPISGWHGDNMLEPSAKMPWFKGWNVEXKEGKAEGKCLIEALDAIVPPSRPTDKALRLPLQDVYKIGGIGTVPVGRVETGILKPGTVVVFAPANLTTEVKSVEMHHEALQEAVPGDNVGFNVKNVSVKELRRGFVAGDTKVNPPKGAADFTAQVIVLNHPGQIANGYTPVLDCHTAHIACKFAEIQQKVDRRTGKSTEDNPKSIKSGDAAIVNLVPSKPMCV

SEQ ID NO: 17220 - protein, 383 aa, Ichthyophonus irregularis
GGIDKRTIEKFEKEAQEMGKGSFKYAWVLDKLKAERERGITIDIALWKFETAKYSVTIIDAPGHRDFIKNMITGTSQADCAVLIIAGGIGEFEAGISKDGQTREHALLAFTLGVKQLIVCVNKMDSVKYSEDRFKEIIGEVANFIKKVGYNPKAVPFVPISGWHGDNMVAPTENMPWYKGWTCERKEGNTSGFTLLEALDNIQAPKRPTDKPLRLPLQDVYKIGGIGTVPVGRVETGIIRPGMVVSFAPGSVSTEVKSVEMHHESIPEAAPGDNVGFNIKNVSVKDIRRGNVAGDSKNDPPKEAKSFLAQVIILNHPGQISNGYSPVLDCHTAHIACKFSEIMEKIDRRSGKKLEDFPKFVKSGDAAMVTMVPQKPMCVESFM

SEQ ID NO: 17221 - protein, 379 aa, Myzostoma alatum
KEAQEMGKGSFKYAWVLDKLKAERERGITIDIALWKFETVKYYVTIIDAPGHRDFIKNMITGTSQADCAVLVVAAGTGEFEAGISKDGQTREHGLLAYTLGVKQMIVAVNKMDTTEPPFSEARFNEIKKEVQGYLKKIGYNPKSVAFVPISGFHGDNMIDAETTRLPWYKGYEIERKEGNASGKTLLSALDNILPPTRPTDKPLRLPLQDVYKIGGIGTVPVGRVETGIIKPGMVVSFAPAGLSTEVKSVEMHHESLTEALPGDNVGFNVKNISVKDIKRGNVAGDSKNDPPKEAKNFTAQVIILNHPGQIRAGYAPVLDCHTAHISCKFVELKEKCDRRTGKKLEDAPQTVKSGDSAVVIMEPSKPMCVESFSTYPPL

SEQ ID NO: 17222 - protein, 371 aa, Pulvinomyzostomum pulvinar
ASFKYAWVLDKLKAERERGITIDIALWKFETTKYYVTIIDAPGHRDFIKNMITGTSQADCAVLIVAAGTGEFEAGISKEGQTREHALLAFTLGVKQMIVAINKMDSTDPPFSESRYNEITKEVGGYLKKIGYNPKTVPFIPISGFHGDNMLDVSEKMPWYKGFAIERKEGNANGKTLFEGLDSILAPKRPTDRPLRLPLQDVYKIGGIGTVPVGRVETGSIKPGMLVTFAPSGLTTEVKSVEMHHESLTEANPGDNVGFNVKNISVKEIKRGNVAGDAKNDPPKEAKQFKAQVIVLNHPGEIRAGYAPVVDCHTAHIACKFSEILEKIDRRTNKTLEENPKFVKSGDSAIVNMCPSKPMCVETFSEYSPLG

SEQ ID NO: 17223 - protein, 340 aa, Aporia crataegi
FEKEAQEMGKGSFKYAWVLDKLKAERERGITIDIALWKFETAKYYVTIIDAPGHRDFIKNMITGTSQADCAVLIVAAGTGEFEAGISKNGQTREHALLAFTLGVKQLIVGVNKMDSTEPPYSESRFEEIKKEVSSYIKKIGYNPAAVAFVPISGWHGDNMLEPSTKMPWFKGWNVERKEGKAEGKCLIEALDAILPPARPTDKPLRLPLQDVYKIGGIGTVPVGRVETGVLKPGTIVVFAPANITTEVKSVEMHHEALQEAVPGDNVGFNVKNVSVKELRRGYVAGDSKSNPPKGAADFTAQVIVLNHPGQISNGYTPVLDCHTAHIACKFAEIKEKVDR

SEQ ID NO: 17224 - protein, 340 aa, Cepora iudith
FEKEAQEMGKGSFKYAWVLDKLKAERERGITIDIALWKFETSKYYVTIIDAPGHRDFIKNMITGTSQADCAVLIVAAGTGEFEAGISKNGQTREHALLAFTLGVKQLIVGVNKMDSTEPPYSESRFEEIKKEVSSYIKKIGYNPAAVAFVPISGWHGDNMLEPSTKMPWFKGWLVERKEGKAEGKCLIEALDAILPPARPTDKPLRLPLQDVYKIGGIGTVPVGRVETGVLKPGTIVVFAPANITTEVKSVEMHHEALQEAVPGDNVGFNVKNVSVKELRRGYVAGDSKSNPPKGAADFTAQVIVLNHPGQISNGYTPVLDCHTAHIACKFAEIKEKVDR

SEQ ID NO: 17225 - protein, 340 aa, Delias belladonna
  unsure (1)..(340): unsure at all Xaa locations
FEKEAQEMGKGSFKYAWVLDKLKAERERGITIDIALWKFETGKYYVTIIDAPGHRDFIKNMITGTSQADCAVLIVAAGTGEFEAGISKNGQTREHALLAFTLGVKQLIVGVNKMDSTEPPYNESRFEEIKKEVSSYIKKIGYNPAAVAFVPISGWHGDNMLEPSTKMPWFKGWLVERKEGKAEGKCLIEALDAILPPARPTDKALRLPLQDVYKIGGIGTVPVGRVETGVLKPGTIVVFAPANITTEVKSVEMHHEALQEAVPGDNVGFNVKNVSVKELRRGYVAGDSKSNPPKGAADFTAXVIVLNHPGQISNGYTPVLDCHTAHIACKFAEIKEKVDR

SEQ ID NO: 17226 - protein, 340 aa, Delias eichhorni
FEKEAQEMGKGSFKYAWVLDKLKAERERGITIDIALWKFETGRYYVTIIDAPGHRDFIKNMITGTSQADCAVLIVAAGTGEFEAGISKNGQTREHALLAFTLGVKQLIVGVNKMDSTEPPFSEPRFEEIKKEVSSYIKKIGYNPAAVAFVPISGWHGDNMLEPSTKMPWFKGWLVERKEGKSEGKCLIEALDAILPPARPTDKALRLPLQDVYKIGGIGTVPVGRVETGVLKPGTIVVFAPANITTEVKSVEMHHEALQEAVPGDNVGFNVKNVSVKELRRGYVAGDSKSNPPKGAADFTAQVIVLNHPGQISNGYTPVLDCHTAHIACKFAEIKEKVDR

SEQ ID NO: 17227 - protein, 340 aa, Delias flavissima
FEKEAQEMGKGSFKYAWVLDKLKAERERGITIDIALWKFETGRYYVTIIDAPGHRDFIKNMITGTSQADCAVLIVAAGTGEFEAGISKNGQTREHALLAFTLGVKQLIVGVNKMDSTEPPYNESRFEEIKKEVSSYIKKIGYNPAAVAFVPISGWHGDNMLEPSTKMPWFKGWMVERKEGKAEGKCLIEALDAILPPARPTDKALRLPLQDVYKIGGIGTVPVGRVETGVLKPGTIVVFAPANITTEVKSVEMHHEALQEAVPGDNVGFNVKNVSVKELRRGYVAGDSKSNPPKGAADFTAQVIVLNHPGQISNGYTPVLDCHTAHIACKFAEIKEKVDR

SEQ ID NO: 17228 - protein, 434 aa, Blastocystis hominis
MGKEKPHINLVVIGHVVAGKSTTTGHLIYACGGIDKRTIERFEEGGQRIGKGSFKYAWVLAKMKAERERGITIDISLWKFETRKDFFTIIDAPGHRDFIKNMITGTSQADVAILVIASGAGEFEAGYSKNGQTREHALLANTLGVKQMIVCCNKMDDKSVNYSEARYKEIKNEMTSFLTKVGYAKVEERIPFIPISGFNGDNMIEHSANMPWYKGPTLLEALDNVHPPKRPVDKPLRLPLQDVYKIGGIGTVPVGRVETGVLKPGMTVTFAPVNVSTEVKSVEMHHESIPQALPGDNVGFNVNNVSVEDIHRGNVCGDAKNDPPCKTESDAQVIVMNHPSGIRPGYCPVVDCHTAHIACKFEKIMSEMDKRTGKVLRENPDIVKNGKSMMAQLVPSKPMCVETFSDYPPLGRFAVRDMRQTVAVGIIKSTVRAK

SEQ ID NO: 17229 - protein, 385 aa, Bombus consobrinus
KFEKEAQEMGKGSFKYAWVLDKLKAERERGITIDIALWKFETAKYYVTIIDAPGHRDFIKNMITGTSQADCAVLIVAAGIGEFEAGISKNGQTREHALLAFTLGVKQLIVGVNKMDMTDPPYSEARFEEIKKEVSSYIKKIGYNTASVAFVPISGWHGDNMLEPSPNTSWYKGWKVERKDGNADGKTLIEALDAILPPSRPTDKALRLPLQDVYKIGGIGTVPVGRVETGILKPGMLVTFAPAALTTEVKSVEMHHEAWTEALPGDNVGFNVKNISVKELRRGYVAGDSKNQPPRGAADFTAQVIVLNHPGQISNGYTPVLDCHTAHIACKFAEIKEKCDRRTGKTTEENPKSIKSGDAAIVMLQPTKPMCVEAFQEFPPLGRFA

SEQ ID NO: 17230 - protein, 413 aa, Lymantria dispar
HVDSGKSTTTGHLIYKCGGIDKRTIEKFEKEAQEMGKGSFKYAWVLDKLKAERERGITIDIALWKFETSKYYVTIIDAPGHRDFIKNMITGTSQADCAVLIVAAGTGEFEAGISKNGQTREHALLAFTLGVKQLIVGVNKMDSTEPPYSESRFEEIKKEVASYIKKIGYNPAAVAFVPISGWHGDNMLEPSTKMPWFKGWNVERKEGKAEGKCLIEALDAILPPARPTDKPLRLPLQDVYKIGGIGTVPVGRVETGILKPGTIVVFAPANITTEVKSVEMHHEALQEAVPGDNVGFNVKNVSVKELRRGYVAGDSKNNPPKGAADFTAQVIVLNHPGQISNGYTPVLDCHTAHIACKFAEIKEKVDRRTGKSTEENPKSIKSGDAAIVILVPSKPLCVESFQEFPPLGRFAVR

SEQ ID NO: 17231 - protein, 331 aa, Allancastria cerisyi
KSTTTGHLIYKCGGIDKRTIEKFEKEAQEMGKGSFKYAWVLDKLKAERERGITIDIALWKFETGKYYVTIIDAPGHRDFIKNMITGTSQADCAVLIVAAGTGEFEAGISKNGQTREHALLAFTLGVKQLIVGVNKMDSTEPPYSESRFEEIKKEVSSYIKKIGYNPAAVAFVPISGWHGDNMLEPSTKMPWFKGWQVERKEGKAEGKCLIEALDAILPPARPTDKALRLPLQDVYKIGGIGTVPVGRVETGVLKPGTIVVFAPANITTEVKSVEMHHEALQEAVPGDNVGFNVKNVSVKELRRGYVAGDSKNNPPKGAADFTAQVIVLNHP

SEQ ID NO: 17232 - protein, 331 aa, Baronia brevicornis
KSTTTGHLIYKCGGIDKRTIEKFEKEAQEMGKGSFKYAWVLDKLKAERERGITIDIALWKFETSKYYVTIIDAPGHRDFIKNMITGTSQADCAVLIVAAGTGEFEAGISKNGQTREHALLAFTLGVKQLIVGVNKMDSTEPPYSESRFEEIKKEVSSYIKKIGYNPAAVAFVPISGWHGDNMLEPSTKMPWFKGWQVERKEGKAEGKCLIEALDAILPPARPTDKALRLPLQDVYKIGGIGTVPVGRVETGILKPGTIVVFAPANITTEVKSVEMHHEALQEAVPGDNVGFNVKNVSVKELRRGYVAGDSKNNPPKGAADFTAQVIVLNHP

SEQ ID NO: 17233 - protein, 331 aa, Baronia brevicornis
KSTTTGHLIYKCGGIDKRTIEKFEKEAQEMGKGSFKYAWVLDKLKAERERGITIDIALWKFETSKYYVTIIDAPGHRDFIKNMITGTSQADCAVLIVAAGTGEFEAGISKNGQTREHALLAFTLGVKQLIVGVNKMDSTEPPYSESRFEEIKKEVSSYIKKIGYNPAAVAFVPISGWHGDNMLEPSTKMPWFKGWQVERKEGKAEGKCLIEALDAILPPARPTDKALRLPLQDVYKIGGIGTVPVGRVETGILKPGTIVVFAPANITTEVKSVEMHHEALQEAVPGDNVGFNVKNVSVKELRRGYVTGDSKNNPPKGAADFTAQVIVLNHP

SEQ ID NO: 17234 - protein, 331 aa, Boloria epithore
KSTTTGHLIYKCGGIDKRTIEKFEKEAQEMGKGSFKYAWVLDKLKAERERGITIDIALWKFETSKYYVTIIDAPGHRDFIKNMITGTSQADCAVLIVAAGTGEFEAGISKNGQTREHALLAFTLGVKQLIVGVNKMDSTEPPYSEPRFEEIKKEVSSYIKKIGYNPAAVAFVPISGWHGDNMLEPSTKMPWFKGWQVERKEGKADGKCLIEALDAILPPARPTDKPLRLPLQDVYKIGGIGTVPVGRVETGVLKPGTIVVFAPANITTEVKSVEMHHEALQEAVPGDNVGFNVKNVSVKELRRGYVAGDSKNNPPRGAADFTAQVIVLNHP

SEQ ID NO: 17235 - protein, 331 aa, Coenonympha tullia
KSTTTGHLIYKCGGIDKRTIEKFEKEAQEMGKGSFKYAWVLDKLKAERERGITIDIALWKFETAKYYVTIIDAPGHRDFIKNMITGTSQADCAVLIVAAGTGEFEAGISKNGQTREHALLAFTLGVKQLIVGVNKMDSTEPPYSEPRFEEIKKEVSSYIKKIGYNPAAVAFVPISGWHGDNMLEPSTKMPWFKGWQVERKEGKAEGKCLIEALDAILPPARPTDKPLRLPLQDVYKIGGIGTVPVGRVETGVLKPGTIVVFAPANITTEVKSVEMHHEALSEAVPGDNVGFNVKNVSVKELRRGYVAGDSKNNPPKGAADFTAQVIVLNHP

SEQ ID NO: 17236 - protein, 331 aa, Erynnis tristis
KSTTTGHLIYKCGGIDKRTIEKFEKEAQEMGKGSFKYAWVLDKLKAERERGITIDIALWKFETAKYYVTIIDAPGHRDFIKNMITGTSQADCAVLIVAAGTGEFEAGISKNGQTREHALLAFTLGVKQLIVGVNKMDSTEPPYSESRFEEIKKEVSSYIKKIGYNPAAVAFVPISGWHGDNMLEPSTKMPWFKGWNVERKEGKAEGKCLIEALDAILPPARPTDKPLRLPLQDVYKIGGIGTVPVGRVETGILKPGTIVVFAPANITTEVKSVEMHHEALQEAVPGDNVGFNVKNVSVKELRRGYVAGDSKNNPPKGAADFTAQVIVLNHP

SEQ ID NO: 17237 - protein, 331 aa, Euphilotes bernardino
KSTTTGHLIYKCGGIDKRTIEKFEKEAQEMGKGSFKYAWVLDKLKAERERGITIDIALWKFETAKYYVTIIDAPGHRDFIKNMITGTSQADCAVLIVAAGTGEFEAGISKNGQTREHALLAFTLGVKQLIVGVNKMDSTEPPYSESRFEEIKKEVSSYIKKIGYNPAAVAFVPISGWHGDNMLEPSTKMPWFKGWQVERKEGKAEGKCLIEALDAIFPPARPTDKALRLPLQDVYKIGGIGTVPVGRVETGVLKPGTIVVFAPASITTEVKSVEMHHEALQEAVPGDNVGFNVKNVSVKELRRGYVAGDSKNNPPKGAADFTAQVIVLNHP

SEQ ID NO: 17238 - protein, 331 aa, Graphium agamemnon
KSTTTGHLIYKCGGIDKRTIEKFEKEAQEMGKGSFKYAWVLDKLKAERERGITIDIALWKFETAKYYVTIIDAPGHRDFIKNMITGTSQADCAVLIVAAGTGEFEAGISKNGQTREHALLAFTLGVKQLIVGVNKMDSTEPPYSEPRFEEIKKEVSSYIKKIGYNPAAVAFVPISGWHGDNMLEASTKMPWFKGWQVERKEGKAEGKCLIEALDAILPPARPTDKALRLPLQDVYKIGGIGTVPVGRVETGVLKPGTIVVFAPANITTEVKSVEMHHEALQEAVPGDNVGFNVKNVSVKELRRGYVAGDSKNNPPKGASDFTAQVIVLNHP

SEQ ID NO: 17239 - protein, 331 aa, Hemileuca electra
  unsure (1)..(331): unsure at all Xaa locations
KSTTNGHLIYKCGGIDKRTIEKFEKEAHEMGKGSFKYAWVLDKLKAERERGITIDIALWKFETSKYYVTIIDAPGHRDFIKNMITGTSQADCAVLIVAAGTGEFEAGISKNGQTREHALLAFTLGVEQLIVGVNXMDSTEPPYSESRFEEIKKEVSSYIKKIGYNPAAVAFVPISGWHGDNMLEPSTKMPWFKGWAVERKEGKAEGKCLIEALDAILPPARPTDKALRLPLQDVYKIGGIGTVPVGRVETGILKPGTVVVFAPANITTEVKSVEMHHEALQEAVPGDNVGFNVKNVSVKELRRGYVAGDSKNNLPKGAADFTAQVIVLNHP

SEQ ID NO: 17240 - protein, 331 aa, Macrosoma sp. MC-2000
KFTTTGHLIYKCGGIDKRTIEKFEKEAQEMGKGSFKYAWVLDKLKAERERGITIDIALWKFETSKYYVTIIDAPGHRDFIKNMITGTSQADCAVLIVAAGTGEFEAGISKNGQTREHALLAFTLGVKQLIVGVNKMDSTEPPYSEPRFEEIKKEVSSYIKKIGYNPAAVAFVPISGWHGDNMLEPSTKMPWFKGWLVERKEGKAEGKCLIEALDAILPPARPTDKALRLPLQDVYKIGGIGTVPVGRVETGILKPGTIVVFAPANITTEVKSVEMHHEALQEAVPGDNVGFNVKNVSVKELRRGYVAGDSKNNPPKGASDFTAQVIVLNHP

SEQ ID NO: 17241 - protein, 331 aa, Parides photinus
KSTTTGHLIYKCGGIDKRTIEKFEKEAQEMGKGSFKYAWVLDKLKAERERGITIDIALWKFETAKYYVTIIDAPGHRDFIKNMITGTSQADCAVLIVAAGTGEFEAGISKNGQTREHALLAFTLGVKQLIVGVNKMDSTEPPYSEPRFEEIKKEVSSYIKKIGYNPAAVAFVPISGWHGDNMLEPSTKMPWFKGWNVERKEGKAEGKCLIEALDAILPPARPTDKALRLPLQDVYKIGGIGTVPVGRVETGVLKPGTIVVFAPANITTEVKSVEMHHEALPEAVPGDNVGFNVKNVSVKELRRGYVAGDSKNNPPKGASDFTAQVIVLNHP

SEQ ID NO: 17242 - protein, 331 aa, Parnassius phoebus
KSTTTGHLIYKCGGIDKRTIEKFEKEAQEMGKGSFKYAWVLDKLKAERERGITIDIALWKFETSKYYVTIIDAPGHRDFIKNMITGTSQADCAVLIVAAGTGEFEAGISKNGQTREHALLAFTLGVKQLIVGVNKMDSTEPPYSESRFEEIKKEVSSYIKKIGYNPAAVAFVPISGWHGDNMLEPSTKMPWFKGWQVERKEGKAEGKCLIEALDAILPPARPTDKPLRLPLQDVYKIGGIGTVPVGRVETGVLKPGTIVVFAPANITTEVKSVEMHHEALQEAVPGDNVGFNVKNVSVKELRRGYVAGDSKNNPPKGAADFTAQVIVLNHP

SEQ ID NO: 17243 - protein, 331 aa, Proserpinus clarkiae
KSTTTGHLIYKCGGIDKRTIEKFEKEAQEMGKGSFKYAWVLDKLKAERERGITIDIALWKFETSKYYVTIIDAPGHRDFIKNMITGTSQADCAVLIVAAGTGEFEAGISKNGQTREHALLAFTLGVKQLIVGVNKMDSTEPPYSESRFEEIKKEVSSYIKKIGYNPAAVAFVPISGWHGDNMLEPSTKMPWFKGWLVERKEGKAEGKCLIEALDAILPPARPTDKALRLPLQDVYKIGGIGTVPVGRVETGILKPGTIVVFAPANITTEVKSVEMHHEALQEAVPGDNVGFNVKNVSVKELRRGYVAGDSKNNPPKGAADFTAQVIVLNHP

SEQ ID NO: 17244 - protein, 413 aa, Stegopterna mutata
HVDSGKSTTTGHLIYKCGGIDKRTIEKFEKEAQEMGKGSFKYAWVLDKLKAERERGITIDIALWKFETAKYYVTIIDAPGHRDFIKNMITGTSQADCAVLIVAAGTGEFEAGISKNGQTREHALLAFTLGVKQLIVGVNKMDSTEPPFSESRFEEIKKEVSSYIKKIGYNPVCVPFVPISGWHGDNMLEVSAKMPWYKGWKVERKDGNADGKCLIESLDAILPPSRPTDKALRLPLQDVYKIGGIGTVPVGRVETGVIKPGMVVVFAPVNLTTEVKSVEMHHEALQEAGPGDNVGFNVKNVSVKELRRGYVAGDSKSNPPKGAENFTAQVIVLNHPGQISNGYTPVLDCHTAHIACKFSEIKEKVDRRTGKSTEDNPKAIKSGDAAIVILVPSKPLCVESFSEYPPLGRFAVR

SEQ ID NO: 17245 - protein, 365 aa, Syncephalastrum racemosum
GKSTTTGHLIYKCGGIDKRTIEKFEKEAAELGKGSFKYAWVLDKLKAERERGITIDIALWKFETPKYHVTVIDAPGHRDFIKNMITGTSQADCGILIIAAGTGEFEAGISKDGQTREHALLAFTLGVRQLIVAINKMDSTKYSEARYNEIVKEVSTFIKKIGFNPKSVPFVPISGWNGDNMLEESPNMPWFKGWKKETKAGEKSGKTLLEAIDNIDPPVRPSDKPLRLPLQDVYKIGGIGTVPVGRVETGVIKAGMVVTFAPANVTTEVKSVEMHHEQLVEGVPGDNVGFNVKNVSVKDIRRGNVCSDSKNDPAKESASFTAQVIVLNHPGQIGAGYAPVLDCHTAHIACKFAELLEKIDRRSGK

SEQ ID NO: 17246 - protein, 390 aa, Rhizophydium sp. JEL136
IEKFEKEAAEMGKGSFKYAWVLDKLKAERERGITIDIALWKFETPKYYVTVIDAPGHRDFIKNMITGTSQADCAILIIGGGIGEFEAGISKDGQTREHALLANTLGVKQMIIAVNKMDTNKWSEDRFNEIVKELSSFIKKVGFNPKAVPFIPISGWHGDNMLEPSANMSWFKGWTKETKGGVLTGKTLLNAIDAIDLPSRPTDKPLRLPLQDVYKIGGIGTVPVGRVETGVIKAGMVVTFAPANVTTEVKSVEMHHETLEQGIPGDNVGFNIKNVSVKDIRRGMVCSDSKNDPAKEAASFQAQIIVLNHPGQISAGYSPVLDCHTAHIACKFSELQEKLDRRTSKKTEDNPKSIKSGDSAIVKMVPTKPMCVESFTEYPPLGRFAVRDMR

SEQ ID NO: 17247 - protein, 413 aa, Artace cribraria
HVDSGKSTTTGHLIYKCGGIDKRTIEKFEKEAQEMGKGSFKYAWVLDKLKAERERGITIDIALWKFETGKYYVTIIDAPGHRDFIKNMITGTSQADCAVLIVAAGTGEFEAGISKNGQTREHALLAFTLGVKQLIVGVNKMDSTEPPYSEPRFEEIKKEVSSYIKKIGYNPAAVAFVPISGWHGDNMLEPSTKMPWFKGWNVERKEGKAEGKCLIEALDAILPPARPTDKALRLPLQDVYKIGGIGTVPVGRVETGILKPGTIVVFAPANITTEVKSVEMHHEALQEAVPGDNVGFNVKNVSVKELRRGYVAGDSKNNPPKGAADFTAQVIVLNHPGQISNGYTPVLDCHTAHIACKFAEIKEKVDRRTGKSTEDNPKSIKSGDAAIVNLVPSKPLCVESFQEFPPLGRFAVR

SEQ ID NO: 17248 - protein, 413 aa, Tolype notialis
HVDSGKSTTTGHLIYKCGGIDKRTIEKFEKEAQEMGKGSFKYAWVLDKLKAERERGITIDIALWKFETSKYYVTIIDAPGHRDFIKNMITGTSQADCAVLIVAAGTGEFEAGISKNGQTREHALLAFTLGVKQLIVGVNKMDSTEPPYSEPRFEEIKKEVSSYIKKIGYNPAAVAFVPISGWHGDNMLEPSTKMPWFKGWNVERKEGKAEGKCLIEALDAILPPARPTDKALRLPLQDVYKIGGIGTVPVGRVETGILKPGTIVVFAPANITTEVKSVEMHHEALQEAVPGDNVGFNVKNVSVKELRRGYVAGDSKNNPPKGAADFTAQVIVLNHPGQISNGYTPVLDCHTAHIACKFAEIKEKVDRRTGKSTEDNPKSIKSGDAAIVNLVPSKPLCVESFQEFPPLGRFAVR

SEQ ID NO: 17249 - protein, 413 aa, Dendrolimus pini
HVDSGKSTTTGHLIYKCGGIDKRTIEKFEKEAQEMGKGSFKYAWVLDKLKAERDQGITIDIALWKFETAKYYVTIIDAPGHRDFIKNMITGTSQADCAVLIVAAGTGEFEAGISKNGQTREHALLAFTLGVKQLIVGVNKMDSTEPPYSEPRFEEIKKEVSSYIKKIGYNPAAVAFVPISGWHGDNMLEPSTKMPWFKGWQVERKEGKAEGKCLIEALDAILPPARPTDKPLRLPLQDVYKIGGIGTVPVGRVETGILKPGTIVVFAPANITTEVKSVEMHHEALQEAVPGDNVGFNVKNVSVKELRRGYVAGDSKNNPPKGAADFTAQVIVLNHPGQISNGYTPVLDCHTAHIACKFAEIKEKVDRRTGKSTEENPKSIKSGDAAIVILVPSKPLCVESFQEFPPLGRFAVR

SEQ ID NO: 17250 - protein, 413 aa, Eutachyptera psidii
HVDSGKSTTTGHLIYKCGGIDKRTIEKFEKEAQEMGKGSFKYAWVLDKLKAERERGITIDIALWKFETAKYYVTIIDAPGHRDFIKNMITGTSQADCAVLIVAAGTGEFEAGISKNGQTREHALLAFTLGVKQLIVGVNKMDSTEPPYSEPRFEEIKKEVSSYIKKIGYNPAAVAFVPISGWHGDNMLEPSTKMPWFKGWQVDRKEGKAEGKCLIEALDAILPPARPTDKPLRLPLQDVYKIGGIGTVPVGRVETGILKPGTIVVFAPANITTEVKSVEMHHEALQEAVPGDNVGFNVKNVSVKELRRGYVAGDSKNNPPKGAADFTAQVIVLNHPGQISNGYTPVLDCHTAHIACKFAEIKEKVDRRTGKSTEENPKSIKSGDAAIVNLVPSKPLCVESFQEFPPLGRFAVR

SEQ ID NO: 17251 - protein, 377 aa, Gloveria arizonensis
QEMGKGSFKYAWVLDKLKAERERGITIDIALWKFETAKYYVTIIDAPGHRDFIKNMITGTSQADCAVLIVAAGTGEFEAGISKNGQTREHALLAFTLGVKQLIVGVNKMDSTEPPYSEPRFEEIKKEVSSYIKKIGYNPAAVAFVPISGWHGDNMLEPSTKMPWFKGWQVDRKEGKAEGKCLIEALDAILPPARPTDKALRLPLQDVYKIGGIGTVPVGRVETGILKPGTIVVFAPANITTEVKSVEMHHEALQEAVPGDNVGFNVKNVSVKELRRGYVAGDSKNNPPKGAADFTAQVIVLNHPGQISNGYTPVLDCHTAHIACKFAEIKEKVDRRTGKSTEENPKSIKSGDAAIVNLVPSKPLCVESFQEFPPLGR

SEQ ID NO: 17252 - protein, 413 aa, Gonometa rufobrunnea
HVDSGKSTTTGHLIYKCGGIDKRTIEKFEKEAQEMGKGSFKYAWVLDKLKAERERGITIDIALWKFETAKYYVTIIDAPGHRDFIKNMITGTSQADCAVLIVAAGTGEFEAGISKNGQTREHALLAFTLGVKQLIVGVNKMDSTEPPYSEPRFEEIKKEVSSYIKKIGYNPAAVAFVPISGWHGDNMLEPSTKMPWFKGWQVERKEGKAEGKCLIEALDAILPPARPTDKPLRLPLQDVYKIGGIGTVPVGRVETGILKPGTIVVFAPANITTEVKSVEMHHEALQEAVPGDNVGFNVKNVSVKELRRGYVAGDSKNNPPKGAADFTAQVIVLNHPGQISNGYTPVLDCHTAHIACKFAEIKEKVDRRTGKSTEENPKSIKSGDAAIVNLVPSKPLCVESFQEFPPLGRFAVR

SEQ ID NO: 17253 - protein, 413 aa, Macrothylacia rubi
HVDSGKSTTTGHLIYKCGGIDKRTIEKFEKEAQEMGKGSFKYAWVLDKLKAERERGITIDIALWKFETAKYYVTIIDAPGHRDFIKNMITGTSQADCAVLIVAAGTGEFEAGISKNGQTREHALLAFTLGVKQLIVGVNKMDSTEPPYSEPRFEEIKKEVSSYIKKIGYNPAAVAFVPISGWHGDNMLEPSTKMPWFKGWQVERKEGKAEGKCLIEALDAILPPARPTDKALRLPLQDVYKIGGIGTVPVGRVETGILKPGTIVVFAPANITTEVKSVEMHHEALQEAVPGDNVGFNVKNVSVKELRRGYVAGDSKNNPPKGAADFTAQVIVLNHPGQISNGYTPVLDCHTAHIACKFAEIKEKVDRRTGKSTEENPKSIKSGDAAIVNLVPSKPLCVESFQEFPPLGRFAVR

SEQ ID NO: 17254 - protein, 413 aa, Phyllodesma americana
HVDSGKSTTTGHLIYKCGGIDKRTIEKFEKEAQEMGKGSFKYAWVLDKLKAERERGITIDIALWKFETGKYYVTIIDAPGHRDFIKNMITGTSQADCAVLIVAAGTGEFEAGISKNGQTREHALLAFTLGVKQLIVGVNKMDSTEPPYSEPRFEEIKKEVSSYIKKIGYNPAAVAFVPISGWHGDNMLEPSTKMPWFKGWLVERKEGKAEGKCLIEALDAILPPARPTDKPLRLPLQDVYKIGGIGTVPVGRVETGILKPGTIVVFAPANITTEVKSVEMHHEALQEAVPGDNVGFNVKNVSVKELRRGYVAGDSKNNPPKGAADFTAQVIVLNHPGQISNGYTPVLDCHTAHIACKFAEIKEKVDRRTGKSTEENPKSIKSGDAAIVNLVPSKPLCVESFQEFPPLGRFAVR

SEQ ID NO: 17255 - protein, 413 aa, Quadrina diazoma
HVDSGKSTTTGHLIYKCGGIDKRTIEKFEKEAQEMGKGSFKYAWVLDKLKAERERGITIDIALWKFETAKYYVTIIDAPGHRDFIKNMITGTSQADCAVLIVAAGTGEFEAGISKNGQTREHALLAFTLGVKQLIVGVNKMDSTEPPYSEPRFEEIKKEVSSYIKKIGYNPAAVAFVPISGWHGDNMLEPSTKMPWFKGWQVDRKEGKAEGKCLIEALDAILPPARPTDKPLRLPLQDVYKIGGIGTVPVGRVETGILKPGTIVVFAPANITTEVKSVEMHHEALQEAVPGDNVGFNVKNVSVKELRRGYVAGDSKNNPPKGAADFTAQVIVLNHPGQISNGYTPVLDCHTAHIACKFAEIKEKVDRRTGKSTEENPKSIKSGDAAIVILVPSKPLCVESFQEFPPLGRFAVR

SEQ ID NO: 17256 - protein, 413 aa, Lasiocampa quercus
HVDSGKSTTTGHLIYKCGGIDKRTIEKFEKEAQEMGKGSFKYAWVLDKLKAERERGITIDIALWKFETGKYYVTIIDAPGHRDFIKNMITGTSQADCAVLIVAAGTGEFEAGISKNGQTREHALLAFTLGVKQLIVGVNKMDSTEPPYSEPRFEEIKKEVSSYIKKIGYNPAAVAFVPISGWHGDNMLEPSTKMPWFKGWQVERKEGKAEGKCLIEALDAILPPARPTDKPLRLPLQDVYKIGGIGTVPVGRVETGILKPGTIVVFAPANITTEVKSVEMHHEALQEAVPGDNVGFNVKNVSVKELRRGYVAGDSKNNPPKGAADFTAQVIVLNHPGQISNGYTPVLDCHTAHIACKFAEIKEKVDRRTGKSTEENPKSIKSGDAAIVILVPSKPLCVESFQEFPPLGRFAVR

SEQ ID NO: 17257 - protein, 340 aa, Prioneris autothisbe
FEKEAQEMGKGSFKYAWVLDKLKAERERGITIDIALWKFETSRYYVTIIDAPGHRDFIKNMITGTSQADCAVLIVAAGTGEFEAGISKNGQTREHALLAFTLGVKQLIVGVNKMDSTEPPYSESRFEEIKKEVSSYIKKIGYNPAAVAFVPISGWHGDNMLEPSTKMPWFKGWLVERKEGKAEGKCLIEALDAILPPARPTDKALRLPLQDVYKIGGIGTVPVGRVETGVLKPGTIVVFAPANITTEVKSVEMHHEALQEAVPGDNVGFNVKNVSVKELRRGYVAGDSKSNPPKGAADFTAQVIVLNHPGQISNGYTPVLDCHTAHIACKFAEIKEKVDR

SEQ ID NO: 17258 - protein, 340 aa, Belenois java
FEKEAQEMGKGSFKYAWVLDKLKAERERGITIDIALWKFETSKYYVTIIDAPGHRDFIKNMITGTSQADCAVLIVAAGTGEFEAGISKNGQTREHALLAFTLGVKQLIVGVNKMDSTEPPYSESRFEEIKKEVSSYIKKIGYNPAAVAFVPISGWHGDNMLEPSTKMPWFKGWLVERKEGKAEGKCLIEALDAILPPARPTDKALRLPLQDVYKIGGIGTVPVGRVETGVLKPGTIVVFAPANITTEVKSVEMHHEALQEAVPGDNVGFNVKNVSVKELRRGYVAGDSKSNPPKGAADFTAQVIVLNHPGQISNGYTPVLDCHTAHIACKFAEIKEKVDR

SEQ ID NO: 17259 - protein, 340 aa, Delias gilliardi
FEKEAQEMGKGSFKYAWVLDKLKAERERGITIDIALWKFETGRYYVTIIDAPGHRDFIKNMITGTSQADCAVLIVAAGTGEFEAGISKNGQTREHALLAFTLGVKQLIVGVNKMDSTEPPFSEPRFEEIKKEVSSYIKKIGYNPAAVAFVPISGWHGDNMLEPSTKMPWFKGWLVERKEGKSEGKCLIEALDAIMPPARPTDKALRLPLQDVYKIGGIGTVPVGRVETGVLKPGTIVVFAPANITTEVKSVEMHHEALQEAVPGDNVGFNVKNVSVKELRRGYVAGDSKSNPPKGAADFTAQVIVLNHPGQISNGYTPVLDCHTAHIACKFAEIKEKVDR

SEQ ID NO: 17260 - protein, 340 aa, Delias iltis
  unsure (1)..(340): unsure at all Xaa locations
FEKEAQEMGKGSFKYAWVLDKLKAERERGITIDIALWKFETGRYYVTIIDAPGHRDFIKNMITGTSQADCAVLIVAAGTGEFEAGISKNGQTREHALLAFTLGVKQLIVGVNKMDSTEPPYSEPRFEEIKKEVSSYIKKIGYNPAAVAFVPISGWHGDNMLEPSTKMPWFKGWYVERKEGKAEGKCLIEALDAILPPARPTDKALRLPLQDVYKIGGIGTVPVGRVETGVLKPGTIVVFAPANITTEVKSVEMHHEALQEAVPGDNVGFNVKNVSVKELRRGYVAGDSKNNPPKGAADFTAQVIVLNHPGQISXGYTPVLDCHTAHIACKFAEIKEKVDR

SEQ ID NO: 17261 - protein, 375 aa, Dieunomia nevadensis
  unsure (1)..(375): unsure at all Xaa locations
MGKGSFKYAWVLDKLKAERERGITIDIALWKFETXKYYVTIIDAPGHRDFIKNMITGTSQADCAVLIVAAGTGEFEAGISKNGQTREHALLAFTLGVKQLIVGVNKMDSTEPPYSEARFEEIKKEVSSYIKKIGYNPAAIAFVPISGWHGDNMLEVSSKMPWFKGWSVERKEGKAEGKCLIEALDAILPPTRPTDKALRLPLQDVYKIGGIGTVPVGRVETGVLKPGMVVTFAPAGLTTEVKSVEMHHEALQEAVPGDNVGFNVKNVSVKELRRGYVAGDSKNNPPKGAADFTAQVIVLNHPGQICNGYTPVLDCHTAHIACKFLQIKEKCDRRSGKTTEDNPKAIKSGDAAIVTLVPSKPMCVEAFQEFPPLGR

SEQ ID NO: 17262 - protein, 361 aa, Lasioglossum figueresi
ERERGITIDIALWKFETAKYYVTIIDAPGHRDFIKNMITGTSQADCAVLIVAAGTGEFEAGISKNGQTREHALLAFTLGVKQLIVGVNKMDSTEPPYSEARFEEIKKEVSSYIKKIGYNPAAVAFVPISGWHGDNMLEASSKMPWFKGWAVERKEGKAEGKCLIEALDAILPPSRPTDKALRLPLQDVYKIGGIGTVPVGRVETGLLKPGMVVTFAPAGLTTEVKSVEMHHEALTEAVPGDNVGFNVKNVSVKELRRGYVAGDSKNNPPKGAADFTAQVIVLNHPGQISNGYTPVLDCHTAHIACKFHKIIEKCDRRTGKTTEVDPKAIKSGDAAIVNLVPSKPMCVEAFQEFPPLGRFAV

SEQ ID NO: 17263 - protein, 361 aa, Lasioglossum mediterraneum
  unsure (1)..(361): unsure at all Xaa locations
ERERGITIDIALWKFETSKYXVTIIDAPGHRDFIKNMITGTSQADCAVLIVAAGTGEFEAGISKNGQTREHALLAFTLGVKQLIVGVNKMDSTEPPYSESRFEEIKKEVSSYIKKIGYNPAAVAFVPISGWHGDNMLEASSKMPWFKGWAVERKEGKAEGKCLIEALDAILPPSRPTDKALRLPLQDVYKIGGIGTVPVGRVETGLLKPGMVVTFAPAGLTTEVKSVEMHHEALTEAVPGDNVGFNVKNVSVKELRRGYVAGDSKNNPPKGAADFTAQVIVLNHPGQISNGYTPVLDCHTAHIACKFHKIIEKCDRRTGKTTEMEPKAIKSGDAAIVTLVPSKPMCVEAFQEFPPLGRFAV

SEQ ID NO: 17264 - protein, 359 aa, Lasioglossum megastigmus
ERERGITIDIALWKFETAKYYVTIIDAPGHRDFIKNMITGTSQADCAVLIVAAGTGEFEAGISKNGQTREHALLAFTLGVKQLIVGVNKMDSTEPPYSEPRFEEIKKEVSSYIKKIGYNPAAVAFVPISGWHGDNMLEVSSKMPWFKGWAVERKEGKAEGKCLIEALDAILPPSRPTDKALRLPLQDVYKIGGIGTVPVGRVETGLLKPGMVVTFAPAGITTEVKSVEMHHEALTEAVPGDNVGFNVKNVSVKELRRGYVAGDSKNNPPKGAADFTAQVIVLNHPGQISNGYTPVLDCHTAHIACKFHKIIEKCDRRTGKTTEMEPKAIKSGDAAIVTLVPSKPMCVEAFQEFPPLGRF

SEQ ID NO: 17265 - protein, 360 aa, Lasioglossum olgae
ERERGITIDIALWKFETSKYYVTIIDAPGHRDFIKNMITGTSQADCAVLIVAAGTGEFEAGISKNGQTREHALLAFTLGVKQLIVGVNKMDSTEPPYSEARFEEIKKEVSSYIKKIGYNPAAVAFVPISGWHGDNMLEASSKMPWFKGWAVERKEGKADGKCLIEALDAILPPSRPTDKALRLPLQDVYKIGGIGTVPVGRVETGLLKPGMVVTFAPAGITTEVKSVEMHHEALTEAVPGDNVGFNVKNVSVKELRRGYVAGDSKNNPPKGAADFTAQVIVLNHPGQISNGYTPVLDCHTAHIACKFHKIIEKCDRRTGKTTEMEPKAIKSGDAAIVTLIPSKPMCVEAFQEFPPLGRFA

SEQ ID NO: 17266 - protein, 358 aa, Lasioglossum supralucens
ERERGITIDIALWKFETSKYYVTIIDAPGHRDFIKNMITGTSQADCAVLIVAAGTGEFEAGISKNGQTREHALLAFTLGVKQLIVGVNKMDSTEPPYSEPRFEEIKKEVSSYIKKIGYNPAAVAFVPISGWHGDNMLEVSSKMPWFKGWNVERKEGKAEGKCLIEALDAILPPSRPTDKALRLPLQDVYKIGGIGTVPVGRVETGLLKPGMVVTFAPAGITTEVKSVEMHHEALLEAVPGDNVGFNVKNVSVKELRRGYVAGDSKNNPPKGAADFTAQVIVLNHPGQISNGYTPVLDCHTAHIACKFHKIIEKCDRRTGKTTEMEPKAIKSGDAAIVTLVPTKPMCVEAFQEFPPLGR

SEQ ID NO: 17267 - protein, 360 aa, Lasioglossum sp. 'Cobboboonee'
ERERGITIDIALWKFETSKYYVTIIDAPGHRDFIKNMITGTSQADCAVLIVAAGTGEFEAGISKNGQTREHALLAFTLGVKQLIVGVNKMDSTEPPYSEARFEEIKKEVSSYIKKIGYNPAAVAFVPISGWHGDNMLEASSKMPWFKGWAVERKEGKADGKCLIEALDAILPPSRPTDKALRLPLQDVYKIGGIGTVPVGRVETGLLKPGMVVTFAPAGITTEVKSVEMHHEALTEAVPGDNVGFNVKNVSVKELRRGYVAGDSKNNPPKGAADFTAQVIVLNHPGQISNGYTPVLDCHTAHIACKFHKIIEKCDRRTGKTTEMEPKAIKSGDAAIVTLVPSKPMCVEAFQEFPPLGRFA

SEQ ID NO: 17268 - protein, 363 aa, Lasioglossum albocinctum
DKLKAERERGITIDIALWKFETSKYYVTIIDAPGHRDFIKNMITGTSQADCAVLIVAAGTGEFEAGISKNGQTREHALLAFTLGVKQLIVGVNKMDSTEPPYSEARFEEIKKEVSSYIKKIGYNPAAVAFVPISGWHGDNMLEVSSKMPWFKGWAVERKEGKAEGKCLIEALDAILPPSRPTDKALRLPLQDVYKIGGIGTVPVGRVETGVLKPGMVVTFAPAGITTEVKSVEMHHEALTEAVPGDNVGFNVKNVAVKELRRGYVAGDSKNNPPKGAADFTAQVIVLNHPGQISNGYTPVLDCHTAHIACKFHKIIEKCDRRTGKTTEMEPKAIKSGDAAIVTLVPSKPMCVEAFQEFPPLGR

SEQ ID NO: 17269 - protein, 385 aa, Bombus subterraneus
KFEKEAQEMGKGSFKYAWVLDKLKAERERGITIDIALWKFETAKYYVTIIDAPGHRDFIKNMITGTSQADCAVLIVAAGIGEFEAGISKNGQTREHALLAFTLGVKQLIVGVNKMDMTDPPYSEARFEEIKKEVSSYIKKIGYNTASVAFVPISGWHGDNMLEPSPNTPWYKGWKVERKDGNADGKTLIEALDAILPPSRPTDKALRLPLQDVYKIGGIGTVPVGRVETGILKPGMLVTFAPAALTTEVKSVEMYHEALTEALPGDNVGFNVKNISVKELRRGYVAGDSKNQPPRGAADFTAQVIVLNHPGQISNGYTPVLDCHTAHIACKFAEIKEKCDRRTGKTTEENPKSIKSGDAAIVMLQPTKPMCVEAFQEFPPLGRFA

SEQ ID NO: 17270 - protein, 432 aa, uncultured crenarchaeote 74A4
MADKPHLNMIVTGHIDNGKSTTMGHFLMDLGVVDERTIAAHGAESEKTGKGDTFKYAWVMDNIKDERERGITIDLAFQKFESAKYFFTLIDAPGHRDFIKNMITGASEADAAILVLSAKEGETDTATAAGGQAREHAFLLKTLGVKQIIVAINKMDAVDYKEDAFKAAKEKGEKLVRSVGYKLEDVPVIPVSGWKGDNLVKKTENMPWYSGKTLLEAFDDFTVEEKPIGKPLRVPIQDVYTITGVGTVPVGRVDTGIMKAAHPIIVMPSGALGEIKSIETHHTQMPTAEAGHNIGFNLRGIENKDIKRGDVLGTPDAPPNVAKEFKAQIIVIHHPTAIAPGYTPVMHAHTTQVAATVTEFLQKINPATGAVEEENPKFLKVAMQQAEFCRPVRPTCIETFEAFPEMGRFALRDMGATIAAGIVKEITEEHKP

SEQ ID NO: 17271 - protein, 310 aa, Hemileuca stonei
  unsure (1)..(310): unsure at all Xaa locations
TIEKLEKEAQEMGKGSFKYAWVLDKLKAERERGITIDIALWKFETSKYYVTIIDAPGHRDFIKNMITGTSQADCAVLIVAAGTGEFEAGISKNGQTREHALLAFTLGVKQLIVGVNKMDSTEPPYSESRFEEIKKEVSSYIKKIGYNPAAVAFVPISGWHGDNMLEPSTKMPWFKGWAVERKEGKAEGKCLIEALDAILPPARPTDKALRLPLQDVYKIGGIGTVPVGRVETGILKPGTVVVFAPANITTEVKSVEMHHEALQEAVPGDNVGFNVKNVSVKELRRGYVAGDSKNNPPKGAADFTAQXIVL

SEQ ID NO: 17272 - protein, 310 aa, Hemileuca hualapai
TIEKFEKEAQEMGKGSFKYAWVLDKLKAERERGITIDIALWKFETSKYYVTIIDAPGHRDFIKNMITGTSQADCAVLIVAAGTGEFEAGISKNGQTREHALLAFTLGVKQLIVGVNKMDSTEPPYSESRFEEIKKEVSSYIKKIGYNPAAVAFVPISGWHGDNMLEPSTKMPWFKGWAVERKEGKAEGKCLIEALDAILPPARPTDKALRLPLQDVYKIGGIGTVPVGRVETGILKPGTVVVFAPANITTEVKSVEMHHEALQEAVPGDNVGFNVKNVSVKELRRGYVAGDSKNNPPRGAADFTAQVIVL

SEQ ID NO: 17273 - protein, 310 aa, Hemileuca nuttali
TIEKFEKEAQEMGKGSFKYAWVLDKLKAERERGITIDIALWKFETSKYYVTIIDAPGHRDFIKNMITGTSQADCAVLIVAAGTGEFEAGISKNGQTREHALLAFTLGVKQLIVGVNKMDSTEPPYSESRFEEIKKEVSSYIKKIGYNPAAVAFVPISGWHGDNMLEPSTKMPWFKGWAVERKEGKAEGKCLIEALDAILPPARPTDKALRLPLQDVYKIGGIGTVPVGRVETGILKPGTVVVFAPANITTEVKSVEMHHEALQEAVPGDNVGFNVKNVSVKELRRGYVAGDSKNNPPKGAADFTAQVIVL

SEQ ID NO: 17274 - protein, 310 aa, Hemileuca hera
TIEKFEKEAQEMGKGSFKYAWVLDKLKAERERGITIDIALWKFETSKYYVTIIDAPGHRDFIKNMITGTSQADCAVLIVAAGTGEFEAGISKNGQTREHALLAFTLGVKQLIVGVNKMDSTEPPYSESRFEEIKKEVSSYIKKIGYNPAAVAFVPISGWHGDNMLEPSTKMPWFKGWTVERKEGKAEGKCLIEALDAILPPARPTDKALRLPLQDVYKIGGIGTVPVGRVETGILKPGTVVVFAPANITTEVKSVEMHHEALQEAVPGDNVGFNVKNVSVKELRRGYVAGDSKNNPPKGAADFTAQVIVL

SEQ ID NO: 17275 - protein, 313 aa, Hylurdrectonus araucariae
  unsure (1)..(313): unsure at all Xaa locations
EKXAXEMGKGSFKYAWVLDKLKAERERGITIDIALWKFETSKYYVTIIDAPGHRDFIKNMITGTSQADCAVLIVAAGTGEFEAGISKNGQTREHALLAFTLGVRQLIVGVNKMDSTEPPYSESRFEEIKKEVSSYIKKIGYNPAAVAFVPISGWHGDNMLEASTKMPWFKGWAIERKEGKAEGKTLIDALDAILPPSRPTDKPLRLPLQDVYKIGGIGTVPVGRIETGILKPGMVVVFAPANITTEVKSVEMHHEALQEAVPGDNVGFNVKNVSVKELRRGYVAGDTKNNPPRAAADFLAQVIVLXXPGQISM

SEQ ID NO: 17276 - protein, 359 aa, Boreus californicus
ERERGITIDIALWKFETARYYVTIIDAPGHRDFIKNMITGTSQADCAVLIVAAGTGEFEAGISKNGQTREHALLAFTLGVKQLIVGVNKMDSTEPPYSESRFEEIKKEVSSYIKKIGYNPMTVPFVPISGWHGDNMLEPSAKMSWFKGWAVERKEGKADGKCLIEALDAIVPPSRPTDKALRLPLQDVYKIGGIGTVPVGRVETGIIKPGTVVVFAPANIVTEVKSVEMHHEALQEAVPGDNVGFNVKNVSVKELKRGYVAGDTKINPPKGAADFTAQVIVLNHPGQISNGYTPVLDCHTAHIACKFAEIKEKVDRRTGKSTEDNPKAIKSGDAAIVVLVPSKPMCVESFSEFPPLGRF

SEQ ID NO: 17277 - protein, 363 aa, Nannochorista dipteroides
ERERGITIDIALWKFETAKYYVTIIDAPGHRDFIKNMITGTSQADCAVLIVAAGTGEFEAGISKNGQTREHALLAFTLGVKQLIVGVNKMDSTEPPFSESRFEEIKKEVSSYIKKIGYNPLAVPFVPISGWHGDNMLEVSTKMPWFKGWAVERKEGKANGICLIEALDAILAPSRPTDKPLRLPLQDVYKIGGIGTVPVGRVETGVLKPGTVVVFAPANLTTEVKSVEMHHEALQEAVPGDNVGFNVKNVSVKDLRRGYVAGDSKASPPKGAADFTAQVIVLNHPGQISNGYTPVLDCHTAHIACKFSEIKEKVDRRTGKSTEDNPKAIKSGDAAIVILVPSKPMCVESFSEFPPLGRFAVRD

SEQ ID NO: 17278 - protein, 363 aa, Hylobittacus apicalis
ERERGITIDIALWKFETAKYYVTIIDAPGHRDFIKNMITGTSQADCAVLIVAAGTGEFEAGISKNGQTREHALLAFTLGVKQLIVGVNKMDSTEPPYSESRFEEIKKEVSSYIKKIGYNPAAVAFVPISGWHGDNMLEVSSKMSWFKGWAVERKEGKADGKCLIEALDAILPPARPTDKALRLPLQDVYKIGGIGTVPVGRVETGVLKPGTVVVFAPANITTEVKSVEMHHEALQEAVPGDNVGFNVKNVSVKELRRGYVAGDTKVNPPKGAADFTAQVIVLNHPGQISNGYTPVLDCHTAHIACKFAEIKEKVDRRTGKSTEDNPKAIKSGDAAIVNLVPSKPMCVESFQEFPPLGRFAVRD

SEQ ID NO: 17279 - protein, 366 aa, Anchitrichia spangleri
QEMGKGSFKYAWVLDKLKAERERGITIDIALWKFETAKYYVTIIDAPGHRDFIKNMITGTSQADCAVLIVAAGTGEFEAGISKNGQTREHALLAFTLGVKQLIVGVNKMDSTEPPYNENRFEEIKKEVSSYIKKIGYNPAAVAFVPISGWHGDNMLEPSDKMPWFKGWEVERKEGKANGKCLIEALDAILPPARPTDKPLRLPLQDVYKIGGIGTVPVGRVETGVLKPGTIVVFAPANLTTEVKSVEMHHEALQEAVPGDNVGFNVKNVSVKELRRGYVAGDSKANPPKGAADFTAQVIVLNHPGQISNGYTPVLDCHTAHIACKFAEIKEKVDRRTGKSTEAEPKAIKSGDAAIVCLVPTKPMCV

SEQ ID NO: 17280 - protein, 366 aa, Byrsopteryx gomezi
QEMGKGSFKYAWVLDKLKAERERGITIDIALWKFETAKYYVTIIDAPGHRDFIKNMITGTSQADCAVLIVAAGTGEFEAGISKNGQTREHALLAFTLGVKQLIVGVNKMDSTEPPYNENRFEEIKKEVSSYIKKIGYNPAAVAFVPISGWHGDNMLEPSDKMPWFKGWAVERKEGKADGKCLIEALDAILPPARPTDKPLRLPLQDVYKIGGIGTVPVGRVETGVLKPGTIVVFAPANLTTEVKSVEMHHEALQEAVPGDNVGFNVKNVSVKELRRGYVAGDSKANPPKGAADFTAQVIVLNHPGQISNGYTPVLDCHTAHIACKFAEIKEKVDRRTGKSTENEPKAIKSGDAAIVTLVPTKPMCV

SEQ ID NO: 17281 - protein, 366 aa, Rhyacophila fuscula
  unsure (1)..(366): unsure at all Xaa locations
QEMGKGSFKYAWVLDKLKAERERGITIDIALWKFETAKYYVTIIDAPGHRDFIKNMITGTSQADCAVLIVAAGTGEFEAGISKNGQTREHALLAFTLGVKQLIVGVNKMDSTEPPFSEARFEEIKKXVSSYIKKIGYNPATVAFVPISGWHGDNMLEPSAKMAWFKGWNVVNKDAKQEGKCLIEALDAILPPSRPTDKALRLPLQDVYKIGGIGTVPVGRVETGILKPGTIVVFAPANITTEVKSVEMHHEALQEAVPGDNVGFNVKNVSVKELRRGFVAGDTKQNPPKGAADFTAQVIVLNHPGQISNGYTPVLDCHTAHIACKFSEIKEKVDRRTGKSTEDNPKAIKSGDAAIVILVPSKPMCV

SEQ ID NO: 17282 - protein, 366 aa, Rhyacophila brunnea
QEMGKGSFKYAWVLDKLKAERERGITIDIALWKFETAKYYVTIIDAPGHRDFIKNMITGTSQADCAVLIVAAGTGEFEAGISKNGQTREHALLAFTLGVKQLIVGVNKMDSTEPPFSESRFEEIKKEVSSYIKKIGYNPATVAFVPISGWHGDNMLEPSAKMPWFKGWNVVNKEVKQEGKCLIEALDAILPPSRPTDKALRLPLQDVYKIGGIGTVPVGRVETGILKPGTIVVFAPANLTTEVKSVEMHHEALQEAVPGDNVGFNVKNVSVKELRRGFVAGDSKINPPKGAADFTAQVIVLNHPGQISNGYTPVLDCHTAHIACKFAEIKEKVDRRTGKSTEDNPKAIKSGDAAIVILVPSKPMCV

SEQ ID NO: 17283 - protein, 366 aa, Atopsyche sp. UMSP000029352-Venezuela
QEMGKGSFKYAWVLDKLKAERERGITIDIALWKFETARYYVTIIDAPGHRDFIKNMITGTSQADCAVLIVAAGTGEFEAGISKNGQTREHALLAFTLGVKQLIVGVNKMDSTEPPFSESRFEEIKKEVSSYIKKIGYNPVAVPFVPISGWHGDNMLEPSSKMPWFKGWNVERKEGKAEGKCLIEALDAILPPARPTDKALRLPLQDVYKIGGIGTVPVGRVETGILKPGTIVVFAPANITTEVKSVEMHHEALQEAVPGDNVGFNVKNVSVKELRRGFVAGDSKANPPKGAADFTAQVIVLNHPGEISNGYTPVLDCHTAHIACKFSEIKEKVDRRTGKSTEDNPKAIKSGDAAIVILTPSKPMCV

SEQ ID NO: 17284 - protein, 366 aa, Taschorema evansi
  unsure (1)..(366): unsure at all Xaa locations
QEMGXGSFKYAWVLDKLKAERERGITIDIALWKFETARYYVTIIDAPGHRDFIKNMITGTSQADCAVLIVAAGTGEFEAGISKNGQTREHALLAFTLGVKQLIVGVNKMDSTEPPFSESRFEEIKKEVSSYIKKIGYNPVAVPFVPISGWHGDNMLEPSSKMPWFKGWNVERKEGKAEGKCLIEALDAILPPARPTDKALRLPLQDVYKIGGIGTVPVGRVETGVLKPGTIVVFAPANITTEVKSVEMHHEALQEAVPGDNVGFNVKNVSVKELRRGFVAGDSKVNPPKGAADFTAQVIVLNHPGEISNGYTPVLDCHTAHIACKFSEIKEKVDRRTGKSTEDNPKAIKSGDAAIVILTPSKPMCV

SEQ ID NO: 17285 - protein, 366 aa, Oeconesus maori
  unsure (1)..(366): unsure at all Xaa locations
QEMGKGSFKYAWVLDKLKAERERGITIDIALWKFETARYYVTIIDAPGHRDFIKNMITGTSQADCAVLIVAAGTGEFEAGISKNGQTREHALLAFTLGVRQLIVGVNKMDSTEPPFSETRFEEIKKEVSSYIKKIGYNPAGVPFVPISGWXXXXXXXXSPKMPWFKGWAVERKEGKAEGKCLLEALDAILPPARPTDKALRLPLQDVYKIGGIGTVPVGRVETGVLKPGTIVVFAPANITTEVKSVEMHHEALQEALPGDNVGFNIKNVSVKELRRGYVAGDSKLNPPKGAADFTAQVIVLNHPGQISNGYTPVLDCHTAHIACKFSEIKEKVDRRTGKSTEDNPKAIKSGDAAIVILVPTKPMCV

SEQ ID NO: 17286 - protein, 365 aa, Beraea pullata
EMGKGSFKYAWVLDKLKAERERGITIDIALWKFETAKFYVTIIDAPGHRDFIKNMITGTSQADCAVLIVAAGTGEFEAGISKNGQTREHALLAFTLGVKQLVVGVNKMDSTEPPYSEPRFEEIKKEVSSYIKKIGYNPAAVAFVPISGWHGDNMLEPSSKMPWFKGWAVERKEGKAEGKCLIEALDAILPPARPTDKPLRLPLQDVYKIGGIGTVPVGRVETGILKPGTVVVFAPANITTEVKSVEMHHEALQEAVPGDNVGFNVKNVSVKELRRGFVAGDSKASPPRGAADFTAQVIVLNHPGQISNGYTPVLDCHTAHIACKFAEIKEKVDRRTGKSTEDNPKAIKSGDAAIVILVPTKPMCV

SEQ ID NO: 17287 - protein, 366 aa, Helicopsyche borealis
QEMGKGSFKYAWVLDKLKAERERGITIDIALWKFETAKYYVTIIDAPGHRDFIKNMITGTSQADCAVLIVAAGTGEFEAGISKNGQTREHALLAFTLGVKQLIVGVNKMDSTEPPYSEARFEEIKKEVASYIKKIGYNPAAVAFVPISGWHGDNMLEPSSKMPWFKGWQVERKEGKAEGKCLIESLDAILPPARPTDKPLRLPLQDVYKIGGIGTVPVGRVETGVLKPGTVVVFAPANITTEVKSVEMHHEALQEAVPGDNVGFNVKNVSVKELRRGFVAGDSKASPPRGAADFTAQVIVLNHPGQISNGYTPVLDCHTAHIACKFSEIKEKVDRRTGKSTEDNPKAIKSGDAAIVILVPTKPMCV

SEQ ID NO: 17288 - protein, 362 aa, Pycnocentrodes sp. UMSP-New Zealand
KGSFRYAWVLDKLKAERERGITIDIALWKFETAKYYVTIIDAPGHRDFIKNMITGTSQADCAVLIVAAGTGEFEAGISKNGQTREHALLAFTLGVKQLIVGVNKMDSTEPPYNEGRFEEIKKEVSSYIKKIGYNPAAVAFVPISGWHGDNMLEPSSKMPWFKGWQVERKEGKADGKCLIEALDAILPPARPTDKPLRLPLQDVYKIGGIGTVPVGRVETGVLKPGTVVVFAPANITTEVKSVEMHHEALQEAVPGDNVGFNVKNVSVKELRRGFVAGDSKASPPKGAADFTAQVIVLNHPGQISNGYTPVLDCHTAHIACKFSEIREKVDRRTGKSTEDNPKAIKSGDAAIVILVPTKPMCV

SEQ ID NO: 17289 - protein, 366 aa, Olinga feredayi
QEMGKGSFKYAWVLDKLKAERERGITIDIALWKFETAKYYVTIIDAPGHRDFIKNMITGTSQADCAVLIVAAGTGEFEAGISKNGQTREHALLAFTLGVKQLIVGVNKMDSTEPPYSESRFEEIKKEVASYIKKIGYNPAAVAFVPISGWHGDNMLEPSSKMPWFKGWMVERKEGKAEGKCLIESLDAILPPARPTDKPLRLPLQDVYKIGGIGTVPVGRVETGVLKPGTVVVFAPANITTEVKSVEMHHEALQEAVPGDNVGFNVKNVSVKELRRGFVAGDSKASPPRGAADFTAQVIVLNHPGQISNGYTPVLDCHTAHIACKFSEIKEKVDRRTGKSTEDNPKAIKSGDAAIVILVPTKPMCV

SEQ ID NO: 17290 - protein, 366 aa, Ceraclea resurgens
QEMGKGSFKYAWVLDKLKAERERGITIDIALWKFETAKYYVTIIDAPGHRDFIKNMITGTSQADCAVLIVAAGTGEFEAGISKNGQTREHALLAFTLGVKQLIVGVNKMDSTEPPYSESRFEEIKKEVSSYIKKIGYNPAAVAFVPISGWHGDNMLEPSSKMPWFKGWQVERKEGKAEGKCLIEALDAILPPSRPTDKALRLPLQDVYKIGGIGTVPVGRVETGVIKPGTVVVFAPANITTEVKSVEMHHEALQEAVPGDNVGFNVKNVSVKELRRGYVAGDTKNNPPKGAADFTAQVIVLNHPGQISNGYTPVLDCHTAHIACKFSEIKEKVDRRTGKSTEDNPKAIKSGDAAIVILVPSKPMCV

SEQ ID NO: 17291 - protein, 366 aa, Diplectrona modesta
QEMGKGSFKYAWVLDKLKAERERGITIDIALWKFETAKYYVTIIDAPGHRDFIKNMITGTSQADCAVLIVAAGTGEFEAGISKNGQTREHALLAFTLGVKQLIVGVNKMDNTEPPYSEPRFEEIKKEVSSYIKKIGYNPAAVAFVPISGWHGDNMLEPSSKMPWFKGWAVERKEGKADGKCLIEALDAILPPARPTDKALRLPLQDVYKIGGIGTVPVGRVETGVLKPGTIVVFAPANITTEVKSVEMHHEALQEAVPGDNVGFNVKNVSVKELRRGFVAGDSKANPPKGAADFTAQVIVLNHPGQIANGYTPVLDCHTAHIACKFADIQQKVDRRTGKSTEDNPKSIKSGDAAIVNLVPSKPMCV

SEQ ID NO: 17292 - protein, 366 aa, Homoplectra doringa
QEMGKGSFKYAWVLDKLKAERERGITIDIALWKFETARYYVTIIDAPGHRDFIKNMITGTSQADCAVLIVAAGTGEFEAGISKNGQTREHALLAFTLGVKQLIVGVNKMDSTEPPYSEPRFEEIKKEVSSYIKKIGYNPAAVAFVPISGWHGDNMLEPSTKMGWFKGWAVERKEGKADGKCLIEALDAIVPPSRPTDKALRLPLQDVYKIGGIGTVPVGRVETGILKPGTIVVFAPANLTTEVKSVEMHHEALQEAVPGDNVGFNVKNVSVKELRRGYVAGDTKANPPKGAADFNAQVIVLNHPGQIANGYTPVLDCHTAHIACKFAEIQQKVDRRTGKSTEDNPKSIKSGDAAIVNLVPSKPMCV

SEQ ID NO: 17293 - protein, 365 aa, Hydropsyche occidentalis
  unsure (1)..(365): unsure at all Xaa locations
XMGKGSFKYAWVLDKLKAERERGITIDIALWKFETSXYYVTIIDAPGHRDFIKNMITGTSQADCAVLIVAAGTGEFEAGISKNGQTREHALLAFTLGVKQLIVGVNKMDSTEPAYSEPRFEEIKKEVSSYIKKIGYNPAAVAFVPISGWHGDNMLEPSSKMPWFKGWNVERKEGKAEGKCLIEALDAILPPARPTDKALRLPLQDVYKIGGIGTVPVGRVETGILKPGTIVVFAPANLTTEVKSVEMHHEALSEAVPGDNVGFNVKNVSVKELRRGYVAGDTKANPPKGASDFNAQVIVLNHPGQISNGYTPVLDCHTAHIACKFAEIQQKVDRRTGKSTEDNPKSIKSGDAAIVNLVPSKPMCV

SEQ ID NO: 17294 - protein, 366 aa, Cheumatopsyche oxa
QEMGKGSFKYAWVLDKLKAERERGITIDIALWKFETAKYYVTIIDAPGHRDFIKNMITGTSQADCAVLIVAAGTGEFEAGISKNGQTREHALLAFTLGVKQLIVGVNKMDNTEPPYSEPRFEEIKKEVSSYIKKIGYNPAAVAFVPISGWHGDNMLEPSSKMPWFKGWAVDRKEGKAEGKCLIEALDAILPPARPTDKPLRLPLQDVYKIGGIGTVPVGRVETGILKPGTIVVFAPANLTTEVKSVEMHHEALPEAVPGDNVGFNVKNVSVKELRRGFVAGDSKASPPKGASDFTAQVIVLNHPGQISNGYTPVLDCHTAHIACKFAEIQQKVDRRTGKSTEDNPKSIKSGDAAIVNLVPSKPMCV

SEQ ID NO: 17295 - protein, 366 aa, Leptonema salvini
  unsure (1)..(366): unsure at all Xaa locations
QEMGKGSFKYAWVLDKLKAERERGITIDIALWKFETAKYYVTIIDAPGHRDFIKNMITGTSQADCAVLIVAAGTGEFEAGISKNGQTREHALLAFTLGVKQLIVGVNKMDSTEPPYSESRXXXXXXXXSSYIXKIGYNPAAVAFVPISGWHGDNMLEPSSKMPWFKGWNVERKEGKADGKCLIEALDAILQPARPTDKPLRLPLQDVYKIGGIGTVPVGRVETGVLKPGTIVVFAPANLTTEVKSVEMHHEALQEAVPGDNVGFNVKNVSVKELRRGYVAGDSKANPPKGASDFNAQVIVLNHPGQISNGYTPVLDCHTAHIACKFAEIQQKVDRRTGKSTEDNPKSIKSGDAAIVNLVPSKPMCV

SEQ ID NO: 17296 - protein, 366 aa, Smicridea talamanca
  unsure (1)..(366): unsure at all Xaa locations
QEMGKGSFKYAWXLDKLKAERERGITIDIALWKFETAKYYVTIIDAPGHRDFIKNMITGTSQADCAVLIVAAGTGEFEAGISKNGQTREHALLAFTLGVKQXIVGVNKMDSTEPAYSEPRFEEIKKEVSSYIKKIGYNPAAVAFVPISGWHGDNMLEPSSKMPWFKGWNVERKEGKAEGKCLIEALDAILPPARPTDKALRLPLQDVYKIGGIGTVPVGRVETGVLKPGTIVVFAPANLTTEVKSVEMHHEALQEAVPGDNVGFNVKNVSVKELRRGYVAGDSKANPPKGAADFTAQVIVLNHPGQISNGYTPVLDCHTAHIACKFAEIQQKVDRRTGKSTEDNPKSIKSGDAAIVNLVPSKPMCV

SEQ ID NO: 17297 - protein, 363 aa, Smicridea turrialbana
  unsure (1)..(363): unsure at all Xaa locations
GXXSFKYAWVLDKLKAERERGITIDIALWKFETAKFYVTIIDAPGHRDFIKNMITGTSQADCAVLIVAAGTGEFEAGISKNGQTREHALLAFTLGVKQLIVGVNKMDSTEPPYSESRFEEIKKEVSSYIKKIGYNPAAVAFVPISGWHGDNMLEPSSKMPWFKGWNVERKEGKAEGKCLIEALDAILPPARPTDKPLRLPLQDVYKIGGIGTVPVGRVETGVLKPGTIVVFAPANLTTEVKSVEMHHEALQEAVPGDNVGFNVKNVSVKELRRGYVAGDSKANPPKGAADFTAQVIVLNHPGQIANGYTPVLDCHTAHIACKFAEIQQKVDRRTGKSTEDNPKSIKSGDAAIVNLVPSKPMCV

SEQ ID NO: 17298 - protein, 366 aa, Parapsyche elsis
  unsure (1)..(366): unsure at all Xaa locations
QEMGKGSFKYAWVLDKLKAERERGITIDIALWKFETGRYYVTIIDAPGHRDFIKNMITGTSQADCAVLIVAAGTGEFEAGISKNGQTREHALLAFTLGVKQLIVGVNKMDSTEPHFSEARFXXXXXXXXSYIKKIGYNPAAVAFVPISGWHGDNMLEPSAKMPWFKGWMVERKEGKAEGKCLIEALDAILPPARPTDKALRLPLQDVYKIGGIGTVPVGRVETGILKPGTVVVFAPANLTTEVKSVEMHHEALQEAVPGDNVGFNVKNVSVKELRRGYVAGDTKINPPKGAADFNAQVIVLNHPGQIANGYTPVLDCHTAHIACKFAEILQKVDRRTGKSTEDNPKSIKSXDAAXVSLISSKPMCL

SEQ ID NO: 17299 - protein, 366 aa, Philopotamus montanus
  unsure (1)..(366): unsure at all Xaa locations
QEMGKGSFKYAWVLDKLKAERERGITIDIALWKFETARYYVTIIDAPGHRDFIKNMITGTSQADCAVLIVAAGTGEFEAGISKNGQTREHALLAFTLGVKQLIVGVNKMDSTEPAFSESRFEEIKKEVSSYIKKIGYNPSAVPFVPISGWHGDNMLEPSSKMPWFKGWNVERKEGKAEGKCLIEALDAILPPARPTDKALRLPLQDVYKIGGIGTVPVGRVETGILKPGTIVVFAPANLTTEVKSVEMHHEALQEAVPGDNVGFNVKNVSVKELRRGYVAGDSKVNPPKGXADFTAQVIVLNHPGQISNGYTPVLDCHTAHIACKFAEIQQKVDRRTGKSTEDXPKAIKSGDAAIVNLVPXKPMCV

SEQ ID NO: 17300 - protein, 366 aa, Chimarra feria
QEMGKGSFKYAWVLDKLKAERERGITIDIALWKFETAKYYVTIIDAPGHRDFIKNMITGTSQADCAVLIVAAGTGEFEAGISKNGQTREHALLAFTLGVKQLIVGVNKMDSTEPPYSEPRFEEIKKEVSSYIKKIGYNPVAVAFVPISGWHGDNMLEPSSKMPWFKGWNVERKEGKAEGKCLIEALDAILPPARPTDKPLRLPLQDVYKIGGIGTVPVGRVETGVLKPGTIVVFAPANLTTEVKSVEMHHEALQEAVPGDNVGFNVKNVSVKELRRGYVAGDSKNNPPKATSDFTAQVIVLNHPGQISNGYTPVLDCHTAHIACKFAEIQQKVDRRTGQATEELPKAIKSGDAAIVNLVPSKPLCV

SEQ ID NO: 17301 - protein, 366 aa, Tinodes waeneri
QEMGKGSFKYAWVLDKLKAERERGITIDIALWKFETAKYYVTIIDAPGHRDFIKNMITGTSQADCAVLIVAAGTGEFEAGISKNGQTREHALLAFTLGVKQLIVGVNKMDSTEPNYSEARFEEIKKEVSSYIKKIGYNPAAVAFVPISGWHGDNMLEPSEKMPWFKGWKVERKDGNADGKCLIEALDAILPPARPTDKTLRLPLQDVYKIGGIGTVPVGRVETGVLKPGTIVVFAPANITTEVKSVEMHHEALPEAVPGDNVGFNVKNVSVKELRRGYVAGDSKVNPPKGAADFTAQVIVLNHPGQISNGYTPVLDCHTAHIACKFAEIQQKVDRRTGKSTEDNPKAIKSGDAAIVNLVPSKPMCV

SEQ ID NO: 17302 - protein, 366 aa, Stenopsyche marmorata
QEMGKGSFKYAWVLDKLKAERERGITIDIALWKFETARYYVTIIDAPGHRDFIKNMITGTSQADCAVLIVAAGTGEFEAGISKNGQTREHALLAFTLGVKQLIVGVNKMDSTEPAYNEARFEEIKKEVSSYIKKIGYNPAGVPFVPISGWHGDNMLEPSSKMPWFKGWAVDRKEGKAEGKCLIEALDAILPPARPTDKALRLPLQDVYKIGGIGTVPVGRVETGILKPGTIVVFAPANLTTEVKSVEMHTEALSEAVPGDNVGFNVKNVSVKELRRGYVAGDTKVNPPKGAADFTAQVIVLNHPGQISNGYTPVLDCHTAHIACKFAEIQQKVDRRTGKSTEDNPKAIKSGDAAIVNLVPTKPMCV

SEQ ID NO: 17303 - protein, 366 aa, Polycentropus interruptus
QEMGKGSFKYAWVLDKLKAERERGITIDIALWKFETAKYYVTIIDAPGHRDFIKNMITGTSQADCAVLIVAAGTGEFEAGISKNGQTREHALLAFTLGVKQLIVGVNKMDSTEPPYSEARFEEIKKEVSSYIKKIGYNPAAVAFVPISGWHGDNMLEPSSKMPWFKGWAVDRKEGKADGKCLIEALDAILPPARPTDKALRLPLQDVYKIGGIGTVPVGRVETGVLKPGTIVVFAPANITTEVKSVEMHHEALQEAVPGDNVGFNVKNVSVKELRRGYVAGDSKNNPPKGAADFTAQVIVLNHPGQISNGYTPVLDCHTAHIACKFAEIQQKVDRRTGKSTEDNPKAIKSGDAAIVNLVPSKPMCV

SEQ ID NO: 17304 - protein, 366 aa, Cyrnus trimaculatus
  unsure (1)..(366): unsure at all Xaa locations
QEMGXGSFKYAWVLDKLKAERERGITIDIALWKFETAKYYVTIIDAPGHRDFIKNMITGTSQADCAVLIVAAGTGEFEAGISKNGQTREHALLAFTLGVKQLIVGVNKMDSTEPPYSEPRFEEIKKEVSSYIKKIGYNPAAVAFVPISGWHGDNMLEPSAKMPWFKGWAVEXKEGKADGKCLIEALDAILPPARPTDKALRLPLQDVYKIGGIGTVPVGRVETGVLKPGTIVVFAPANITTEVKSVEMHHEALQEAVPGDNVGFNVKNVSVKELRRGYVAGDSKNSPPKGAADFTAQVIVLNHPGQISNGYTPVLDCHTAHIACKFAEIQQKVDRRTGKSTEDNPKAIKSGDAAIVNLVPSKPMCV

SEQ ID NO: 17305 - protein, 366 aa, Cyrnellus fraternus
  unsure (1)..(366): unsure at all Xaa locations
QEMGKGSFKYAWVLDKLKAERERGITIDIALWKFETAKYYVTIIDAPGHRDFIKNMITGTSQADCAVLIVAAGTGEFEAGISKNGQTREHALLAFTLGVKQLIVGVNKMDSTEPPYSEPRFEEIKKEVSSYIKKIGYNPAAVAFVXISGWHGDNMLEPSSKMPWFKGWNVERKEGKVDGKCLIEALDAILPPARPTDKPLRLPLQDVYKIGGIGTVPVGRVETGVLKPGTIVVFAPANITTEVKSVEMHHEALPEAVPGDNVGFNVKNVSVKELRRGYVAGDSKNNPPKGAADFTAQVIVLNHPGQISNGYTPVLDCHTAHIACKFAEIQQKVDRRTGKSTEDNPKAIKSGDAAIVNLVPSKPMCV

SEQ ID NO: 17306 - protein, 366 aa, Phylocentropus placidus
  unsure (1)..(366): unsure at all Xaa locations
QEMGXGSFKYAWVLDKLKAERERGITIDIALWKFETAKYYVTIIDAPGHRDFIKNMITGTSQADCAVLIVAAGTGEFEAGISKNGQTREHALLAFTLGVKQLIVGVNKMDSTEPPYNEGRFEEIKKEVSSYIKKIGYNPAAVPFVPISGWHGDNMLEPSAKMPWFKGWAVDXKEGKAEGKCLIEALDAILPPARPTDKALRLPLQDVYKIGGIGTVPVGRVXTGVLKPGTIVVFAPANITTEVKSVEMHHEALSEAVPGDNVGFNVKNVSVKELRRGYVAGDSKASPPRGAADFLAQVIVLNHPGQISNGYTPVLDCHTAHIACKFAEIQQKVDRRSGKSTEDNPKAIKSGDAAIVNLVPTKPMCV

SEQ ID NO: 17307 - protein, 366 aa, Austrotinodes sp. UMSP000029359-Costa Rica
  unsure (1)..(366): unsure at all Xaa locations
QEXGKGSFKYAWVLDKLKAERERGITIDIALWKFETAKYYVTIIDAPGHRDFIKNMITGTSQADCAVLIVAAGTGEFEAGISKNGQTREHALLAFTLGVKQLIVGVNKMDSTEPPYSEARFEEIKKEVSSYIKKIGYNPAAVAFVPISGWHGDNMLEPSAKMPWFKGWAVERKEGKAEGKCLIEALDAILPPARPTDKALRLPLQDVYKIGGIGTVPVGRVETGVLKPGTIVVFAPANITTEVKSVEMHHEALPEAVPGDNVGFNVKNVSVKELRRGYVAGDSKNNPPKGAADFTAQVIVLNHPGQISNGYTPVLDCHTAHIACKFAEIQQKVDRRTGKSTEDNPKAIKTGDAAIVTLVPSKPMCV

SEQ ID NO: 17308 - protein, 366 aa, Ecnomus tenellus
QEMGKGSFKYAWVLDKLKAERERGITIDIALWKFETAKYYVTIIDAPGHRDFIKNMITGTSQADCAVLIVAAGTGEFEAGISKNGQTREHALLAFTLGVKQLIVGVNKMDSTEPPYSESRFEEIKKEVSSYIKKIGYNPAAVAFVPISGWHGDNMLEPSSKMPWFKGWKVERKEGNADGKCLIEALDAILPPARPTDKALRLPLQDVYKIGGIGTVPVGRVETGVLKPGTIVVFAPANITTEVKSVEMHHEALQEAVPGDNVGFNVKNVSVKELRRGYVAGDSKNNPPKGAADFTAQVIVLNHPGQISNGYTPVLDCHTAHIACKFAEIQQKVDRRTGKSTEDNPKAIKSGDAAIVNLVPSKPMCV

SEQ ID NO: 17309 - protein, 365 aa, Anagapetus debilis
EMGKGSFKYAWVLDKLKAERERGITIDIALWKFETAKYYVTIIDAPGHRDFIKNMITGTSQADCAVLIVAAGTGEFEAGISKNGQTREHALLAFTLGVKQLIVGVNKMDSTEPPFNEGRFEEIKKEVSSYIKKIGYNPAAVPFVPISGWHGDNMLEPSAKMNWFKGWAVERKEGKAEGKCLIEALDAIVPPSRPTDKALRLPLQDVYKIGGIGTVPVGRVETGVIKPGTIVVFAPANITTEVKSVEMHHEALQEAVPGDNVGFNVKNVSVKELRRGFVAGDSKLNPPKGAADFTAQVIVLNHPGQISNGYTPVLDCHTAHIACKFAEIKEKVDRRTGKSTEDNPKAIKSGDAAIVILVPSKPMCV

SEQ ID NO: 17310 - protein, 362 aa, Lasioglossum brevicorne
ERERGITIDIALWKFETSKYYVTIIDAPGHRDFIKNMITGTSQADCAVLIVAAGTGEFEAGISKNGQTREHALLAFTLGVKQLIVGVNKMDSTEPPYSEARFEEIKKEVSSYIKKIGYNPAAVAFVPISGWHGDNMLEASSKMPWFKGWAVERKEGKAEGKCLIEALDAILPPSRPTDKALRLPLQDVYKIGGIGTVPVGRVETGLLKPGMVVTFAPAGLTTEVKSVEMHHEALTEAVPGDNVGFNVKNVSVKELRRGYVAGDSKNNPPKGAADFTAQVIVLNHPGQISNGYTPVLDCHTAHIACKFHKIIEKCDRRTGKTTEMEPKAIKSGDAAIVTLVPSKPMCVEAFQEFPPLGRFAVR

SEQ ID NO: 17311 - protein, 362 aa, Lasioglossum inconditum
ERERGITIDIALWKFETSKYYVTIIDAPGHRDFIKNMITGTSQADCAVLIVAAGTGEFEAGISKNGQTREHALLAFTLGVKQLIVGVNKMDSTEPPYSEARFEEIKKEVSSYIKKIGYNPAAVAFVPISGWHGDNMLEASSKMPWFKGWAVERKEGKAEGKCLIEALDAILPPSRPTDKALRLPLQDVYKIGGIGTVPVGRVETGLLKPGMVVTFAPAGLTTEVKSVEMHHEALTEAVPGDNVGFNVKNVSVKELRRGYVAGDSKNNPPKGAADFTAQVIVLNHPGQISNGYTPVLDCHTAHIACKFHKIIEKCDRRTGKTTEVDPKAIKSGDAAIVTLVPSKPMCVEAFQEFPPLGRFAVR

SEQ ID NO: 17312 - protein, 362 aa, Lasioglossum interruptum
ERERGLTIDIALWKFETSKYYVTIIDAPGHRDFIKNMITGTSQADCAVLIVAAGTGEFEAGISKNGQTREHALLAFTLGVKQLIVGVNKMDSTEPPYSEARFEEIKKEVSSYIKKIGYNPAAVAFVPISGWHGDNMLEASSKMPWFKGWAVERKEGKAEGKCLIEALDAILPPSRPTDKALRLPLQDVYKIGGIGTVPVGRVETGLLKPGMVVTFAPAGLTTEVKSVEMHHEALTEAVPGDNVGFNVKNVSVKELRRGYVAGDSKNNPPKGAADFTAQVIVLNHPGQISNGYTPVLDCHTAHIACKFHKIIEKCDRRTGKTTEMEPKAIKSGDAAIVTLVPSKPMCVEAFQEFPPLGRFAVR

SEQ ID NO: 17313 - protein, 375 aa, Lipotriches australica
  unsure (1)..(375): unsure at all Xaa locations
MGKGSFKYAWVLDKLKAERERGITIDIALWKFETSKYYVTIIDAPGHRDFIKNMITGTSQADCAVLIVAAGTGEFEAGISKNGQTREHALLAFTLGVKQLIVGVNKMDSTEPPYSEARFEEIKKEVSSYIKKIGYNPAAIAFVPISGWHGDNMLEVSSKMPWFKGWAVERKEGKAEGKCLIEALDAILPPTRPTDKALRLPLQDVXKIGGIGTVPVGRVETGVLKPGMVVTFAPAGLTTEVKSVEMHHEALQEAVPGDNVGFNVKNVSVKELRRGYVAGDSKNNPPKGAADFTAQVIVLNHPGQICNGYTPVLDCHTAHIACKFLQIKEKCDRRSGKTTEENPKAIKSGDAAIVTLIPSKPMCVEAFQEFPPLGR

SEQ ID NO: 17314 - protein, 375 aa, Agapostemon leunculus
MGKGSFKYAWVLDKLKAERERGITIDIALWKFETAKYYVTIIDAPGHRDFIKNMITGTSQADCAVLIVAAGTGEFEAGISKNGQTREHALLAFTLGVKQLIVGVNKMDSTEPPYSESRFEEIKKEVSSYIKKIGYNPAAVAFVPISGWHGDNMLEISSKMPWFKGWAVERKEGKAEGKCLIEALDAILPPTRPTDKALRLPLQDVYKIGGIGTVPVGRVETGVLKPGMVVTFAPAGLTTEVKSVEMHHEALTEAVPGDNVGFNVKNLAVKELRRGFVAGDSKNNPPKGAADFTAQVIVLNHPGQISNGYTPVLDCHTAHIACKFYKIIEKCDRRTGKTTEVDPKAIKSGDAAIVTLVPSKAMCVEAFQEFPPLGR

SEQ ID NO: 17315 - protein, 375 aa, Augochlorella pomoniella
MGKGSFKYAWVLDKLKAERERGITIDIALWKFETSKYYVTIIDAPGHRDFIKNMITGTSQADCAVLIVAAGTGEFEAGISKNGQTREHALLAFTLGVKQLIVGVNKMDSTEPPYSEARFEEIKKEVSSYIKKIGYTPAAVAFVPISGWHGDNMLEVSSKMPWFKGWAVERKEGKAEGKCLIEALDAILPPTRPTDKALRLPLQDVYKIGGIGTVPVGRVETGVLKPGMVVTFAPAGLTTEVKSVEMHHEALVEAVPGDNVGFNVKNVSVKELRRGYVAGDSKNNPPKGAADFTAQVIVLNHPGQICNGYTPVLDCHTAHIACKFHKIIEKCDRRTGKTTEMEPKAIKSGDAAIVTLVPSKPMCVEAFQEFPPLGR

SEQ ID NO: 17316 - protein, 375 aa, Caenohalictus sp. BND-1
MGKGSFKYAWVLDKLKAERERGITIDIALWKFETSKYYVTIIDAPGHRDFIKNMITGTSQADCAVLIVAAGTGEFEAGISKNGQTREHALLAFTLGVKQLIVGVNKMDSTEPPYSDARFEEIKKEVSSYIKKIGYNPAAVAFVPISGWHGDNMLEVSSKMPWFKGWAVERKEGKAEGKCLIEALDAILPPSRPTDKALRLPLQDVYKIGGIGTVPVGRVETGVLKPGTVVTFAPAGLTTEVKSVEMHHEALTEAVPGDNVGFNVKNVSVKELRRGYVAGDSKNNPPKGAADFTAQVIVLNHPGQISNGYTPVLDCHTAHIACKFFKIIEKCDRRTGKTTEMVPKAIKSGDAAIVILVPTKPMCVEAFQEFPPLGR

SEQ ID NO: 17317 - protein, 375 aa, Caenohalictus sp. BND-2
MGKGSFKYAWVLDKLKAERERGITIDIALWKFETSKYYVTIIDAPGHRDFIKNMITGTSQADCAVLIVAAGTGEFEAGISKNGQTREHALLAFTLGVKQLIVGVNKMDSTEPPYSDARFEEIKKEVSSYIKKIGYNPAAVAFVPISGWHGDNMLEVSSKMPWFKGWAVERKEGKAEGKCLIEALDAILPPSRPTDKALRLPLQDVYKIGGIGTVPVGRVETGVLKPGTVVTFAPAGLTTEVKSVEMHHEALTEAVPGDNVGFNVKNVSVKELRRGYVAGDSKNNPPKGAADFTAQVIVLNHPGQIGNGYTPVLDCHTAHIACKFFKIIEKCDRRTGKTTEMVPKAIKSGDAAIVILVPTKPMCVEAFQEFPPLGR

SEQ ID NO: 17318 - protein, 375 aa, Caenohalictus sp. BND-3
MGKGSFKYAWVLDKLKAERERGITIDIALWKFETSKYYVTIIDAPGHRDFIKNMITGTSQADCAVLIVAAGTGEFEAGISKNGQTREHALLAFTLGVKQLIVGVNKMDSTEPPYSDARFEEIKKEVSSYIKKIGYNPAAVAFVPISGWHGDNMLEVSSKMPWFKGWAVERKEGKAEGKCLIEALDAILPPSRPTDKALRLPLQDVYKIGGIGTVPVGRVETGVLKPGTVVTFAPAGLTTEVKSVEMHHEALTEAVPGDNVGFNVKNVSVKELRRGYVAGDSKNNPPKGAADFTAQVIVLNHPGQISNGYTPVLDCHTAHIACKFFKIIEKCDRRTGKTTEMEPKAIKSGDAAIVTLVPTKPMCVEAFQEFPPLGR

SEQ ID NO: 17319 - protein, 375 aa, Chaetalictus sp. BND-2001
MGKGSFKYAWVLDKLKAERERGITIDIALWKFETAKYYVTIIDAPGHRDFIKNMITGTSQADCAVLIVAAGTGEFEAGISKNGQTREHALLAFTLGVKQLIVGVNKMDSTEPPYSEARFEEIKKEVSSYIKKIGYNPAAVAFVPISGWHGDNMLEVSSKMPWFKGWAVERKDGKGEGKCLIEALDAILPPSRPTDKALRLPLQDVYKIGGIGTVPVGRVETGLLKPGMVVTFAPAGLTTEVKSVEMHHEALTEAVPGDNVGFNVKNVSVKELRRGYVAGDSKNNPPRGAADFTAQVIVLNHPGQINNGYTPVLDCHTAHIACKFHKIIEKCDRRTGKTTELDPKAIKSGDAAIVTLVPSKPMCVEAFQEFPPLGR

SEQ ID NO: 17320 - protein, 375 aa, Conanthalictus wilmattae
MGKGSFKYAWVLDKLKAERERGITIDIALWKFETSRYYVTIIDAPGHRDFIKNMITGTSQADCAVLIVAAGTGEFEAGISKNGQTREHALLAFTLGVKQLIVGVNKMDSTEPPYSESRFEEIKKEVSSYIKKIGYNPAAVAFVPISGWHGDNMLEASSKMPWFKGWAVERKEGKAEGKCLIEALDAILPPTRPTDKALRLPLQDVYKIGGIGTVPVGRVETGLLKPGMVVTFAPAGLTTEVKSVEMHHEALQEAVPGDNVGFNVKNVSVKELRRGYVAGDSKNNPPKGAADFTAQVIVLNHPGQISNGYTPVLDCHTAHIACKFLLIKEKCDRRTGKTTEENPKAIKSGDAAIVTLVPSKPMCVEAFQEFPPLGR

SEQ ID NO: 17321 - protein, 375 aa, Dieunomia triangulifera
MGKGSFKYAWVLDKLKAERERGITIDIALWKFETSKYYVTIIDAPGHRDFIKNMITGTSQADCAVLIVAAGTGEFEAGISKNGQTREHALLAFTLGVKQLIVGVNKMDSTEPPYSEARFEEIKKEVSSYIKKIGYNPAAIAFVPISGWHGDNMLEVSSKMPWFKGWSVERKEGKAEGKCLIEALDAILPPTRPTDKALRLPLQDVYKIGGIGTVPVGRVETGVLKPGMVVTFAPAGLTTEVKSVEMHHEALQEAVPGDNVGFNVKNVSVKELRRGYVAGDSKNNPPKGAADFTAQVIVLNHPGQICNGYTPVLDCHTAHIACKFLQIKEKCDRRSGKTTEDNPKAIKSGDAAIVTLVPSKPMCVEAFQEFPPLGR

SEQ ID NO: 17322 - protein, 375 aa, Dinagapostemon sp. BND-1
MGKGSFKYAWVLDKLKAERERGITIDIALWKFETSKYYVTIIDAPGHRDFIKNMITGTSQADCAVLIVAAGTGEFEAGISKNGQTREHALLAFTLGVKQLIVGVNKMDSTEPPYSEARFEEIKKEVSSYIKKIGYNPAAVAFVPISGWHGDNMLEISSKMPWFKGWAVERKEGKAEGKCLIEALDAILPPTRPTDKALRLPLQDVYKIGGIGTVPVGRVETGVLKPGMLVTFAPAGLTTEVKSVEMHHEALTEAVPGDNVGFNVKNVAVKELRRGYVAGDSKNNPPKGAADFTAQVIVLNHPGQISNGYTPVLDCHTAHIACKFYKIIEKCDRRTGKTTEVDPKAIKSGDAAIVTLVPSKAMCVEAFQEFPPLGR

SEQ ID NO: 17323 - protein, 375 aa, Dufourea malacothricis
MGKGSFKYAWVLDKLKAERERGITIDIALWKFETSKYYVTIIDAPGHRDFIKNMITGTSQADCAVLIVAAGTGEFEAGISKNGQTREHALLAFTLGVKQLIVGVNKMDSTEPPYSEARFEEIKKEVSSYIKKIGYNPAAVAFVPISGWHGDNMLESSSKMPWFKGWAVERKEGKAEGKCLIEALDAILPPSRPTDKALRLPLQDVYKIGGIGTVPVGRVETGLLKPGMVVTFAPAGLTTEVKSVEMHHEALQEAVPGDNVGFNVKNVSVKELRRGYVAGDSKNNPPKGAADFTAQVIVLNHPGQISNGYTPVLDCHTAHIACKFLQIKEKCDRRTGKTTEENPKAIKSGDAAIVTLVPSKPVCVEAFQEFPPLGR

SEQ ID NO: 17324 - protein, 375 aa, Dufourea mulleri
MGKGSFKYAWVLDKLKAERERGITIDIALWKFETSKYYVTIIDAPGHRDFIKNMITGTSQADCAVLIVAAGTGEFEAGISKNGQTREHALLAFTLGVKQLIVGVNKMDSTEPPYSEARFEEIKKEVSSYIKKIGYNPAAVAFVPISGWHGDNMLESSSKMPWFKGWAVERKEGKAEGKCLIEALDAILPPSRPTDKALRLPLQDVYKIGGIGTVPVGRVETGLLKPGMVVTFAPAGLTTEVKSVEMHHEALQEAVPGDNVGFNVKNVSVKELRRGYVAGDSKNNPPKGAADFTAQVIVLNHPGQISNGYTPVLDCHTAHIACKFLQIKEKCDRRTGKTTEENPKAIKSGDAAIVTLVPSKPMCVEAFQEFPPLGR

SEQ ID NO: 17325 - protein, 375 aa, Dufourea novaeangliae
MGKGSFKYAWVLDKLKAERERGITIDIALWKFETSRYYVTIIDAPGHRDFIKNMITGTSQADCAVLIVAAGTGEFEAGISKNGQTREHALLAFTLGVKQLIVGVNKMDSTEPPYSEARFEEIKKEVSSYIKKIGYNPAAVAFVPISGWHGDNMLESSSKMPWFKGWAVERKEGKGEGKCLIEALDAILPPSRPTDKALRLPLQDVYKIGGIGTVPVGRVETGLLKPGMVVTFAPAGLTTEVKSVEMHHEALQEAVPGDNVGFNVKNVSVKELRRGYVAGDSKNNPPKGAADFTAQVIVLNHPGQISNGYTPVLDCHTAHIACKFLQIKEKCDRRTGKTTEENPKAIKSGDAAIVTLVPSKPMCVEAFQEFPPLGR

SEQ ID NO: 17326 - protein, 375 aa, Goeletapis peruensis
MGKGSFKYAWVLDKLKAERERGITIDIALWKFETSKYYVTIIDAPGHRDFIKNMITGTSQADCAVLIVAAGTGEFEAGISKNGQTREHALLAFTLGVKQLIVGVNKMDSTEPPYSEARFEEIKKEVSSYIKKIGYNPAAVAFVPISGWHGDNMLEVSSKMPWFKGWAVERKEGKAEGKCLIDALDAILPPARPTDKALRLPLQDVYKIGGIGTVPVGRVETGVLKPGMVVTFAPAGLTTEVKSVEMHHEALQEAVPGDNVGFNVKNVSVKELRRGYVAGDSKNNPPKGAADFTAQVIVLNHPGQISNGYTPVLDCHTAHIACKFHVIKEKCDRRTGKTTEENPKAIKSGDAAIVTLVPSKPMCVEAFQEFPPLGR

SEQ ID NO: 17327 - protein, 375 aa, Habralictus sp. BND-2001
MGKGSFKYAWVLDKLKAERERGITIDIALWKFETSKYYVTIIDAPGHRDFIKNMITGTSQADCAVLIVAAGTGEFEAGISKNGQTREHALLAFTLGVKQLIVGVNKMDSTEPPYSEARFEEIKKEVSSYIKKIGYNPAAVAFVPISGWHGDNMLEISSKMPWFKGWAVERKEGKAEGKCLIEALDAILPPSRPTDKALRLPLQDVYKIGGIGTVPVGRVETGVLKPGTVVTFAPAGLTTEVKSVEMHHEALTEAVPGDNVGFNVKDVAVKELRRGYVAGDSKNNPPKGAADFTAQVIVLNHPGQISNGYTPVLDCHTAHIACKFFKIIEKCDRRTGKTTEMEPKAIKSGDAAIVTLVPTKPMCVEAFQEFPPLGR

SEQ ID NO: 17328 - protein, 375 aa, Lasioglossum athabascense
MGKGSFKYAWVLDKLKAERERGITIDIALWKFETSKYYVTIIDAPGHRDFIKNMITGTSQADCAVLIVAAGTGEFEAGISKNGQTREHALLAFTLGVKQLIVGVNKMDSTEPPYSEARFEEIKKEVSSYIKKIGYNPAAVAFVPISGWHGDNMLEASSKMPWFKGWAVERKEGKAEGKCLIEALDAILPPSRPTDKALRLPLQDVYKIGGIGTVPVGRVETGLLKPGMVVTFAPAGITTEVKSVEMHHEALTEAVPGDNVGFNVKNVSVKELRRGYVAGDSKNNPPKSAADFTAQVIVLNHPGQISNGYTPVLDCHTAHIACKFHKIIEKCDRRTGKTTEMDPKAIKSGDAAIVTLVPSKPMCVEAFQEFPPLGR

SEQ ID NO: 17329 - protein, 375 aa, Lasioglossum lithuscum
MGKGSFKYAWVLDKLKAERERGITIDIALWKFETAKYYVTIIDAPGHRDFIKNMITGTSQADCAVLIVAAGTGEFEAGISKNGQTREHALLAFTLGVKQLIVGVNKMDSTEPPYSEARFEEIKKEVSSYIKKIGYNPAAVAFVPISGWHGDNMLEVSSKMPWFKGWAVERKEGKAEGKCLIEALDAILPPSRPTDKALRLPLQDVYKIGGIGTVPVGRVETGLLKPGMVVTFAPAGITTEVKSVEMHHEALTEAVPGDNVGFNVKNVSVKELRRGYVAGDSKNNPPKGAADFTAQVIVLNHPGQISNGYTPVLDCHTAHIACKFHKIIEKCDRRTGKTTEMEPKAIKSGDAAIVTLVPSKPMCVEAFQEFPPLGR

SEQ ID NO: 17330 - protein, 375 aa, Lasioglossum punctatum
MGKGSFKYAWVLDKLKAERERGITIDIALWKFETAKYYVTIIDAPGHRDFIKNMITGTSQADCAVLIVAAGTGEFEAGISKNGQTREHALLAFTLGVKQLIVGVNKMDSTEPPYSESRFEEIKKEVSSYIKKIGYNPAAVAFVPISGWHGDNMLEVSSKMPWFKGWAVERKEGKAEGKCLIEALDAILPPSRPTDKALRLPLQDVYKIGGIGTVPVGRVETGLLKPGMVVTFAPAGITTEVKSVEMHHEALTEAVPGDNVGFNVKNVSVKELRRGYVAGDSKNNPPKGAADFTAQVIVLNHPGQISNGYTPVLDCHTAHIACKFHKIIEKCDRRTGKTTEMEPKAIKSGDAAIVTLVPSKPMCVEAFQEFPPLGR

SEQ ID NO: 17331 - protein, 360 aa, Lasioglossum punctatum
ERERGITIDIALWKFETAKYYVTIIDAPGHRDFIKNMITGTSQADCAVLIVAAGTGEFEAGISKNGQTREHALLAFTLGVKQLIVGVNKMDSTEPPYSESRFEEIKKEVSSYIKKIGYNPAAVAFVPISGWHGDNMLEVSSKMPWFKGWAVERKEGKAEGKCLIEALDAILPPSRPTDKALRLPLQDVYKIGGIGTVPVGRVETGLLKPGMVVTFAPAGITTEVKSVEMHHEALTEAVPGDNVGFNVKNVSVKELRRGYVAGDSKNNPPKGAADFTAQVIVLNHPGQISNGYTPVLDCHTAHIACKFHKIIEKCDRRTGKTTEMEPKAIKSGDAAIVTLVPSKPMCVEAFQEFPPLGRFA

SEQ ID NO: 17332 - protein, 375 aa, Lasioglossum scitulum
MGKGSFKYAWVLDKLKAERERGITIDIALWKFETSKYYVTIIDAPGHRDFIKNMITGTSQADCAVLIVAAGTGEFEAGISKNGQTREHALLAFTLGVKQLIVGVNKMDSTEPPYSEARFEEIKKEVSSYIKKIGYNPAAVAFVPISGWHGDNMLEVSSKMPWFKGWAVERKEGKAEGKCLIEALDAILPPSRPTDKALRLPLQDVYKIGGIGTVPVGRVETGVLKPGMVVTFAPAGITTEVKSVEMHHEALTEAVPGDNVGFNVKNVAVKELRRGYVAGDSKNNPPKGAADFTAQVIVLNHPGQISNGYTPVLDCHTAHIACKFHKIIEKCDRRTGKTTEMEPKAIKSGDAAIVTLVPSKPMCVEAFQEFPPLGR

SEQ ID NO: 17333 - protein, 375 aa, Leioproctus sp. BND-2001
MGKGSFKYAWVLDKLKAERERGITIDIALWKFETSKYYVTIIDAPGHRDFIKNMITGTSQADCAVLIVAAGTGEFEAGISKNGQTREHALLAFTLGVKQLIVGVNKMDSTEPPYSESRFEEIKKEVSSYIKKIGYNPAAVAFVPISGWHGDNMLEVSSKMPWFKGWNVERKEGKAEGKCLIEALDAILPPTRPTDKALRLPLQDVYKIGGIGTVPVGRVETGLLKPGMIVTFAPTALTTEVKSVEMHHEALQEAVPGDNVGFNVKNVSVKDLRRGYVAGDSKNNPPKGAADFTAQVIVLNHPGQISNGYTPVLDCHTAHIACKFAEIKEKCDRRTGKTTEENPKAIKSGDAAIVVLVPSKPMCVEAFQEFPPLGR

SEQ ID NO: 17334 - protein, 375 aa, Lomatalictus sp. BND-2001
MGKGSFKYAWVLDKLKAERERGITIDIALWKFETAKYYVTIIDAPGHRDFIKNMITGTSQADCAVLIVAAGTGEFEAGISKNGQTREHALLAFTLGVKQLIVGVNKMDSTEPPYSEARFEEIKKEVSSYIKKIGYNPAAVAFVPISGWHGDNMLEVSSKMPWFKGWAVERKEGKAEGKCLIEALDAILPPSRPTDKALRLPLQDVYKIGGIGTVPVGRVETGLLKPGMVVTFAPAGLTTEVKSVEMHHEALTEAVPGDNVGFNVKNVSVKELRRGYVAGDSKNNPPKGAADFTAQVIVLNHPGQISNGYTPVLDCHTAHIACKFHKIIEKCDRRTGKTTEVDPKAIKSGDAAIVMLVPSKPMCVEAFQEFPPLGR

SEQ ID NO: 17335 - protein, 375 aa, Nomia tetrazonata
MGKGSFKYAWVLDKLKAERERGITIDIALWKFETSKYYVTIIDAPGHRDFIKNMITGTSQADCAVLIVAAGTGEFEAGISRNGQTREHALLAFTLGVKQLIVGVNKMDSTEPPYSEARFEEIKKEVSSYIKKIGYNPAAIAFVPISGWHGDNMLEVSSKMPWFKGWAVERKEGKAEGKCLIEALDAILPPTRPTDKALRLPLQDVYKIGGIGTVPVGRVETGVLKPGMVVTFAPAGLTTEVKSVEMHHEALQEAVPGDNVGFNVKNVSVKELRRGYVAGDSKNNPPKGAADFTAQVIVLNHPGQICNGYTPVLDCHTAHIACKFLQIKEKCDRRSGKTTEENPKAIKSGDAAIVTLVPSKPMCVEAFQEFPPLGR

SEQ ID NO: 17336 - protein, 375 aa, Nomioides facilis
MGKGSFKYAWVLDKLKAERERGITIDIAMWKFETSKYYVTIIDAPGHRDFIKNMITGTSQADCAVLIVAAGTGEFEAGISKNGQTREHALLAFTLGVKQLIVGVNKMDSTEPPYSETRFEEIKKEVSSYIKKIGYNPAAIAFVPISGWHGDNMLEVSAKMPWFKGWSVERKEGKAEGKCLIEALDAILPPTRPTDKALRLPLQDVYKIGGIGTVPVGRVETGVLKPGMVVTFAPVGLTTEVKSVEMHHEALQEAVPGDNVGFNVKNVSVKELRRGYVAGDSKNNPPKGAADFTAQVIVLNHPGQISNGYTPVLDCHTAHIACKFQQIKEKCDRRSGKTTETDPKSIKSGDAAIVTLVPSKPMCVEAFQEFPPLGR

SEQ ID NO: 17337 - protein, 375 aa, Pachyhalictus sp. BND-2001
MGKGSFKYAWVLDKLKAERERGITIDIALWKFETAKYYVTIIDAPGHRDFIKNMITGTSQADCAVLIVAAGTGEFEAGISKNGQTREHALLAFTLGVKQLIVGVNKMDSTEPPYSEARFEEIKKEVSSYIKKIGYNPAAVAFVPISGWHGDDMLEVSSKMPWFKGWAVERKEGKAEGKCLIEALDAILPPSRPTDKALRLPLQDVYKIGGIGTVPVGRVETGLLKPGMLVTFAPAGLTTEVKSVEMHHEALTEAVPGDNVGFYVKNVSVKELRRGYVAGDSKNNPPKGAADFTAQVIVLNHPGQISNGYTPVLDCHTAHIACKFHKIIEKCDRRTGKTTEMDPKAIKSGDAAIVTLVPSKPMCVEAFQEFPPLGR

SEQ ID NO: 17338 - protein, 375 aa, Penapis penai
MGKGSFKYAWVLDKLKAERERGITIDIALWKFETSKYYVTIIDAPGHRDFIKNMITGTSQADCAVLIVAAGTGEFEAGISKNGQTREHALLAFTLGVKQLIVGVNKMDSTEPPYSESRFEEIKKEVSSYIKKIGYNPAAVAFVPISGWHGDNMLEVSSKMPWFKGWAVERKEGKAEGKCLIDALDAILPPTRPTDKALRLPLQDVYKIGGIGTVPVGRVETGVLKPGMVVTFAPAGLTTEVKSVEMHHEALQEAVPGDNVGFNVKNVSVKELRRGYVAGDSKNNPPKGAADFTAQVIVLNHPGQITNGYTPVLDCHTAHIACKFQLIKEKCDRRTGKTTEENPKTIKSGDAAIVTLVPSKPMCVEAFQEFPPLGR

SEQ ID NO: 17339 - protein, 375 aa, Protodufourea parca
MGKGSFKYAWVLDKLKAERERGITIDIALWKFETSKYYVTIIDAPGHRDFIKNMITGTSQADCAVLIVAAGTGEFEAGISKNGQTREHALLAFTLGVKQLIVGVNKMDSTEPPYSEARFEEIKKEVSSYIKKIGYNPAAVAFVPISGWHGDNMLEVSSKMPWFKGWNVERKEGKAEGKCLIEALDAILPPSRPTDKALRLPLQDVYKIGGIGTVPVGRVETGLLKPGMVVTFAPAGLTTEVKSVEMHHEALQEAVPGDNVGFNVKNVSVKELRRGYVAGDSKNNPPRGAADFTAQVIVLNHPGQISNGYTPVLDCHTAHIACKFLQIKEKCDRRTGKTTEENPKAIKSGDAAIVTLVPSKPMCVEAFQEFPPLGR

SEQ ID NO: 17340 - protein, 375 aa, Pseudagapostemon pissisi
MGKGSFKYAWVLDKLKAERERGITIDIALWKFETAKYYVTIIDAPGHRDFIKNMITGTSQADCAVLIVAAGTGEFEAGISKNGQTREHALLAFTLGVKQLIVGVNKMDSTEPPYSEARFEEIKKEVSSYIKKIGYNPAAVAFVPISGWHGDNMLEISAKMPWFKGWAVERKEGKAEGKCLIEALDAILPPTRPTDKALRLPLQDVYKIGGIGTVPVGRVETGVLKPGMVVTFAPAGLTTEVKSVEMHHEALTEAVPGDNVGFNVKNVSVKELRRGYVAGDSKNNPPKGAADFTAQVIVLNHPGQISNGYTPVLDCHTAHIACKFYKIIEKCDRRTGKTTEMEPKAIKSGDAAIVTLVPTKPMCVEAFQEFPPLGR

SEQ ID NO: 17341 - protein, 375 aa, Pseudapis unidentata
MGKGSFKYAWVLDKLKAERERGITIDIALWKFETSKYYVTIIDAPGHRDFIKNMITGTSQADCAVLIVAAGTGEFEAGISKNGQTREHALLAFTLGVKQLIVGVNKMDSTEPPYSEARFEEIKKEVSSYIKKIGYNPAAIAFVPISGWHGDNMLEVSSKMPWFKGWAVERKEGKAEGKCLIEALDAILPPTRPTDKALRLPLQDVYKIGGIGTVPVGRVETGVLKPGMVVTFAPAGLTTEVKSVEMHHEALQEAVPGDNVGFNVKNVSVKELRRGYVAGDSKNNPPKGAADFTAQVIVLNHPGQICNGYTPVLDCHTAHIACKFLQIKEKCDRRSGKTTEENPKAIKSGDAAIVTLVPSKPMCVEAFQEFPPLGR

SEQ ID NO: 17342 - protein, 375 aa, Rhinetula denticrus
MGKGSFKYAWVLDKLKAERERGITIDIALWKFETSKYYVTIIDAPGHRDFIKNMITGTSQADCAVLIVAAGTGEFEAGISKNGQTREHALLAFTLGVKQLIVGVNKMDSTEPPYSEARFEEIKKEVSSYIKKIGYNPAAVAFVPISGWHGDNMLEISSKMPWFKGWAVERKEGKAEGKCLIEALDAILPPTRPTDKALRLPLQDVYKIGGIGTVPVGRVETGVLKPGMLVTFAPAGLTTEVKSVEMHHEALTEAVPGDNVGFNVKNVAVKELRRGYVAGDSKNNPPKGAADFTAQVIVLNHPGQISNGYTPVLDCHTAHIACKFYKIIEKCDRRTGKTTEMDPKAIKSGDAAIVTLVPSKAMCVEAFQEFPPLGR

SEQ ID NO: 17343 - protein, 375 aa, Ruizantheda mutabilis
MGKGSFKYAWVLDKLKAERERGITIDIALWKFETAKYYVTIIDAPGHRDFIKNMITGTSQADCAVLIVAAGTGEFEAGISKNGQTREHALLAFTLGVKQLIVGVNKMDSTEPPYSEARFEEIKKEVSSYIKKIGYNPLAVAFVPISGWHGDNMLEISAKMPWFKGWAVERKEGKGEGKCLIEALDAILPPTRPTDKALRLPLQDVYKIGGIGTVPVGRVETGVLKPGMVVTFAPAGLTTEVKSVEMHHEALTEAVPGDNVGFNVKNVSVKELRRGYVAGDSKNNPPKSAADFTAQVIVLNHPGQISNGYTPVLDCHTAHIACKFYKIIEKCDRRTGKTTENEPKAIKSGDAAIVTLVPSKPMCVEAFQEFPPLGR

SEQ ID NO: 17344 - protein, 375 aa, Ruizantheda proxima
MGKGSFKYAWVLDKLKAERERGITIDIALWKFETAKYYVTIIDAPGHRDFIKNMITGTSQADCAVLIVAAGTGEFEAGISKNGQTREHALLAFTLGVKQLIVGVNKMDSTEPPYSEARFEEIKKEVSSYIKKIGYNPAAVAFVPISGWHGDNMLEISSKMPWFKGWAVERKEGKGEGKCLIEALDAILPPTRPTDKALRLPLQDVYKIGGIGTVPVGRVETGVLKPGMVVTFAPAGLTTEVKSVEMHHEALTEAVPGDNVGFNVKNVSVKELRRGYVAGDSKNNPPKGAADFTAQVIVLNHPGQISNGYTPVLDCHTAHIACKFFKIIEKCDRRTGKTTEMDPKAIKSGDAAIVTLVPTKPMCVEAFQEFPPLGR

SEQ ID NO: 17345 - protein, 375 aa, Sphecodes cressonii
MGKGSFKYAWVLDKLKAERERGITIDIALWKFETSKYYVTIIDAPGHRDFIKNMITGTSQADCAVLIVAAGTGEFEAGISKNGQTREHALLAFTLGVKQLIVGVNKMDSTEPPYSEARFEEIKKEVSSYIKKIGYNPAAVAFVPISGWHGDNMLESSSKMPWFKGWAVERKEGKAEGKCLIEALDAILPPSRPTDKALRLPLQDVYKIGGIGTVPVGRVETGLLKPGMVVTFAPAGLTTEVKSVEMHHEALTEAVPGDNVGFNVKNVSVKELRRGYVAGDSKNNPPKGAADFTAQVIVLNHPGQISNGYTPVLDCHTAHIACKFHKIIEKCDRRTGKTTEMEPKAIKSGDAAIVNLVPSKPMCVEAFQEFPPLGR

SEQ ID NO: 17346 - protein, 375 aa, Sphecodosoma pratti
MGKGSFKYAWVLDKLKAERERGITIDIALWKFETSKYYVTIIDAPGHRDFIKNMITGTSQADCAVLIVAAGTGEFEAGISKNGQTREHALLAFTLGVKQLIVGVNKMDSTEPPYSEARFEEIKKEVSSYIKKIGYNPAAVAFVPISGWHGDNMLEISSKMPWFKGWAVERKEGKAEGKCLIEALDAILPPSRPTDKALRLPLQDVYKIGGIGTVPVGRVETGLLKPGMVVTFAPAGLTTEVKSVEMHHEALQEAVPGDNVGFNVKNVSVKELRRGYVAGDSKNNPPKGAADFTAQVIVLNHPGQISNGYTPVLDCHTAHIACKFLQIKEKCDRRTGKTTEENPKAIKSGDAAIVTLVPSKPMCVESFQEFPPLGR

SEQ ID NO: 17347 - protein, 375 aa, Systropha curvicornis
MGKGSFKYAWVLDKLKAERERGITIDIALWKFETAKYYVTIIDAPGHRDFIKNMITGTSQADCAVLIVAAGTGEFEAGISKNGQTREHALLAFTLGVKQLIVGVNKMDSTEPPYSEARFEEIKKEVSSYIKKIGYNPAAVAFVPISGWHGDNMLEASSKMPWFKGWAVERKEGKAEGKCLIEALDAILPPTRPTDKALRLPLQDVYKIGGIGTVPVGRVETGVLKPGMVVTFAPAGLTTEVKSVEMHHEALQEAVPGDNVGFNVKNVSVKELRRGYVAGDSKNNPPKGAADFTAQVIVLNHPGQISNGYTPVLDCHTAHIACKFLQIKEKCDRRTGKTTEENPKAIKSGDAAIVTLVPSKPMCVEAFQEFPPLGR

SEQ ID NO: 17348 - protein, 375 aa, Systropha planidens
MGKGSFKYAWVLDKLKAERERGITIDIALWKFETSKYYVTIIDAPGHRDFIKNMITGTSQADCAVLIVAAGTGEFEAGISKNGQTREHALLAFTLGVKQLIVGVNKMDSTEPPYSEARFEEIKKEVSSYIKKIGYNPAAVAFVPISGWHGDNMLEASSKMPWFKGWAVERKEGKAEGKCLIEALDAILPPTRPTDKALRLPLQDVYKIGGIGTVPVGRVETGVLKPGMVVTFAPAGLTTEVKSVEMHHEALQEAVPGDNVGFNVKNVSVKELRRGYVAGDSKNNPPKGAADFTAQVIVLNHPGQISNGYTPVLDCHTAHIACKFLQIKEKCDRRTGKTTEENPKAIKSGDAAIVTLVPSKPMCVEAFQEFPPLGR

SEQ ID NO: 17349 - protein, 375 aa, Xeralictus bicuspidariae
MGKGSFKYAWVLDKLKAERERGITIDIALWKFETAKYYVTIIDAPGHRDFIKNMITGTSQADCAVLIVAAGTGEFEAGISKNGQTREHALLAFTLGVKQLIVGVNKMDSTEPPYSEARFEEIKKEVSSYIKKIGYNPAAVAFVPISGWHGDNMLEVSSKMPWFKGWNVERKEGKAEGKCLIEALDAILPPTRPTDKALRLPLQDVYKIGGIGTVPVGRVETGLLKPGMVVTFAPAGLTTEVKSVEMHHEALQEAVPGDNVGFNVKNVSVKELRRGYVAGDSKNNPPKGAADFTAQVIVLNHPGQISNGYTPVLDCHTAHIACKFLQIKEKCDRRTGKTTEENPKAIKSGDAAIVTLVPSKPMCVEAFQEFPPLGR

SEQ ID NO: 17350 - protein, 366 aa, Chimarra obscura
  unsure (1)..(366): unsure at all Xaa locations
QEMGKGSFKYAWVLDKLKAERERGITIDIALWKFETAKYYVTIIDAPGHRDFIKNMITGTSQADCAVLIVAAGTGEFEAGISKNGQTREHALLAFTLGVKQLIVGVNKMDSTEPPYSEARFXXXXXXXSPYIKKIGYNPVAVAFVPISGWHGDNMLEPSSKMPWFKGWAVERKEGKADGKCLIEALDAILPPARPTDKPLRLPLQDVYKIGGIGTVPVGRVETGVLKPGTIVVFAPANLTTEVKSVEMHHEALQEAVPGDNVGFNVKNVSVKELRRGYVAGDSKNNPPKATADFTAQVIVLNHPGQISNGYTPVLDCHTAHIACKFAEIQQKVDRRTGQATEELPKAIKSGDAAIVNLVPSKPLCV

SEQ ID NO: 17351 - protein, 413 aa, Saturnia albofasciata
HVDSGKSTTTGHLIYKCGGIDKRTIEKFEKEAQEMGKGSFKYAWVLDKLKAERERGITIDIALWKFETSRYYVTIIDAPGHRDFIKNMITGTSQADCAVLIVAAGTGEFEAGISKNGQTREHALLAFTLGVKQLIVGVNKMDSTEPPYSESRFEEIKKEVSSYIKKIGYNPAAVAFVPISGWHGDNMLEPSTKMPWFKGWMVERKEGKAEGKCLIEALDAILPPARPTDKALRLPLQDVYKIGGIGTVPVGRVETGILKPGTIVVFAPANITTEVKSVEMHHEALQEAVPGDNVGFNVKNVSVKELRRGYVAGDSKNNPPKGAADFTAQVIVLNHPGQISNGYTPVLDCHTAHIACKFAEIKEKVDRRTGKSTEDNPKSIKSGDAAIVNLVPSKPLCVESFQEFPPLGRFAVR

SEQ ID NO: 17352 - protein, 413 aa, Saturnia caecigena
HVDSGKSTTTGHLIYKCGGIDKRTIEKFEKEAQEMGKGSFKYAWVLDKLKAERERGITIDIALWKFETGRYYVTIIDAPGHRDFIKNMITGTSQADCAVLIVAAGTGEFEAGISKNGQTREHALLAFTLGVKQLIVGVNKMDSTEPPYSEPRFEEIKKEVSSYIKKIGYNPAAVAFVPISGWHGDNMLEPSTKMPWFKGWMVERKEGKAEGKCLIEALDAILPPARPTDKALRLPLQDVYKIGGIGTVPVGRVETGILKPGTIVVFAPANITTEVKSVEMHHEALQEAVPGDNVGFNVKNVSVKELRRGYVAGDSKNNPPKGAADFTAQVIVLNHPGQISNGYTPVLDCHTAHIACKFAEIKEKVDRRTGKSTEDNPKSIKSGDAAIVNLVPSKPLCVESFQEFPPLGRFAVR

SEQ ID NO: 17353 - protein, 413 aa, Attacus caesar
HVDSGKSTTTGHLIYKCGGIDKRTIEKFEKEAQEMGKGSFKYAWVLDKLKAERERGITIDIALWKFETGKYYVTIIDAPGHRDFIKNMITGTSQADCAVLIVAAGTGEFEAGISKNGQTREHALLAFTLGVKQLIVGVNKMDSTEPPYSEPRFEEIKKEVSSYIKKIGYNPAAVAFVPISGWHGDNMLEPSTKMPWFKGWLVERKEGKAEGKCLIEALDAILPPARPTDKPLRLPLQDVYKIGGIGTVPVGRVETGILKPGTIVVFAPANITTEVKSVEMHHEALQEAVPGDNVGFNVKNVSVKELRRGYVAGDSKNNPPKGAADFTAQVIVLNHPGQISNGYTPVLDCHTAHIACKFAEIKEKVDRRTGKSTEDNPKSIKSGDAAIVNLVPSKPLCVESFQEFPPLGRFAVR

SEQ ID NO: 17354 - protein, 413 aa, Actias isis
HVDSGKSTTTGHLIYKCGGIDKRTIEKFEKEAQEMGKGSFKYAWVLDKLKAERERGITIDIALWKFETSKYYVTIIDAPGHRDFIKNMITGTSQADCAVLIVAAGTGEFEAGISKNGQTREHALLAFTLGVKQLIVGVNKMDSTEPPYSEPRFEEIKKEVSSYIKKIGYNPAAVAFVPISGWHGDNMLEPSTKMPWFKGWLVERKEGKAEGKCLIEALDAILPPARPTDKALRLPLQDVYKIGGIGTVPVGRVETGILKPGTIVVFAPANITTEVKSVEMHHEALQEAVPGDNVGFNVKNVSVKELRRGYVAGDSKNNPPKGAADFTAQVIVLNHPGQISNGYTPVLDCHTAHIACKFAEIKEKVDRRTGKSTEDNPKSIKSGDAAIVNLVPSKPLCVESFQEFPPLGRFAVR

SEQ ID NO: 17355 - protein, 413 aa, Argema mimosae
HVDSGKSTTTGHLIYKCGGIDKRTIEKFEKEAQEMGKGSFKYAWVLDKLKAERERGITIDIALWKFETSKYYVTIIDAPGHRDFIKNMITGTSQADCAVLIVAAGTGEFEAGISKNGQTREHALLAFTLGVKQLIVGVNKMDSTEPPYSESRFEEIKKEVSSYIKKIGYNPAAVAFVPISGWHGDNMLEPSTKMPWFKGWMVERKEGKAEGKCLIEALDAILPPARPTDKALRLPLQDVYKIGGIGTVPVGRVETGILKPGTIVVFAPANITTEVKSVEMHHEALQEAVPGDNVGFNVKNVSVKELRRGYVAGDSKNNPPKGAADFTAQVIVLNHPGQISNGYTPVLDCHTAHIACKFAEIKEKVDRRTGKSTEDNPKSIKSGDAAIVNLVPSKPLCVESFQEFPPLGRFAVR

SEQ ID NO: 17356 - protein, 413 aa, Ceranchia apollina
HVDSGKSTTTGHLIYKCGGIDKRTIEKFEKEAQEMGKGSFKYAWVLDKLKAERERGITIDIALWKFETSKYYVTIIDAPGHRDFIKNMITGTSQADCAVLIVAAGTGEFEAGISKNGQTREHALLAFTLGVKQLIVGVNKMDSTEPPYSESRFEEIKKEVSSYIKKIGYNPAAVAFVPISGWHGDNMLEQSTKMPWFKGWLVERKEGKAEGKCLIEALDAILPPARPTDKALRLPLQDVYKIGGIGTVPVGRVETGILKPGTIVVFAPANITTEVKSVEMHHEALQEAVPGDNVGFNVKNVSVKELRRGYVAGDSKNNPPKGAADFTAQVIVLNHPGQISNGYTPVLDCHTAHIACKFAEIKEKVDRRTGKSTEDNPKSIKSGDAAIVNLVPSKPLCVESFQEFPPLGRFAVR

SEQ ID NO: 17357 - protein, 413 aa, Copaxa multifenestrata
HVDSGKSTTTGHLIYKCGGIDKRTIEKFEKEAQEMGKGSFKYAWVLDKLKAERERGITIDIALWKFETGKYYVTIIDAPGHRDFIKNMITGTSQADCAVLIVAAGTGEFEAGISKNGQTREHALLAFTLGVKQLIVGVNKMDSTEPPYSESRFEEIKKEVSSYIKKIGYNPAAVAFVPISGWHGDNMLEPSTKMPWFKGWQVERKEGKADGKCLIEALDAILPPARPTDKALRLPLQDVYKIGGIGTVPVGRVETGILKPGTIVVFAPANITTEVKSVEMHHEALQEAVPGDNVGFNVKNVSVKELRRGYVAGDSKNNPPKGAADFTAQVIVLNHPGQISNGYTPVLDCHTAHIACKFAEIKEKVDRRTGKSTEDNPKSIKSGDAAIVNLVPSKPLCVESFQEFPPLGRFAVR

SEQ ID NO: 17358 - protein, 413 aa, Eacles imperialis
  unsure (1)..(413): unsure at all Xaa locations
HVDSGKSTTTGHLIYKCGGIDKRTIEKFEKEAQEMGKGSFKYAWVLDKLKAERERGITIDIALWKFETAKYYVTIIDAPGHRDFIKNMITGTSQADCAVLIVAAGTGEFEAGISKNGQTREHALLAFTLGVKQLIVGVNKMDSTEPPYSEPRFEEIKKEVSSYIKKIGYNPAAVAFVPISGWHGDNMLEPSTKMPWFKGWMVERKEGKAEGKXLIEALDAILPPARPTDKALRLPLQDVYKIGGIGTVPVGRVETGILKPGTVVVFAPANITTEVKSVEMHHEALQEAVPGDNVGFNVKNVSVKELRRGYVAGDSKNNPPKGAADFTAQVIVLNHPGQISNGYTPVLDCHTAHIACKFAEIKEKVDRRTGKSTEDNPKSIKSGDAAIVNLVPSKPLCVESFQEFPPLGRFAVR

SEQ ID NO: 17359 - protein, 413 aa, Holocerina smilax
HVDSGKSTTTGHLIYKCGGIDKRTIEKFEKEAQEMGKGSFKYAWVLDKLKAERDRGITIDIALWKFETAKYYVTIIDAPGHRDFIKNMITGTSQADCAVLIVAAGTGEFEAGISKNGQTREHALLAFTLGVKQLIVGVNKMDSTEPPYSEPRFEEIKKEVSSYIKKIGYNPAAVAFVPISGWHGDNMLEPSTKMPWFKGWMVERKEGKAEGKCLIEALDAILPPARPTDKALRLPLQDVYKIGGIGTVPVGRVETGILKPGTIVVFAPANITTEVKSVEMHHEALQEAVPGDNVGFNVKNVSVKELRRGYVAGDSKNNPPKGAADFTAQVIVLNHPGQIANGYTPVLDCHTAHIACKFAEIKEKVDRRTGKSTEDNPKFIKSGDAAIVNLVPSKPLCVESFQEFPPLGRFAVR

SEQ ID NO: 17360 - protein, 413 aa, Imbrasia petiveri
HVDSGKSTTTGHLIYKCGGIDKRTIEKFEKEAQEMGKGSFKYAWVLDKLKAERERGITIDIALWKFETAKYYVTIIDAPGHRDFIKNMITGTSQADCAVLIVAAGTGEFEAGISKNGQTREHALLAFTLGVKQLIVGVNKMDSTEPPYSEPRFEEIKKEVSSYIKKIGYNPAAVAFVPISGWHGDNMLEPSTKMPWFKGWLVERKEGKAEGKCLIEALDAILPPARPTDKALRLPLQDVYKIGGIGTVPVGRVETGILKPGTIVVFAPANITTEVKSVEMHHEALQEAVPGDNVGFNVKNVSVKELRRGYVAGDSKNNPPKGAADFTAQVIVLNHPGQISNGYTPVLDCHTAHIACKFAEIKEKVDRRTGKSTEDNPKSIKSGDAAIVNLVPSKPLCVESFQEFPPLGRFAVR

SEQ ID NO: 17361 - protein, 413 aa, Opodiphthera eucalypti
HVDSGKSTTTGHLIYKCGGIDKRTIEKFEKEAQEMGKGSFKYAWVLDKLKAERERGITIDIALWKFETSKYYVTIIDAPGHRDFIKNMITGTSQADCAVLIVAAGTGEFEAGISKNGQTREHALLAFTLGVKQLIVGVNKMDSTEPPYSEPRFEEIKKEVSSYIKKIGYNPAAVAFVPISGWHGDNMLEPSTKMPWFKGWLVERKEGKAEGKCLIEALDAILPPARPTDKALRLPLQDVYKIGGIGTVPVGRVETGILKPGTIVVFAPANITTEVKSVEMHHEALQEAVPGDNVGFNVKNVSVKELRRGYVAGDSKNNPPKGAADFTAQVIVLNHPGQISNGYTPVLDCHTAHIACKFAEIKEKVDRRTGKSTEDNPKSIKSGDAAIVILVPSKPLCVESFQEFPPLGRFAVR

SEQ ID NO: 17362 - protein, 413 aa, Polythysana apollina
  unsure (1)..(413): unsure at all Xaa locations
HVDSGKSTTTGHLIYKCGGIDKRTIEKFEKEAQEMGKGSFKYAWVLDKLKAERERGITIDIALWKFETGRYYVTIIDAPGHRDFIKNMITGTSQADCAVLIVAAGTGEFEAGISKNGQTREHALLAXTLGVKQLIVGVNKMDSTEPPFSEPRFEEIKKEVSSYIKKIGYNPAAVAFVPISGWHGDNMLEPSTKMPWFKGWMVERKEGKADGKCLIEALDAILPPARPTDKALRLPLQDVYKIGGIGTVPVGRVETGILKPGTVVVFAPANITTEVKSVEMHHEALQEAVPGDNVGFNVKNVSVKELRRGYVAGDSKNNPPKGAADFTAQVIVLNHPGQISNGYTPVLDCHTAHIACKFAEIKEKVDRRTGKSTEDNPKSIKSGDAAIVILVPSKPLCVESFQEFPPLGRFAVR

SEQ ID NO: 17363 - protein, 652 aa, Anopheles gambiae str. PEST
DYDDDDYQYGQSVEDDCISPTDASQWIYDRAKGQQSMSEFLANNRDIEEEDDDELAAETGREGPAHKRRDSECFQMPELNDEDRARLMSCMDEIRDIVGETCSDRQMVEAIMKHDYECSKALDEILNSNKTPPAALGAKSGSKLTAGAAMEKASTVIITPSASVAKKTLAFEVTSSPRMQSPSVSGRNTPEITEEAARQQQQQSFKSTPKEPSRNAKELFGKERGDRKDHIHMVVIGHVDAGKSTLMGHLLYDTGNVSQRIMHKHEQESKKLGKSSFMYAWVLDETGEERERGITMDVGSTRFETAKKEITLLDAPGHKDFIPNMISGANQADVALLVVDATRGEFETGFEQGGQTREHALLVRSLGVSQLGVVVNKLDTVGWSKERFDEIVNKLKVFLKQAGFRDADVTYVPCSGLTGENLVKDPTDPALTAWYSGPTLLKVIDSFKTPDRAIDKPFRLSVADIFKGTGSGFCLCGRIESGMVCVNDKVLVCPSKEQAVVKNITIDELPQQTAFAGDQVSLTLANIDINNISVGYILSDIFHPVPLATRILARIVVFNIKVPITRGYPVLLHHQSLIEPATIRKLKAQLHKGTGEVIKKNPRCLGNNSCALVEIEFQRPIGMERYADFKDLGRIMLRVEGVTIAAGLVTEI

SEQ ID NO: 17364 - protein, 395 aa, Piptocephalis freseniana
KRTIEKFEKEAAELGKGSFKYAWVLDKLKAERERGITIDIALWKFETPKYQVTVIDAPGHRDFIKNMITGTSQADCAILIIAGGTGEFEAGISKDGQTREHVLLAFTLGVRQLIVAVNKMDTTKWSEDRFNEIVKEVSNYVKKIGYNPKSVPFVPISGWHGDNMLEASVNMPWFKGWTKEGKTGAKTGKTLLEAIDAIDPPSRPTDKPLRLPLQDVYKIGGIGTVPVGRVETGVIKAGMVVTFAPAAVTTEVKSVEMHHEQLVEGVPGDNVGFNVKNVSVKDIRRGNVCSDSKNDPAKEAGSFLAQVIVLNHPGQISAGYAPVLDCHTAHIACKFTELIEKIDRRSGKSIEDSPKFVKSGDAAIVKMTPSKPMCVEAFTEYPPLGRFAVRDMRQT

SEQ ID NO: 17365 - protein, 395 aa, Rhizophlyctis sp. C-10
KRTIEKFEKEAADIGKGSFKYAWVLDKLKAERERGITIDIALWKFETPKYYVTVIDAPGHRDFIKNMITGTSQADCAILIIAGGVGEFEAGISKDGQTREHALLAFTLGVRQLIVAVNKMDTNKWSEDRFNEIVKELSGFIKKVGYNPKSVPFVPISGWHGDNMLEVSENMPWFKGWTKETKAGNSTGKTLLQAIDAIEPPTRPTDKPLRLPLQDVYKIGGIGTVPVGRVETGVIKPGMVVTFAPANVTTEVKSVEMHHESLTEGLPGDNVGFNVKNVSVKEIRRGMVASDSKNDPAKEAASFNAQVIVLAHPGQIAAGYSPVLDCHTAHIACKFAELVEKIDRRSGKKLEDAPKFIKSGDAAIVKMIPSKAMCVEAYTDYPPLGRFAVRDMRQT

SEQ ID NO: 17366 - protein, 442 aa, Giardia lamblia ATCC 50803
MGKEKKHINLVVIGHVDNGKSTLTGHLIYKCGGIDQRTIDEYEKRATEMGKGSFKYAWVLDQLKDERERGITINIALWKFETKKYIVTIIDAPGHRDFIKNMITGTSQADVAILVVAAGQGEFEAGISKDGQTREHATLANTLGIKTMIICVNKMDDGQVKYSKERYDEIKGEMMKQLKNIGWKKAEEFDYIPTSGWTGDNIMEKSDKMPWYEGPCLIDAIDGLKAPKRPTDKPLRLPIQDVYKISGVGTVPAGRVETGELAPGMKVVFAPTSQVSEVKSVEMHHEELKKAGPGDNVGFNVRGLAVKDLKKGYVVGDVTNDPPVGCKSFTAQVIVMNHPKKIQPGYTPVIDCHTAHIACQFQLFLQKLDKRTLKPEMENPPDAGRGDCIIVKMVPQKPLCCETFNDYAPLGRFAVRDMKRTVAVGIIQEIDKEEFKPPKGGK

SEQ ID NO: 17367 - protein, 465 aa, Giardia lamblia ATCC 50803
MSSQEVVQVEEEKRKNLNIVFIGHVDAGKSTISGHLVSDLGKLDKRQLEKLEQQAKALNRESWKYAFAMDTSEEEREKGKTVECARESFLTPNGRRITIIDAPGHKGFVHNMISGAAQADTAILVISARKGEFESGFERGGQTSEHALLAYVNGIKQIVCLINKMDDITVEYCKKRYDSIVSQLKLYLENVGYASKNIFFLPISGFTGENLISTKELNPKLSEWYSGPSFLDLLDELKVPKRDTKSPLCACVSGHYKENSAFIVVKVEQGKMSIGDTVLCLPENKAFDILDIEGEQEEGSKLVQAKAGDNVRIKVKDDIWEFLTEGSVICAQPSPGQSPSVSVTNRFQANLLIVSTAENLVITSGYSCVAHINLQQVGCQIRAILADLDLKTGKVKPEYIVSTEPLKVRRPTHVLSKARIICEIITQKPVCVQSYAGHEALGRIILRHESDTVAIGYIVSVKPAK

SEQ ID NO: 17368 - protein, 363 aa, Bittacus punctiger
GRERGITIDIALWKFETAKYYVTIIDAPGHRDFIKNMITGTSQADCAVLIVAAGTGEFEAGISKNGQTREHALLAFTLGVKQLIVGVNKMDSTEPPYSESRFEEIKKEVSSYIKKIGYNPAAVAFVPISGWHGDNMLEVSTKMSWFKGWNVERKEGKADGKCLIEALDAILPPARPTDKPLRLPLQDVYKIGGIGTVPVGRVETGILKPGTVVVFAPANLTTEVKSVEMHHEALQEAVPGDNVGFNVKNVSVKELRRGYVAGDSKASPPKGAADFTAQVIVLNHPGQISNGYTPVLDCHTAHIACKFAEIKEKVDRRTGKSTEDNPKAIKSGDAAIVNLVPSKPMCVESFQEFPPLGRFAVRD

SEQ ID NO: 17369 - protein, 363 aa, Bittacus selysi
ERERGITIDIALWKFETAKYYVTIIDAPGHRDFIKNMITGTSQADCAVLIVAAGTGEFEAGISKNGQTREHALLAFTLGVKQLIVGVNKMDSTEPPYSESRFEEIKKEVSSYIKKIGYNPAAVAFVPISGWHGDNMLEVSSKMSWFKGWNVERKEGKADGKCLIEALDAILPPARPTDKPLRLPLQDVYKIGGIGTVPVGRVETGVLKPGTVVVFAPANLTTEVKSVEMHHEALQEAVPGDNVGFNVKNVSVKELRRGYVAGDSKASPPKGAADFTAQVIVLNHPGQISNGYTPVLDCHTAHIACKFAEIKEKVDRRTGKSTEDNPKAIKSGDAAIVNLVPSKPMCVESFQEFPPLGRFAVRD

SEQ ID NO: 17370 - protein, 363 aa, Neopanorpa harmandi
ERERGITIDIALWKFETAKYYVTIIDAPGHRDFIKNMITGTSQADCAVLIVAAGTGEFEAGISKNGQTREHALLAFTLGVKQLIVGVNKMDSTEPPYSEARFEEIKKEVSSYIKKIGYNPAAVAFVPISGWHGDNMLEVSTKMTWFKGWNVERKEGKADGKCLIEALDAILPPARPTDKPLRLPLQDVYKIGGIGTVPVGRVETGVLKPGTVVVFAPANLTTEVKSVEMHHEALQEAVPGDNVGFNVKNVSVKELRRGYVAGDSKANPPKGAADFTAQVIVLNHPGQISNGYTPVLDCHTAHIACKFAEIKEKVDRRTGKSTEDNPKAIKSGDAAIVNLVPSKPMCVESFQEFPPLGRFAVRD

SEQ ID NO: 17371 - protein, 361 aa, Panorpa arakavae
ERGITIDIALWKFETAKYYVTIIDAPGHRDFIKNMITGTSQADCAVLIVAAGTGEFEAGISKNGQTREHALLAFTLGVKQLIVGVNKMDSTEPPYSEPRFEEIKKEVSSYIKKIGYNPAAVAFVPISGWHGDNMLEVSSKMGWFKGWAVERKEGKADGKCLIEALDAILPPARPTDKPLRLPLQDVYKIGGIGTVPVGRVETGVLKPGTVVVFAPANLTTEVKSVEMHHEALQEAVPGDNVGFNVKNVSVKELRRGYVAGDSKANPPKGAADFTAQVIVLNHPGQISNGYTPVLDCHTAHIACKFAEIKEKVDRRTGKSTEDNPKAIKSGDAAIVVLVPSKPMCVESFQEFPPLGRFAVRD

SEQ ID NO: 17372 - protein, 362 aa, Panorpa carolinensis
RERGITIDIALWKFETAKYYVTIIDAPGHRDFIKNMITGTSQADCAVLIVAAGTGEFEAGISKNGQTREHALLAFTLGVKQLIVGVNKMDSTEPPYSESRFEEIKKEVSSYIKKIGYNPAAVAFVPISGWHGDNMLEVSSKMGWFKGWAVERKEGKADGKCLIEALDAILPPARPTDKPLRLPLQDVYKIGGIGTVPVGRVETGVLKPGTVVVFAPANLTTEVKSVEMHHEALQEAVPGDNVGFNVKNVSVKELRRGYVAGDSKANPPKGAADFTAQVIVLNHPGQISNGYTPVLDCHTAHIACKFAEIKEKVDRRTGKSTEDNPKAIKSGDAAIVVLVPSKPMCVESFQEFPPLGRFAVRD

SEQ ID NO: 17373 - protein, 363 aa, Panorpa striata
ERERGITIDIALWKFETAKYYVTIIDAPGHRDFIKNMITGTSQADCAVLIVAAGTGEFEAGISKNGQTREHALLAFTLGVKQLIVGVNKMDSTEPPYSESRFEEIKKEVSSYIKKIGYNPAAVAFVPISGWHGDNMLEVSTKMGWFKGWAVERKEGKADGKCLIEALDAILPPARPTDKALRLPLQDVYKIGGIGTVPVGRVETGILKPGTVVVFAPANLTTEVKSVEMHHEALQEAVPGDNVGFNVKNVSVKELRRGYVAGDSKSNPPKGAADFTAQVIVLNHPGQISNGYTPVLDCHTAHIACKFAEIKEKVDRRTGKSTEDNPKAIKSGDAAIVNLVPSKPMCVESFQEFPPLGRFAVRD

SEQ ID NO: 17374 - protein, 363 aa, Harpobittacus australis
ERERGITIDIALWKFETAKYYVTIIDAPGHRDFIKNMITGTSQADCAVLIVAAGTGEFEAGISKNGQTREHALLAFTLGVKQLIVGVNKMDSTEPPYSESRFEEIKKEVSSYIKKIGYNPAAVAFVPISGWHGDNMLEVSSKMGWFKGWNVERKEGKADGKCLIEALDAILAPSRPTDKPLRLPLQDVYKIGGIGTVPVGRVETGVLKPGTVVVFAPANLTTEVKSVEMHHEALQEAVPGDNVGFNVKNVSVKELRRGYVAGDSKASPPKGAADFTAQVIVLNHPGQISNGYTPVLDCHTAHIACKFAEIKEKVDRRTGKSTEDNPKAIKSGDAAIVNLVPSKPMCVESFQEFPPLGRFAVRD

SEQ ID NO: 17375 - protein, 363 aa, Opthalmopsylla volgensis palestinica
ERERGITIDIALWKFETAKYYVTIIDAPGHRDFIKNMITGTSQADCAVLIVAAGVGEFEAGISKNGQTREHALLAFTLGVKQLIVGVNKMDSTEPPYSEARFEEIKKEVSSYIKKIGYNPAAVAFVPISGWHGDNMLEVSSKMGWFKGWNVERKEGKADGKCLIEALDAILPPARPTDKPLRLPLQDVYKIGGIGTVPVGRVETGVLKPGTVVVFAPANLTTEVKSVEMHHEALQEAVPGDNVGFNVKNVSVKELRRGYVAGDSKASPPRGAADFTAQVIVLNHPGQISNGYTPVLDCHTAHIACKFAEIKEKVDRRTGKSTEDNPKAIKSGDAAIVNLVPSKPMCVESFSEFPPLGRFAVRD

SEQ ID NO: 17376 - protein, 428 aa, Pyrococcus furiosus DSM 3638
MPKDKPHVNIVFIGHVDHGKSTTIGRLLYDTGNIPEQIIKKFEEMGEKGKSFKFAWVMDRLKEERERGITIDVAHTKFETPHRYITIIDAPGHRDFVKNMITGASQADAAVLVVAATDGVMPQTKEHAFLARTLGIKHIIVAINKMDMVNYNQKRFEEVKAQVEKLLKMLGYKDFPVIPISAWEGENVVKKSDKMPWYNGPTLIEALDQIPEPEKPVDKPLRIPIQDVYSIKGVGTVPVGRVETGKLRVGEVVIFEPASTIFHKPIQGEVKSIEMHHEPLEEALPGDNIGFNVRGVSKNDIKRGDVAGHTTNPPTVVRTKDTFKAQIIVLNHPTAITVGYSPVLHAHTAQVPVRFEQLLAKLDPKTGNIVEENPQFIKTGDAAIVILRPMKPVVLEPVKEIPQLGRFAIRDMGMTIAAGMVISIQRGE

SEQ ID NO: 17377 - protein, 413 aa, Methanothermobacter thermautotrophicus str. Delta H
MAKEKEHMNLAFIGHVDHGKSTLVGHLLLQAGAIAEQQLAEGEDKFRFVMDRLSEERERGVTIDLAHAKFETDKYEFTIVDCPGHRDFVKNMITGASQADAAVLVVAVDDGVMPQTKEHVFLSRTLGINQLIVAINKMDLVNYDEEKFNALKDEVAALIKTVGYKPSDVEFIPLSAFEGDNITSKSENTPWYKGKTLVEALDDLEAPEKPVDLPLRIPIQDVYSITGVGTVPVGRVETGVLKKGENVIFEPAGVSGEVKSIEMHHEMIEQAEPGDNIGFNVRGVGKNDIRRGDVAGHLDNPPKVAKEFTAQIVVLQHPGVITVGYTPVFHCHTAQVACTFLELVQKMNPATGQVEEENPDFLKTGNAAVVKVKPTKPLVIEKIKDIPHMGRFAIRDMGQTVAAGMCIDLVPAK

SEQ ID NO: 17378 - protein, 422 aa, Methanosarcina acetivorans C2A
MAADKPHMNLAVIGHIDHGKSTLVGRLMYEAGAVPAHIIEKYKEEAKQKGKESFAFAWVMDSLKEERERGITIDIAHKRFDTPKYYFTVVDCPGHRDFVKNMITGASQADAAILVVAAPDGVMAQTKEHIFLSRTLGINQLIIAINKMDAVEYSEAKYKEVVEQVSGLLKMIGFKPANIPFIPTSAFMGDNITKLSEKTPWYKGPVIMQALDELKEPEKPSTLPLRIPVEDAYTISGIGTVPVGRVETGVMKKGDKVIFMPGGAGGEVKSIEMHHEEIPQAYPGDNIGWNVRGIGKNDVRRGDVCGHTDNPPKVADEFVGQIVVLQHPSAITAGYTPVFHAHTSQIACQLISLDKKLDPKTGQVKEEHPTFIKAGDAAIVTIKPTKPMVIEPVKEIPQLGRFAIRDMGMTIAAGMCMSVKQK

SEQ ID NO: 17379 - protein, 423 aa, Methanopyrus kandleri AV19
MAKEKEHINLAFIGHVDHGKSTLVGRLLYDTGVIEDKDLGEGEDKFRVIMDTLEEERERGVTIDLAHTKFETDNYEFTIVDCPGHRDFVKNMITGASQADAAILVVAADDGVMPQTKEHAFLAKTLGIDQLIVAINKMDLVDYDENRYEEVKQEVAELLKTIGYNVDEIPFIPISAFEGDNVVEKSDNTPWYDGPTLLEALDNLEPPEKPTDKPLRIPIQDVYSITGVGTVPVGRVETGVLEVGDTVRFEPAYTATGGRKGEGEVRSIEMHHEEIERAEPGDNIGFNVKGVGKNDISRGDVACHPDEPATVVTPDDTFIAQIVVLQHPSAITAGYTPVFHCHTAQVACKFEELIEKIDPATGEVIEENPDFLKTGEAAKVRIRPTKPMVIEEVSFIPQLGRFAIRDMGQTVAAGMCVKIEKEE

SEQ ID NO: 17380 - protein, 422 aa, Methanosarcina mazei Goe1
MAADKPHMNLAVIGHIDHGKSTFVGRLMYDAGAVPAHIIEKYKEEAKQKGKESFAFAWVMDSLKEERERGITIDIAHKRFDTDKFYFTVVDCPGHRDFVKNMITGASQADAAVLVVAAPDGVMAQTKEHIFLSRTLGINQLIVAINKMDAVDYSEARYKEVVEQVSGILKMIGFKPSEIPFIPTSAFHGDNIMKLSDKTPWYKGPAIMEALNSLKEPEKPSTLPLRIPVEDAYTISGIGTVPVGRVETGVMKKGDKVVFMPGGAGGEVKSIEMHHEEIPQATPGDNIGWNVRGIGKNDVRRGDVCGHADNPPKVADEFVGQIVVLQHPSAITAGYTPVFHAHTSQIACQLIALNKKLDPKTGQVKEENPTFLKAGDAAIVTIKPTKPMVIEPVKEIPQLGRFAIRDMGMTIAAGMCMSVKQK

SEQ ID NO: 17381 - protein, 385 aa, Bombus mendax
KFEKEAQEMGKGSFKYAWVLDKLKAERERGITIDIALWKFETAKYYVTIIDAPGHRDFIKNMITGTSQADCAVLIVAAGIGEFEAGISKNGQTREHALLAFTLGVKQLIVGVNKMDMTDPPYSEARFEEIKKEVSSYIRKIGYNTLSVAFVPISGWHGDNMLEPSPKTPWYKGWKVERKDGNADGKTLIEALDAILPPSRPTDKALRLPLQDVYKIGGIGTVPVGRVETGILKPGMLVTFAPAALTTEVKSVELHHEALTEALPGDNVGFNVKNISVKELRRGYVAGDSKNQPPRGAADFTAQVIVLNHPGQISNGYTPVLDCHTAHIACKFAEIKEKCDRRTGKTTEENPKSIKSGDAAIVVLQPTKPMCVEAFQEFPPLGRFA

SEQ ID NO: 17382 - protein, 385 aa, Bombus confusus
KFEKEAQEMGKGSFKYAWVLDKLKAERERGITIDIALWKFETAKYYVTIIDAPGHRDFIKNMITGTSQADCAVLIVAAGIGEFEAGISKNGQTREHALLAFTLGVKQLIVGVNKMDMTEPPYSEARFEEIKKEVSSYIKKIGYNTASVAFVPISGWHGDNMLEPSPKTPWYKGWKVERKDGNADGKTLIEALDAILPPSRPTDKALRLPLQDVYKIGGIGTVPVGRVETGILKPGMLVTFAPAALNTEVKSVEMHHEALSEALPGDNVGFNVKNISVKELRRGYVAGDSKNQPPRGAADFTAQVIVLNHPGQISNGYTPVLDCHTAHIACKFAEIKEKCDRRTGKTTEENPKSIKSGDAAIVMLQPTKPMCVEAFQEFPPLGRFA

SEQ ID NO: 17383 - protein, 428 aa, Methanococcus vannielii
MAKTKPILNVAFIGHVDAGKSTTVGRLLLDGGAIDPQLIVRLRKEAEEKGKAGFEFAYVMDGLKEERERGVTIDVAHKKFPTAKYEVTIVDCPGHRDFIKNMITGASQADAAVLVVNVDDAKSGIQPQTREHVFLIRTLGVRQLAVAVNKMDTVNFSEADYNELKKMIGDQLLKMIGFNPEQINFVPVASLHGDNVFKKSERNPWYKGPTIAEVIDGFQPPEKPTNLPLRLPIQDVYTITGVGTVPVGRVETGIIKPGDKVVFEPAGAIGEIKTVEMHHEQLPSAEPGDNIGFNVRGVGKKDIKRGDVLGHTTNPPTVATDFTAQIVVLQHPSVLTDGYTPVFHTHTAQIACTFAEIQKKLNPATGEVLEENPDFLKAGDAAIVKLIPTKPMVIESVKEIPQLGRFAIRDMGMTVAAGMAIQVTAKNK

SEQ ID NO: 17384 - protein, 428 aa, Methanocaldococcus jannaschii
MAKQKPVLNVAFIGHVDAGKSTTVGRLLYDSGAIDPQLLEKLKREAQERGKAGFEFAYVMDNLKEERERGVTIDVAHKKFETQKYEVTIVDCPGHRDFIKNMITGASQADAAVLVVDVNDAKTGIQPQTREHMFLARTLGIKQIAVAINKMDTVNYSQEEYEKMKKMLSEQLLKVLGYNPDQIDFIPTASLKGDNVVKRSENMPWYKGPTLVEALDKFQPPEKPTNLPLRIPIQDVYSITGVGTVPVGRVETGILRPGDKVVFEPAGVSGEVKSIEMHHEQIPQAEPGDNIGFNVRGVSKKDIKRGDVCGHPDNPPTVAEEFTAQIVVLQHPTAITVGYTPVFHAHTAQVACTFIELLKKLDPRTGQVIEENPQFLKTGDAAIVKIKPTKPMVIENVREIPQLGRFAIRDMGMTIAAGMAIDVKAKNK

SEQ ID NO: 17385 - protein, 422 aa, Methanosarcina barkeri
MAADKPHMNLAVIGHIDHGKSTFVGRLMYDAGAVPAHVIEKYKEEAKQKGKESFAFAWVMDSLKEERERGITIDIAHKRFDTDKYYFTVVDCPGHRDFVKNMITGASQADAAVLVVAAPDGVMAQTKEHIFLSRTLGINQLIVAINKMDAVEYSEKRYKEVVEQVSGILKMIGFKPGDIPFVPTSAFYGDNVVNHSEKTPWYKGVTMMEALNNLKVPEKPSTLPLRIPVEDAYTISGIGTVPVGRVETGTMKKGDKVVFMPGGAAGEVKSIEMHHEEIPQALPGDNIGWNVRGIGKADVRRGDVCGHTDNPPKVADTFVGQIVVLQHPSAITAGYTPVFHAHTSQIACQLIELNKKLDPKSGQVKEENPTFLKAGDAAIVTIKPTKPMVIEPVKEIPQLGRFAIRDMGMTIAAGMCMSVKQK

SEQ ID NO: 17386 - protein, 398 aa, Streblomastix strix
VGKSTTTGHLIYKCGGIDKRTIEKFEQEAEQIGKASFKYAWVLDKLKAERERGITIDIALWKFETNKYYFTIIDAPGHRDFIKNMITGTSQADAALLVVAANQGEFEAGISKDGQTREHALLAYTLGVKQMIVLVNKMDDKSVSFSEARYNEIVGEMRNYLKKIGYNPDKIQMIPISGFCGDNMLEHSPNMPWYKGNTLFDSLDTLEVPKRPVDKPLRLPIQDVFKIGGIGTVPVGRVETGVLTPGQVVTIAPAMITTECKSVEMHHEALTQAVPGDNVGFNLKGVSVKDIKRGYVCGDSKQDPPQETESSQAQVIVMQHPGQIQNGYTPVLDCHTSHIACKFKEITSKIDRRTNKEQEANPKSIKTGDSAIVTMVPSKPMVVEKFVEYPPLGRFAVR

SEQ ID NO: 17387 - protein, 398 aa, Streblomastix strix
VGKSTTTGHLIYKCGGIDKRTIEKFEQEAEQIGKSSFKYAWVLDKLKAERERGITIDISLWKFETNKYYFTIIDAPGHRDFIKNMITGTSQADVALLVVAANQGEFEAGISKDGQTREHALLAYTLGVKQLIVLVNKMDDKSVNFAEARYTEIVTEMRNYLKKIGYNPEKIQMIPISGFQGDNMIEHSENMPWYKGNTLFEALDTLEVPKRPTDKPLRLPIQDVFKIGGIGTVPVGRVETGIMTPGQVVTIAPAMITTECKSVEMHHVALTEAVPGDNVGFNLKGVSVKDIKRGYVCGDSKQDPPQETESFQAQVIVMQHPGQIQNGYTPVLDCHTSHIACKFKEITSKIDRRTNKEQESNPKSIKTGDSAIVTMVPSKPMVVEKFVEYPPLGRFAVR

SEQ ID NO: 17388 - protein, 398 aa, Streblomastix strix
VGKSTTTGHLIYKCGGIDKRTIEKFEQEAEQIGKASFKYAWVLDKLKAERERGITIDIALWKFETNKYYFTIIDAPGHRDFIKNMITGTSQADAALLVVAANQGEFEAGISKDGQTREHALLAYTLGVRQTIVLVNKMDDKSVNFSEARYNEIVGEMRNYLKKIGYNPDKIQMIPISGFCGDNMLEHSENMPWYKGNTLFDSLDTLEVPKRPLDKPLRLPIQDVFKIGGIGTVPVGRVETGSLTPGQIVTIAPAMITTECKSVEMHHVSLTEAVPGDNVGFNLRGVSVKDIKRGYVCGDSKQDPPQETESFLAQVIVMQHPGQIQNGYTPVLDCHTSHIACKFKEITSKIDRRTNKELEANPKSIKTGDSAMVLMVPTKPLVVEKFVEYPPLGRFAVR

SEQ ID NO: 17389 - protein, 421 aa, Haloarcula marismortui
MSDEQHQNLAIIGHVDHGKSTLVGRLLYETGSVPEHVIEQHKEEAEEKGKGGFEFAYVMDNLAEERERGVTIDIAHQEFSTDTYDFTIVDCPGHRDFVKNMITGASQADNAVLVVAADDGVQPQTQEHVFLARTLGIGELIVAVNKMDLVDYGESEYKQVVEEVKDLLTQVRFDSENAKFIPVSAFEGDNIAEESEHTGWYDGEILLEALNELPAPEPPTDAPLRLPIQDVYTISGIGTVPVGRVETGILNTGDNVSFQPSDVSGEVKTVEMHHEEVPKAEPGDNVGFNVRGVGKDDIRRGDVCGPADDPPSVAETFQAQIVVMQHPSVITEGYTPVFHAHTAQVACTVESIDKKIDPSSGEVAEENPDFIQNGDAAVVTVRPQKPLSIEPSSEIPELGSFAIRDMGQTIAAGKVLGVNER

SEQ ID NO: 17390 - protein, 421 aa, Halobacterium salinarum
MSDNRHQNLAVIGHVDHGKSTMVGRLLYETGSVPEHVIEQHKEEAEEEGKGGFEFAYVMDNLAEERERGVTIDIAHQEFTTDEYEFTIVDCPGHRDFVKNMITGASQADNAVLVVAADDGVAPQTREHVFLSRTLGIDELIVAVNKMDVVDYDESKYNEVVSGVKDLFGQVGFNPDDAKFIATSAFEGDNVSDHSDNTPWYDGPTLLEALNGLPVPQPPTDADLRLPIQDVYTISGIGTVPVGRIETGVMNTGDNVSFQPSDVGGEVKTIEMHHEEVPNAEPGDNVGFNVRGIGKDDIRRGDVCGPADDPPSVADTFQAQVVVMQHPSVITAGYTPVFHAHTAQVACTIESIDKKMDPASGETQEENPDFIQSGDAAVVTVRPQKPLSLEPSSEIPELGSFAVRDMGQTIAAGKVLDVDEA

SEQ ID NO: 17391 - protein, 430 aa, Pyrococcus woesei
MKMPKDKPHVNIVFIGHVDHGKSTTIGRLLYDTGNIPEQIIKKFEEMGEKGKSFKFAWVMDRLREERERGITIDVAHTKFETPHRYITIIDAPGHRDFVKNMITGASQADAAVLVVAATDGVMPQTKEHAFLARTLGIKHIIVAINKMDMVNYNQKRFEEVKAQVEKLLKMLGYKDFPVIPISAWEGENVVKKSDKMPWYNGPTLIEALDQIPEPEKPVDKPLRIPIQDVYSIKGVGTVPVGRVETGKLRVGEVVIFEPASTIFHKPIQGEVKSIEMHHEPLEEALPGDNIGFNVRGVSKNDIKRGDVAGHTTNPPTVVRTKDTFKAQIIVLNHPTAITVGYSPVLHAHTAQVPVRFEQLLAKLDPKTGNIVEENPQFIKTGDAAIVILRPMKPVVLEPVKEIPQLGRFAIRDMGMTIAAGMVISIQRGE

SEQ ID NO: 17392 - protein, 428 aa, Thermococcus celer
MAKEKPHINIVFIGHVDHGKSTTIGRLLFDTANIPENIIKKFEEMGEKGKSFKFAWVMDRLKEERERGITIDVAHTKFETPHRYITIIDAPGHRDFVKNMITGASQADAAVLVVAVTDGVMPQTKEHAFLARTLGINNILVAVNKMDMVNYDEKKFKAVAEQVKKLLMMLGYKNFPIIPISAWEGDNVVKKSDKMPWYNGPTLIEALDQMPEPPKPTDKPLRIPIQDVYSIKGVGTVPVGRVETGVLRVGDVVIFEPASTIFHKPIQGEVKSIEMHHEPMQEALPGDNIGFNVRGVGKNDIKRGDVAGHTNNPPTVVRPKDTFKAQIIVLNHPTAITVGYTPVLHAHTLQVAVRFEQLLAKLDPRTGNIVEENPQFIKTGDSAIVVLRPTKPMVIEPVKEIPQMGRFAIRDMGQTVAAGMVISIQKAE

SEQ ID NO: 17393 - protein, 275 aa, Staphylothermus marinus
HGKSTLVGHILYRLGLVDQKTIQMLEEEAKKRGKESFKFAWLLDKLKEERERGVTIALTYMKFETRRYIFTIIDAPGHRDFVKNMITGASQADAALLVVSARKGEFEAGMSPEGQTREHAILAKTMGINQLIVAVNKMDATEPPWSQKRYEQIKTILGKFLKSLGYDISKVPFIPVSAWTGDNLIERSPNMPWYNGPTLVEALDSLEPPPKPIDKPLRIPIQDVYAISGVGTVPVGRVETGVLRVGDKVVFMPPAKVGEVRSIETHHVRIEKAEP

SEQ ID NO: 17394 - protein, 413 aa, Austrosimulium bancrofti
HVNSGKSTTTGHLIYKCGGIDKRTIEKFEKEAREMGRGSFKYAWVLDKLKAERERGITIDIALWKFETSKYYVTIIDAPGHRDFIKNMITGTSQADCAVLIVAAGTGEFEAGISKNGQTREHALLAFTLGVKQLIVGVNKMDSTEPPFSEARFEEIKKEVSSYIKKIGYNPVCVPFVPISGWHGDNMLEVSSKMPWYKGWKVERKEGNADGKCLIEALDAILPPSRPTDKPLRLPLQDVYKIGGIGTVPVGRVETGVIKPGMVVVFAPVNLTTEVKSVEMHHEALQEASPGDNVGFNVKNVSVKELRRGYVAGDSKSNPPKGAENFTAQVIVLNHPGQISNGYTPVLDCHTAHIACKFSEIKEKVDRRTGKSTEDNPKAIKSGDAAIVILVPSKPLCVESFSEFPPLGRFAVR

SEQ ID NO: 17395 - protein, 377 aa, Ctenolepisma lineata
QEMGKGSFKYAWVLDKLKAERERGITIDIALWKFETNKYYITIIDAPGHRDFIKNMITGTSQADCAVLIVAAGTGEFEAGISKNGQTREHALLAFTLGVKQLIVGVNKMDSTEPPYSEARFEEIKKEVGNYIKKIGYNPAAVAFVPISGWHGDNMLEQSDKMPWFKGWKVERKEGNADGKCLIDALDAILPPSRPTDKPLRLPLQDVYKIGGIGTVPVGRVETGVLKPGMVVTFAPVNLTTEVKSVEMHHEALTEAVPGDNVGFNVKNVSVKELRRGYVCGDSKSNPPKSAADFTAQVIVLNHPGQISNGYTPVLDCHTAHIACKFAEIKEKCDRRTGKTVEEAPKSIKSGDAAIITLVPSKPMCVESFQEFPPLGR

SEQ ID NO: 17396 - protein, 399 aa, Hexamita inflata
NGKSTLTGHLIYKCGGIDQRTLEDYEKKANEIGKGSFKYAWVLDQLKDERERGITINIALWKFETKKFIVTIIDAPGHRDFIKNMITGTSQADVAILVVAAGQGEFEAGISSEGQTREHATLANTLGIKTMIVAVNKMDDPQVNYSEARYTEIKTEMQKTFKQIGFKHWEEFDFVPLSGWTGDNIMEASPKTPWYKGKCLIECIDGLKAPKRPNDKPLRLPIQDVYKINGVGTVPAGRVESGELIPGMMVVFAPAGEKTEVKSVEMHHEQLAKAGPGDNVGFNIKGLSAKDIKKGYVVGDVNNDAPKGCEYFKANVIIMNHPKKINPGYTPVLDCHTSHLAWKFDKFLAKLNSRTFKVEIENPTEAVRGECVLMQIVPTKPLCVESFEQYPALGRFAVR

SEQ ID NO: 17397 - protein, 331 aa, Ostrinia nubilalis
  unsure (1)..(331): unsure at all Xaa locations
KFNNNGHLIYKCGGIDKRTIEKFEKEAQEMGKGSFKYAWVLDKLKAERERGITIDIALWKFETSKFYVTIIDAPGHRDFIKNMITGTSQADCAVLIVAAGTGEFEAGISKNGQTREHALLAFTLGVKQLIVGVNKMDSTEPPYSESRFEEIKKEVSSYIKKIGYNPAAVAFVPISGWHGDNMLEASTKMPWFKGWQIERKEGKAEGKCLIEALDAILPPARPTDKPLRLPLQDVYKIGGIGTVPVXRVETGVLKPGTIVVFAPANLTTEVKSVEMHHEALQEAVPGDNVGFNVKNVSVKELRRGFVAGDSKNNPPKGAADFTAQVIVLNHP

SEQ ID NO: 17398 - protein, 413 aa, Helicoverpa armigera
HVDSGKSTTTGHLIYKCGGIDKRTIEKFEKEAQEMGKGSFKYAWVLDKLKAERERGITIDIALWKFETAKYYVTIIDAPGHRDFIKNMITGTSQADCAVLIVAAGTGEFEAGISKNGQTREHALLAFTLGVKQLIVGVNKMDSTEPPYSESRFEEIKKEVSSYIKKIGYNPAAVAFVPISGWHGDNMLEASTKMPWFKGWNVERKEGKAEGKCLIEALDAILPPARPTDKALRLPLQDVYKIGGIGTVPVGRVETGILKPGTIVVFAPANITTEVKSVDMHHEALQEAVPGDNVGFNVKNVSVKELRRGYVAGDSKNNPPKGAADFTAQVIVLNHPGQISNGYTPVLDCHTAHIACKFSEIKEKVDRRTGKSTEDNPKSIKSGDAAIVNLVPSKPLCVESFQEFPPLGRFAVR

SEQ ID NO: 17399 - protein, 428 aa, Pyrococcus abyssi
MPKEKPHVNIVFIGHVDHGKSTTIGRLLYDTGNIPETIIKKFEEMGEKGKSFKFAWVMDRLKEERERGITIDVAHTKFETPHRYITIIDAPGHRDFVKNMITGASQADAAVLVVAATDGVMPQTKEHAFLARTLGIKHIIVTINKMDMVNYDQKVFEKVKAQVEKLLRTLGYKDFPVIPTSAWNGDNIVKKSDKMPWYNGPTLIEALDQIPEPEKPVDKPLRIPIQDVYSIKGVGTVPVGRVETGKLKVGDVVIFEPASTIFHKPIQGEVKSIEMHHEPLQEALPGDNIGFNVRGVSKNDIKRGDVAGHPDKPPTVVRTKDTFKAQIIVLNHPTAITVGYSPVLHAHTAQVPVRFEQLLAKIDPRTGNITEENPQFIKTGDSAIVVLRPMKPVVLEPVKELPQLGRFAIRDMGMTIAAGMVISIQKGE

SEQ ID NO: 17400 - protein, 403 aa, Mucor mucedo
GKSTTTGHLIYKCGGIDKRTIEKFEKEAAELGKGSFKYAWVLDKLKAERERGITIDIALWKFETPKYNVTVIDAPGHRDFIKNMITGTSQADCAILIIAGGTGEFEAGISKDGQTREHALLAFTLGVRQLIVAINKMDTTKWSEARYNEIVKEVSSFIKKIGFNPKSVPFVPISGWHGDNMLEESVNMGWFKGWNKETKAGSKTGKTLLEAIDAIDPPSRPSDKPLRLPLQDVYKIGGIGTVPVGRVETGTIKAGMVVNFAPAAVTTEVKSVEMHHETLTEGLPGDNVGFNVKNVSVKDIRRGNVCSDSKNDPAKEAGSFLAQVIILNHPGQISNGYSPVLDCHTAHIACKFSELVEKIDRRSGKKMEDAPKFVKSGDSAIVKMIPSKPMCVEAYTDYPPLGR

SEQ ID NO: 17401 - protein, 414 aa, Amylomyces rouxii
GKSTTTGHLIYKCGGIDKRTIEKFEKEAAELGKGSFKYAWVHDKLKAERERGITIDIALWKFETPKYQITVIDAPGHRDFIKNMITGTSQADCAILIIAGGTGEFEAGISKDGQTREHALLAFTLGVRQLIVAVNKMDTTKWSEARFNEIVKEVSSFIKKIGYNPKSVPFVPISGWHGDNMLDESTNMPWYKGWNKETKAGAKSGKTLLDAIDNIDPPTRPVDKPLRLPLQDVYKIGGIGTVPVGRVETGVIKAGMVVTFAPAAVTTEVKSVEMHHETLSEGLPGDNVGFNVKNVSVKDIRRGNVCSDSKNDPAKEAGSFTAQVIILNHPGQIGAGYAPVLDCHTAHIACKFAELIEKIDRRSGKSLEATPKFVKSGDSAIVKMIPSKPMCVEAYTDYPPLGRLAVRDMRQTVA

SEQ ID NO: 17402 - protein, 416 aa, Rhizomucor racemosus
DSGKSTTTGHLIYKCGGIDKRTIEKFEKEAAELGKGSFKYAWVLDKLKAERERGITIDIALWKFETPKYNVTVIDAPGHRDFIKNMITGTSQADCAILIIAGGTGEFEAGISKDGQTREHALLAFTLGVRQLIVAINKMDTTKWSQDRYNEIVKEVSGFIKKIGFNPKSVPFVPISGWHGDNMLDESTNMPWFKGWNKETKAGSKTGKTLLEAIDAIEPPVRPSDKPLRLPLQDVYKIGGIGTVPVGRVETGTIKAGMVVNFAPAAVTTEVKSVEMHHETLTEGLPGDNVGFNVKNVSVKDIRRGNVCSDSKNDPAKESASFTAQVIILNHPGQISAGYAPVLDCHTAHIACKFSELIEKIDRRSGKKMEDSPKFVKSGDSAIVKMVPSKPMCVEAYTDYPPLGRFAVRDMRQTVA

SEQ ID NO: 17403 - protein, 385 aa, Bombus hypnorum
KFEKEAQEMGKGSFKYAWVLDKLKAERERGITIDIALWKFETAKYYVTIIDAPGHRDFIKNMITGTSQADCAVLIVAAGIGEFEAGISKNGQTREHALLAFTLGVKQLIVGVNKMDMTDPPYSEARFEEIKKEVSSYIKKIGYNTASVAFVPISGWHGDNMLEPSPNTPWYKGWKVERKDGNADGKTLIEALDAILPPSRPTDKALRLPLQDVYKIGGIGTVPVGRVETGILKPGMLVTFAPAALTTEVKSVEMHHEALTEALPGDNVGFNVKNISVKELRRGYVAGDSKNQPPRGAADFTAQVIVLNHPGQISNGYTPVLDCHTAHIACKFAEIKEKCDRRTGKTTEENPKSIKSGDAAIVMLQPTKPMCVEAFQEFPPLGRFA

SEQ ID NO: 17404 - protein, 385 aa, Bombus lapidarius
KFEKEAQEMGKGSFKYAWVLDKLKAERERGITIDIALWKFETAKYYETIIDAPGHRDFIKNMITGTSQADCAVLIVAAGIGEFEAGISKNGQTREHALLAFTLGVKQLIVGVNKMDMTDPPYSEARFEEIKKEVSSYIKKIGYNTASVAFVPISGWHGDNMLEPSPNTPWYKGWKVERKDGNADGKTLIEALDAILPPSRPTDKALRLPLQDVYKIGGIGTVPVGRVETGILKPGMLVTFAPAALTTEVKSVEMHHEALTEALPGDNVGFNVKNISVKELRRGYVAGDSKNQPPRGAADFTAQVIVLNHPGQISNGYTPVLDCHTAHIACKFAEIKEKCDRRTGKTTEENPKSIKSGDAAIVMLQPTKPMCVEAFQEFPPLGRFA

SEQ ID NO: 17405 - protein, 385 aa, Bombus lucorum
KFEKEAQEMGKGSFKYAWVLDKLKAERERGITIDIALWKFETAKYYVTIIDAPGHRDFIKNMITGTSQADCAVLIVAAGIGEFEAGISKNGQTREHALLAFTLGVKQLIVGVNKMDMTDPPYSEARFEEIKKEVSSYIKKIGYNTASVAFVPISGWHGDNMLEPSPNTPWYKGWKVERKDSNADGKTLIEALDAILPPSRPTDKALRLPLQDVYKIGGIGTVPVGRVETGILKPGMLVTFAPAALTTEVKSVEMHHEALTEALPGDNVGFNVKNISVKELRRGYVAGDSKNQPPRGAADFTAQVIVLNHPGQISNGYTPVLDCHTAHIACKFAEIKEKCDRRTGKTTEENPKSIKSGDAAIVMLQPTKPMCVEAFQEFPPLGRFA

SEQ ID NO: 17406 - protein, 385 aa, Bombus bohemicus
KFEKEAQEMGKGSFKYAWVLDKLKAERERGITIDIALWKFETAKYYVTIIDAPGHRDFIKNMITGTSQADCAVLIVAAGIGEFEAGISKNGQTREHALLAFTLGVKQLIVGVNKMDMTDPPYSEARFEEIKKEVSSYIKKIGYNTASVAFVPISGWHGDNMLEPSPNTPWYKGWKVERKDGNADGKTLIEALDAILPPSRPTDKALRLPLQDVYKIGGIGTVPVGRVETGILKPGMLVTFAPAALTTEVKSVEMHHEALTEALPGDNVGFNVKNISVKELRRGYVAGDSKNQPPRGAADFTAQVIVLNHPGQISNGYTPVLDCHTAHIACKFAEIKEKCDRRTGKTTEENPKSIKSGDAAIVMLQPTKAMCVEAFQEFPPLGRFA

SEQ ID NO: 17407 - protein, 445 aa, Euglena gracilis
MGKEKVHISLVVIGHVDSGKSTTTGHLIYKCGGIDKRTIEKFEKEASEMGKGSFKYAWVLDKLKAERERCITIDIALWKFETAKSVFTIIDAPGHRDFIKNMITGTSQADAAVLVIDSTTGGFEAGISKDGQTREHALLAYTLGVKQMIVATNKFDDKTVKYSQARYEEIKKEVSGYLKKVGYNPEKVPFIPISGWNGDNMIEASENMGWYKGLTLIGALDNLEPPKRPSDKPLRLPLQDVYKIGGIGTVPVGRVETGVLKPGDVVTFAPNNLTTEVKSVEMHHEALTEAVPGDNVGFNVKNVSVKDIRRGYVASNAKNDPAKEAADFTAQVIILNHPGQIGNGYAPVLDCHTCHIACKFATIQTKIDRRSGKELEAEPKFIKSGDAAIVLMKPQKPMCVESFTDYPPLGVSCGDMRQTVAVGVIKSVNKKENTGKVTKAAQKKK

SEQ ID NO: 17408 - protein, 415 aa, Beroe cucumis
HLIYKCGGVDERTIEKFKKEAQEMGKGSFCYAWVLDKLKSERERGITIDIALMKFETDKYDVTIIDAPGHRDFIKNMITGTSQADAAVMIVAAGTGEFEAGYAKNGQTREHLLLAFTLGVKEVIIAINKMDTTTPPYSEDRYKEIKGEVSNYLKKIGYKVAKIPFMPISGFHGDNMVHWDPNSGEPQPPNNMKWFTGEVVGDDKKKSKALKTLTDCLDNVAEPTRPTDKPLRLPLQDVYKGIGTVPVGRVETGIIKPAMVVTFGPIGLTTEVKSVEMHHESLPEAVPGDNVGFNVKNVAVKEIKRGFVASDSKNDPCKETQSFEAQVIIMNHPGKISAGYTPVLDCHTAHIACKFTDLNAKMDKRSGKVLEENPKDIKTGDASMCILKPSKPMVVETFKEYAPLGRFAVRDMRQT

SEQ ID NO: 17409 - protein, 401 aa, Ephydatia fluviatilis
LIYKCGGIDKRTIEKYEKEAQDMGKGSFKYAWVMDKLKAERERGITIDLALWKFETTKFYVTVIDAPGHRDFIKNMITGTSQADCALLIVAASTGEFEAGISKNGQTREHALLAYTLGVKQLIVGVNKIDNTEPPYSEARFTEITKEVSDYIKKIGYNPKSVPFLPISGWNGDNMLERSTNLPWYKGFQIERKEGNASGYTLFDALDCIVPPARPTDKPLRLPLQDVQIGGIGTVPVGRVETGILKPGMIVTIAPAGITTEVKSVEMHHEALTEALPGDNVGFNVKNLAVKDLKRGFVAGDSKNDPPKEAKSFNAQVIIINHPGEIHAGYSPVLDCHTAHIACKFAELIEKCDRRSGKKLEDAPKSVKTGDAAIVTLIPSKPMCVESFSDFPPLGRFAVRD

SEQ ID NO: 17410 - protein, 444 aa, Picea abies
EKTHINIVVIGHVDSGKSTTTGHLIYKLGGIDKRVIERFEKEAAEMNKRSFKYAWVLDKHKAERERGITIDIALWKFETNKYYCTVIDAPGHRDFIKNMITGTSQADCAVLIIDSTTGGFEAGISKDGQTREHALLAFTLGVKQMICCCNKMDATTPKYSKARYDEIVKEVSSYLKRVGYNPDKIPFVPISGFEGDNMIERSTNLDWYKGPTLLEALDQVSEPKRPTDKPLRLPLQDVYKIGGIGTVPVGRVETGIIKPGTIVTFGPTGLTTEVKSVEMHHEALQEAYPGDNVGFNVKNVAVKDLKRGYVASDSKNDPAKEAANFTAQVIIMNHPGQIGNGYAPVLDCHTCHIAVKFSEIMTKVDRRSGKELEKEPKFLKNGDAGFVKMIPTKPMVVETFAEYPPLGRFAVRDMRQTVAVGVIKAVEKKDPTGAKVTKAAAKKK

SEQ ID NO: 17411 - protein, 406 aa, Spathidium sp.
VDSGKSTSTGHLIYKCGGIDERTIEKFEKEAKQIGKESFKYAWVLDKLKAERERGITIDIALWKFESQKYSFTIIDAPGHRDFIKNMITGTSQADVAILVISAGHGEFEAGIGKDGQTREHALLAYTMGIKQVIVAINKMDAISYNEERFTDIKKEVIDYLKKLGFQEKNVNVVAYSGFVGDNLIERSDKMPWYKGDTILEALDKVEPPVRPVEKPLRLPLQDVYKITGVGTVPVGRVETGVIKPGTLVTFAPVNITTECKTVEMHHQQLEEAIPGDNVGFNVKNISIKDIRRGNVVGDSKQDPPKEAVSFNAQVIVLNHPNKIQAGYCPVLDCHTSHIACKFEKSLIKIDRRSGKEIESEPKEIKNQEAAIVLMVPQKSMVCETFAEYPPLGRFAVRDMKQTVAV

SEQ ID NO: 17412 - protein, 406 aa, Spathidium sp.
VDSGKSTSTGHLIYKCGGIDERTIEKFEKEAKQIGKESFKYAGLLDILKAERARGITIDIALWKFESQKYSFTIIDAPGHRDFIKNMITGTSQADVAILVISAGQGEFEAGIGKDGQTREHALLAYTMGIKQVVVAINKMDAVQYNEERFTDIKKEVIDYLKKMGSKKKMLMSLPISGFMGDNLIEKSDKMPWYKGDTILEALDRVERPKRPVAKPLRLPLQDVYKITGVGTVPVGRVETGVIKPGTLVTFAPVNITTECKTVEMHHQQLEEAIPGDNVGFNVKNISIKDIRRGNVVGDSKNDPPKEAVSFNAQVIVLNHPNKIQAGYCPVLDCHTSHIACKFEKLLIKIDRRSGKEIESEPKEIKNQEAAIVQMVPQKIMVCETFAGYPPLGRFAVRDMKQTVAV

SEQ ID NO: 17413 - protein, 426 aa, Parasitella parasitica
VVVIGHVDSGKSTTTGHLIYKCGGIDKRTIEKFEKEAAELGKGSFKYAWVLDKLKAERERGITIDIALWKFETPKFMVTVIDAPGHRDFIKNMITGTSQADCAILIIAGGTGEFEAGISKDGQTREHALLAFTLGVRQLIVAINKMDTTKWSENRYTEIVKEVSNFIKKIGFNPKAVPFVPISGWHGDNMLDESKNMPWFKGWNKETKAGAKTGKTLLEAIDAIEPPVRPSDKPLRLPLQDVYKIGGIGTVPVGRVETGVIKAGMVVNFAPANVTTEVKSVEMHHETIPEGLPGDNVGFNVKNVSVKDIRRGNVCSDTKNDPAKESGSFTAQVIILNHPGQISAGYAPVLDCHTAHIACKFDELIEKIDRRSGKKMEDSPKFVKSGDSAIVKMIPSKPMCVEAYTDYPPLGRFAVRDMRQTVAVGV

SEQ ID NO: 17414 - protein, 376 aa, Paralvinella hessleri
QEMGKGSFKYAWVLDKLKAERERGITIDIALWKFETKNYYVTVIDAPGHRDFIKNMITGTSQADCAVLIVAAGVGEFEAGISKNGQTREHALLAFTLGVKQLVVGVNKMDSTEPPYSESRYFEIKKEVSAYIKKIGYNPDTVPFVPISGWHGDNMIEASSNMPWFKNWEVKKAKDKKTVTGTTLLEALDAIDAPSRPTDKPLRLPLQDVYKIGGIGTVPVGRVETGVLKPGMVVTFAPVNITTEVKSVEMHHNALEKAEPGDNVGFNVKNVSVKDIRRGNVCGDSKNDPPKAIEKFKAQVIILNHPGQIQAGYAPVVDCHTAHIACKKAELLKKIDRRSGKELEDNPPHVKSGDAAIVEMVPSKPMCCEAFADYPP

SEQ ID NO: 17415 - protein, 374 aa, Sternaspis scutata
QEMGKGSFKYAWVLDKLKAERERGITIDIALWKFETNKYYITIIDAPGHRDFIKNMITGTSQADCAVLIVAAGVGEFESGISKNGQTREHALLAYTLGVKQMIIGVNKMDNTEPPYSEDRFKEIKKEVSAYIKKIGYNPDTVPFVPISGWVGDNMLENSSNMTWFKTWSKKSKSKEVTGQTLFDALDSVDPPARPTDKPLRLPLQDVYKIGGIGTVPVGRVETGTLKPGMVVTFAPVNLTTEVKSVEMHHQALEAAEPGDNVGFNVKNVSVKDIRRGYVAGDSKNDAPKEAQEFKAQVIILNHPGQINAGYAPVLDCHTAHIACKFRELVEKIDRRSGKSLETSPSSIKSGEAAIVNMVPQKPMCVETFNEYAP

SEQ ID NO: 17416 - protein, 804 aa, Arabidopsis thaliana
MSGVWVFNNGVIRLVENPNQSGGVSTQSHGRRNVLVYLPTGEAVSSYSSLEQILRSLGWERYFSGDSDLIQYHKRSSIDLISLPRDFSKFNSVYMYDIVVKNPNSFHKQTMPRKGLSNFDDYDDGFDDDDDAFDYDYDVDIDEHEEEAAAEPKEEIAKTQGLWRCAICTYDNVETMFVCDICGVLRHPVAGNQSINKNTAVRVVSLFAIVVLQRRYSDSSFSTYVAPFKFDAPSPDDLVSNGLTSSKTGPKGSGDASMRQKEKQDSVEQKPLKKGGDSSETSSRGRHDKLDDKGGAGGIKSGKSLPKAKADMSNETSSSSKYMETSESLTGTMNKMSLIGETENSSDIKIRGPKSQSKHKPEEWMLLDKESDALSQLNLAIVGHVDSGKSTLSGRLLHLLGRISQKQMHKYEKEAKLQGKGSFAYAWALDESAEERERGITMTVAVAYFNSKRHHVVLLDSPGHKDFVPNMIAGATQADAAILVIDASVGAFEAGFDNLKGQTREHARVLRGFGVEQVIVAINKMDIVGYSKERFDLIKQHVGSFLQSCRFKDSSLTWIPLSAMENQNLVAAPSDNRLSSWYQGPCLLDAVDSVKSPDRDVSKPLLMPICDAVRSTSQGQVSACGKLEAGAVRPGSKVMVMPSGDQGTIRSLERDSQACTIARAGDNVALALQGIDANQVMAGDVLCHPDFPVSVATHLELMVLVLEGATPILLGSQLEFHVHHAKEAATVVKLVAMLDPKTGQPTKKSPRCLTAKQSAMLEVSLQNPVCVETFSESRALGRVFLRSSGRTVAMGKVTRIIQDS

SEQ ID NO: 17417 - protein, 413 aa, Simulium sirbanum
HVHSGKSTTTGHLIYKCGGIDKRTIEKFEKEAQEMGKGSFKYAWVLDKLKAERERGITIDIALWKFETAKYYVTIIDAPGHRDFIKNMITGTSQADCAVLIVAAGTGEFEAGISKNGQTREHALLAFTLGVKQLIVGVNKMDSTEPPFSESRFEEIKKEVSSYIKKIGYNPAAVAFVPISGWHGDNMLEVSSKMPWYKGWKVERKEGNVDGKCLIEALDAILPPSRPTDKALRLPLQDVYKIGGIGTVPVGRVETGVIKPGMVVVFAPVNLTTEVKSVEMHHEALQEAGPGDNVGFNVKNVSVKELRRGYVAGDSKSNPPKGAENFTAQVIVLNHPGQISNGYTPVLDCHTAHIACKFSEIKEKVDRRSGKSTEDNPKAIKSGDAAIVILVPSKPLCVESFSEFPPLGRFAVR

SEQ ID NO: 17418 - protein, 447 aa, Malus x domestica
MGKEKFHINIVVIGHVDSGKSTTTGHLIYKLGGIDKRVIERFEKEAAEMNKRSFKYAWVLDKLKAERERGITIDIALWKFETTKYYCTVIDAPGHRDFIKNMITGTSQADCAILIIDSTTGGFEAGISKDGQTREHALLAFTLGVRQMICCCNKMDATTPKYSRARYDEIVKEVSSYLKKVGYNPDKIPFVPISGFEGDNMIERSTNLDWYKGPTLLEALDQINEPKRPSDKPLRLPLQDVYKIGGIGTVPVGRVETGVIKPGMVVTFGPTGLTTEVKSVEMHHEAMQEALPGDNVGFNVKNVAVKDLKRGYVASNSKDDPAKEAANFIAQVIIMNHPGQIGQGYAPVLDCHTSHIAVKFAELVTKIDRRSGKELEKEPKFLKNGDAGFVKMLPTKPMVVETFSEYPPLGRFAVRDMRQTVAVGVIKSVEKKDPTGAKITKAAAKKK

SEQ ID NO: 17419 - protein, 413 aa, Actias selene
HVDSGKSTTTGHLIYKCGGIDKRTIEKFEKEAQEMGKGSFKYAWVLDKLKAERERGITIDIALWKFETSRYYVTIIDAPGHRDFIKNMITGTSQADCAVLIVAAGTGEFEAGISKNGQTREHALLAFTLGVKQLIVGVNKMDSTEPPYSESRFEEIKKEVSSYIKKIGYNPAAVAFVPISGWHGDNMLEPSTKMPWFKGWLVERKEGKAEGKCLIEALDAILPPARPTDKALRLPLQDVYKIGGIGTVPVGRVETGILKPGTIVVFAPANITTEVKSVEMHHEALQEAVPGDNVGFNVKNVSVKELRRGYVAGDSKNNPPKGAADFTAQVIVLNHPGQISNGYTPVLDCHTAHIACKFAEIKEKVDRRTGKSTEDNPKSIKSGDAAIVNLVPSKPLCVESFQEFPPLGRFAVR

SEQ ID NO: 17420 - protein, 413 aa, Saturnia japonica
  unsure (1)..(413): unsure at all Xaa locations
HVDSGKSTTTGHLIYKCGGIDKRTIEKFEKEAQEMGKGSFKYAWVLDKLKAERERGITIDIALWKFETSRYYVTIIDAPGHRDFIKNMITGTSQADCAVLIVAAGTGEFEAGISKNGQTREHALLAFTLGVKQLIVGVNKMDSTEPPYSEPRFEEIKKEVSSYIKKIGYNPAAVAFVPISGWHGDNMLEPSTKMPWFXGWLVERKEGKAEGKCLIEALDAILPPARPTDKALRLPLQDVYKIGGIGTVPVGRVETGILKPGTIVVFAPANITTEVKSVEMHHEALQEAVPGDNVGFNVKNVSVKELRRGYVAGDSKNNPPKGAADFTAQVIVLNHPGQISNGYTPVLDCHTAHIACKFAEIKEKVDRRTGKSTEDNPKSIKSGDAAIVNLVPSKPLCVESFQEFPPLGRFAVR

SEQ ID NO: 17421 - protein, 413 aa, Rhodinia fugax
HVDSGKSTTTGHLIYKCGGIDKRTIEKFEKEAQEMGKGSFKYAWVLDKLKAERERGITIDIALWKFETAKYYVTIIDAPGHRDFIKNMITGTSQADCAVLIVAAGTGEFEAGISKNGQTREHALLAFTLGVKQLIVGVNKMDSTEPPYSEPRFEEIKKEVSSYIKKIGYNPAAVAFVPISGWHGDNMLEPSTKMPWFKGWMVERKEGKAEGKCLIEALDAILPPARPTDKALRLPLQDVYKIGGIGTVPVGRVETGILKPGTIVVFAPANITTEVKSVEMHHEALQEAVPGDNVGFNVKNVSVKELRRGYVAGDSKNNPPKGAADFTAQVIVLNHPGQISNGYTPVLDCHTAHIACKFAEIKEKVDRRTGKSTEDNPKSIKSGDAAIVVLVPSKPLCVESFQEFPPLGRFAVR

SEQ ID NO: 17422 - protein, 413 aa, Heliothis subflexa
HVDSGKSTTTGHLIYKCGGIDKRTIEKFEKEAQEMGKGSFKYAWVLDKLKAERERGITIDIALWKFETAKYYVTIIDGPGHRDFIKNMITGTSQADCAVLIVAAGTGEFEAGISKNGQTREHALLAFTLGVKQLIVGVNKMDSTEPPYSESRFEEIKKEVSSYIKKIGYNPAAVAFVPISGWHGDNMLEASTKMPWFKGWNVERKEGKAEGKCLIEALDAILPPARPTDKALRLPLQDVYKIGGIGTVPVGRVETGILKPGTIVVFAPANITTEVKSVEMHHEALQEAVPGDNVGFNVKNVSVKELRRGYVAGDSKNNPPKGAADFTAQVIVLNHPGQISNGYTPVLDCHTAHIACKFAEIKEKVDRRTGKSTEDNPKSIKSGDAAIVNLVPSKPLCVESFQEFPPLGRFAVR

SEQ ID NO: 17423 - protein, 413 aa, Basilodes chrysopis
HVDSGKSTTTGHLIYKCGGIDKRTIEKFEKEAQEMGKGSFKYAWVLDKLKAERERGITIDIALWKFETAKYYVTIIDAPGHRDFIKNMITGTSQADCAVLIVAAGTGEFEAGISKNGQTREHALLAFTLGVKQLIVGVNKMDSTEPPYSESRFEEIKKEVSSYIKKIGYNPAAVAFVPISGWHGDNMLEPSTKMPWFKGWMVERKEGKAEGKCLIEALDAILPPARPTDKPLRLPLQDVYKIGGIGTVPVGRVETGVLKPGTIVVFAPANITTEVKSVEMHHEALQEAVPGDNVGFNVKNVSVKELRRGYVAGDSKNNPPKGAADFTAQVIVLNHPGQISNGYTPVLDCHTAHIACKFAEIKEKVDRRTGKSTEDNPKSIKSGDAAIVNLVPSKPLCVESFQEFPPLGRFAVR

SEQ ID NO: 17424 - protein, 413 aa, Eutricopis nexilis
HVDSGKSTTTGHLIYKCGGIDKRTIEKFEKEAQEMGKGSFKYAWVLDKLKAERERGITIDIALWKFETAKYYVTIIDAPGHRDFIKNMITGTSQADCAVLIVAAGTGEFEAGISKNGQTREHALLAFTLGVKQLIVGVNKMDSTEPPYSESRFEEIKKEVSSYIKKIGYNPAAVAFVPISGWHGDNMLEASTKMPWFKGWAVERKEGKAEGKCLIEALDAILPPARPTDKALRLPLQDVYKIGGIGTVPVGRVETGILKPGTIVVFAPANITTEVKSVEMHHEALQEAVPGDNVGFNVNNVSVKELRRGYVAGDSKNNPPKGAADFTAQVIVLNHPGQISNGYTPVLDCHTAHIACKFAEIKEKVDRRTGKSTEENPKSIKSGDAAIVNLVPSKPLCVESFQEFPPLGRFAVR

SEQ ID NO: 17425 - protein, 413 aa, Heliothodes diminutivus
HVDSGKSTTTGHLIYKCGGIDKRTIEKFEKEAQEMGKGSFKYAWVLDKLKAERERGITIDIALWKFETAKYYVTIIDAPGHRDFIKNMITGTSQADCAVLIVAAGTGEFEAGISKNGQTREHALLAFTLGVKQLIVGVNKMDSTEPPYSESRFEEIKKEVSSYIKKIGYNPAAVAFVPISGWHGDNMLEPSTKMPWFKGWAVERKEGKAEGKCLIEALDAILPPARPTDRALRLPLQDVYKIGGIGTVPVGRVETGILKPGTIVVFAPANITTEVKSVEMHHEALQEALPGDNVGFNVKNVSVKELRRGYVAGDSKNNPPKGAADFTAQVIVLNHPGQISNGYTPVLDCHTAHIACKFAEIKEKVDRRTGKSTEENPKSIKSGDAAIVNLVPSKPLCVESFQEFPPLGRFAVR

SEQ ID NO: 17426 - protein, 413 aa, Heliolonche pictipennis
HVDSGKSTTTGHLIYKCGGIDKRTIEKFEKEAQEMGKGSFKYAWVLDKLKAERERGITIDIALWKFETAKYYVTIIDAPGHRDFIKNMITGTSQADCAVLIVAAGTGEFEAGISKNGQTREHALLAFTLGVKQLIVGVNKMDSTEPPYSESRFEEIKKEVSSYIKKIGYNPAAVAFVPISGWHGDNMLEASTKMPWFKGWNVERKEGKAEGKCLIEALDAILPPARPTDKALRLPLQDVYKIGGIGTVPVGRVETGILKPGTIVVFAPANITTEVKSVEMHHEALQEAVPGDNVGFNVKNVSVKELRRGYVAGDSKNNPPKGAADFTAQVIVLNHPGSISNGYTPVLDCHTAHIACKFAEIKEKVDRRTGKSTEDNPKSIKSGDAAIVNLVPSKPLCVESFQEFPPLGRFAVR

SEQ ID NO: 17427 - protein, 413 aa, Pyrrhia exprimens
HVDSGKSTTTGHLIYKCGGIDKRTIEKFEKEAQEMGKGSFKYAWVLDKLKAERERGITIDIALWKFETAKYYVTIIDAPGHRDFIKNMITGTSQADCAVLIVAAGTGEFEAGISKNGQTREHALLAFTLGVKQLIVGVNKMDSTEPPYSESRFEEIKKEVSSYIKKIGYNPAAVAFVPISGWHGDNMLEASTKMPWFKGWAVERKEGKAEGKCLIEALDAILPPARPTDKALRLPLQDVYKIGGIGTVPVGRVETGILKPGTIVVFAPANITTEVKSVEMHHEALQEAVPGDNVGFNVKNVSVKELRRGYVAGDSKNNPPKGAADFTAQVIVLNHPGQISNGYTPVLDCHTAHIACKFAEIKEKVDRRTGKSTEDNPKSIKSGDAAIVNLVPSKPLCVESFQEFPPLGRFAVR

SEQ ID NO: 17428 - protein, 413 aa, Schinia arcigera
HVDSGKSTTTGHLIYKWGGIDKRTMEKFEKEAQEMGKGSFKYAWVLDKLKAERERGITIDIALWKFETAKYYVTIIDAPGHRDFIKNMITGTSQADCAVLIVAAGTGEFEAGISKNGQTREHALLAFTLGVKQLIVGVNKMDSTEPPYSESRFEEIKKEVSSYIKKIGYNPAAVAFVPISGWHGDNMLEASTKMPWFKGWNVERKEGKAEGKCLIEALDAILPPARPTDKALRLPLQDVYKIGGIGTVPVGRVETGILKPGTIVVFAPANITTEVKSVEMHHEALQEAVPGDNVGFNVKNVSVKELRRGYVAGDSKNNPPKGAADFTAQVIVLNHPGSISNGYTPVLDCHTAHIACKFAEIKEKVDRRTGKSTEDNPKSIKSGDAAIVNLVPSKPLCVESFQEFPPLGRFAVR

SEQ ID NO: 17429 - protein, 423 aa, Glycine max
  unsure (1)..(423): unsure at all Xaa locations
XVDSGKSTLSGRLLHLLGRISQKEMHKYEKEAKLQGKGSFAYAWALDESXXXXXXXXXMTVAVAYFDTKRYHVVVLDSPGHKDFVPNMISGATQADAAILVIDASLGSFEAGMDGSKGQTREHAQLIRSFGVDRVIVAVNKMDAVVYSKDRFDFIRQQLGVFLHSCGFKDSSLSWIPMSAMENQNLVASPSDALLKNWYGGPYLLDAIDSLQPPTREFSKPLLMPVCDVIKSTTLGQVSASGKLEAGALRSGSKVLVMPSAVVGTVRSLERDSNACTVARAGDNVALMLQGVXDGNHVMAGDVLCHPDFPVAVAKHLELKVLVLDGASPILVGTQLEFHIHHAKEPGRVSRILSVLDPKTGKVTKKSPRCLTAKQSAVIEVILNETVCVVEFSSCKALGRVSLRSMGRTIAVGVVTRIIEEQG

SEQ ID NO: 17430 - protein, 447 aa, Pisum sativum
MGKEKVHINIVVIGHVDSGKSTTTVHVIYKLGGIDKRVIERFEKEADEMNKRSFKYAWLLDKLKAERERGITIDIALLKFETTKYYSTVMDAPGHRDFIKNMITGTSQADCAVLIIDSTTGGFEAGISKDGQTREHALLAFTLGVKQMICCCNKMDATTPKYSKGRYEEIVKEVSSYLKEVGYNPDKIPFVPISGFEGDNMIERSTNLDWYKGPTLLDALDNINEPKRPSDKPLRLPLQDVYKIGGIGTVPVGRVETGVVKPGMLVTFAPTGLTTEVKSVEMHHEALTEALPGDNVRFNVKNVAVKDLKHGLVASNSKDDPAKDAANFTSQVIIMNHPGQIGNGYAPVLDCHTSHIAVKFAELITKIDRRSGKEIEKEPKFLKNGDAGMVKMIPTKPMVVETFAEYPPLGRFAVRDMRQTVAVGVIKSVEKKDPTGAKVTKAAAKKK

SEQ ID NO: 17431 - protein, 413 aa, Hyphantria cunea
HVDSGKSTTTGHLIYKCGGIDKRTIEKFEKEAQEMGKGSFKYAWVLDKLKAERERGITIDIALWKFETSKYYVTIIDAPGHRDFIKNMITGTSQADCPVLIVAAGTGEFEAGISKNGQTREHALLAFTLGVKQLIVGVNKMDSTEPPYSESRFEEIKKEVSSYIKKIGYNPAAVAFVPISGWHGDNMLEPSTKMPWFKGWQVERKEGKADGKCLIEALDAILPPARPTDKALRLPLQDVYKIGGIGTVPVGRVETGILKPGTIVVFAPANITTEVKSVEMHHEALQEAVPGDNVGFNVKNVSVKDLRRGYVAGDSKNNPPKGAADFTAQVIVLNHPGQISNGYTPVLDCHTAHIACKFAEIKEKVDRRTGKSTEDNPKSIKSGDAAIVNLVPSKPLCVESFQEFPPLGRFAVR

SEQ ID NO: 17432 - protein, 275 aa, Spironucleus muris
NGKSTLTGHLIFKCGGIDKRTIEEYEKKAAEIGKGSFKYAWVLDQLKDERERGITINIALWKFETKNYIVTIIDAPGHRDFIKNMITGTAQADVAILVIAAGQGEFEAGISKDGTAREHATLANTLGIRTIICAINKMDSIKYDQKRYTEIMEEMKKLLKSIGYGKKAEEFHYIPVSGWIGDNIMEKSENMPWYTGKCLIEAIDELKPPKRPTDKPLRLPLQDVYKISGIGTVPAGRVESGVLKPGQIVVFAPSDESGEVKSVEMHHESLPQAVP

SEQ ID NO: 17433 - protein, 449 aa, Manihot esculenta
MGKEKVHINIVVIGHVDSGKSTTTGHLIYKLGGIDKRVIERFEKEAAEMNKRSFKYAWVLDKLKAERERGITIDIALWKFETTKYYCTVIDAPGHRDFIKNMITGTSQADCAVLIIDSTTGGFEAGISKDGQTREHALLAFTLGVKQMICCCNKMDATTPKYSKARYDEIVKEVSSYLKKVGYNPDKIPFVPISGFEGDNMIERSTNLDWYKGPTLLEALDQIQEPKRPSDKPLRLPLQDVYKIGGIGTVPVGRVETGILKPGMVVTFGPTGLTTEVKSVEMHHEALQEALPGDNVGFNVKNVAVKDLKRGIVASNSKDDPAKEAANFTSQVIIMNHPGQIGNGYAPVLDCHTSHIAVKFAEILTKIDRRSGKELEKEPKFLKNGDAGFVKMIPTKPMVVETFSAYPPLGRFAVRDMRQTVAVGVIKSVEKKDPSGAKVTKSAAKKGGK

SEQ ID NO: 17434 - protein, 826 aa, Oryza sativa (japonica cultivar-group); identical to SEQ ID NO: 500

SEQ ID NO: 17435 - protein, 331 aa, Hylephila phyleus
KSTTTGHLIYKCGGIDKRTIEKFEKEAQEMGKGSFKYAWVLDKLKAERERGITIDIALWKFETSKYYVTIIDAPGHRDFIKNMITGTSQADCAVLIVAAGTGEFEAGISKNGQTREHALLAFTLGVKQLIVGVNKMDSTEPPYSESRFEEIKKEVSSYIKKIGYNPAAVAFVPISGWHGDNMLEPSTKMPWFKGWNVERKEGKAEGKCLIEALDAILPPARPTDKALRLPLQDVYKIGGIGTVPVGRVETGILKPGTIVVFAPANITTEVKSVEMHHEALQEAVPGDNVGFNVKNVSVKELRRGYVAGDSKNNPPKGAADFTAQVIVLNHP

SEQ ID NO: 17436 - protein, 448 aa, Lycopersicon esculentum
MGKEKIHISIVVIGHVDSGKSTTTGHLIYKLGGIDKRVIERFEKEAAEMNKRSFKYAWVLDKLKAERERGITIDIALWKFETTKYYCTVIDAPGHRDFIKNMITGTSQADCAVLIIDSTTGGFEAGISKDGQTREHALLAFTLGVKQMICCCNKMDATTPKYSKARYDEIVKEVSSYLKKVGYNPDKIPFVPISGFEGDNMIERSTNLDWYKGPTLLEALDQINEPKRPSDKPLRLPLQDVYKIGGIGTVPVGRVETGVIKPGMVVTFGPTGLTTEVKSVEMHHEALQEALPGDNVGFNVKNVAVKDLKRGYVASNSKDDPAKGAASFTAQVIIMNHPGQIGNGYAPVLDCHTSHIAVKFAEILTKIDRRSGKELEKEPKFLKNGDAGMVKMIPTKPMVVETFAEYPPLGRFAVRDMRQTVAVGVVKNVDKKDPTGAKVTKAAQKKGK

SEQ ID NO: 17437 - protein, 366 aa, Macronema zebratum
QEMGKGSFKYAWVLDKLKAERERGITIDIALWKFETSKYYVTIIDAPGHRDFIKNMITGTSQADCAVLIVAAGTGEFEAGISKNGQTREHALLAFTLGVKQLIVGVNKMDSTEPNYSESRFEEIKKEVSSYIKKIGYNPAAVAFVPISGWHGDNMLEPSSKMPWFKGWQVERKEGKAEGKCLIEALDAILPPARPTDKPLRLPLQDVYKIGGIGTVPVGRVETGVLKPGTIVVFAPANLTTEVKSVEMHHEALQEAVPGDNVGFNVKNVSVKELRRGYVAGDSKSNPPKGASDFNAQVIVLNHPGQISNGYTPVLDCHTAHIACKFAEIQQKVDRRTGKSTEDNPKSIKSGDAAIVNLVPSKPMCV

SEQ ID NO: 17438 - protein, 363 aa, Apterobittacus apterus
ERERGITIDIALWKFETAKYYVTIIDAPGHRDFIKNMITGTSQADCAVLIVAAGTGEFEAGISKNGQTREHALLAFTLGVKQLIVGVNKMDSTEPPYSESRFEEIKKEVSSYIKKIGYNPAAVPFVPISGWHGDNMLEVSSKMGWFKGWAVERKEGKADGKCLIEALDAILPPARPTDKALRLPLQDVYKIGGIGTVPVGRVETGVLKPGTVVVFAPANITTEVKSVEMHHEALQEAVPGDNVGFNVKNVSVKELRRGYVAGDTKVNPPKGAADFTAQVIVLNHPGQISNGYTPVLDCHTAHIACKFAEIKEKVDRRTGKSTEDNPKAIKSGDAAIVNLVPSKPMCVESFQEFPPLGRFAVRD

SEQ ID NO: 17439 - protein, 448 aa, Solanum tuberosum
MGKEKIHISIVVIGHVDSGKSTTTGHLIYKLGGIDKRVIERFEKEAAEMNKRSFKYAWVLDKLKAERERGITIDIALWKFETTKYYCTVIDAPGHRDFIKNMITGTSQADCAVLIIDSTTGGFEAGISKDGQTREHALLAFTLGVKQMICCCNKMDATTPKYSKARYDEIVKEVSSYLKKVGYNPDKIPFVPISGFEGDNMIERSTNLDWYKGPTLLDALDQINEPKRPSDKPLRLPLQDVYKIGGIGTVPVGRVETGVIKPGMVVTFGPTGLTTEVKSVEMHHEALQEALPGDNVGFNVKNVAVKDLKRGFVASNSKDDPAKGAASFTAQVIIMNHPGQIGNGYAPVLDCHTSHIAVKFAEILTKIDRRSGKELEKEPKFLKNGDAGMVKMIPTKPMVVETFAEYPPLGRFAVRDMRQTVAVGVVKNVDKKDPTGAKVTKAAQKKGK

SEQ ID NO: 17440 - protein, 447 aa, Solanum tuberosum
MGKKKIHISIVVIGHFNSGNSTTTGHLIYNLGGIDNLFIERFEKEPAEINKRSFNYAWVLDKLKAELERGITIDIALWNFETTNYYCTVIDAPGHRDFIKNIITGTSQADCAVLIIDSTTGGFKPGISKNGQTREHPLLAFTLGVNQIICCCNKMDATTPKYSKARYDEIVKEISSYLKKVGYNPDKIPFVPISGFEGDNMIERSTNLDWYKGPTLLDALDQINEPKRPTDKPLRLPLQDVYKIGGIGTVPVGRVETGVIKPGMVVTFGPTGLTTEVKSVEMHHEALLEALPGDNVGFNVKNVAVKDLKRGFVASNSKDDPAKGAASFTAQVIIMNHPGQIGNGYAPVLDCHTSHIAVKFAEILTKIDRRSGKELEKEPKFLKNGDAGMVKMIPTKPMVVETFSEYPPLGRFAVRDMRQTVAVGVIKSVDKKDPSGAKVTKAAQKKK

SEQ ID NO: 17441 - protein, 426 aa, Umbelopsis ramanniana
VVVIGHVDSGKSTTTGHLIYKCGGIDKRTIEKSEKEAAELGKGSFKYAWVLDKLKAERERGITIDIALWKFETPKYHVTVIDAPGHRDFIKNMITGTSQADCGVLIIAAGTGEFEAGISKDGQTREHALLAFTLGVRQLIVAINKMDTTKWSGDRYDEIVKEVSSFIKKIGFNPKSVPFVPISGWHGDNMLEESTNMPWFKGWTKETKAGSKSGKTLLEAIDAIDPPTRPTDKPLRLPLQDVYKIGGIGTVPVGRVETGIIKAGMVVTFAPTMVSTEVKSVEMHHEQLVEGVPGDNVGFNVKNVSVKDIRRGNVCSDSKNDPAKEAGSFTAQVIVLNHPGQIGAGYAPVLDCHTAHIACKFAELVEKIDRRSGKKLEDNPKFVKSGDSAIVKMVPSKPMCVEAYTDYPPLGRFAVRDMRQTVAVGV

SEQ ID NO: 17442 - protein, 331 aa, Apodemia mormo
KSTTTGHLIYKCGGIDKRTIEKFEKEAQEMGKGSFKYAWVLDKLKAERERGITIDIALWKFETAKYYVTIIDAPGHRDFIKNMITGTSQADCAVLIVAAGTGEFEAGISKNGQTREHALLAFTLGVKQLIVGVNKMDSTEPPYSEPRFEEIKKEVSSYIKKIGYNPAAVAFVPISGWHGDNMLEPSTKMPWFKGWQVERKEGKAEGKCLIEALDAILPPARPTDKPLRLPLQDVYKIGGIGTVPVGRVETGVLKPGTVVVFAPANITTEVKSVEMHHEALQEAVPGDNVGFNVKNVSVKELRRGFVAGDSKNNPPRGAADFTAQVIVLNHP

SEQ ID NO: 17443 - protein, 331 aa, Battus philenor
KSTTTGHLIYKCGGIDKRTIEKFEKEAQEMGKGSFKYAWVLDKLKAERERGITIDIALWKFETSKYYVTIIDAPGHRDFIKNMITGTSQADCAVLIVAAGTGEFEAGISKNGQTREHALLAFTLGVKQLIVGVNKMDSTEPPYSEPRFEEIKKEVSSYIKKIGYNPAAVAFVPISGWHGDNMLEPSTKMPWFKGWNVERKEGKAEGKCLIEALDAILPPARPTDKPLRLPLQDVYKIGGIGTVPVGRVETGVLKPGTIVVFAPANITTEVKSVEMHHEALQEAVPGDNVGFNVKNVSVKELRRGYVAGDSKNNPPKGAADFTAQVIVLNHP

SEQ ID NO: 17444 - protein, 331 aa, Parnassius clodius
KSTTTGHLIYKCGGIDKRTIEKFEKEAQEMGKGSFKYAWVLDKLKAERERGITIDIALWKFETSKYYVTIIDAPGHRDFIKNMITGTSQADCAVLIVAAGTGEFEAGISKNGQTREHALLAFTLGVKQLIVGVNKMDSTEPPYSESRFEEIKKEVSSYIKKIGYNPAAVAFVPISGWHGDNMLEPSTKMPWFKGWQVDRKEGKAEGKCLIEALDAILPPARPTDKPLRLPLQDVYKIGGIGTVPVGRVETGVLKPGTIVVFAPANITTEVKSVEMHHEALQEAVPGDNVGFNVKNVSVKELRRGYVAGDSKNNPPRGAADFTAQVIVLNHP

SEQ ID NO: 17445 - protein, 331 aa, Colias eurytheme
KSTTTGHLIYKCGGIDKRTIEKFEKEAQEMGKGSFKYAWVLDKLKAERERGITIDIALWKFETSKYYVTIIDAPGHRDFIKNMITGTSQADCAVLIVAAGTGEFEAGISKNGQTREHALLAFTLGVKQLIVGVNKMDSTEPPYSESRFEEIKKEVSSYIKKIGYNPAAVAFVPISGWHGDNMLEPSTKMPWFKGWLVERKEGKAEGKCLIEALDAILPPARPTDKPLRLPLQDVYKIGGIGTVPVGRVETGVLKPGTIVVFAPANITTEVKSVEMHHEALQEAVPGDNVGFNVKNVSVKELRRGYVAGDSKNNPPKGAADFTAQVIVLNHP

SEQ ID NO: 17446 - protein, 395 aa, Trichomonas tenax
STTTGHLIYKCGGLDKRKLAAMEKEAEQLGKSSFKYAFVMDSLKAERERGITIDISLWKFEGQKYSFTIIDAPGHRDFIKNMITGTSQADAAILVIDSTLGGFEAGIAEQGQTREHALLAFTLGIKQVIVAVNKMDDKTVNYNKARFDEIQSEMTRILTGIGYKPEMFRFIPISGWAGDNMTEKSTNMPWYNGPYLLEALDSLQPPKRPFDKPLRLPLQDVYKINGIGTVPVGRVESGIMKPGMIVNFAPSTVTAEVKSIEMHHESLPEALPGDNIGFNVKNVSTQDVKRGYVVSDTKRDPAVECNSFTAQMIISNHPGKIHAGYQPVFDCHTAHIACKFDKLIQRIDRRHGKKATENPEYIQKDDAAIVEVVPSKPLVVESFQEYPPLGRFAIR

SEQ ID NO: 17447 - protein, 377 aa, Ischyropsalis luteipes
QEMGKGSFKYAWVLDKLKAERERGITIDITLWKFETPKYYVTVIDAPGHRDFIKNMITGTSQADCAVLIVAAGTGEFEAGISKNGQTREHALLAYTLGVKQMIVGVNKMDTTEPPFNQARFEEIQKEVSIYIKKIGYNPATVPFVPISGWNGDNMLEASTNMPWFKGWTLDRKSSKSDGKTLLQALDAMEPPSRPLDKPLRLPLQDVYKIGGIGTVPVGRVETGVMKPGVVVTFAPVGITTEVKSVEMHHEALTEAVPGDNVGFNVKNVSVKELRRGFVCGDSKDNPPKATEEFTAQVIVLNHPGQISNGYTPVLDCHTAHIACKFREIKEKCDRRSGKKLEDNPKFLKSGDAAIIDLAPSKPMCVEVFTEFPPLGR

SEQ ID NO: 17448 - protein, 401 aa, Acrasis rosea
SGKSTTTGHLIYKCGGIDKRVIEKFEKEAADMGKQSFKYAWVMDKLKAERERGITIDIALRKFETSKTMFTIIDAPGHRDFIKNMITGTSQADAAVLVIDSTTGGFEAGISKDGQTREHAMLAFTLGVKQMIVCTNKMDDKSVQYKEDRYKEIQKEVADYLKKVGYNPKNVPFVPISGWAGDNMLEKSTNMPWYKGPTLLEALDALEPPKRPTEKPLRLPLQDVYKIGGIGTVPVGRVETGVMKPGDTVLFAPVDVSTEVKSIEMHHEQLAEAILGDNVGFNIKNVAVKDIRRGNVCSNIKNDPARGCENFEAQVIILNHPGEIQNGYAPVLDCHTAHIACKFQEILTKIDKRTGQEMEKLPKSLKSGQAGIVNLVPQKPMCVEEYAQYPPLGRFAVRDMR

SEQ ID NO: 17449 - protein, 453 aa, Dictyostelium discoideum
MEFPESEKTHINIVVIGHVDAGKSTTTGHLIYKCGGIDKRVIEKYEKEASEMGKQSFKYAWVMDKLKAERERGITIDIALWKFETSKYYFTIIDAPGHRDFIKNMITGTSQADCAVLVIASPTGEFEAGIAKNGQTREHALLAYTLGVKQMIVAINKMDEKSTNYSQARYDEIVKEVSSFIKKIGYNPEKVAFVPISGWNGDNMLERSDKMEWYKGPTLLEALDAIVEPKRPHDKPLRIPLQDVYKIGGIGTVPVGRVETGIIKPGMVVTFAPAGLSTEVKSVEMHHEQLPEARPGDNVGFNVKNVSVKEIKRGMVAGDSKNDPPQETEKFVAQVIVLNHPGQIHAGYSPVLDCHTAHIACKFTEIVDKVDRRTGAVVAKEGTAAVVLKNGDAAMVELTPSRPMCVESFTEYPPLGRFAVRDMRQTVAVGVIKSTVKKAPGKAGDKKGAAAPS

SEQ ID NO: 17450 - protein, 450 aa, Dictyostelium discoideum
EKTHINIVVIGHVDAGKSTTTGHLIYKCGGIDKRVIEKYEKEASEMGKQSFKYAWVMDKLKAERERGITIDIALWKFETSKYYFTIIDAPGHRDFIKNMITGTSQADCAVLVIASPTGEFEAGIAKNGQTREHALLAYTLGVKQMIVAINKMDEKSTNYSQARYDEIVKEVSSFIKKIGYNPEKVAFVPISGWNGDNMLERSDKMEWYKGPTLLEALDAIVEPKRPHDKPLRIPLQDVYKIGGIGTVPVGRVETGIIKPGMVVTFAPAGLSTEVKSVEMHHEQLPEARPGDNVGFNVKNVSVKEIKRGMVAGDSKNDPPQETEKFVAQVIVLNHPGQIHAGYSPVLDCHTAHIACKFTEIVDKVDRRTGAVVAKEGTAAVVLKNGDAAMVELTPSRPMCVESFTEYPPLGRFAVRDMRQTVAVGVIKSTVKKAPGKAGDKKGAAAPSKKK

SEQ ID NO: 17451 - protein, 456 aa, Dictyostelium discoideum
MEFPESEKTHINIVVIGHVDAGKSTTTGHLIYKCGGIDKRVIEKYEKEASEMGKQSFKYAWVMDKLKAERERGITIDIALWKFETSKYYFTIIDAPGHRDFIKNMITGTSQADCAVLVIASPTGEFEAGIAKNGQTREHALLAYTLGVKQMIVAINKMDEKSTNYSQARYDEIVKEVSSFIKKIGYNPEKVAFVPISGWNGDNMLERSDKMEWYKGPTLLEALDAIVEPKRPHDKPLRIPLQDVYKIGGIGTVPVGRVETGIIKPGMVVTFAPAGLSTEVKSVEMHHEQLPEARPGDNVGFNVKNVSVKEIKRGMVAGDSKNDPPQETEKFVAQVIVLNHPGQIHAGYSPVLDCHTAHIACKFTEIVDKVDRRTGAVVAKEGTAAVVLKNGDAAMVELTPSRPMCVESFTEYPPLGRFAVRDMRQTVAVGVIKSTVKKAPGKAGDKKGAAAPSKKK

SEQ ID NO: 17452 - protein, 400 aa, Dictyostelium discoideum
AGKSTTTGHLIYKCGGIDKRVIEKYEKEASEMGKQSFKYAWVMDKLKAERERGITIDIALWKFETSKYYFTIIDAPGHRDFIKNMITGTSQADCAVLVIASPTGEFEAGIAKNGQTREHALLAYTLGVKQMIVAINKMDEKSTNYSQARYDEIVKEVSSFIKKIGYNPEKVAFVPISGWNGDNMLERSDKMEWYKGPTLLEALDAIVEPKRPHDKPLRIPLQDVYKIGGIGTVPVGRVETGIIKPGMVVTFAPAGLSTEVKSVEMHHEQLPEARPGDNVGFNVKNVSVKEIKRGMVAGDSKNDPPQETEKFVAQVIVLNHPGQIHAGYSPVLDCHTAHIACKFTEIVDKVDRRTGAVVAKEGTAAVVLKNGDAAMVELTPSRPMCVESFTEYPPLGRFAV

SEQ ID NO: 17453 - protein, 447 aa, Hordeum vulgare
MGKEKIHISIVVIGHVDSGKSTTTGHLIYKLGGIDKRVIERFEKEAAEMNKRSFKYAWVLDKLKAERERGITIDIALWKFETTKYSCTVIDAPGHRDFIKNMITGTSQADCAVLIIDSTTGVFQAGISKDGQTREHALLAFTLGVKQMICCCNKMDATTPKYSKSRYDEIVKEVSSYLKKVGYNPDKVPFVPISGFEGDNMIERSSNLDWYKGPTLLEALDQINEPKRPSDKPLHLPLQDVYKIGGIGTVPVGRVETGVIKPGMVVTFGPTGLTTEVKSVEVHHESLLEALPGDNVGFNVKNVAVKDLKRGYVASNSKDDPAKEAANFTAQVIIMNHPGQISNGYAPVLDCHTSHIAVKFAEIQTKIDRRSGKELEAAPKFLKNGDAGFVKMIPTKPMVVETFAQYPPLGRFAVRDMRQTVAVGVIKSVEKKEPTGAKVTKAAIKKK

SEQ ID NO: 17454 - protein, 447 aa, Hordeum vulgare
MGKEKIHISIVVIGHVDSGKSTTTGHLIYKLGGIDKRVIESFEKEAAEMNKRSFKYAWVLDKLKAERERGITIDIALWKFETTKYSCTVIDAPGHRDFIKNMITGTSQADCAVLIIDSTTGGFEAGISKDGQTREHALLAFTLGVKHMICCCNKMDATTPKYSKSRYDEIVKEVSSYLKKVGYNPDKVPFVPISGFEGDNMIERSSNLDWYKGPTLLEALDQINEPKRPSEKPLRLPLQDVYKIGGIGTVPVGRVETGVIKPGMVVTFGPTGLTTEVKSVEMHHESLLEALPGDNVGFNVKNVAVKDLKRGYVASNSKDDPAKEAANFTAQVIIMNHPGQISNGYAPVLDCHTSHIAVKFAEIQTKIDRRSGKELEAAPKFLKNGDAGFVKMIPTKPMVVETFAQYPPLGRFAVRDMRQTVAVGVIKSVEKKEPTGAKVTKAAIKKK

SEQ ID NO: 17455 - protein, 448 aa, Saccharum officinarum
MGKEKSHINIVVIGHVDSGKSTTTGHLIYKLGGIDKRVIERFEKEAAEMNKRSFKYAWVLDKLKAERERGITIDIALWKFETTKYYCTVIDAPGHRDFIKNMITGTSQADCAVLIIDSTTGGFEAGISKDGQTREHALLAFTLGVKQMICCCCCNKMDATTPKYSKARYDEIVKEVSSYLKKVGYNPDKIAFVPISGFEGDNMIERSTNLDWYKGPTLLEALDQITEPKRPSDKPLRLPLQDVYKIGGIGTVPVGRVETGVIKPGMVVTFGPTGLTTEVKSVEMHHEALQEALPGDNVGFNVKNVAVKDLKRGYVASNSKDDPAKEAASFTSQVIMNHPGQIGNGYAPVLDCHTSHIAVKFAELITKIDRRSGKELEKEAKFLKNGDAGMVKMIPTKPMVVETFSEYPPLGRFAVRDMRQTVAVGIIKSVEKKDPTGAKVTKAAAKKK

SEQ ID NO: 17456 - protein, 713 aa, Triticum aestivum
  unsure (1)..(713): unsure at all Xaa locations
XRIQRRDRGTSERGRXSSASSKPNAEDIXLTSRTMPRKVVSGPDYDDDYADYEDYEDDYDDYDETGYADVKPPVKEKESSKKSSNAVPVLWKCSMCTFDNHETMVYCEMCGVFRESFVKSGKDVSIKESVNGISNNSGTSALSNSDSTKMPAKTSTTNFDGDSERKYASTSHDKVNSTQLASVGSSSSTGKKKQPVISDNNVPIERTPQLNADHFQLKEDQGSIRASSSAQNKGSMETLSSDISQLSIERNNVNVAQPLPEEYKPEGWMLADQESGVLSQLNLAIVGHVDSGKSTLSGRLLHLLGKISKRDMHKNEKEAKEKGKGSFAYAWAMDESTEERARGVTMTVAVAYLETKKYRVVLLDSPGHKDFVPNLISGATQADAAILVVDASTGSFESGMDGEGGKSVGQTKEHAQLIRSFGVEQLIVAVNKMDAIGYSKDRLEFIKVRLGSFLRSCNFRDSAVTWIPLSAVENQNLIKSPSDARFTSWYQGSCLLDAIDCLQLPSRDVSKPLILPICDVIKSQSTGQLAAFGKLETGAIRNGSKVLVLPCEEVATVKTIERDSSSCSIARAGDNVAVILQGIDGSRIIPGGVLCHPGFPVPVANYLELKIRVLDIAIPILIGYQVEFHIHHVKEAARVTKIVALLDKTGKPSKTAPRFLKSKQNAVVQVTLDQAVCVEEFSKCRALGRAFLRSSGSTIAVGIVTKIMRQDQH

SEQ ID NO: 17457 - protein, 398 aa, Zea mays
  unsure (1)..(398): unsure at all Xaa locations
XVAVEEKGKGSFAYAWAMDESSDERERGITMTVAVAYFNSEKYRVVLLDSPGHKDFVPNMISGATQADAAILVVDASIGSFEAGMGVNGIGQTKEHSQLVRSFGVENLIPAVHKMDGVEYSKERFQSVKSQLGVFLRSCGYKDSSVTWVPLSAMANENLVTACSDTRLLSWYNGGCLLQAIDSLPPPRRDVSSPLRLPICDVIASHTLGQVAVCGKVESGGIRTGCKVLVMPSGDIATVKTMERDSSTCSLARAGDNVAVGLHGVDPGHIAAGGVLCHPDFPVRVACHLELKILVLEITVPILVGLEFELHIRHAKSSARLVRILSSLDQKTGRALKKAPRLLTARQAALVELRLDREACVEEFSTLKALARVFLRSQGSTVAVGVVTRVLDRALDMG

SEQ ID NO: 17458 - protein, 252 aa, Zea mays
  unsure (1)..(252): unsure at all Xaa locations
XGIAWIPLSAVENQNLIKAPSDARLTSWYQGFCLLDAIDFLQLPSRDVSKPLIIPICDVIKSQSTGQLAAYGKLETGAIQIGSKVLVLPSGQEATVKAIERDSNSCTVARAGDNVAICLQGIDGKQLIPGGVLCHPGFPVPVANHLELKVLVLDITTPILVGSQVEFHIHHVKEAARVTKIVALLDKTGKPSKSAPRFLKSKQNSVIQVTLDGAVCVQEFSKSRALGRAYLRSAGRTIAVGVVNRIIGQDQN

SEQ ID NO: 17459 - protein, 243 aa, Zea mays
  unsure (1)..(243): unsure at all Xaa locations
XXNFDGDSEXKDASTSXDKVNSTQLASIGSSSSTGKKKQPVISDNNVPIERTPQLIADHFQLKEDQGSSSRASSSAQNKGSMETLSSDISQLSIERNNVNVAQPLPEEYKPEGWMLADQESGVLSQLNLAIVGHVDSGKSTLSGRLLHLLGKISKRDMHKNEKEAKEKGKGSFAYAWAMDESTEERARGVTMTVAVAYLETKKYRVVLLDSPGHKDFVPNLISGATQADAAILVVDASTGSFX

SEQ ID NO: 17460 - protein, 204 aa, Zea mays
  unsure (1)..(204): unsure at all Xaa locations
IRQESGRWARXAKNEKESKEKGKGSFALAWTMDESSEERERGVTMTVAVAYLETKKFRVVLLDSPGHKDFVPNMISGATQADAAILVVDASTGSFEAGMDGEGGKSVGQTKEHAQLVRSFGVEQLVVAVNKMDAVDYAKERFDFIKLQLGSFLRSCNFKDSAINWIPPSAVENQNLIQAPSDARLNSWYQGFCLLDAIDFLQLX

SEQ ID NO: 17461 - protein, 270 aa, Zea mays
  unsure (1)..(270): unsure at all Xaa locations
XHASAHASAHACEMCGVFRETFVKSAKDGLLKDTAVAVSSGTSAASKNDSAKAPVKTRAVNSDGDSMRKHASMSYDKANSTQLPSAGSSLGAEKKKKTPVLSEEVPVDRIALLASDGFQSKGNQNSGASSSSQNDNVIQKLSSDVGQLNVNKNNVNVTKSCLPDEYKPEKWMLADLESRALSQLNLAIVGHVDSGKSTLSGRLLHLLGRISKKYMHKNEKESKEKGGRAFAFAWAMDESSEERERGVTMTVAVAYLETKKFRVVLLDSPX

SEQ ID NO: 17462 - protein, 459 aa, Dreissena polymorpha
MGKEKLHINIVVIGHVDSGKSTSTGHMIYKCGGIDKRTIEKFEKEAAEMGKGSFKYAWVLDKLKSERERGITIDIALWKFETTKYYVTIIDAPGHRDFIKNMITGTSQADCAVLIVAAGVGEFEAGISKNGQTREHALLAFTLGVKQLIVGVNKMDNTEPPFSEKRYEEIKNEVGNYIKKIGYNPKAVAFVPISGWHGDNMIEPTEKMPWYKGWAIERKEGNASGKTLFEAFDSIFPPTRPFEKPLRLPLQDVYKIGGIGTVPVGRVETGILKPGMVVTFSPANITTEVKSVEMHHESLPEASPGDNVGFNIKNVSVKEIRRGNVTGDSKNDPPKAAKSFYAQVIILNHPGEIKNGYAPVLDCHTAHIACKFEEIKEKIDRRSGKKLEDFPKVVKSGDACMADLVPFKPMCVEAFSDYAPLGRFAVRDMRQTVAVGVIKEVTKEVDGQGKVTKAATKKK

SEQ ID NO: 17463 - protein, 377 aa, Milnesium tardigradum
  unsure (1)..(377): unsure at all Xaa locations
QEMGKGSFKYAWVLDKLKQERERGITIDIALWKFETPKYYVTIIDAPGHRDFIKNMITGTSQADCAVLVTPAPPGEFEAGISKNGQTREHALLAYTLGVKQMIVAVNKMDSSEPPFSEDRFNEIVKEVSGYVKKIGYNPKTIPFVPISGWHGDNMVEASDKMPWYKGWXVERGDKTVEGKTLLEALDSISPPARPTDKPLRLPLQDVYKIGGIGTVPVGRVETGVIKPGMVVTFAPTGLTTEVKSVEMHHESLPEAIPGDNVGFNIKNVSVKDIRRGFVCGDSKNDPPKESASFNAQVIVLNHPGEIRNGYTPVLDCHTAHIACKFNEIKEKVDRRSGKSIEENPKTIKSGDAAIVNLIPTKPLCVEAFSEYPPLGR

SEQ ID NO: 17464 - protein, 447 aa, Lilium longiflorum
MGKEKVHINIVVIGHVDSGKSTTTGHLIYKLGGIDKRVIERFEKEAAEMNKRSFKYAWVLDKLKAERERGITIDIALWKFETTKYYCTVIDAPGHRDFIKNMITGTSQADCAILIIDSTTGGFEAGISKDGQTREHALLAFTLGVRQMICCCNKMDATTPKYAKARYDEIVKEVSSYLKKVGYNPDKIPFVPISGFEGDNMIERSTNLDWYKGPTLLEALDQISEPKRPSDKPLRLPLQDVYKIGGIGTVPVGRVETGVIKPGMVVTFGPTGLTTEVKSVEMHHEALLEALPGDNVGFNVKNVAVKDLKRGFVASNSKDDPAKEAANFTSQVIIMNHPGQIGNGYAPVLDCHTSHIAVKFAEILTKIDRRSGKELEKEPKFLKNGDAGMVKMIPTKPMVVETFAEYPPLGRFAVRDMRQTVAVGVIKNVEKKDPTGAKVTKSAVKKK

SEQ ID NO: 17465 - protein, 432 aa, Phytophthora infestans
VIGHVDAGKSTTTGHLIYKCGGIDKRTIEKFEKEAAELGKTSFKYAWVLDNLKAERERGITIDIALWKFESPKYFFTVIDAPGHRDFIKNMITGTSQADCAILVVASGVGEFEAGISKEGQTREHALLAFTLGVKQMVVAINKMDDSSVMYGQARYEEIKSEVTTYLKKVGYKPAKIPFVPISGWEGDNMIDRSTNMPWYKGPFLLEALDNLNAPKRPSDKPLRLPLQDVYKIGGIGTVPVGRVETGVIKPGMVATFGPVGLSTEVKSVEMHHESLPEAVPGDNVGFNVKNVSVKELRRGFVASDSKNDPAKATQDFTAQVIVLNHPGQIGNGYSPVLDCHTAHVACKFKEITEKMDRRSGKVLETAPKFVKSGDACMVILEPSKPMTVESFQEYPPLGRFAVRDMRQTVAVGVIKSVNKKEASGKGGAKKK

SEQ ID NO: 17466 - protein, 413 aa, Phycomyces blakesleeanus
GKSTTTGHLIYKCGGIDKRTIEKFEKEAAELGKGSFKYAWVLDKLKAERERGITIDIALWKFETPKYMVTVIDAPGHRDFIKNMITGTSQADCGVLIIAAGTGEFEAGISKDGQTREHALLAFTLGVRQLIVAINKMDTTKWSEARYNEIVKEVSSFIKKIGFNPKSVPFVPISGWHGDNMLEESVNMGWFKGWTKETKAGVKSGKTLLEAIDNIDPPVRPSDKPLRLPLQDVYKIGGIGTVPVGRVETGVIKAGMIVNFAPAGVVTEVKSVEMHHEQLVEGLPGDNVGFNVKNVSVKDIRRGNVCSDSKNDPAKESGSFTAQVIVLNHPGQIGAGYSPVLDCHTAHIACKFAELIEKIDRRSGKKMEDAPKFIKSGDSAIVKMVPSKPMCVEAYTDYPPLGRFAVRDMRQTV

SEQ ID NO: 17467 - protein, 426 aa, Rhizomucor miehei
VVVIGHVDSGKSTTTGHLIYKCGGIDKRTIEKFEKEAAELGKGSFKYAWVLDKLKAERERGITIDIALWKFETPKYHVTVIDAPGHRDFIKNMITGTSQADCGILIIAAGTGEFEAGISKDGQTREHALLAFTLGVRQLIVAINKMDSTKYSEARYNEIVKEVSTFIKKIGYNPKAVPFVPISGWNGDNMLEESPNMPWFKGWTKETKAGNKTGKTLLEAIDNIEPPVRPVDKPLRLPLQDVYKIGGIGTVPVGRVETGTIKAGMVVTFAPANVTTEVKSVEMHHEQLVEGVPGDNVGFNVKNVSVKDIRRGNVCSDSKNDPAKESASFIAQVIVLNHPGQISAGYSPVLDCHTAHIACKFAELLEKIDRRSGKKLEDSPKSVKSGDSAIVKMIPSKPMCVEAYTEYPPLGRFAVRDMRQTVAVGV

SEQ ID NO: 17468 - protein, 402 aa, Rhizomucor pusillus
GKSTTTGHLIYKCGGIDKRTIEKFEKEAAELGKGSFKYAWVLDKLKAERERGITIDIALWKFETPKYHVTVIDAPGHRDFIKNMITGTSQADCGILIIAAGTGEFEAGISKDGQTREHALLAFTLGVRQLIVAINKMDSTKYSEARYNEIVKEVSTFIKKIGYNPKAVPFVPISGWNGDNMLEESPNMPWFKGWTKETKAGNKTGKTLLEAIDNIDPPVRPVDKPLRLPLQDVYKIGGIGTVPVGRVETGTIKAGMVVTFAPANVTTEVKSVEMHHEQLAEGVPGDNVGFNVKNVSVKDIRRGNVCSDSKNDPAKESASFTAQVIVLNHPGQISAGYSPVLDCHTAHIACKFAELLEKIDRRSGKKLEDSPKAVKCGDSAIVKMIPTKPMCVEAYTEYPPLG

SEQ ID NO: 17469 - protein, 406 aa, Anemonia erythraea
GHLIYKCGGIDKRAIEKFEKEAAEMGKGSFKYAWVLDKLKAERERGITIDIALWKFETNKYYVTVIDAPGHRDFIKNMITGTSQADCTVLIVASGTGEFEAGISKNGQTREHALLAFTLGVKQMIVCCNKMDNTESTLREARFQEIEKEVGSYLKKIGYNPKKIHFVPISGWHGDNMLEKSDKMPWWNGFELFNKSQGSKTGTTLFDGLDDINVPSRPTDKALRLPLQDVYKIGGIGTVPVGRVETGILKPGMLVTFAPVNLTTEVKSVEMHHTALTEALPGDNVGFNVKNLSVKDIKRGFVAGDSKNDPPKNIGFFDAQVIVLNHPGEIHNGYSPVLDCHTAHIACKFYEIKNKGDKRSGKVTEEFPKAIKSGDAALVTLQPSKDMCVEKYSSYAPLGRFAVRDM

SEQ ID NO: 17470 - protein, 410 aa, Eugymnanthea japonica
TGHLIYKCGGIDKRTIEKFEKEAQEMGKGSFKYAWVLDKLKAERERGITIDIALWKFTTEKYSVTIIDAPGHRDFIKNMITGTSQADCAVLIVASSTGEFEAGISKNGQTREHALLAYTLGVKQMIVGVNKIDNTEPPYSEARFKEISKEISAYVKKVGYNPKEVAIVPISGWHGDNMIEPSTNMSWYKGWEIERKAGKASGKTLLEALDAVVPPTRPTEKPLRLPLQDVYKIGGIGTVPVGRIETGILKPAMVVTFAPANITTEVKSVEMHHTSLTEALPGDNVGFNVKNVSVKDIKRGMVCSDSKNDPAKETKSFVAQVIVLNHPGEIHSGYQPVLDCHTAHIACKFAVLQQKIDRRSGKVLEENPKMVKSGDAAMIELVPSKPMVVEPYGDYAPLGRFAVRDMSQTV

SEQ ID NO: 17471 - protein, 417 aa, Rhizopus stolonifer
GKSTTTGHLIYKCGGIDKRTIEKFEKEAAELGKGSFKYAWVLDKLKAERERGITIDIALWKFETPKYQITVIDAPGHRDFIKNMITGTSQADCAVLIIAGGTGEFEAGISKDGQTREHALLAFTLGVRQLIVAVNKMDTTKWSEARFNEIVKEVSSFIKKIGYNPKSVPFVPISGWHGDNMLDESTNMPWYKGWNKETKAGAKSGKTLLEAIDNIDPPTRPSDKPLRLPLQDVYKIGGIGTVPVGRVETGVIKAGMVVTFAPAAVTTEVKSVEMHHETLSEGAPGDNVGFNVKNVSVKDIRRGNVCSDSKNDPAKEAGSFTAQVIVLNHPGQIGAGYAPVLDCHTAHIACKFSELIEKIDRRSGKSLEAEPKFVKSGDSAIVKMIPSKPMCVEAYTDYPPLGRFAVRDMRQTVAVGV

SEQ ID NO: 17472 - protein, 417 aa, Rhizopus microsporus var. oligosporus
GKSTTTGHLIYKCGGIDKRTIEKFEKEAAELGKGSFKYAWVLDKLKAERERGITIDIALWKFETPKYNVTVIDAPGHRDFIKNMITGTSQADCGILIIAAGTGEFEAGISKDGQTREHALLAFTLGVRQLIVAINKMDTTKWSEARYNEIVKEVSSFIKKIGYNPKSVPFVPISGWHGDNMLEESNNMPWFKGWTKETKAGNKTGKTLLEAIDNIDPPTRPVDKPLRLPLQDVYKIGGIGTVPVGRVETGVIKAGMVVTFAPANVTTEVKSVEMHHETLTEGLPGDNVGFNVKNVSVKDIRRGNVCSDSKNDPAKEAGSFTAQVIVLNHPGQIGAGYAPVLDCHTAHIACKFSELIEKIDRRSGKSLEAEPKFVKSGDSAIVKMIPSKPMCVEAYTDYPPLGRLAVRDMRQTVAVGV

SEQ ID NO: 17473 - protein, 401 aa, Blakeslea trispora
GKSTTTGHLIYKCGGIDKRTIEKFEKEAAELGKGSFKYAWVLDKLKAERERGITIDIALWKFETPKYHVTVIDAPGHRDFIKNMITGTSQADCAILIIAGGTGEFEAGISKDGQTREHALLAFTLGVRQLIVAINKMDTTKWSEARYTEIVKEVSSFIKKIGFNPKAVPFVPISGWHGDNMLEESTNMPWFKGWKKETKAGEKSGKTLLEAIDAIEPPVRPSDKPLRLPLQDVYKIGGIGTVPVGRVETGVIKAGMVVTFAPAAVTTEVKSVEMHHETLTEGLPGDNVGFNVKNVSVKDIRRGNVCSDSKNDPAKEAGSFTAQVIILNHPGQIGAGYAPVLDCHTAHIACKFSELIEKIDRRSGKKLEEQPKFVKSGDSAIVKMIPSKPMCVEAYTDYPPL

SEQ ID NO: 17474 - protein, 395 aa, Smittium culisetae
KRTIEKFEKEANEMGKGSFKYAWVLDKLKAERERGITIDIALWKFETPRYVVTVIDAPGHRDFIKNMITGTSQADCAILIIAGGVGEFEAGISKDGQTREHALLAFTLGVRQLIVAVNKMDTTNYSEARFTEITKEVCNFIKKVGYNPKSVPMVPISGFHGDNMIEATTNMPWYKGWTKETKAGNAKGMTLLDAIDAVEPPVRPSDKPLRLPLQDVYKIGGIGTVPVGRIETGILKAGMVVTFAPTGVTTEVKSVEMHHEVLSQGNPGDNVGFNVKNVSVKDIRRGNVCGDSKNDPPKEAGNFTAQVIVLNHPGQISNGYCPVLDCHTAHISCKFTQIKEKMDRRSGKTLEAEPKFIKSGDAAMVVLTPSKPMCVETFSEYPPLGRLAVRDMRQT

SEQ ID NO: 17475 - protein, 331 aa, Feltia jaculifera
KSTTTGHLIYKCGGIDKRTIEKFEKEAQEMGKGSFKYAWVLDKLKAERERGITIDIALWKFETAKYYVTIIDAPGHRDFIKNMITGTSQADCAVLIVAAGTGEFEAGISKNGQTREHALLAFTLGVKQLIVGVNKMDSTEPPYSEPRFEEIKKEVSSYIKKIGYNPAAVAFVPISGWHGDNMLEPSTKMPWFKGWNVERKEGKAEGKCLIEALDAILPPARPTDKALRLPLQDVYKIGGIGTVPVGRVETGILKPGTIVVFAPANITTEVKSVEMHHEALQEAVPGDNVGFNVKNVSVKELRRGYVAGDSKNNPPKGAADFTAQVIVLNHP

SEQ ID NO: 17476 - protein, 377 aa, Euperipatoides rowelli
QEMGKGSFKYAWVLDKLKAERERGITIDIALWKFETPKFYITIIDAPGHRDFIKNMITGTSQADCAVLIVAAGTGEFEAGISKNGQTREHALLAYTLGVKQLIVGVNKMDSTEPPFSQARFEEIVKEVSNYIKKIGYNPKTVPFVPISGWHGDNMLEGSANMAWHKGWDVEKGDKKFSGKTLLEALDSIQPPSRPTEKPLRLPLQDVYKIGGIGTVPVGRVETGILKPGMVVTFAPVGLTTEVKSVEMHHEALTEASPGDNVGFNVKNVSVKELRRGFVAGDSKNEAPKEAADFLAQVIVLNHPGQIGNGYTPVLDCHTAHIACKFAEIKEKCDRRTGKTIEENPKFIKSGDAAIVNLVPTKPLCVEAFSDFPPLGR

SEQ ID NO: 17477 - protein, 742 aa, Yarrowia lipolytica
MSDQFNQDFANKANINEQGQGQGQGQQGQGYGQYQAPQQFVPGQSFVPGQSFVPGQSFAPQGGYDQYQGQGGYQGGYQGGYQGGYQGNNRGGYSGRGRGGYRGGYQGGYNNQYGNQGGYQGGYQGGYDNQYGNQGGYQGGYDNQYGYDQPEEPQEKTLTLEEYQKQKQEALNKLKKPKVGGALKIGGDKPKAGGALKIGGDKPASTGGALKIGGDKPKTSGGALKIGGDKPKSGGVLKIGGDKESEKKEAVSKEASPAPKESTPKESTPAPASKESTPSAAEKKEAAENAASADALIAAQNAEIDQETIKEMFGETKDHMSIIFMGHVDVGKSTLGGQILYLTGTVNKRTIEKMEKEAADAGRPGWYLSWVMDINKEERAEGKTVEVGRSYFETEKRRYTLLDAPGHKMYVPSMIGGAAQADAGILVISARKGEYETGFERDGQTREHAMLAKTQGINKLVIAINKMDDSTVNWSKERYDECINKLKLYLKGLGYSDKTEITFMPVSGFTGANVKERVSKEVCPWYDGPSLLELLDSFELERNLTGPFMLPISNKEKNLGTIVEGKIEVGQVKKGDNLVVMPSKVPVEVTTLYKETEQEVGGASVGEQIRLKVKGIEEEEVQIGQVLCSAAQPVAAVTVFEAQIAITELKSILSTGFSCVMHIHTAAEEVTFTALLHKLEKGTNRKSKKPPAFAKKGMKIIARLETQNPVCMDEFSKTPQLGRFTLRDQGQSIAIGRVTKLC

SEQ ID NO: 17478 - protein, 662 aa, Zygosaccharomyces rouxii
MSDPNQNGQQGGQQNAGGNYYQQYFQKLTQQAQAGGGYQPYGGYGGYGGYGGYQPYGGYQQFYQDGQQAQQGAYNGYPYQAQGAPGGFNNYNNQFQPQQQSQGMTLDDFHKQKQTSQSAPPKQKKSLKLVSSSGIKLANATKKPKEDEKKEEEPKKEEKKAEPKEQESKKEEPKREGTPRPAAAKDEKKEDLPKLEKLKIKEEQAAANASGADSLIKEQEEEVDEGVVNDMFGGKDHMSIIFMGHVDAGKSTMGGNILYMTGSVDKRTVEKYEREAKDAGKQGWYLSWVMDTNREERDDGKTIEVGRAYFETEKRRYTILDAPGHKMYVSEMIGGASQADVGILVISARKGEYETGFEKGGQTREHALLAKTQGVNKLIVTINKMDDPTVNWSKERYDQCVKNLSNFLKAIGYNVKEEVVFMPVSGYSGAGLGTRVDPKECPWYDGPALLEYMDNMSHVDRKMNAPFMLPIAAKMRDMGTIVEGKIESGHIRKGHSTLLMPNKIPVEIQNIYNETENEVDMAICGEQVKLKIKGVEEEDIAPGFVLTSPKNPVKNVTRFVAQVAIVELKSILSSGFSCVMHVHTAIEEVRITKLLHKLERGTNRKSKKPPAFAKKGMKIIAVLETERPVCVETYQDYPQLGRFTLRDQGTTIAIGKIVKIIE

SEQ ID NO: 17479 - protein, 701 aa, Debaryomyces hansenii
MSDDQQYNQDKLSQDFQNTSIGSGEQQQQSYQQYQQQPQQNNFNANSAPTFTPSGQQGGYQGGYQGGYQGGYQNYSQGGYQNYNQGYQNYNQGYQGYQNNNRGGYNSYNNRGGYNNYNNYNQQDQQPVQNQGMSLADFQKQQNAQANLNKPKKTLKLASSSGIKLANAKKAPETESKEATPAATQKEATPAATEKEATPAATEKETTPAATEKETTPAPAKKEATPASAKSESKPASKSTSKVATKESTPVTSDKVIQEQVDEVDEEVVKDMFGGKDHVSIIFMGHVDAGKSTMGGNILYLTGSVDKRTVDKYEREAKDAGRQGWYLSWVMDTNKEERSDGKTIEVGKAYFETEKRRYTILDAPGHKMYVSEMIGGASQADVGILVISARKGEYETGFEKGGQTREHALLAKTQGVNKIIVVVNKMDDPTVGWAEDRYKDCITKLGTFLKGIGYAKDDIVFMPVSGYTGAGIKDRVNPKDCPWYSGPSLLEFLDNMKTVQRHINGPFMLPISGKMKDMGTIIEGKIESGHIKKGGNLLLMPNKASIEVVTIFNETEQECDAAYCGEQVRLKIKGVEEEDLAPGYVLTSPLKPIKTITRFEAQIAIVELKSILSNGFSCVMHLHTAIEEVTFIELKHKLEKGTNRKSKKPPAFAKKGMKVIAVLETSESVCAETYADYPQLGRFTLRDQGTTIAIGKITKVL

SEQ ID NO: 17480 - protein, 363 aa, Ctenocephalides canis
ERERGITIDIALWKFETSKYYVTIIDAPGHRDFIKNMITGTSQADCAVLIVAAGVGEFEAGISKNGQTREHALLAFTLGVKQLIVGVNKMDSTEPPYSENRFEEIKKEVSSYIKKIGYNPAAVAFVPISGWHGDNMLEVSTKMNWFKGWNIERKEGKADGKCLIEALDAILPPARPTDKPLRLPLQDVYKIGGIGTVPVGRVETGVLKPGTVVVFAPANLTTEVKSVEMHHEALQEAVPGDNVGFNVKNVSVKELRRGYVAGDSKSSPPRGAADFTAQVIVLNHPGQISNGYTPVLDCHTAHIACKFAEIKEKVDRRTGKSTEDNPKAIKSGDAAIVTLVPSKPMCVESFQEFPQLGRFAVLD

SEQ ID NO: 17481 - protein, 460 aa, Cryptococcus neoformans
MGKDKLHVNVVVIGHVDSGKSTTTGHLIYKCGGIDKRTIEKFEKEAQELGKSSFKYAWVLDKLKAERERGITIDIALWKFETPKYQVTVIDAPGHRDFIKNMITGTSQADCAILIIATGIGEFEAGISKDGQTREHALLAFTLGVRQLIVACNKMDTCKWSEDRFNEIVKETNGFIKKVGYNPKAVPFVPISGWHGDNMLEETTNMPWYKGWTKETKSGVSKGKTLLEAIDASRPPTRPTDKPLRLPLQDVYKIGGIGTVPVGRVETGVIKAGMVVKFAPTNVTTEVKSVEMHHEQIPEGLPGDNVGFNVKNVSIKDIRRGNVCGDSKNDPPMEAASFNAQVIVLNHPGQIGAGYTPVLDCHTAHIACKFSELIEKIDRRTGKVMEAAPKFVKSGDAAIVKLVSQKPLCVETYADYPPLGRFAVRDMRQTVAVGVIKSVEKSDGKSGKVTKAAEKAAKKK

SEQ ID NO: 17482 - protein, 459 aa, Cryptococcus neoformans
MGKDKLHVNVVVIGHVDSGKSTTTGHLIYKCGGIDKRTIEKFEKEAQELGKSSFKYAWVLDKLKAERERGITIDIALWKFETPRYQVTVIDAPGHRDFIKNMITGTSQADCAILIIATGIGEFEAGISKDGQTREHALLAFTLGVRQLIVACNKMDTCKWSEDRFNEIVKETNGFIKKVGYNPKAVPFVPISGWHGDNMLEETTNMPWYKGWTKETKSGVSRGKTLLEAISASRPHTRPTDKPLRLPLQDVYKIGGIGTVPVGRVETGVIKAGMVVKFAPTNVTTEVKSVEMHHEQIPEGLPGDNVGFNVKNVSIKDIRRGNVCGDSKNDPPMEAASFNAQVIVLNHPGQIGAGYTPVLDCHTAHIACKFAELIEKIDRRTGKVMEAAPKFVKSGDAAIVKLVAQKPLCVETYADYPPLGRFAVRDMRQTVAVGVIKSVDKTEKGGKVTKAAEKAAKKK

SEQ ID NO: 17483 - protein, 413 aa, Heliothis terracottoides
HVDSGKSTTTGHLIYKCGGIDKRTIEKFEKEAQEMGKGSFKYAWVLDKLKAERERGITIDIALWKFETAKYYVTIIDAPGHRDFIKNMITGTSQADCAVLIVAAGTGEFEAGISKNGQTREHALLAFTLGVKQLIVGVNKMDSTEPPYSESRFEEIKKEVSSYIKKIGYNPAAVAFVPISGWHGDNMLEASTKMPWFKGWNVERKEGKAEGKCLIEALDAILPPARPTDKALRLPLQDVYKIGGIGTVPVGRVETGILKPGTIVVFAPANITTEVKSVEMHHEALQEAVPGDNVGFNVKNVSVKELRRGYVAGDSKNNPPKGAADFTAQVIVLNHPGQISNGYTPVLDCHTAHIACKFAEIKEKVDRRTGKSTEDNPKSIKSGDAAIVNLVPSKPLCVEFFQEFPPLGRFAVR

SEQ ID NO: 17484 - protein, 413 aa, Plagiomimicus olvello
HVDSGKSTTTGHLIYKCGGIDKRTIEKFEKEAQEMGKGSFKYAWVLDKLKAERERGITIDIALWKFETAKYYVTIIDAPGHRDFIKNMITGTSQADCAVLIVAAGTGEFEAGISKNGQTREHALLAFTLGVKQLIVGVNKMDSTEPPYSESRFEEIKKEVSSYIKKIGYNPAAVAFVPISGWHGDNMLEPSTKMPWFKGWQVERKEGKAEGKCLIEALDAILPPARPTDKALRLPLQDVYKIGGIGTVPVGRVETGVLKPGTIVVFAPANITTEVKSVEMHHEALQEAVPGDNVGFNVKNVSVKELRRGYVAGDSKNNPPKGAADFTAQVIVLNHPGQISNGYTPVLDCHTAHIACKFAEIKEKVDRRTGKSTEDNPKSIKSGDAAIVNLVPSKPLCVESFQEFPPLGRFAVR

SEQ ID NO: 17485 - protein, 428 aa, Pyrococcus horikoshii
MPKEKPHVNIVFIGHVDHGKSTTIGRLLYDTGNIPETIIKKFEEMGEKGKSFKFAWVMDRLKEERERGITIDVAHTKFETPHRYITIIDAPGHRDFVKNMITGASQADAAVLVVAATDGVMPQTKEHAFLARTLGIKHIIVTINKMDMVNYDQKVFEKVKAQVEKLLKTLGYKDFPVIPTSAWNGDNVVKKSDKMPWYNGPTLIEALDQIPEPEKPIDKPLRIPIQDVYSIKGVGTVPVGRVETGKLKVGDVVIFEPASTIFHKPIQGEVKSIEMHHEPLQEALPGDNIGFNVRGVSKNDIKRGDVAGHTDKPPTVVRTKDTFKAQIIVLNHPTAITVGYSPVLHAHTAQIPVRFEQILAKVDPRTGNIVEENPQFIKTGDSAIVVLRPMKPVVLEPVKEIPQLGRFAIRDMGMTIAAGMVISIQKGE

SEQ ID NO: 17486 - protein, 712 aa, Candida maltosa
MSNPQDQLSNDLANASISGDQSKQPQQQQPQQQQPYFNPNQAQAFVPTGGYQQFQPQQQQQYGGYQQNYTQYQAGGYQQNYNNRGGYQQNYNNRGGYQQNYNNRGGYQQQQQQQYQAYNPNQQYGGYQAYNPQQQQQQQTQSQGMSLADFQKQKAEQQASLNKPAVKKTLKLASSSGIKLANATKKVDTAKPAASKEASPAPKDEEASAEPEAKKESTPVPASSSPAPAAADSTPAPVKKESTPTPSVASKSAPVSASASVVTADALAKEQEDEVDEEVVKDMFGGKDHVSIIFMGHVDAGKSTMGGNILYLTGSVDKRTVEKYEREAKDAGRQGWYLSWVMDTNKEERNDGKTIEVGKAYFETDKRRYTILDAPGHKMYVSEMIGGASQADVGILVISARKGEYETGFEKGGQTREHALLAKTQGVNKIIVVVNKMDDPTVNWSKERYQECTTKLGVFLKGIGYNKDDIINMPVSGYTGAGLKDRVNPKDCPWYEGPSLLEYLDNMDTMNRKINGPFMMPVSGKMKDLGTVVEGKIESGHVKKGTNLILMPNKTPVEVLTIYNETEQEADTAFSGEQVRLKIKGVEEEDLQPGYVLTSPKNPVKTVTKFEAQIAIVELKSILSNGFSCVMHLHTAIEEVKFVELKHKLEKGTNRKSKKPPAFAKKGMKIIAILEVSEPVCAETYKDYPQLGRFTLRDQGTTIAIGKITKLL

SEQ ID NO: 17487 - protein, 398 aa, Rhodotorula mucilaginosa
CGGIDKRTIEKFEKEAAELGKGSFKYAWVLDKLKAERERGITIDIALWKFETPKYMITVIDAPGHRDFIKNMITGTSQADCAILIIASGTGEFEAGISKDGQTREHALLAFTLGVRQLIVAINKMDTCKYSQERYEEIIKETSNFIKKVGFNPKALPFVPISGWHGDNMIEATTNMPWYKGWKKETKSGEVTGKTLLDAIDAIEPPTRPTDKPLRLPLQDVYKIGGIGTVPVGRVETGTIKAGMVVVFAPANVTTEVKSVEMHHEQLEAGLPGDNVGFNVKNVSVKDIRRGNVCGDTKNDPPKEAASFKAQVIVMNHPGQIGNGYAPVLDCHTAHIACKFDTLLEKIDRRSGKSVEDLPKFIKSGDAAIVKMIPSKPMCVEPFSDYPPLGRFAVRDMR

SEQ ID NO: 17488 - protein, 464 aa, Trichophyton rubrum
MGKDEKGHINLVVIGHVDSGKSTTTGHLIYKCGGIDQRTIEKFEKEAEELGKKSFKYAWVLDKLKAERERGITIDIALWKFETPKYNVTVIDAPGHRDFIKNMITGTSQADCAILIIAAGTGEFEAGISKDGQTREHRSARLHPWVSKQLIVAINKMDTTNWSETRFKEIIKGSHQLHQERLATDPKGCSIFVPISGFNGDNMIEGFTNCPWYKGWNKETKAGGAKTGKTLLEAIDAIDMPTRPTDKPLRLPLQDVYKISGIGTVPVGRVETGIIKPGMVVTFAPANVTTEVKSVEMHHQQLQQGVPGDNVGFNVKNVSVKEVRRGNVAGDSKNDPPSGCASFNAQVIVLNHPGQIGAGYAPVLDCHTAHIACKFAELLEKIDRRTGKSVEANPKFVKSGDAAIAKMVPSKPMCVEAFTDYPPLGRFAVRDMRQTVAVGVIKAVEKATGGAGKVTKSAAKAGKK

SEQ ID NO: 17489 - protein, 413 aa, Agrotis ipsilon
HVDSGKSTTTGHLIYKCGGIDKRTIEKFEKEAQEMGKGSFKYAWVLDKLKAERERGITIDIALWKFETAKYYVTIIDAPGHRDFIKNMITGTSQADCAVLIVAAGTGEFEAGISKNGQTREHALLAFTLGVKQLIVGVNKMDSTEPPYSESRFEEIKKEVSSYIKKIGYNPAAVAFVPISGWHGDNMLEPSTKMPWFKGWNVERKEGKAEGKCLIEALDAILPPARPTDKALRLPLQDVYKIGGIGTVPVGRVETGILKPGTIVVFAPANITTEVKSVEMHHEALQEAVPGDNVGFNVKNVSVKELRRGYVAGDSKNNPPKGAADFTAQVIVLNHPGQISNGYTPVLDCHTAHIACKFAEIKEKVDRRTGKSTEDNPKSIKSGDAAIVNLVPSKPLCVESFQEFPPLGRFAVR

SEQ ID NO: 17490 - protein, 413 aa, Amphipyra pyramidoides
HVDSGKSTTTGHLIYKCGGIDKRTIEKFEKEAQEMGKGSFKYAWVLDKLKAERERGITIDIALWKFETARYYVTIIDAPGHRDFIKNMITGTSQADCAVLIVAAGTGEFEAGISKNGQTREHALLAFTLGVKQLIVGVNKMDSTEPPYNESRFEEIKKEVSSYIKKIGYNPAAVAFVPISGWHGDNMLEPSTKMPWFKGWQVERKEGKAEGKCLIEALDAILPPARPTDKALRLPLQDVYKIGGIGTVPVGRVETGILKPGTIVVFAPANITTEVKSVEMHHEALQEAVPGDNVGFNVKNVSVKELRRGYVAGDSKNNPPKGAADFTAQVIVLNHPGQISNGYTPVLDCHTAHIACKFAEIKEKVDRRTGKSTEDNPKSIKSGDAAIVNLVPSKPLCVESFQEFPPLGRFAVR

SEQ ID NO: 17491 - protein, 413 aa, Anagrapha falcifera
HVDSGKSTTTGHLIYKCGGIDKRTIEKFEKEAQEMGKGSFKYAWVLDKLKAERERGITIDIALWKFETAKYYVTIIDAPGHRDFIKNMITGTSQADCAVLIVAAGTGEFEAGISKNGQTREHALLAFTLGVKQLIVGVNKMDSTEPPYSESRFEEIKKEVSSYIKKIGYNPAAVAFVPISGWHGDNMLEPSTKMPWFKGWMVERKEGKAEGKCLIEALDAILPPARPTDKPLRLPLQDVYKIGGIGTVPVGRVETGILKPGTIVVFAPANITTEVKSVEMHHEALQEAVPGDNVGFNVKNVSVKELRRGYVAGDSKNNPPKGAADFTAQVIVLNHPGQISNGYTPVLDCHTAHIACKFAEIKEKVDRRTGKSTETNPKSIKSGDAAIVNLVPSKPLCVESFQEFPPLGRFAVR

SEQ ID NO: 17492 - protein, 413 aa, Anathix ralla
HVDSGKSTTTGHLIYKCGGIDKRTIEKFEKEAQEMGKGSFKYAWVLDKLKAERERGITIDIALWKFETARYYVTIIDAPGHRDFIKNMITGTSQADCAVLIVAAGTGEFEAGISKNGQTREHALLAFTLGVKQLIVGVNKMDSTEPPYSEPRFEEIKKEVSSYIKKIGYNPLAVAFVPISGWHGDNMLEPSTKMPWFKGWNVERKEGKAEGKCLIEALDAILPPARPTDKALRLPLQDVYKIGGIGTVPVGRVETGILKPGTIVVFAPANITTEVKSVEMHHEALQEAVPGDNVGFNVKNVSVKELRRGYVAGDSKNNPPKGAADFTAQVIVLNHPGQISNGYTPVLDCHTAHIACKFAEIKEKVDRRTGKSTEDNPKSIKSGDAAIVNLVPSKPLCVESFQEFPPLGRFAVR

SEQ ID NO: 17493 - protein, 413 aa, Anicla infecta
HVDSGKSTTTGHLIYKCGGIDKRTIEKFEKEAQEMGKGSFKYAWVLDKLKAERERGITIDIALWKFETAKYYVTIIDAPGHRDFIKNMITGTSQADCAVLIVAAGTGEFEAGISKNGQTREHALLAFTLGVKQLIVGVNKMDSTEPPYSESRFEEIKKEVSSYIKKIGYNPAAVAFVPISGWHGDNMLEASTKMPWFKGWNVERKEGKAEGKCLIEALDAILPPARPTDKALRLPLQDVYKIGGIGTVPVGRVETGILKPGTIVVFAPANITTEVKSVEMHHEALQEAVPGDNVGFNVKNVSVKELRRGYVAGDSKNNPPKGAADFTAQVIVLNHPGQISNGYTPVLDCHTAHIACKFAEIKEKVDRRTGKSTEDNPKSIKSGDAAIVNLVPSKPLCVESFQEFPPLGRFAVR

SEQ ID NO: 17494 - protein, 413 aa, Baileya levitans
  unsure (1)..(413): unsure at all Xaa locations
HVDSGKSTTTGHLIYKXGGIDKRTIEKFEKEAQEMGKGSFKYAWVLDKLKAERERGITIDIALWKFETAKYYVTIIDAPGHRDFIKNMITGTSQADCAVLIVAAGTGEFEAGISKNGQTREHALLAFTLGVKQLIVGVNKMDSTEPPYSESRFEEIKKEVSSYIKKIGYNPAAVAFVPISGWHGDNMLEASTKMPWFKGWMVERKEGKAEGKXLIEALDAILPPARPTDKALRLPLQDVYKIGGIGTVPVGRVETGVLKPGTVVVFAPANITTEVKSVEMHHEALQEAVPGDNVGFNVKNVSVKELRRGYVAGDSKNNPPKGAADFTAQVIVLNHPGQISNGYTPVLDCHTAHIACKFAEIKEKVDRRTGKSTEDNPKSIKSGDAAIVNLVPSKPLCVESFQEFPPLGRFAVR

SEQ ID NO: 17495 - protein, 413 aa, Catocala ultronia
HVDSGKSTTTGHLIYKCGGIDKRTIEKFEKEAQEMGKGSFKYAWVLDKLKAERERGITIDIALWKFETAKYYVTIIDAPGHRDFIKNMITGTSQADCAVLIVAAGTGEFEAGISKNGQTREHALLAFTLGVKQLIVGVNKMDSTEPPYSESRFEEIKKEVSSYIKKIGYNPAAVAFVPISGWHGDNMLEASTKMPWFKGWMVERKEGKAEGKCLIEALDAILPPARPTDKALRLPLQDVYKIGGIGTVPVGRVETGILKPGTIVVFAPANITTEVKSVEMHHEALQEAVPGDNVGFNVKNVSVKELRRGYVAGDSKNNPPKGAADFTAQVIVLNHPGQISNGYTPVLDCHTAHIACKFAEIKEKVDRRTGKSTEENPKSIKSGDAAIVNLVPSKPLCVESFQEFPPLGRFAVR

SEQ ID NO: 17496 - protein, 413 aa, Charadra deridens
  unsure (1)..(413): unsure at all Xaa locations
HVDSGKSTTTGHLIYKCGGIDKRTIEKFEKEAQEMGKGSFKYAWVLDKLKAERERGITIDIALWKFETAKYYVTIIDAPGHRDFIKNMITGTSQADCAVLIVAAGTGEFEAGISKNGQTREHALLAFTLGVKQLIVGVNKMDSTEPPYSESRFEEIKKEVSSYIKKIGYNPAAVAFVPISGWHGDNMLEASTKMPWFKGWNVERKEGKAEGKCLIEALDAILPPARPTDKALXLPLQDVYKIGGIGTVPVGRVETGILKPGTIVVFAPANITTEVKSVEMHHEALQEAVPGDNVGFNVKNVSVKELRRGYVAGDSKNNPPKGAADFTAQVIVLNHPGQISNGYTPVLDCHTAHIACKFAEIKEKVDRRTGKSTEDNPKSIKSGDAAIVNLVPSKPLCVESFQEFPPLGRFAVR

SEQ ID NO: 17497 - protein, 413 aa, Condica videns
HVDSGKSTTTGHLIYKCGGIDKRTIEKFEKEAQEMGKGSFKYAWVLDKLKAERERGITIDIALWKFETAKYYVTIIDAPGHRDFIKNMITGTSQADCAVLIVAAGTGEFEAGISKNGQTREHALLAFTLGVKQLIVGVNKMDSTEPPYSEPRFEEIKKEVSSYIKKIGYNPAAVAFVPISGWHGDNMLEASTKMPWFKGWNVERKEGKAEGKCLIEALDAILPPARPTDKPLRLPLQDVYKIGGIGTVPVGRVETGILKPGTIVVFAPANITTEVKSVEMHHEALQEAVPGDNVGFNVKNVSVKELRRGYVAGDSKNNPPKGAADFTAQVIVLNHPGQISNGYTPVLDCHTAHIACKFAEIKEKVDRRTGKSTEDNPKSIKSGDAAIVNLVPSKPLCVESFQEFPPLGRFAVR

SEQ ID NO: 17498 - protein, 413 aa, Cucullia convexipennis
HVDSGKSTTTGHLIYKCGGIDKRTIEKFEKEAQEMGKGSFKYAWVLDKLKAERERGITIDIALWKFETARYYVTIIDAPGHRDFIKNMITGTSQADCAVLIVAAGTGEFEAGISKNGQTREHALLAFTLGVKQLIVGVNKMDSTEPPYSESRFEEIKKEVSSYIKKIGYNPAAVAFVPISGWHGDNMLEASTKMPWFKGWNVERKEGKAEGKCLIEALDAILPPARPTDKALRLPLQDVYKIGGIGTVPVGRVETGILKPGTIVVFAPANITTEVKSVEMHHEALQEAVPGDNVGFNVKNVSVKELRRGYVAGDSKNNPPKGAADFTAQVIVLNHPGQISNGYTPVLDCHTAHIACKFAEIKEKVDRRTGKSTEDNPKSIKSGDAAIVNLVPSKPLCVESFQEFPPLGRFAVR

SEQ ID NO: 17499 - protein, 413 aa, Elaphria grata
  unsure (1)..(413): unsure at all Xaa locations
HVDSGKSTTTGHLIYKCGGIDKRTIEKFEKEAQEMGKGSFKYAWVLDKLKAERERGITIDIALWKFETAKYYVTIIDAPGHRDFIKNMITGTSQADCAVLIVAAGTGEFEAGISKNGXTREHALLAFTLGVKQLIVGVNKMDSTEPPYSESRFEEIKKEVSSYIKKIGYNPAAVAFVPISGWHGDNMLEASTKMPWFKGWNVERKEGKAEGKCLIEALDAILPPARPTDKALRLPLQDVYKIGGIGTVPVGRVETGILKPGTIVVFAPANITTEVKSVEMHHEALQEAVPGDNVGFNVKNVSVKELRRGYVAGDSKNNPPKGAADFTAQVIVLNHPGQISNGYTPVLDCHTAHIACKFAEIKEKVDRRTGKSTEDNPKSIKSGDAAIVNLVPSKPLCVESFQEFPPLGRFAVR

SEQ ID NO: 17500 - protein, 413 aa, Eudryas grata
HVDSGKSTTTGHLIYKCGGIDKRTIEKFEKEAQEMGKGSFKYAWVLDKLKAERERGITIDIALWKFETAKYYVTIIDAPGHRDFIKNMITGTSQADCAVLIVAAGTGEFEAGISKNGQTREHALLAFTLGVKQLIVGVNKMDSTEPPYSESRFEEIKKEVSSYIKKIGYNPAAVAFVPISGWHGDNMLEASTKMPWFKGWNVERKEGKAEGKCLIEALDAILPPARPTDKALRLPLQDVYKIGGIGTVPVGRVETGVLKPGTIVVFAPANITTEVKSVEMHHEALQEAVPGDNVGFNVKNVSVKELRRGYVAGDSKNNPPKGAADFTAQVIVLNHPGQISNGYTPVLDCHTAHIACKFAEIKEKVDRRTGKSTEDNPKSIKSGDAAIVNLVPSKPLCVESFQEFPPLGRFAVR

SEQ ID NO: 17501 - protein, 413 aa, Feralia major
HVDSGKSTTTGHLIYKFGGIDKRTIEKFEKEAQEMGKGSFKYAWVLDKLKAERERGITIDIALWKFETAKYYVTIIDAPGHRDFIKNMITGTSQADCAVLIVAAGTGEFEAGISKNGQTREHALLAFTLGVKQLIVGVNKMDSTEPPYSEPRFEEIKKEVSSYIKKIGYNPAAVAFVPISGWHGDNMLEPSTKMPWFKGWMVERKEGKAEGKCLIEALDAILPPARPTDKALRLPLQDVYKIGGIGTVPVGRVETGILKPGTVVVFAPANITTEVKSVEMHHEALQEAVPGDNVGFNVKNVSVKELRRGYVAGDSKNNPPKGAADFTAQVIVLNHPGQISNGYTPVLDCHTAHIACKFAEIKEKVDRRTGKSTEDNPKSIKSGDAAIVNLVPSKPLCVESFQEFPPLGRFAVR

SEQ ID NO: 17502 - protein, 413 aa, Lithophane hemina
HVDSGKSTTTGHLIYKCGGIDKRTIEKFEKEAQEMGKGSFKYAWVLDKLKAERERGITIDIALWKFETAKYYVTIIDAPGHRDFIKNMITGTSQADCAVLIVAAGTGEFEAGISKNGQTREHALLAFTLGVKQLIVGVNKMDSTEPPYSEPRFEEIKKEVSSYIKKIGYNPLAVAFVPISGWHGDNMLEPSTKMPWFKGWNVERKEGKAEGKCLIEALDAILPPARPTDKALRLPLQDVYKIGGIGTVPVGRVETGILKPGTIVVFAPANITTEVKSVEMHHEALQEAVPGDNVGFNVKNVSVKELRRGYVAGDSKNNPPKGAADFTAQVIVLNHPGQISNGYTPVLDCHTAHIACKFAEIKEKVDRRTGKSTEDNPKSIKSGDAAIVNLVPSKPLCVESFQEFPPLGRFAVR

SEQ ID NO: 17503 - protein, 413 aa, Nedra ramosula
  unsure (1)..(413): unsure at all Xaa locations
HVDSGKSTTTGHLIYKCGGIDKRTIEKFEKEAQEMGKGSFKYAWVLDKLKAERERGITIDIALWKFETAKYYVTIIDAPGHRDFIKNMITGTSQADCAVLIVAAGTGEFEAGISKNGQTREHALLAFTLGVKQLIVGVXKMDSTEPPYSESRFEEIKKEVSSYIKKIGYNPAAVAFVPISGWHGDNMLEASTKMPWFKGWNVERKEGKAEGKCLIEALDAILPPARPTDKALRLPLQDVYKIGGIGTVPVGRVETGILKPGTIVVFAPANITTEVKSVEMHHEALQEAVPGDNVGFNVKNVSVKELRRGYVAGDSKNNPPKGAADFTAQVIVLNHPGQISNGYTPVLDCHTAHIACKFAEIKEKVDRRTGKSTEDNPKSIKSGDAAIVNLVPSKPLCVESFQEFPPLGRFAVR

SEQ ID NO: 17504 - protein, 413 aa, Oncocnemis obscurata
HVDSGKSTTTGHLIYKCGGIDKRTIEKFEKEAQEMGKGSFKYAWVLDKLKAERERGITIDIALWKFETAKYYVTIIDAPGHRDFIKNMITGTSQADCAVLIVAAGTGEFEAGISKNGQTREHALLAFTLGVKQLIVGVNKMDSTEPPYSESRFEEIKKEVSSYIKKIGYNPAAVAFVPISGWHGDNMLEPSTKMPWFKGWNVERKEGKAEGKCLIEALDAILPPARPTDKPLRLPLQDVYKIGGIGTVPVGRVETGVLKPGTIVVFAPANITTEVKSVEMHHEALQEAVPGDNVGFNVKNVSVKELRRGYVAGDSKNNPPKGAADFTAQVIVLNHPGQISNGYTPVLDCHTAHIACKFAEIKEKVDRRTGKSTEDNPKSIKSGDAAIVNLVPSKPLCVESFQEFPPLGRFAVR

SEQ ID NO: 17505 - protein, 413 aa, Orthodes crenulata
HVDSGKSTTTGHLIYKCGGIDKRTIEKFEKEAQEMGKGSFKYAWVLDKLKAERERGITIDIALWKFETAKYYVTIIDAPGHRDFIKNMITGTSQADCAVLIVAAGTGEFEAGISKNGQTREHALLAFTLGVKQLIVGVNKMDSTEPPYSEPRFEEIKKEVSSYIKKIGYNPAAVAFVPISGWHGDNMLEPSTKMPWFKGWNVERKEGKAEGKCLIEALDAILPPARPTDKALRLPLQDVYKIGGIGTVPVGRVETGILKPGTIVVFAPANITTEVKSVEMHHEALQEAVPGDNVGFNVKNVSVKELRRGYVAGDSKNNPPKGAADFTAQVIVLNHPGQISNGYTPVLDCHTAHIACKFAEIKEKVDRRTGKSTEDNPKSIKSGDAAIVNLVPSKPLCVESFQEFPPLGRFAVR

SEQ ID NO: 17506 - protein, 413 aa, Paectes pygmaea
HVDSGKSTTTGHLIYKCGGIDKRTIEKFEKEAQEMGKGSFKYAWVLDKLKAERERGITIDIALWKFETAKYYVTIIDAPGHRDFIKNMITGTSQADCAVLIVAAGTGEFEAGISKNGQTREHALLAFTLGVKQLIVGVNKMDSTEPPYSESRFEEIKKEVSSYIKKIGYNPAAVAFVPISGWHGDNMLEASTKMPWFKGWNVERKEGKAEGKCLIEALDAILPPARPTDKALRLPLQDVYKIGGIGTVPVGRVETGVLKPGTVVVFAPAQITTEVKSVEMHHEALQEAVPGDNVGFNVKNVSVKELRRGYVAGDSKNNPPRGAADFTAQVIVLNHPGQISNGYTPVLDCHTAHIACKFAEIKEKVDRRTGKSTEDNPKSIKSGDAAIVNLVPSKPLCVESFQEFPPLGRFAVR

SEQ ID NO: 17507 - protein, 413 aa, Panthea furcilla
HVDSGKSTTTGHLIYKCGGIDKRTIEKFEKEAQEMGKGSFKYAWVLDKLKAERERGITIDIALWKFETAKYYVTIIDAPGHRDFIKNMITGTSQADCAVLIVAAGTGEFEAGISKNGQTREHALLAFRLGVKQLIVGVNKMDSTEPPYSEPRFEEIKKEVSSYIKKIGYNPAAVAFVPISGWHGDNMLEASTKMPWFKGWNVERKEGKAEGKCLIEALDAILPPARPTDKALRLPLQDVYKIGGIGTVPVGRVETGILKPGTIVVFAPANITTEVKSVEMHHEALQEAVPGDNVGFNVKNVSVKELRRGYVAGDSKNNPPKGAADFTAQVIVLNHPGQISNGYTPVLDCHTAHIACKFAEIKEKVDRRTGKSTEDNPKSIKSGDAAIVNLVPSKPLCVESFQEFPPLGRFAVR

SEQ ID NO: 17508 - protein, 413 aa, Psaphida resumens
HVDSGKSTTTGHLIYKCGGIDKRTIEKFQKEAQEMGKGSFKYAWVLDKLKAERERGITIDIALWKFETAKYYVTIIDAPGHRDFIKNMITGTSQADCAVLIVAAGTGEFEAGISKNGQTREHALLAFTLGVKQLIVGVNKMDSTEPPYSESRFEEIKKEVSSYIKKIGYNPAAVAFVPISGWHGDNMLEPSTKMPWFKGWLVERKEGKAEGKCLIEALDAILPPARPTDKALRLPLQDVYKIGGIGTVPVGRVETGILKPGTIVVFAPANITTEVKSVEMHHEALQEAVPGDNVGFNVKNVSVKELRRGYVAGDSKNNPPKGAADFTAQVIVLNHPGQISNGYTPVLDCHTAHIACKFAEIKEKVDRRTGKSTEDNPKSIKSGDAAIVNLVPSKPLCVESFQEFPPLGRFAVR

SEQ ID NO: 17509 - protein, 413 aa, Psychomorpha epimenis
HVDSGKSTTTGHLIYKCGGIDKRTIEKFEKEAQEMGKGSFKYAWVLDKLKAERERGITIDIALWKFETAKYYVTIIDAPGHRDFIKNMITGTSQADCAVLIVAAGTGEFEAGISKNGQTREHALLAFTLGVKQLIVGVNKMDSTEPPYSESRFEEIKKEVSSYIKKIGYNPAAVAFVPISGWHGDNMLEASTKMPWFKGWNVERKEGKAEGKCLIEALDAILPPARPTDKPLRLPLQDVYKIGGIGTVPVGRVETGVLKPGTIVVFAPANITTEVKSVEMHHEALQEAVPGDNVGFNVKNVSVKELRRGYVAGDSKNNPPKGAADFTAQVIVLNHPGQISNGYTPVLDCHTAHIACKFAEIKEKVDRRTGKSTEDNPKSIKSGDAAIVNLVPSKPLCVESFQEFPPLGRFAVR

SEQ ID NO: 17510 - protein, 413 aa, Raphia abrupta
HVDSGKSTTTGHLIYKCGGIDKRTIEKFEKEAQEMGKGSFKYAWVLDKLKAERERGITIDIALWKFETAKYYVTIIDAPGHRDFIKNMITGTSQADCAVLIVAAGTGEFEAGISKNGQTREHALLAFTLGVKQLIVGVNKMDSTEPPYSESRFEEIKKEVSSYIKKIGYNPAAVAFVPISGWHGDNMLEPSTKMPWFKGWLVERKEGKAEGKCLIEALDAILPPARPTDKPLRLPLQDVYKIGGIGTVPVGRVETGILKPGTIVVFAPANITTEVKSVEMHHEALQEAVPGDNVGFNVKNVSVKELRRGYVAGDSKNNPPKGAADFTAQVIVLNHPGQISNGYTPVLDCHTAHIACKFAEIKEKVDRRTGKSTEDNPKSIKSGDAAIVNLVPSKPLCVESFQEFPPLGRFAVR

SEQ ID NO: 17511 - protein, 413 aa, Spragueia leo
HVDSGKSTTTGHLIYKCGGIDKRTIEKFEKEAQEMGKGSFKYAWVLDKLKAERERGITIDIALWKFETAKYYVTIIDAPGHRDFIKNMITGTSQADCAVLIVAAGTGEFEAGISKNGQTREHALLAFTLGVKQLIVGVNKMDSTEPPYSESRFEEIKKEVSSYIKKIGYNPAAVAFVPISGWHGDNMLEASTKMPWFKGWQVERKEGKAEGKCLIEALDAILPPARPTDKPLRLPLQDVYKIGGIGTVPVGRVETGILKPGTIVVFAPANITTEVKSVEMHHEALQEAVPGDNVGFNVKNVSVKELRRGYVAGDSKNNPPKGAADFTAQVIVLNHPGQISNGYTPVLDCHTAHIACKFAEIKEKVDRRTGKSTEDNPKSIKSGDAAIVNLVPSKPLCVESFQEFPPLGRFAVR

SEQ ID NO: 17512 - protein, 413 aa, Stiria rugifrons
  unsure (1)..(413): unsure at all Xaa locations
HVDSGKSTTTGHLIYXCGGIDKRTIEKFEKEAQEMGXGSFXYAWVLDKLKAERXRGIXIDIALWKFETAKYYVTIIDAPGHRDFIKNMITGTSQADCAVLIVAAGTGEFEAGISKNGQTREHALLAFTLGVKQLIVGVNKMDSTEPPYSESRFEEIKKEVSSYIKKIGYNPAAVAFVPISGWHGDNMLEPSTKMPWFKGWMVERKEGKAEGKCLIEALDAILPPARPTDKPLRLPLQDVYKIGGIGTVPVGRVETGVLKPGTIVGFAPANITTEVKSVEMHHEALQEAVPGDNVGFNVKNVSVKELRRGYVAGDSKNNPPKGAADFTAQVIVLNHPGQISNGYTPVLDCHTAHIACKFAEIKEKVDRRTGKSTEDNPKSIKSGDAAIVNLVPSKPLCVESFQEFPPLGRFAVR

SEQ ID NO: 17513 - protein, 413 aa, Tarachidia candefacta
HVDSGKSTTTGHLIYKCGGIDKRTIEKFEKEAQEMGKGSFKYAWVLDKLKAERERGITIDIALWKFETAKYYVTIIDAPGHRDFIKNMITGTSQADCAVLIVAAGTGEFEAGISKNGQTREHALLAFTLGVKQLIVGVNKMDSTEPPYSEPRFEEIKKEVSSYIKKIGYNPAAVAFVPISGWHGDNMLEASTKMPWFKGWQVERKEGKAEGKCLIEALDAILPPARPTDKALRLPLQDVYKIGGIGTVPVGRVETGILKPGTIVVFAPANITTEVKSVEMHHEALQEAVPGDNVGFNVKNVSVKELRRGYVAGDSKNNPPKGAADFTAQVIVLNHPGQISNGYTPVLDCHTAHIACKFAEIKEKVDRRTGKSTEDNPKSIKSGDAAIVNLVPSKPLCVESFQEFPPLGRFAVR

SEQ ID NO: 17514 - protein, 413 aa, Thioptera nigrofimbria
  unsure (1)..(413): unsure at all Xaa locations
HVDSGKSTTTGHLIYKCGGIDKRTIEKFEKEAQEMGKGSFKYAWVLDKLKAERERGITIDIALWKFETAKYYVTIIDAPGHRDFIKNMITGTSQADCAVLIVAAGTGEFEAGISKNGQTREHALLAFTLGVKQLIVGVNKMDSTEPPYSESRFEEIKKEVSSYIKKIGYNPAAVAFVPISGWHGDNMLEASPKMPWFKGWNVERKEGKAEGKSLIEALDAILPPARPTDKALRLPLQDVYKIGGIGTVPVGRVETGILKPGTIVVFAPANITTEVKSVEMHHEALQEAVPGDNVGFNVKNVSVKELRRGYVAGDSKNNPPKGAADFTAQVIVLNHPGQISNGYTPVLDCHTAHIACKFAEIKEKVDRRTGKSTEDNPKSIKSGDAAIVNLVPSKPLCVESFQEFPPXGRFAVR

SEQ ID NO: 17515 - protein, 413 aa, Polygrammate hebraeicum
HVDSGKSTTTGHLIYKCGGIDKRTIEKFEKEAQEMGKGSFKYAWVLDKLKAERERGITIDIALWKFETAKYYVTIIDAPGHRDFIKNMITGTSQADCAVLIVAAGTGEFEAGISKNGQTREHALLAFTLGVKQLIVGVNKMDSTEPPYSESRFEEIKKEVSSYIKKIGYNPAAVAFVPISGWHGDNMLEPSTKMPWFKGWLVERKEGKAEGKCLIEALDAILPPARPTDKPLRLPLQDVYKIGGIGTVPVGRVETGVLKPGTIVVFAPANITTEVKSVEMHHEALQEAVPGDNVGFNVKNVSVKELRRGYVAGDSKNNPPKGAADFTAQVIVLNHPGQISNGYTPVLDCHTAHIACKFAEIKEKVDRRTGKSTEDNPKSIKSGDAAIVNLVPSKPLCVESFQEFPPLGRFAVR

SEQ ID NO: 17516 - protein, 413 aa, Datana perspicua
  unsure (1)..(413): unsure at all Xaa locations
HVDSGKSTTTGHLIYKCGGIDKRTIEKFEKEAQEMGKGSFKYAWVLDKLKAERERGITIDIALWKFETAKYYVTIIDAPGHRDFIKNMITGTSQADCAVLIVAAGTGEFEAGISKNGQTREHALLAFTLGVKQLIVGVNKMDSTEPPYSESRFEEIKKEVSSYIKKIGYNPAAVAFVPISGWHGDNMLEASTKIPWFKGWNVERKEGKAEGKCLIEALDAILPPARPTDKALRLPLQDVYKIGGIGTVPVGRVETGILKPGTIVVFAPANITTEVKSVEIHHEALQEXVPGDNVGFNVKNVSVKELRRGYVAGDSKNNPPKGAADFTAQVIVLNHPGQISNGYTPVLDCHTAHIACKFAEIKEKVDRRTGKSTEDNPKSIKSGDAAIVNLVPSKPLCVESFQEFPPLGRFAVR

SEQ ID NO: 17517 - protein, 413 aa, Furcula cinerea
HVDSGKSTTTGHLIYKCGGIDKRTIEKFEKEAQEMGKGSFKYAWVLDKLKAERERGITIDIALWKFETAKYYVTIIDAPGHRDFIKNMITGTSQADCAVLIVAAGTGEFEAGISKNGQTREHALLAFTLGVKQLIVGVNKMDSTEPPYSESRFEEIKKEVSSYIKKIGYNPAAVAFVPISGWHGDNMLEPSTKMPWFKGWQVERKEGKAEGKCLIEALDAILPPARPTDKALRLPLQDVYKIGGIGTVPVGRVETGILKPGTIVVFAPANITTEVKSVEMHHEALQEAVPGDNVGFNVKNVSVKELRRGYVAGDSKNNPPKGAADFTAQVIVLNHPGQISNGYTPVLDCHTAHIACKFAEIKEKVDRRTGKSTEDNPKSIKSGDAAIVNLVPSKPLCVESFQEFPPLGRFAVR

SEQ ID NO: 17518 - protein, 413 aa, Symmerista albifrons
HVDSGKSTTTGHLIYKCGGIDKRTIEKFEKEAQEMGKGSFKYAWVLDKLKAERERGITIDIALWKFETAKYYVTIIDAPGHRDFIKNMITGTSQADCAVLIVAAGTGEFEAGISKNGQTREHALLAFTLGVKQLIVGVNKMDSTEPPYSEPRFEEIKKEVSSYIKKIGYNPAAVAFVPISGWHGDNMLEPSTKMPWFKGWLVERKEGKAEGKCLIEALDAILPPARPTDKALRLPLQDVYKIGGIGTVPVGRVETGILKPGTVVVFAPANITTEVKSVEMHHEALQEAVPGDNVGFNVKNVSVKELRRGYVAGDSKNNPPKGAADFTAQVIVLNHPGQISNGYTPVLDCHTAHIACKFAEIKEKVDRRTGKSTEDNPKSIKSGDAAIVNLVPSKPLCVESFQEFPPLGRFAVR

SEQ ID NO: 17519 - protein, 413 aa, Estigmene acrea
HVDSGKSTTTGHLIYKCGGIDKRTIEKFEKEAQEMGKGSFKYAWVLDKLKAERERGITIDIALWKFETSKYYVTIIDAPGHRDFIKNMITGTSQADCAVLIVAAGTGEFEAGISKNGQTREHALLAFTLGVKQLIVGVNKMDSTEPPYSESRFEEIKKEVSSYIKKIGYNPAAVAFVPISGWHGDNMLEPSTKMPWFKGWQVERKEGKADGKCLIEALDAILPPARPTDKALRLPLQDVYKIGGIGTVPVGRVETGILKPGTIVVFAPANITTEVKSVEMHHEALQEAVPGDNVGFNVKNVSVKELRRGYVAGDSKNNPPKGAADFTAQVIVLNHPGQISNGYTPVLDCHTAHIACKFAEIKEKVDRRTGKSTEDNPKSIKSGDAAIVNLVPSKPLCVESFQEFPPLGRFAVR

SEQ ID NO: 17520 - protein, 413 aa, Hypoprepia miniata
HVDSGKSTTTGHLIYKCGGIDKRTIEKFEKEAQEMGKGSFKYAWVLDKLKAERERGITIDIALWKFETAKYYVTIIDAPGHRDFIKNMITGTSQADCAVLIVAAGTGEFEAGISKNGQTREHALLAFTLGVKQLIVGVNKMDSTEPPYSEPRFEEIKKEVSSYIKKIGYNPAAVAFVPISGWHGDNMLEPSTKMPWFKGWNVERKEGKAEGKCLIEALDAILPPARPTDKPLRLPLQDVYKIGGIGTVPVGRVETGILKPGTIVVFAPANITTEVKSVEMHHEALQEAVPGDNVGFNVKNVSVKELRRGYVAGDSKNNPPKGAADFTAQVIVLNHPGQISNGYTPVLDCHTAHIACKFAEIKEKVDRRTGKSTEDNPKSIKSGDAAIVNLVPSKPLCVESFQEFPPLGRFAVR

SEQ ID NO: 17521 - protein, 447 aa, Leishmania braziliensis
MGKDKVHMNLVVVGHVDAGKSTATGHLIYKCGGIDKRTIEKFEKEAAEMGKASFKYAWVLDKLKAERERGITIDIALWKFESPKSVFTIIDAPGHRDFIKNMITGTSQADAAILMIDSTQGGFEAGVSKDGQTREHALLAFTLGVKQMVVCCNKMDDKTVQYSQARYEEISKEVGTYLKRVGYNPEKVRFIPISGWQGDNMIDKSESMAWYKGPTLLDALDMLAGAVRPVDKPGAAPADVYKIGGIGTVPVGRVETGIMKPGDVVTFAPANVTTEVKSIEMHHEQLAEAVPGDNVGFNVKNVSVKDIRRGNVWGNSKNDPAEEPADFTAQVIVLNHPGQISNGYAPVLDCHTSHIACRFGTIESKIDRRSGKDVEKNPKAIKSGDAAIVKMVPQKPMCVEVFNDYPPLGRFAVRDMRRTVAVGIIKAVSKKDGSRKVTKAAAKAAKK

SEQ ID NO: 17522 - protein, 449 aa, Leishmania donovani
MGKDKVHMNLVVVGHVDAGKSTATGHLIYKCGGIDKRTIEKFEKEAAEIGKASFKYAWVLDKLKAERERGITIDIALWKFESPKSVFTIIDAPGHRDFIKNMITGTSQADAAILMIDSTHGGFEAGISKDGQTREHALLAFTLGVKQMVVCCNKMDDKTVTYAQSRYDEISKEVGAYLKRVGYNPEKVRFIPISGWQGDNMIERSDNMPWYKGPTLLDALDMLEPPVRPVDKPLRLPLQDVYKIGGIGTVPVGRVETGIMKPGDVVTFAPANVTTEVKSIEMHHEQLAEAQPGDNVGFNVKNVSVKDIRRGNVCGNSKNDPPKEAADFTAQVIVLNHPGQISNGYAPVLDCHTSHIACRFAEIESKIDRRSGKELEKNPKAIKSGDAAIVKMVPQKPMCVEVFNDYAPLGRFAVRDMRQTVAVGIIKGVNKKEGSGGKVTKAAAKAAKK

SEQ ID NO: 17523 - protein, 449 aa, Trypanosoma brucei
MGKEKVHMNLVVVGHVDAGKSTATGHLIYKCGGIDKRTIEKFEKEAADIGKASFKYAWVLDKLKAERERGITIDIALWKFESPKSVFTIIDAPGHRDFIKNMITGTSQADAAILIIASAQGEFEAGISKDGQTREHALLAFTLGVKQMVVCCNKMDDKTVNYGQERYDEIVKEVSAYIKKVGYNVEKVRFVPISGWQGDNMIEKSEKMPWYKGPTLLEALDMLEPPVRPSDKPLRLPLQDVYKIGGIGTVPVGRVETGVMKPGDVVTFAPANVTTEVKSIEMHHEQLAEATPGDNVGFNVKNVSVKDIRRGNVCGNTKNDPPKEAADFTAQVIILNHPGQIGNGYAPVLDCHTSHIACKFAEIESKIDRRSGKELEKAPKSIKSGDAAIVRMVPQKPMCVEVFNDYAPLGRFAVRDMRQTVAVGIIKAVTKKDGSGGKVTKAAVKASKK

SEQ ID NO: 17524 - protein, 398 aa, Trypanosoma brucei
AGKSTATGHLIYKCGGIDKRTIEKFEKEAADIGKASFKYAWVLDKLKAERERGITIDIALWKFESPKSVFTIIDAPGHRDFIKNMITGTSQADAAILIIASAQGEFEAGISKDGQTREHALLAFTLGVKQMVVCCNKMDDKTVNYGQERYDEIVKEVSAYIKKVGYNVEKVRFVPISGWQGDNMIEKSEKMPWYKGPTLLEALDMLEPPVRPSDKPLRLPLQDVYKIGGIGTVPVGRVETGVMKPGDVVTFAPANVTTEVKSIEMHHEQLAEATPGDNVGFNVKNVSVKDIRRGNVCGNTKNDPPKEAADFTAQVIILNHPGQIGNGYAPVLDCHTSHIACKFAEIESKIDRRSGKELEKAPKSIKSGDAAIVRMVPQKPMCVEVFNDYAPLGRFAVR

SEQ ID NO: 17525 - protein, 449 aa, Trypanosoma cruzi
MGKEKVHMNLVVVGHVDAGKSTATGHLIYKCGGIDKRTIEKFEKEAAEIGKSSFKYAWVLDKLKAEREPGITIDIALWKFESPKSVFTIIDAPGHRDFIKNMITGTPQADAAVLVIASSQGEFEAGISKDGQTREHALLAFTLGVKQMVVCCNKMDDKSVNFAQERYDEIVKEVSAYLKKVGYNVEKVRFIPISGWQGDNMIDKSENMPWYKGPTLLEALDMLEPPVRPSDKPLRLPLQDVYKIGGIGTVPVGRVETGTMKPGDVVTFAPANVTTEVKSIEMHHEQLAEATPGDNVGFNVKNVSVKDIRRGNVCGNSKNDPPKEAADFTAQVIILNHPGQIGNGYAPVLDCHTCHIACKFAEIESKIDRRSGKELEKNPKSIKSGDAAMVRMVPQKPMCVEVFNDYAPLGRFAVRDMRQTVAVGIIKAVTKKDGGAGKVTKAAAKAAKK

SEQ ID NO: 17526 - protein, 395 aa, Trypanosoma cruzi
STATGHLIYKCGGIDKRTIEKFEKEAAEIGKSSFKYAWVLDKLKAERERGITIDIALWKFESPKSVFTIIDAPGHRDFIKNMITGTSQADAAVLVIASSQGEFEAGISKDGQTREHALLAFTLGVKQMVVCCNKMDDKSVNFAQERYDEIVKEVSAYLKKVGYNVEKVRFIPISGWQGDNMIDKSENMPWYKGPTLLEALDMLEPPVRPSDKPLRLPLQDVYKIGGIGTVPVGRVETGTMKPGDVVTFAPANVTTEVKSIEMHHEQLAEATPGDNVGFNVKNVSVKDIRRGNVCGNSKNDPPKEAADFTAQVIILNHPGQIGNGYAPVLDCHTCHIACKFAEIESKIDRRSGKELEKNPKSIKSGDAAMVRMVPQKPMCVEVFNDYAPLGRFAVR

SEQ ID NO: 17527 - protein, 449 aa, Trypanosoma brucei brucei
MGKEKVHMNLVVVGHVDAGKSTATGHLIYKCGGIDKRTIEKFEKEAADIGKASFKYAWVLDKLKAERERGITIDIALWKFESPKSVFTIIDAPGHRDFIKNMITGTSQADAAILIIASAQGEFEAGISKDGQTREHALLAFTLGVKQMVVCCNKMDDKTVNYGQERYDEIVKEVSAYIKKVGYNVEKVRFVPISGWQGDNMIEKSEKMPWYKGPTLLEALDMLEPPVRPSDKPLRLPLQTCTKIGGIGTVPVGRVETGVMKPGDVVTFAPANVTTEVKSIEMHHEQLAEATPGDNVGFNVKNVSVKDIRRGNVCGNTKNDPPKEAADFTAQVIILNHPGQIGNGYAPVLDCHTSHIACKFAEIESKIDRRSGKELEKAPKSIKSGDAAIVRMVPQKPMCVEVFNDYAPLGRFAVRDMRQTVAVGIIKAVTKKDGSGGKVTKAAVKASKK

SEQ ID NO: 17528 - protein, 587 aa, Trichomonas vaginalis
MDSVSVPKYQSFSSTKFKLNGKLRFEEVSHFFMSTPLKIEKPKTAGGFTLSLGNGTKIEIKPKVETKPVVLTTSKPAENKPQEEPKPAPKPEPKPEPKPEPKPAPKPEPKPEPKPEPKPEPKPEPKAEPKPEPKKEEAEEEEDIEEEEKFEGEILDETAKKHFNIVFIGHVDAGKSTLCGHVLYQAGCVDQRTIEQYQAESAKEGRGSWYFSWVMDLSKEERSKGKTEEVGVAHFETAQNKYTILDAPGHRSYVPQMIGGAVQADVAVLVISARNGEFEAGFENGGQTSEHLLIARTAGVREIIIVVNKMDDPTVKWSKERFDQIVTKFTPFIEREIGFKKDQYTYIPIAALTGFNLKQRSNECPWYNGPTLFEKLDSLKPPVRNETDSFRLPVIDRYKTKHVIASGKLEKGVIKEGDQVIVMPSRKLGTISSIFVDENKIRRAVPGDNIRVALSGIDMADINSGSVICPVNAPCDVAQKVIAKIRIVPSGPELITAGYEAMCHIHTETVPVSVEKLRTLQIPGRELEKNPRFIKRGCLAEVILKFDHPICVEVAKDFPQLGRFIIRKEGFTTIVGLVDKLPKATGK

SEQ ID NO: 17529 - protein, 422 aa, Trichomonas vaginalis
VDAGKSTTTGHLIYKCGGLDKRKLAAIEKEAEQLGKSSFKYAFVMDSLKAERERGITIDISLWKFEGQKFSFTIIDAPGHRDFIKNMITGTSQADAAILVIDSTLGGFEAGIAEQGQTREHALLAFTLGIKQVIVAVNKMDDKTVNYNKARFDEITAEMTRILTGIGYKPEMFRFVPISGWAGDNMTEKSPNMPWYNGPYLLEALDSLQPPKRPFDKPLRLPLQDVYKINGIGTVPVGRVESGTMKPGMIVNFAPSTVTAEVKSIEMHHESLPEALPGDNIGFNVKNVSTADVKRGYVVGDTKRDPPVECASFTAQMIISNHPGKIHAGYQPVFDCHTAHIACKFDKLIQRIDRRHGKKATENPEYIQKDDAAIVEVVPSKPLVVESFQEYPPLGRFAIRDMKQTVAVGVIRSVNKKPNPIK

SEQ ID NO: 17530 - protein, 396 aa, Giardia intestinalis
STLTGHLIYKCGGIDQRTIDEYEKRATEMGKGSFKYAWVLDQLKDERERGITINIALWKFETKKYIVTIIDAPGHRDFIKNMITGTSQADVAILVVAAGQGEFEAGISKDGQTREHATLANTLGIKTMIICVNKMDDGQVKYSKERYDEIKGEMMKQLKNIGWKKAEEFDYIPTSGWTGDNIMEKSDKMPWYEGPCLIDAIDGLKAPKRPTDKPLRLPIQDVYKISGVGTVPAGRVETGELAPGMKVVFAPTSQVSEVKSVEMHHEELKKAGPGDNVGFNVRGLAVKDLKKGYVVGDVTNDPPVGCKSFTAQVIVMNHPKKIQPGYTPVIDCHTAHIACQFQLFLQKLDKRTLKPEMENPPDAGRGDCIIVKMVPQKPLCCETFNDYAPLGPFAVR

SEQ ID NO: 17531 - protein, 465 aa, Giardia intestinalis
MSSQEVVQVEEEKRKNLNIVFIGHVDAGKSTISGHLVSDLGKLDKRQLEKLEQQAKALNRESWKYAFAMDTSEEEREKGKTVECARESFLTPNGRRITIIDAPGHKGFVHNMISGAAQADTAILVISARKGEFESGFERGGQTSEHALLAYVNGIKQIVCLINKMDDITVEYCKKRYDSIVSQLKLYLENVGYASKNIFFLPISGFTGENLISTKELNPKLSEWYSGPSFLDLLDELKVPKRDTKSPLCACVSGHYKENSAFIVVKVEQGKMSIGDTVLCLPENKAFDILDIEGEQEEGSKLVQAKAGDNVRIKVKDDIWEFLTEGSVICAQPSPGQSPSVSVTNRFQANLLIVSTAENLVITSGYSCVAHINLQQVGCQIRAILADLDLKTGKVKPEYIVSTEPLKVRRPTHVLSKARIICEIITQKPVCVQSTPGHEALGRIILRHESDTVAIGYIVSVKPAK

SEQ ID NO: 17532 - protein, 401 aa, Physarum polycephalum
AGKSTTTGHLIYKCGGIDKRTIEKFEKEAAEMGKGSFKYAWVLDKLKSERERGITIDIALWKFETAKYYITIIDAPGHRDFIKNMITGTSQADAAVLVIASPTGEFEAGIAKTGQTREHALLAYTLGVKQMIVAINKMDEKSVNWSQARYDEIVKETSSFVKKIGYNPEKIAFVPISGWNGDNMLEKSANLPWYKGPTLLEALDQITEPKRPTDKPLRVPLQDVYKIGGIGTVPVGRVETGILKPGMIVTFAPANLSTEVKSVEMHHVALPEAVPGDNVGFNVKNLSVKDIRRGMVAGDSKNSPPARAESFNAQVIILNHPGTIHAGYAPVLDCHTAHIACKFTEILSKVDRRTGQAVEEVPKNIKNGDAAIVKLTPSKPMCVESFTDFPPLGRFAVRDMR

SEQ ID NO: 17533 - protein, 443 aa, Plasmodium berghei
MGKEKTHINLVVIGHVDSGKSTTTGHIIYKLGGIDRRTIEKFEKESAEMGKGSFKYAWVLDKLKAERERGITIDIALWKFETPRYFFTVIDAPGHKHFIKNMITGTSQADVALLVVPAEVGGFEGAFSKEGQTKEHALLAFTLGVKQIVVGVNKMDTVKYSEDRYEEIKKEVKDYLKKVGYQADKVDFIPISGFEGDNLIEKSDKTPWYKGRTLIEALDTMEPPKRPYDRPLRIPLQGVYKIGGIGTVPVGRVETGILKAGMVLNFAPSAVVSECKSVEMHKEVLEEARPGDNIGFNVKNVSVKEIKRGYVASDTKNEPAKGCSKFTAQVIILNHPGEIKNGYTPVLDCHTSHISCKFLNIDSKIDKRSGKVVEESPKAIKSGDSALVTLEPKKPMVVETFTEYPPLGRFAIRDMRQTIAVGIIKSVEKKEPGAVSAKAPAKK

SEQ ID NO: 17534 - protein, 401 aa, Spironucleus vortens
NGKSTLTGHLIFKCGGIDQRTLDEYEKKANELGKGSFKYAWVLDQLKDERERGITINIALWKFETKKFIVTIIDAPGHRDFIKNMITGTSQADVAILVVAAGQGEFEAGISKEGQTREHATLANTLGIKTIILCINKMDDPNVNYSKDRYNEIKTEMTKTLVAIGYKKAPEFNYIPTSGWTGLNIMEKDTEKTGWYDGPCLIEAIDSLKPPKRPTDKCLRLPIQDVYKINGVGTVPAGRVESGCLKPNTLAVFAPTNTTAEVKSVEMHHEELPQAEPGDNVGFNVRGIAAKDIKKGYVVGDSKESDPPGRVKSFEAQVIIMNHPKKIQPGYTPVVDCHTNHMACEFTKFLQKLNSRTLKPEQENPTEAARGECIIAKITPTKEFSAESYELYPALGRFAVR

SEQ ID NO: 17535 - protein, 443 aa, Plasmodium falciparum (isolate K1 / Thailand)
MGKEKTHINLVVIGHVDSGKSTTTGHIIYKLGGIDRRTIEKFEKESAEMGKGSFKYAWVLDKLKAERERGITIDIALWKFETPRYFFTVIDAPGHKDFIKNMITGTSQADVALLVVPADVGGFDGAFSKEGQTKEHVLLAFTLGVKQIVVGVNKMDTVKYSEDRYEEIKKEVKDYLKKVGYQADKVDFIPISGFEGDNLIEKSDKTPWYKGRTLIEALDTMQPPKRPYDKPLRIPLQGVYKIGGIGTVPVGRVETGILKAGMVLNFAPSAVVSECKSVEMHKEVLEEARPGDNIGFNVKNVSVKEIKRGYVASDTKNEPAKGCSKFTAQVIILNHPGEIKNGYTPLLDCHTSHISCKFLNIDSKIDKRSGKVVEENPKAIKSGDSALVSLEPKKPMVVETFTEYPPLGRFAIRDMRQTIAVGIINQLKRKNLGAVTAKAPAKK

SEQ ID NO: 17536 - protein, 364 aa, Triops longicaudatus
LDKLKAERERGITIDIALWKFETAKFYVTIIDAPGHRDFIKNMITGTSQADCAVLIVAAGVGEFEAGISKNGQTREHALLAYTLGVKQLIVGVNKMDSTEPPYSENRFEEIKKEVSSYIKKIGYNPAAVAFVPISGWHGDNMLEASTNLPWYKGWAIERKEGKADGKTLLDALDAILPPSRPTDKPLRLPLQDVYKIGGIGTVPVGRVETGIIKPGMVVTFAPANITTEVKSVEMHHEALEEAVPGDNVGFNVKNVSVKELRRGYVAGDSKSNPPKGAADFYAQVIVLNHPGQISNGYTPVLDCHTAHIACKFAEIKEKCDRRTGKTTEENPKFIKSGDAAMITLVPSKPLCVESFSDFPPLGR

SEQ ID NO: 17537 - protein, 364 aa, Chaetopleura apiculata
LDKLKAERERGITIDIALWKFETTKYYVTVIDAPGHRDFIKNMITGTSQADCAVLIVAAGVGEFEAGISEQGQTREHALLAYTLGVKQLIIGVNKMDSTTPPFSQPRFEEISKEVGTYIKKVGYNPKAVAFVPISGWNGDNMLEVSSNTAWFKGWNIERKEGNASGKTLFEALDSILPPKRPTDKPLRLPLQDVYKIGGIGTVPVGRVETGIIKPGVIVKFSPCNITTEVKSVEMHHESLSEALPGDNVGFNVKNVSVKELKRGYVAGDSKNDPPMSAASFNAQVIILNHPGEIHAGYSPVLDCHTAHIACKFASLLEKVDRRTGKKLEDNPKMVKSGDAAIVQLIPSKPMTVETFTEYPPLGR

SEQ ID NO: 17538 - protein, 437 aa, Paramecium tetraurelia
MPKDKLHVNLVVIGHVDSGKSTTTGHLIYKLGGIDERTIKKFEDEANKLGKGSFKYAWVLDNLKAERERGITIDISLWKFETNKYYYTVIDAPGHRDFIKNMITGTSQADVALLMIASPAGEFEAGISKEGQTREHVLLAYTLGVKQMICATNKMDEKTVNYAQGRYDEIVKEMRDYLKKVGYNPDNVPFIPISGWVGDNMLEKSANFGWYKGPTLLEALDAVTPPKRPTEKPLRLPLQDVYKIGGIGTVPVGRVETGVLKPGMVVQFAPSAITTEVKSVEMHHEALPEAVPGDNVGFNVKNIAVKDLKRGFVCSDSKSDPARECQSFNAQVIIINHPGQIQNGYCPVLDCHTAHIACKFQEILSKNDRRTGKVIEEEPKFVKSGDAAMVKLIPTKPMCVEIFSEYPPLGRFAVRDMKQTVAVGVIKVVEKKELKKK

SEQ ID NO: 17539 - protein, 409 aa, Paramecium tetraurelia
VDSGKSTTTGHLIYKLGGIDERTIKKFEDEANKLGKGSFKYAWVLDNLKAERERGITIDISLWKFETNKYYYTVIDAPGHRDFIKNMITGTSQADVALLMIASPAGEFEAGISKEGQTREHVLLAYTLGVKQMICATNKMDEKTVNYAQGRYDEIVKEMRDYLKKVGYNPDNVPFIPISGWVGDNMLEKSANFGWYKGPTLLEALDAVTPPKRPTEKPLRLPLQDVYKIGGIGTVPVGRVETGVLKPGMVVQFAPSAITTEVKSVEMHHEALPEAVPGDNVGFNVKNIAVKDLKRGFVCSDSKSDPARECQSFNAQVIIIINHPGQIQNGYCPVLDCHTAHIACKFQEILSKNDRRTGKVIEEEPKFVKSGDAAMVKLIPTKPMCVEIFSEYPPLGRFAVRDMKQTVAV

SEQ ID NO: 17540 - protein, 407 aa, Euplotes aediculatus
VDSGKSTTTGHLIYKLGGTDARTIEKFEKESAEMGKGTFKYAWVLDKLKAERERGITIDIALWKFETTNRFYTIIDAPGHRDFIKNMITGTSQADAAILIIASGKGEFEAGISKEGQTREHALLAFTMGVKQMVVALNKMDAAEYDETRYKEIKKEVSEYLDKVGYKTDTMNFVPISGFNGDNLLERSTNMPWYTGPTLTEALDSFKQPKRPILKPLRLPLQDVYKIGGIGTVPVGRVETGVLKSGIVVVFAPKGVSAECKSVEMHHEAVEEAIPGNNVGFNVKGLSVKDIKRGFVAGDSKNDPPMDTENFVAHVIIMNHPGEIKAGYTPVIDVHTAHIACKFEELLTKADRRSGKKTDDPPKFLKAGDAGQIRLVPTKPLCIENFSRYAPLGRFAVRDMKQTVAVG

SEQ ID NO: 17541 - protein, 805 aa, Euplotes aediculatus
MDKKEDFPALGSLEKKKDANQQSNQKNKKKEDKKEDEKKEEVNTETQKPVEEVKKAKLKATVRTFVPKSSVPKEPVKINYYIPHEEPTLAEMDYFPTLGGPAPTAPVVSDAQIRHSEFLERHELFKPYICLIPKELWYVPQEYIDMYGFPIMSLLPELYAYLWNTYNIFFTPDAQWQTNSSTVMSTLGELWTHAEWRDRIIAKEQKEIEEWEREMREWEEENLEDEDGVSIDEMDSYGKGKKNKKNKKKKKDDKGKRPPPPPPKSLSSYKRFEKKKDETVVPKKNIGFKEVSEITFEEEVVEVDETRQPSSLVFIGHVDAGKSTICGNLMFMTGMVDERTTEKFKQEAKEKNRDSWWLAYVMDINDDEKSKGKTVEVGRATMETPTKRYTIFDAPGHKNYVPDMIMGAAMADVAALVISARKGEFEAGFERDGQTREHAQLARSLGVSKLVVVVNKMDEETVQWNEARYNDIVSGVTPFLIEQCGYKREDLIFIPISGLNGQNIEKLTPACTWYQGPTLIEILDNIEPPKRNADGPLRVPVLDKMKDRGVVAFGKVESGVIKIGSKLAVMPNNLKCQVVGIYNCKLELVRYANPGENIQIKVRMIDDENLINKGDVLCPYDNLAPLTDLFEAELSILELLPHRPIITPGYKSMMHLHTISDEIVIQTLAGVYELDGSGKEYLKKNPKYCKSGSKVIVKISTRVPVCLEKYEFIEHMGRFTLRDEGRTIALGKVLRYKPTVVKKVEEIPSNVEGDQAKDEESKTASFEYTGSETTLFQNEKKYDVLVYDPEEDTIVTSSNAAEYTE

SEQ ID NO: 17542 - protein, 406 aa, Euplotes aediculatus
VDSGKSTTTGHLIYKCGGIDARTIEKFEKESAEMGKGSFKYAFVLDNLKAERERGITIDIALWKFETPKRFYTIIDAPGHRDFIKNMITGTSQADAAILIIAAGKGEFEAGISKEGQTREHALLAYTMGVKQMIVAMNKMDAAEYDEERYNEIKKEVSEYLAKVGYKPDTMNFVPISGWNGDNLLENSTNMPWYKGPTLTEALDAFKQPKRPIAKPLRLPLQDVYKIGGIGTVPVGRVETGVLKAGIVVVFAPKGVSTECKSAEMHHEAVEEAIPGNNVGFNVKDSQVKDIKRGFVAETQRTTHQWTLRYFVAHVIIINHPGEIKAGYTPVIDVHTAHIACKFEELLTKADRRSGKKTDDLPKFLKAGDAGQIRLVPTEPLCIENFSSYAPLGRFAVRDMKQTVAV

SEQ ID NO: 17543 - protein, 446 aa, Stylonychia lemnae
MPKEKNHLNLVVIGHVDSGKSTSTGHLIYKCGGIDKRTIEKFEKEAAEMGKGSFKYAWVLDKLKAERERGITIDIALWNFETAKSVFTIIDAPGHRDFIKNMITGTSQADAAILIIASGQGEFEAGISKEGQTREHALLAFTMGVKQMIVAVNKMDDKSVNWDQGRFIEIKKELSDYLKKIWLQPRQDPFIPISGWHGDNMLEKSPNMPWFTGSTLIDALDALDQPKRPKDKPLRLPLQDVYKIGGIGTVPVGRVETGLLKPGMVLTFAPMNITTECKSVEMHHESLTEAEPGDNVGFTVKNLSVKDLRRGYVASDSKNDPAKDTTNFLAQVIVLNHPGQIQKGYAPVLDCHTAHIACKFDEIESKVDRRSGKVLEEEPKFIKSGEAALVRMVPQKPMCVEAFNQYPPLGRFAVRDMKQTVAVGVIKEVVKKEQKGMVTKAAQKKK

SEQ ID NO: 17544 - protein, 409 aa, Stylonychia mytilus
VDSGKSTSTGHLIYKCGGIDKRTIEKFEKEPAEMGKGSFKYAWVLDKLKAERERGITIDIALWKFETAKSVFTIIDAPGHRDFIKNMITGTSQADAAILIIASGQGEFEAGISKEGQTREHALLAFTMGVKQMIVAVNKMDDKSVNWDQGRFLEIKKELSDYLKKIGYNPEKIPFIPISGWHGDNMLEKSPNMPWFTGSTLIDALDALDQPKRPKDKPLRLPLQDVYKIGGIGTVPVGRVETGLLKPGMVLTFAPMNITTECKSVEMHHESLTEAEPGDNVGFNVKNLSVKDLRRGYVASDSKNDPAKDTTNFLAQVIVLNHPGQIQKGYAPVLDCHTAHIACKFDEIESKVDRRSGKVLEEEPKFIKSGEAALVRMVPQKPMCVEAFNQYPPLGRFAVRDMKQTVAVG

SEQ ID NO: 17545 - protein, 411 aa, Blepharisma japonicum
GHVDSGKSTSCGHLIYKCGGIDKRTIEKYEKEANEMGKSSFKYAWVLDKLKAERERGITIDISLFKFQTDKFYFTIIDAPGYRDFIKNMITGTSQADVAILIIAAGKGEFEAGYSKNGQTREHALLAFTLGVKQMVVGVNKMDDKSVEWKQDRYLEIKQGVSEYLKKGGYNPAKVPFIPISGCYGDNMVEKSTNMPWYDGPTLLGALDNVQPPKRHVEKPLRLPVQDVYKISGIGTVPVGRVETGVLRPGTVVVFGPSGISTEVKSVEMHHESLEEALPGDNVGFNVKNLSVKDIKRGYVASDSRSDPAKEEIDFTAQVIILNHPGQIQSVGYTPVLDCHTAHIACKFNEIKQKIDRRSGAVLEDEPKFVKSGDALIVRLIPSKPMCVETFTEYPPLGRFAVRDMKQTVAV

SEQ ID NO: 17546 - protein, 408 aa, Blepharisma japonicum
VDSGKSTSCGHLIYKCGGIDKRTIEKYEKEAKEMGKSSFKYAWVLDKLKAERERGITIDISLFKFQTDKFYFTIIDAPGHRDFIKNMITGTSQADVAILIIAAGKGEFEAGYSKNGQTREHALLAFTLGVKQMVVGVNKMDDKSAEWKQDRYLEIKQEVSEYLKKVGYNPAKVPFIPISGWLGDNMVEKSTNMPWYDGPTLLGALDNVQPPKRHVDKPLRLPVQDVYKISGIGTVPVGRVETGVLRPGTVVVFAPSGISTEVKSVEMHHESLEEALPGDNVGFNIKNIAVNQIKRGYVASDSRSDPARESIDFTAQVIILHHPGQISVGYTPVLDCHTAHIACRFNDLKQKVDRRSGAVLEQEPKFVKSGDAAIVTLIPTKSMCVEPFTEYPPLGRFAVRDMRQTVAV

SEQ ID NO: 17547 - protein, 409 aa, Stentor coeruleus
VDSGKSTSTGHLIYKCGGIDKRTIEKFEKEASEMGKSSFKYAWVLDKLKAERERGITIDISLFKFQTEKFYFTIIDAPGHRDFIKNMITGTSQADVAILIVASGKGEFEAGIGKNGQTREHGLLAFTLGVKQMIVGVNKMDDKSCNWSQARYDEIKNEVSQYLKKVGYNPDKIPFIPISGWLGDNMVERSPNLPWYNGPTLLGALDMIIPPKRHSDKPLRLPIQDVYKISGIGTVPVGRVETGSIKAGMVVVFAPSGVTTEVKSVEMHHETLEVANPGDNVGFNVKNVSVKDIKRGYVASDTKADPAKECENLTAQCIVLNHPGQISAGYTPVLDCHTAHIACRFNIIQKKIDRRTVASLEDELKVVKSGDAAFDVLGSPSKPMCVETFTEYPPLGRFAVRDMRQTVAV

SEQ ID NO: 17548 - protein, 409 aa, Stentor coeruleus
VDSGKSTTIGHLIYKCGGIDKRTIDKFDKDASDMGKSSFKYAWVLDKLKAERERGITIDISLFKFQTDKFYSTIIDAPGHRDFIKNMITGTSQADVAILIVASGKGEFEAGIGKNGQTREHGLLAFTLGVKQMIVGVNKMDDKSCNWSQERYEEIKKEVSQYLKKVGYKPDKIPFIPISGWLGDNMVESSPNLPWYNGPTLLGALDMIIPPKRHSDKPLRLPIQDVYKISGIGTVPVGRVETGSIKAGMVVVFAPSGVTTEVKSVEMHHETLEVANPGDNVGFNVKNLSVKDIKRGYVASDSKADPAKECENFTAQCIVLNHPGQIQAGYTPVLDCHTAHIACKFNIIQKKIDRRTGASLEDELKVVKSGDALFDVLGSPSKPMCVETFTEYPPLGRFAVRDMKQTVAV

SEQ ID NO: 17549 - protein, 426 aa, Phascolomyces articulosus
VVVIGHVDSGKSTTTGHLIYKCGGIDKRTIEKFEKEAAELGKGSFKYAWVLDKLKAERERGITIDIALWKFETPKYHVTVIDAPGHRDFIKNMITGTSQADCGILIIAAGTGEFEAGISKDGQTREHALLAFTLGVRQLIVAINKMDSTKYSEARYNEIVKEVSTFIKKIGYNPKSVPFVPISGWNGDNMLDESTNMPWFKGWTKETKAGSKTGKTLLEAIDNIDPPVRPSDKPLRLPLQDVYKIGGIGTVPVGRVETGVIKAGMVVTFAPANVTTEVKSVEMHHEQLAEGVPGDNVGFNVKNVSVKDIRRGNVCSDSKNDPAKESASFTAQVIVLNHPGQIGAGYSPVLDCHTAHIACKFAELLEKIDRRSGKKLEDAPKFVKSGDSAIVKMIPSKPMCVEAYTEYPPLGRFAVRDMRQTVAVGV

SEQ ID NO: 17550 - protein, 457 aa, Geodia cydonium
MPKEKTHINIVVIGHVDSGKSTTTGHLIYKCGGIDKRAIEKFEKEAQEIGKGSFKYAWVLDKLKAERAGITIDIALWKFETTKYYITVIDAPGHRDFIKNMITGTSQADCAVLIVASGTGEFEAGISKNGQTREHALLAYSLGVKQLIVGVNKMDSTEPPYSQARYDEITKEVGTYIKKVGYNPKAVAFVPISGWHGDNMLEESPNMKWFKGWNVERKEGNASGKTLFNPLDSILPPTRPTDKPLRLPLQDVYKIGGIGTVPVGRVETGILKPGTVVTFSPAGISTEVKSVEMHHEALTEALPGDNVGFNVKNISVKDIKRGMVAGDSKNDPPKEAKTFTAQVIVLNHPGQIHAGYAPVLDCHTAHIACKFTELKEKIDRSGKKLEDNPKFVKSGDAAIVILTPSKPMCVESFSEYPPLGRFAVRDMKQTVAVGVIKSVEKKEKEGKATKSAQKKGK

SEQ ID NO: 17551 - protein, 468 aa, Hydra magnipapillata
MSNKVKPHINIVVIGHVYSAKSTSTGHMIYKCGGIDKRQIATFEKEAQEMGKGAGKYAWVLDKLKAERGRGITIDIALWKFETTKYVVTIIDAPGHRDFIKNMITGTSQADCAVLIVASSTGEFEAGISKNGQTREHALLAFTLGVKQMIVAVNKIDNTEPPYSEARFNEIKKEISAYVKKVGYDPKTVPVLPVSGWHGDNMIEPSPNMSWYKGWEVEYKDTGKHTGKTLLEALDNIPLPARPSSKPLRLPLQDVYKIGGIGTVPVGRVETGILKPGIVVTFSPANLSTEVKSVEMHHESLPEALPGDNVGFNVKNVSIKDIRRGMVASDSKNDPAIEAASFKAQVIILNHPGEIHAGYQPVLDCHTAHIACKFAELLEKIDRRSGKVIETEPKMVKSGDAAIINLIPSKPMCVEYFAQYPPLGRFAVRDMRQTVAVGVIKEVDKTAAVAGKVTKSAQKAGVAAGKKK

SEQ ID NO: 17552 - protein, 468 aa, Hydra vulgaris
MSNKVKPHINIVVIGHVDSGKSTSTGHMIYKCGGIDKRQIEKFEKEAQEMGKGSFKYAWVLDKLKAERERGITIDIALWKFETTKYVVTIIDAPGHRDFIKNMITGTSQADCAVLIVASSTGEFEAGISKNGQTREHALLAFTLGVKQMIVAVNKIDNTEPPYSEARFNEIKKEISAYVKKVGYDPKTVPVLPVSGWHGDNMIEPSPNMSWYKGWEVEYKDTGKHTGKTLLEALDNIPLPARPSSKPLRLPLQDVYKIGGIGTVPVGRVETGILKPGMVVTFCPANLSTEVKSVEMHHESLPEALPGDNVGFNVKNVSIKDIRRGMVASDSKNDPAIEAASFKAQVIILNHPGEIHAGYQPVLDCHTAHIACKFAELLEKIDRRSGKVIETEPKMVKSGDAAIINLIPSKGMCVESFSQYPPLGRFAVRDMRQTVAVGVIKEVDKTVAVAGKVTKSAQKAGVAAGKKK

SEQ ID NO: 17553 - protein, 471 aa, Podocoryne carnea
MAPKEKAKIHINIVVIGHVDSGKSTSTGHLIYKCGGIDKRTIEKFEKEAQEMGKGSFKYAWVLDKLKAERERGITIDIALWKFETTKFYVTIIDAPGHRDFIKNMITGTSQADCAVLIVASSTGEFEAGISKNGQTREHALLAYTLGVKQLIIGVNKIDNTEPPYSEARFNEIKKEVEGYVKKVGYNPKAVAILPISGWHGDSMLEESPNTKWFKGWATERVDEDKKVINSSGKTLFEALDAIVPPSRPSNKPLRLPLQDVYKIGGIGTVPVGRVETGKIMPGMVVTFAPCGISTEVKSVEMHHTAMPEALPGDNVGFNVKNVSIKEIKRGMVASDSKNDPAKEAKTFYAQVIILNHPGEIHAGYQPVLDCHTAHVACKFTELKQKCDRRSGKVLEENPKLVKSGDAAMITLTPSKPMCVEAFSDYAPLGRFAVRDMRQTVAVGVIKSVEKAEAGGKMTKSAQKATGGKKK

SEQ ID NO: 17554 - protein, 413 aa, Austrosimulium mirabile
HVDSGKSTTTGHLIYKCGGIDKRTIEKFEKEAQEMGKGSFKYAWVLDKLKAERERGITIDIALWKFETSKYYVTIIDAPGHRDFIKNMITGTSQADCAVLIVAAGTGEFEAGISKNGQTREHALLAFTLGVKQLIVGVNKMDSTEPPFSESRFEEIKKEVSSYIKKIGYNPVCVPFVPISGWHGDNMLEVSVKMPWYKGWKVERKEGNADGKCLIEALDAILPPSRPTDKALRLPLQDVYKIGGIGTVPVGRVETGVIKPGMVVVFAPVNLTTEVKSVEMHHEALQEAGPGDNVGFNVKNVSVKELRRGYVAGDSKSNPPKGAENFTAQVIVLNHPGQISNGYTPVLDCHTAHIACKFSEIKEKVDRRTGKSTEDNPKAIKSGDAAIVILVPSKPLCVESFSEFPPLGRFAVR

SEQ ID NO: 17555 - protein, 413 aa, Cardiocladius sp.
HVDSGKSTTTGHLIYKCGGIDKRTIEKFEKEAQEMGKGSFKYAWALDKLKAERERGITIDIALWKFETAKYYVTIIDAPGHRDFIKNMITGTSQADCAVLIVAAGTGEFEAGISKNGQTREHALLAFTLGVKQLIVGVNKMDSTEPPYNEARFEEIKKEVSSYIKKIGYNPATVAFVPISGWHGDNMLEASSKMPWFKGWAVERKEGKADGKCLIEALDAILPPSRPTDKALRLPLQDVYKIGGIGTVPVGRVETGVIKPGMVVAFAPVNLTTEVKSVEMHHEALQEAVPGDNVGFNVKNVSVKELRRGYVAGDSKNNPPKGAADFTAQVIVLNHPGQISNGYTPVLDCHTAHIACKFGEIKEKVDRRSGKSVEDNPKSIKSGDAAMVVLVPSKPLCVESFSDFPPLGRFAVR

SEQ ID NO: 17556 - protein, 413 aa, Cnephia sp. S.x.east
HVDSGKSTTTGHLIYKCGGIDKRTIEKFEKEAQEMGKGSFKYAWVLDKLKAERERGITIDIALWKFETAKYYVTIIDAPGHRDFIKNMITGTSQADCAVLIVAAGTGEFEAGISKNGQTREHALLAFTLGVKQLIVGVNKMDSTEPPFSESRFEEIKKEVSSYIKKIGYNPTCVPFVPISGWHGDNMLEVSAKMPWYKGWKVERKEGNADGKCLIEALDAILPPSRPTDKPLRLPLQDVYKIGGIGTVPVGRVETGVIKPGMVVVFAPVNLTTEVKSVEMHHEALQEAGPGDNVGFNVKNVSVKELRRGYVAGDSKASPPKGAENFTAQVIVLNHPGQISNGYTPVLDCHTAHIACKFAEIKEKVDRRTGKSTEDNPKAIKSGDAAIVILVPSKPLCVESFSEFPPLGRFAVR

SEQ ID NO: 17557 - protein, 413 aa, Cnephia sp. S.x.west
HVDSGKSTTTGHLIYKCGGIDKRTIEKFEKEAQEMGKGSFKYAWVLDKLKAERERGITIDIALWKFETAKYYVTIIDAPGHRDFIKNMITGTSQADCAVLIVAAGTGEFEAGISKNGQTREHALLAFTLGVKQLIVGVNKMDSTEPPFSESRFEEIKKEVSSYIKKIGYNPTCVPFVPISGWHGDNMLEVSAKMPWYKGWKVERKEGNADGKCLIEALDAILPPSRPTDKALRLPLQDVYKIGGIGTVPVGRVETGVIKPGMVVVFAPVNLTTEVKSVEMHHEALQEAGPGDNVGFNVKNVSVKELRRGYVAGDSKASPPKGAENFTAQVIVLNHPGQISNGYTPVLDCHTAHIACKFAEIKEKVDRRTGKSTEDNPKAIKSGDAAIVILVPSKPLCVESFSEFPPLGRFAVR

SEQ ID NO: 17558 - protein, 413 aa, Cnephia sp. X
HVDSGKSTTTGHLIYKCGGIDKRTIEKFEKEAQEMGKGSFKYAWVLDKLKAERERGITIDIALWKFETAKYYVTIIDAPGHRDFIKNMITGTSQADCAVLIVAAGTGEFEAGISKNGQTREHALLAFTLGVKQLIVGVNKMDSTEPPFSESRFEEIKKEVSSYIKKIGYNPVCVPFVPISGWHGDNMLEVSAKMPWYKGWKVERKEGNADGKCLIEALDAILPPSRPTDKALRLPLQDVYKIGGIGTVPVGRVETGVIKPGMVVVFAPVNLTTEVKSVEMHHEALQEAGPGDNVGFNVKNVSVKELRRGYVAGDSKSNPPKGAENFTAQVIVLNHPGQISNGYTPVLDCHTAHIACKFSEIKEKVDRRTGKSTEENPKAIKSGDAAIVILVPSKPLCVESFSEFPPLGRFAVR

SEQ ID NO: 17559 - protein, 413 aa, Cnephia sp. Y
HVDSGKSTTTGHLIYKCGGIDKRTIEKFEKEAQEMGKGSFKYAWVLDKLKAERERGITIDIALWKFETSKYYVTIIDAPGHRDFIKNMITGTSQADCAVLIVAAGTGEFEAGISKNGQTREHALLAFTLGVKQLIVGVNKMDSTEPPFSESRFEEIKKEVSSYIKKIGYNPVCVPFVPISGWHGDNMLEVSAKMPWYKGWKVERKEGNADGKCLIEALDAILPPSRPTDKPLRLPLQDVYKIGGIGTVPVGRVETGVIKPGMVVVFAPVNLTTEVKSVEMHHEALQEAGPGDNVGFNVKNVSVKELRRGYVAGDSKASPPKGAENFTAQVIVLNHPGQISNGYTPVLDCHTAHIACKFSEIKEKVDRRTGKSTEDNPKAIKSGDAAIVILVPSKPLCVESFSEFPPLGRFAVR

SEQ ID NO: 17560 - protein, 413 aa, Cnephia aurantiacum
HVDSGKSTTTGHLIYKCGGIDKRTIEKFEKEAQEMGKGSFKYAWVLDKLKAERERGITIDIALWKFETAKYYVTIIDAPGHRDFIKNMITGTSQADCAVLIVAAGTGEFEAGISKNGQTREHALLAFTLGVKQLIVGVNKMDSTEPPFSESRFEEIKKEVSSYIKKIGYNPACVPFVPISGWHGDNMLEVSAKMPWYKGWKVERKEGNADGKCLIEALDAILPPSRPTDKALRLPLQDVYKIGGIGTVPVGRVETGVIKPGMVVVFAPVNLTTEVKSVEMHHEALQEAGPGDNVGFNVKNVSVKELRRGYVAGDTKSNPPKGAENFTAQVIVLNHPGQISNGYTPVLDCHTAHIACKFAEIKEKVDRRTGKSTEDNPKAIKSGDAAIVILVPSKPLCVESFSEFPPLGRFAVR

SEQ ID NO: 17561 - protein, 413 aa, Cnephia ornithophilia
HVDSGKSTTTGHLIYKCGGIDKRTIEKFEKEAQEMGKGSFKYAWVLDKLKAERERGITIDIALWKFETAKYYVTIIDAPGHRDFIKNMITGTSQADCAVLIVAAGTGEFEAGISKNGQTREHALLAFTLGVKQLIVGVNKMDSTEPPFSESRFEEIKKEVSSYIKKIGYNPVCVPFVPISGWHGDNMLEVSAKMPWYKGWKVERKEGNADGKCLIEALDAILPPSRPTDKALRLPLQDVYKIGGIGTVPVGRVETGVIKPGMVVVFAPVNLTTEVKSVEMHHEALQEAGPGDNVGFNVKNVSVKELRRGYVAGDSKSNPPKGAENFTAQVIVLNHPGQISNGYTPVLDCHTAHIACKFSEIKEKVDRRTGKSTEDNPKAIKSGDAAIVILVPSKPLCVESFSEFPPLGRFAVR

SEQ ID NO: 17562 - protein, 413 aa, Cnephia pilfreyi
HVDSGKSTTTGHLIYKCGGIDKRTIEKFEKEAQEMGKGSFKYAWVLDKLKAERERGITIDIALWKFETAKYYVTIIDAPGHRDFIKNMITGTSQADCAVLIVAAGTGEFEAGISKNGQTREHALLAFTLGVKQLIVGVNKMDSTDPPFSESRFEEIKKEVSSYIKKIGYNPACVAFVPISGWHGDNMLEVSAKMPWYKGWKVERKDGNADGTCLIEALDAILPPSRPTDKAMRLPLQDVYKIGGIGTVPVGRVETGVIKPGMVVVFAPVNLTTEVKSVEMHHEALQEAGPGDNVGFNVKNVSVKELRRGYVAGDSKASPPKGADNFTAQVIVLNHPGQISNGYTPVLDCHTAHIACKFSEIKEKVDRRTGKSTEDNPKAIKSGDAAIVILVPSKPLCVESFSEFPPLGRFAVR

SEQ ID NO: 17563 - protein, 413 aa, Cnephia sp. GKW2
HVDSGKSTTTGHLIYKCGGIDKRTIEKFEKEAQEMGKGSFKYAWVLDKLKAERERGITIDIALWKFETAKYYVTIIDAPGHRDFIKNMITGTSQADCAVLIVAAGTGEFEAGISKNGQTREHALLAFTLGVKQLIVGVNKMDSTEPPFSESRFEEIKKEVSSYIKKIGYNPVCVPFVPISGWHGDNMLEVSAKMPWYKGWKVERKEGNADGKCLIEALDAILPPSRPTDKPLRLPLQDVYKIGGIGTVPVGRVETGVIKPGMVVVFAPVNLTTEVKSVEMHHEALQEAGPGDNVGFNVKNVSVKELRRGYVAGDSKASPPKGAENFTAQVIVLNHPGQISNGYTPVLDCHTAHIACKFAEIKEKVDRRTGKSTEDNPKAIKSGDAAIVILVPSKPLCVESFSEFPPLGRFAVR

SEQ ID NO: 17564 - protein, 413 aa, Cnephia strenua
HVDSGKSTTTGHLIYKCGGIDKRTIEKFEKEAQEMGKGSFKYAWVLDKLKAERERGITIDIALWKFETAKYYVTIIDAPGHRDFIKNMITGTSQADCAVLIVAAGTGEFEAGISKNGQTREHALLAFTLGVKQLIVGVNKMDSTEPPFSEARFEEIKKEVSSYIKKIGYNPVCVPFVPISGWHGDNMLEVSAKMPWYKGWKVERKEGNADGKCLIEALDAILPPSRPTDKALRLPLQDVYKIGGIGTVPVGRVETGVIKPGMVVVFAPVNLTTEVKSVEMHHEALQEAGPGDNVGFNVKNVSVKELRRGYVAGDSKSNPPKGAENFTAQVIVLNHPGQISNGYTPVLDCHTAHIACKFSEIKEKVDRRTGKSTEDNPKAIKSGDAAIVILVPSKPLCVESFSEFPPLGRFAVR

SEQ ID NO: 17565 - protein, 413 aa, Cnephia tonnoiri
HVDSGKSTTTGHLIYKCGGIDKRTIEKFEKEAQEMGKGSFKYAWVLDKLKAERERGITIDIALWKFETAKYYVTIIDAPGHRDFIKNMITGTSQADCAVLIVAAGTGEFEAGISKNGQTREHALLAFTLGVKQLIVGVNKMDSTEPPFSESRFEEIKKEVSSYIKKIGYNPVCVPFVPISGWHGDNMLEVSAKMPWYKGWKVERKEGNADGKCLIEALDAILPPSRPTDKALRLPLQDVYKIGGIGTVPVGRVETGVIKPGMVVVFAPVNLTTEVKSVEMHHEALQEAGPGDNVGFNVKNVSVKELRRGYVAGDSKSSPPKGAENFTAQVIVLNHPGQISNGYTPVLDCHTAHIACKFSEIKEKVDRRTGKSTEDNPKAIKSGDAAIVILVPSKPLCVESFSEFPPLGRFAVR

SEQ ID NO: 17566 - protein, 413 aa, Cnephia umbratorum
HVDSGKSTTTGHLIYKCGGIDKRTIEKFEKEAQEMGKGSFKYAWVLDKLKAERERGITIDIALWKFETAKYYVTIIDAPGHRDFIKNMITGTSQADCAVLIVAAGTGEFEAGISKNGQTREHALLAFTLGVKQLIVGVNKMDSTDPPFSESRFEEIKKEVSSYIKKIGYNPVCVPFVPISGWHGDNMLEVSAKMPWYKGWKVERKDGNADGKCLIEALDAILPPSRPTDKALRLPLQDVYKIGGIGTVPVGRVETGVIKPGMVVVFAPVNLTTEVKSVEMHHEALAEAGPGDNVGFNVKNVSVKELRRGYVAGDSKSSPPRGAENFTAQVIVLNHPGQISNGYTPVLDCHTAHIACKFAEIKEKVDRRTGKSTEDNPKAIKSGDAAIVILVPSKPLCVESFSEFPPLGRFAVR

SEQ ID NO: 17567 - protein, 413 aa, Crozetia crozetensis
HVHTGKSTTTGHLIYKCGGIDKRTIEKFEKEAQEMGKGSFKYAWVLDKLKAERERGITIDIALWKFETAKYYVTIIDAPGHRDFIKNMITGTSQADCAVLIVAAGTGEFEAGISKNGQTREHALLAFTLGVKQLIVGVNKMDSTEPTFSEPRFEEIKKEVSSYIKKIGYNPACVPFVPISGWHGDNMLEVSAKMPWYKGWKVERKEGNADGKCLIEALDAILPPSRPTDKALRLPLQDVYKIGGIGTVPVGRVETGVIKPGMVVVFAPVNLTTEVKSVEMHHEALPEAGPGDNVGFNVKNVSVKELRRGYVAGDSKSNPPKGAENFTAQVIVLNHPGQISNGYTPVLDCHTAHIACKFAEIKEKVDRRTGKSTEDNPKAIKSGDAAIVILVPSKPLCVESFSEFPPLGRFAVR

SEQ ID NO: 17568 - protein, 296 aa, Ectemnia sp.
HVDSGKSTTTGHLIYKCGGIDKRSIEKFEKEAQEMGKGSFKYAWVLDKLKAERERGITIDIALWKFETAKYYVTIIDAPGHRDFIKNMITGTSQADCAVLIVAAGTGEFEAGISKNGQTREHALLAFTLGVKQLIVGVNKMDSTDPPFSESRFEEIKKEVSSYIKKIGYNPACVAFVPISGWHGDNMLEVSAKMPWYKGWKVERKDGNASGTCLIEALDAILPPSRPTDKALRLPLQDVYKIGGIGTVPVGRVETGVIKPGGLFLGNLEMFFFSTFHFLLVLLRYGRRVRPRQFDH

SEQ ID NO: 17569 - protein, 413 aa, Gigantodax adleri
HVDSGKSTTTGHLIYKCGGIDKRTIEKFEKEAQEMGKGSFKYAWVLDKLKAERERGITIDIALWKFETAKYYVTIIDAPGHRDFIKNMITGTSQADCAVLIVAAGTGEFEAGISKNGQTREHALLAFTLGVKQLIVGVNKMDSTEPPFSEARFEEIKKEVSSYIKKIGYNPVCVPFVPISGWHGDNMLEVSAKMGWYKGWKVERKEGNADGKCLIEALDAILPPSRPTDKALRLPLQDVYKIGGIGTVHVGRVETGIIKPGMVVVFAPVNLTTEVKSVEMHHEALQEASPGDNVGFNVKNVSVKELRRGYVAGDSKSNPPKGAENFTAQVIVLNHPGQISNGYTPVLDCHTAHIACKFSEIKEKVDRRTGKSTEDNPKAIKSGDAAIVILVPSKPLCVESFSEFPPLGRFAVR

SEQ ID NO: 17570 - protein, 413 aa, Gigantodax marginale
HVDSGKSTTTGHLIYKCGGIDKRTIEKFEKEAQEMGKGSFKYAWVLDKLKAERERGITIDIALWKFETAKYYVTIIDAPGHRDFIKNMITGTSQADCAVLIVAAGTGEFEAGISKNGQTREHALLAFTLGVKQLIVGVNKMDSTEPPFSESRFEEIKKEVSSYIKKIGYNPVCVPFVPISGWHGDNMLEVSAKMGWYKGWKVERKEGNADGKCLIEALDAILPPSRPTDKALRLPLQDVYKIGGIGTVPVGRVETGIIKPGMVVVFAPVNLTTEVKSVEMHHEALQEASPGDNVGFNVKNVSVKELRRGYVAGDSKSNPPKGAENFTAQVIVLNHPGQISNGYTPVLDCHTAHIACKFAEIKEKVDRRTGKSTEDNPKAIKSGDAAIVILVPSKPLCVESFSEFPPLGRFAVR

SEQ ID NO: 17571 - protein, 413 aa, Greniera denaria
HVDSGKSTTTGHLIYKCGGIDKRTIEKFEKEAQEMGKGSFKYAWVLDKLKAERERGITIDIALWKFETAKYYVTIIDAPGHRDFIKNMITGTSQADCAVLIVAAGTGEFEAGISKNGQTREHALLAFTLGVKQLIVGVNKMDSTDPPFSESRFEEIKKEVSSYIKKIGYNPACVPFVPISGWHGDNMLEVSSNMGWFKGWKVERKEGNADGKCLIEALDAILPPSRPTDKALRLPLQDVYKIGGIGTVPVGRVETGIIKPGMVVVFAPVNLTTEVKSVEMHHEALQEAGPGDNVGFNVKNVSVKELRRGYVAGDSKSNPPKGAENFTAQVIVLNHPGQISNGYTPVLDCHTAHIACKFAEIKEKVDRRTGKSTEDNPKAIKSGDAAIVVLVPSKPLCVESFSEFPPLGRFAVR

SEQ ID NO: 17572 - protein, 413 aa, Greniera fabri
HVDSGKSTTTGHLIYKCGGIDKRTIEKFEKEAQEMGKGSFKYAWVLDKLKAERERGITIDIALWKFETAKYYVTIIDAPGHRDFIKNMITGTSQADCAVLIVAAGTGEFEAGISKNGQTREHALLAFTLGVKQLIVGVNKMDSTDPPFSESRFEEIKKEVSSYIKKIGYNPACVAFVPISGWHGDNMLEVSAKMPWFKGWKVERKDGNADGKCLIEALDAILPPSRPTDKALRLPLQDVYKIGGIGTVPVGRVETGVIKPGMVVVFAPVNLTTEVKSVEMHHEALQEAGPGDNVGFNVKNVSVKELRRGYVAGDSKSNPPKGAENFTAQVIVLNHPGQISNGYTPVLDCHTAHIACKFAEIKEKVDRRTGKSTEDNPKAIKSGDAAIVILVPSKPLCVESFSEFPPLGRFAVR

SEQ ID NO: 17573 - protein, 413 aa, Gymnopais fimbriatus
HVDSGKSTTTGHLIYKCGGIDKRTIEKFEKEAQEMGKGSFKYAWVLDKLKAERERGITIDIALWKFETGKYCVTIIDAPGHRDFIKNMITGTSQADCAVLIVAAGTGEFEAGISKNGQTREHALLAFTLGVKQLIVGVNKMDSTDPPFSESRFEEIKKEVSSYIKKIGYNPACVAFVPISGWHGDNMLEISEKMPWFKGWKVERKDGNADGKCLIEALDAILPPSRPTDKALRLPLQDVYKIGGIGTVPVGRVETGVIKPGMVIVFAPVNLTTEVKSVEMHHEALVEAGPGDNVGFNVKNVSVKELRRGYVAGDTKSNPPKGAENFTAQVIVLNHPGQISNGYTPVLDCHTAHIACKFAEIKEKVDRRTGKSTEDNPKAIKSGDAAIVILVPSKPLRVESFSEFPPLGRFAVR

SEQ ID NO: 17574 - protein, 413 aa, Mayacnephia sp. nr. osbornei
HVDSGKSTTTGHLIYKCGGIDKRTIEKFEKEAQEMGKGSFKYAWVLDKLKAERERGITIDIALWKFETSKYYVTIIDAPGHRDFIKNMITGTSQADCAVLIVAAGTGEFEAGISKNGQTREHALLAFTLGVKQLIVGVNKMDSTEPPFSESRFEEIKKEVCCYIKKIGYNPMCVPFVPISGWHGDNMLEISAKMPWYKGWKVERKEGNADGKCLIESLDAILPPSRPTDKALRLPLQDVYKIGGIGTVPVGRVETGVIKPGMVVVFAPVNLTTEVKSVEMHHEALQEAGPGDNVGFNVKNVSVKELRRGYVAGDSKSNPPKGAENFTAQVIVLNHPGQISNGYTPVLDCHTAHIACKFSEIKEKVDRRTGKSTEDNPKAIKSGDAAIVILVPSKPLCVESFSEFPPLGRFAVR

SEQ ID NO: 17575 - protein, 413 aa, Metacnephia sommermanae
HVDSGKSTTTGHLIYKCGGIDKRTIEKFEKEAQEMGKGSFKYAWVLDKLKAERERGITIDIALWKFETAKYYVTIIDAPGHRDFIKNMITGTSQADCAVLIVAAGTGEFEAGISKNGQTREHALLAFTLGVKQLIVGVNKMDSTEPPFSESRFEEIKKEVSSYIKKIGYNPICVPFVPISGWHGDNMLEVSAKMPWYKGWKVERKEGNAEGKCLIEALDAILPPSRPTDKALRLPLQDVYKIGGIGTVPVGRVETGVIKPGMVVVFAPVNLTTEVKSVEMHHEALQKAGPGDNVGFNVKNVAVKDLRRGYVAGDSKSNPPKGADNFTAQVIVLNHPGQISNGYTPVLDCHTAHIACKFSEIKEKVDRRTGKSTEDNPKAIKSGDAAIVILVPSKPLCVESFSEFPPLGRFAVR

SEQ ID NO: 17576 - protein, 413 aa, Paracnephia thornei
HVDSGKSTTTGHLIYKCGGIDKRTIEKFEKEAQEMGKGSFKYAWVLDKLKAERERGITIDIALWKFETAKYYVTIIDAPGHRDFIKNMITGTSQADCAVLIVAAGTGEFEAGISKNGQTREHALLAFTLGVKQLIVGVNKMDSTEPPFSESRFEEIKKEVSSYIKKIGYNPVCVPFVPISGWHGDNMLEVSAKMPWYKGWKVERKEGNADGKCLIEALDAILPPSRPTDKALRLPLQDVYKIGGIGTEPVGRVETGVIKPGMVVVFAPVNLTTEVKSVEMHHEALQEAGPGDNVGFNVKNVSVKELRRGYVAGDSKSNPPKGAEDFTAQVIVLNHPGQISNGYTPVLDCHTAHIACKFPEIKEKVDRRTGKSTEDNPKAIKSGDAAMVILVPSKPLCVEFFSEFPPLGRFAVR

SEQ ID NO: 17577 - protein, 413 aa, Parasimulium crosskeyi
HVDSGKSTTTGHLIYKCGGIDKRTIEKFEKEAQEMAKGSFKYAWVLDKLKAERERGITIDIALWKFETGKYYVTIIDAPGHRDFIKNMITGTSQADCAVLIVAAGTGEFEAGISKNGQTREHALLAFTLGVKQLIVGVNKMDSTEPPFSETRFEEIKKEVSSYIKKIGYNPLCVAFVPISGWHGDNMLEISSKMPWFKGWKVERKDGNADGKCLIEALDAILPPSRPTDKPLRLPLQDVYKIGGIGTVPVGRVETGLLKPGMVVVFAPVNLTTEVKSVEMHHEALVEAVPGDNVGFNVKNVSVKELRRGYVAGDTKNNPPRGAENFTAQVIVLNHPGQISNGYTPVLDCHTAHIACKFSEIKEKVDRRTGKSTEDNPKAIKSGDAAIVILVPSKPLCVESFSEFPPLGRFAVR

SEQ ID NO: 17578 - protein, 413 aa, Paraustrosimulium anthracinum
HVDSGKSTTTGHLIYKCGGIDKRTIEKFEKEAQEMGKGSFKYAWVLDKLKAERERGITTDIALWKFETAKYYVTIIDAPGHRDFIKNMITGTSQADCAVLIVAAGTGEFEAGISKNGQTREHALLAFTLGVKQLIVGVNKMDSTEPPFSESRFEEIKKEVSSYIKKIGYNPVCVPFVPISGWHGDNMLEISAKMPWYKGWKVERKDGNADGKCLIEALDAILPPSRPTDKALRLPLQDVYKIGGIGTVPVGRVETGVINPGMVVVFAPVNLTTEVKSVEMHHEALQEAGPGDNVGFNVKNVSVKELRRGYVAGDSKSNPPKGAENFTAQVIVLNHPGQISNGYTPVLDCHTAHIACKFSEIKEKVDRRTGKSTEDNPKAIKSGDAAIVILVPSKPLCVESFSEFPPLGRFAVR

SEQ ID NO: 17579 - protein, 413 aa, Paracnephia rhodesiense
HVDSGKSTTTGHLIYKCGGIDKRTIEKFEKEAQEMGKGSFKYAWVLDKLKAERERGITIDIALWKFETSKYYVTIIDAPGHRDFIKNMITGTSQADCAVLIVAAGTGEFEAGISKNGQTREHALLAFTLGVKQLIVGVNKMDSTEPPFSEARFEEIKKEVSSYIKKIGYNPVCVPFVPISGWHGDNMLEVSSKMPWYKGWKVERKEGNADGKCLIEALDAILPPTRPTDKPLRLPLQDVYKIGGIGTVPVGRVETGVIKPGMVVVFAPVNLTTEVKSVEMHHEALQEAGPGDNVGFNVKNVSVKELRRGYVAGDSKSSPPKGAENFTAQVIVLNHPGQISNGYTPVLDCHTAHIACKFSEIKEKVDRRTGKSTENDPKAIKSGDAAIVILVPSKPLCVEFFSEFPPLGRFAVR

SEQ ID NO: 17580 - protein, 413 aa, Simulium congareenarum
HVDSGKSTTTGHLIYKCGGIDKRTIEKFEKEAQEMGKGSFKYAWVLDKLKAERERGITIDIALWKFETAKYYVTIIDAPGHRDFIKNMITGTSQADCAVLIVAAGTGEFEAGISKNGQTREHALLAFTLGVKQLIVGVNKMDSTEPPFSESRFEEIKKEVSSYIKKIGYNPVCVPFVPISGWHGDNMLEVSAKMPWYKGWKVERKEGNADGKCLIEALDAILPPSRPTDKALRLPLQDVYKIGGIGTVPVGRVETGVIKPGMVVVFAPVNLTTEVKSVEMHHEALQEAGPGDNVGFNVKNVSVKELRRGYVAGDSKNNPPKGAENFTAQVIVLNHPGQISNGYTPVLDCHTAHIACKFSEIKEKVDRRTGKSTEDNPKAIKSGDAAIVILVPSKPLCVESFSEFPPLGRFAVR

SEQ ID NO: 17581 - protein, 413 aa, Simulium reptans
HVHSGKSTTTGHLIYKCGGIDKRTIEKFEKEAQEMGKGSFKYAWVLDKLKAERERGITIDIALWKFETAKYYVTIIDAPGHRDFIKNMITGTSQADCAVLIVAAGTGEFEAGISKNGQTREHALLAFTLGVKQLIVGVNKMDSTEPPFCESRFEEIKKEVSSYIQKIGYNPAAVSFVPISGWHGDNLLDVSAKMPWYKGWKVERKDGNADGKCLIEALDAILPPSRPTDKALRLPLQDVYKIGGIGTVPVGRVETGVIKPGMVVVFAPVNLTTEVKSVEMHHEALQEAGPGDNVGFNVKNVSVKELRRGYVAGDSKSNPPKGAENFTAQVIVLNHPGQISNGYTPVLDCHTAHIACKFAEIKEKVDRRSGKSTEDNPKAIKSGDAAIVILVPSKPLCVESFSEFPPLGRFAVR

SEQ ID NO: 17582 - protein, 413 aa, Simulium pugetense complex
HVDSGKSTTTGHLIYKCGGIDKRTIEKFEKEAQEVGKGSFKYAWVLDKLKAERERGITIDIALWKFETAKYYVTIIDAPGHRDFIKNMITGTSQADCAVLIVAAGTGEFEAGISKNGQTREHALLAFTLGVKQLIVGVNKMDSTDPPFSESRFEEIKKEVSSYIKKIGYNPAAVAFVPISGWHGDNMLEVSAKMPWYKGWKVERKDGNADGKCLIESLDAILPPSRPTDKALRLPLQDVYKIGGIGTVPVGRVETGVIKPGMVVVFAPVNLTTEVKSVEMHHEALQEAGPGDNVGFNVKNVSVKELRRGYVAGDSKSNPPKGAENFTAQVIVLNHPGQISNGYTPVLDCHTAHIACKFAEIKEKVDRRSGKSTEDNPKAIKSGDAAIVILVPSKPLCVESFSDFPPLGRFAVR

SEQ ID NO: 17583 - protein, 413 aa, Thaumalea gillespieae
HVDSGKSTTTGHLIYKCGGIDKRTIEKFEKEAQEMGKGSFKYAWVLDKLKAERERGITIDIALWKFETGKYYVTIIDAPGHRDFIKNMITGTSQADCAVLIVAAGTGEFEAGISKNGQTREHALLAFTLGVKQLIVGVNKMDSTDPPFAETRFEEIKKEVSSYIKKIGYNPAAVAFVPISGWHGDNMLEVSAKMPWFKGWKVERKDGNAEGKCLIEALDAILPPSRPTGKPLRLPLQDVYKIGGIGTVPVGRVETGILKPGMLVIFAPVNLTTEVKSVEMHHEALQEAVPGDNVGFNVKNVSVKDLRRGFVAGDSKVSPPRGAADFTAQVIVLNHPGQISNGYTPVLDCHTAHIACKFSEIKEKVDRRSGKSTEDNPKSIKSGDAAIVILAPSKPLCVESFSEFPPLGRFAVR

SEQ ID NO: 17584 - protein, 413 aa, Twinnia nova
HVDSGKSTTTGHLIYKCGGIDKRTIEKFEKEAQEMGKGSFKYAWVLDKLKAERERGITIDIALWKFETGKYYVTIIDAPGHRDFIKNMITGTSQADCAVLIVAAGTGEFEAGISKNGQTREHALLAFTLGVKQLIVGVNKMDSTDPPFSESRFEEIKKEVSSYIKKIGYNPACVAFVPISGWHGDNKLEVSVKMPWFKGWKVERKDGNADGKCLIEALDAILPPSRPTDKALRLPLQDVYKIGGIGTVPVGRVETGVIKPGMVIVFAPVNLTTEVKSVEMHHEALQEAGPGDNVGFNVKNVSVKELRRGYVAGDTKSNPPKGAESFTAQVIVLNHPGQISNGYTPVLDCHTAHIACKFSEIKEKVDRRTGKSTEDNPKAIKSGDAAIVILVPSKPLCVESFSEFPPLGRFAVR

SEQ ID NO: 17585 - protein, 413 aa, Urosimulium aculeatum
HVDSGKSTTTGHLIYKCGGIDKRTIEKFEKEAQEMGKGSFKYAWVLDKLKAERERGITIDIALWKFETGKYYVTIIDAPGHRDFIKNMITGTSQADCAVLIVAAGTGEFEAGISKNGQTREHALLAFTLGVKQLIVGVNKMDSTEPPFSESRFEEIKKEVSSYIKKIGYNPACVAFVPISGWHGDNMLEVSAKMPWFKGWKVERKEGNADGKCLIEALDAILPPSRPTDKALRLPLQDVYKIGGIGTVPVGRVETGVIKPGMVIVFAPVNLTTEVKSVEMHHEALQEAGPGDNVGFNVKNVSVKELRRGYVAGDSKSNPPKGAENFTAQVIVLNHPGQISNGYTPVLDCHTAHIACKLSEIKEKVDRRTGKSTEDNPKAIKSGDAAIVILVPSKPLCVESFSEFPPLGRFAVR

SEQ ID NO: 17586 - protein, 374 aa, Escarpia sp.
QEMGKGSFKYAWVLDKLKAERERGITIDIALWKFETNKYYVTIIDAPGHRDFIKNMITGTSQADCAVLIVAAGVGEFEAGISKNGQTREHALLAYTLGVKQMIIGVNKMDNTEPPYSEARFEEIKKEVAQYIKKVGYNPDTVAFVPISGWHGDNMLESSPKMTWFKGWKVKRGGKEFSGNTLMEALDNVLQPQRPTDRPLRLPLQDVYKIGGIGTVPVGRVETGIMKPGMVVTFAPANLTTEVKSVEMHHTALTEALPGDNVGFNIKNVSVKDIRRGFVCGDSKNDPPLETDEFLAQVIILNHPGSIQAGYAPVLDCHTAHIACKFKELKEKIDRRSGKVLEASPQSVKSGDAAMVEMIPQKAMCVERFSEYAP

SEQ ID NO: 17587 - protein, 407 aa, Dugesia japonica
KSTSTGHLIYKCGGIDKRTIEKFEKEAQEMGKGSFKYAWVLDQLKAERERGITIDIALWKFETTKFYVTVIDAPGHRDFIKNMITGTSQADCAVLVVAAGTGEFEAGISKNGQTREHALLAYTLGVKQMIVGVNKMDSTEPPFSEPRFDEIKKEVSGYLKKVGYQPDAVAFVPISGWNGDNMIDESSNMPWYKGWEITRKNAKKEEIKTTGRTLLDALDSLEPPTRPTDKPLRLPLQDVYKIGGIGTVPVGRVETGILKPGMVVTFAPKVFTTEVKSVEMHHEALTEALPGDNVGFNVKNVSVKEIRRGNVCSDSKSDPARQATDFVAQVIIMNHPGEIHAGYSPVLDCHTAHIACKFAELVEKIDRRSGKDLEDFPKQFKSGDAGLVRLVPSKPMCVETFSEYPPL

SEQ ID NO: 17588 - protein, 465 aa, Schistosoma mansoni
MPSDKEHINIVVYGHVDSGKSTTTGHLIFKCGGIDKRAIEKYEKESGEMGKGSFKYAWVLVKLKAERERGITIDIVLWKFDTQTYKVTVIDAPGHRDFTTNMITGTSQADCAVLIVAAGVGEFEAGISKNGQTREHALLAYTLGVKQLIIAINKMDCTEPPFSEDRYKEIVKEVSGYIKKVGYNPATVPFVPISGWHGDNMIEKSSFMPWFKGWEITRTKDGKTVTDTGFTLLEALDKMEPPARMTDKPLRIPLQDVYKIGGMGTVPVGRVETGIIKPGMVVTFGPQGWSAEVKSVEMHHEALTEGLPGSNVGFNVKNVAVSEIHRGNVAGDSKNDPPKEAESFMAQVIVLNHPGEIKNGYSPVLDCHTAHIASKFSEITEKLDRRSGKKSEDNPKCIKNGDAANILLVPNKPLCLETFQQYPPLGRFAVRDMNQTVAVGVVKSVTKKESAAKVTKSAAKVAKKK

SEQ ID NO: 17589 - protein, 377 aa, Colossendeis sp. 'Col'
QEMGKGSFKYAWVLDKLKAERERGITIDIALWKFRTKKYYITIIDAPGHRDFIKNMITGTSQADCAVLVVAAGVGEFEAGISKNGQTREHALLAYTLGVKQLIVAVNKMDSTEPTYNEGRFQEIVKEVSAYIKKIGYNPKTVPFVPISGWHGDNMLEVSKNMPWWKKWEVERKEGNANGETLYDALDAILPPNRPTDKALRLPLQDVYKIGGIGTVPVGRVETGILKPGMVVTFAPVNLSTEVKSVEMHHESLTEAEPGDNVGFNVKNISVKDIRRGYVAGDSKSNPPRATESFTAQVIVLNHPGQIQNGYSPVLDCHTAHIACKFNDIKEKCDRRSGKKLEDSPKFVKSGDVAIVELIPNKPMCVETFTDFPPLGR

SEQ ID NO: 17590 - protein, 377 aa, Stenochrus portoricensis
QEMGKGSFKYAWVLDKLKAERERGITIDITLWKFETQKYYITVIDAPGHRDFIKNMITGTSQADCAVLIVAAGTGEFEAGISKNGQTREHALLAYTLGVKQMIVGVNKMDTTEPPFSEARFEEIKKEVSAYIKKIGYNPATVPFVPISGWNGDNMLEPSTNMAWYKGWAIERKNNKADGKTLLQALDAMEPPSRPTEKPLRLPLQDVYKIGGIGTVPVGRVETGVLKPGMVVTFAPVNITTEVKSVEMHHEALAEAYPGDNVGFNVKNVSVKELRRGYVCGDSKESPPKATEEFTAQVIVLNHPGQIANGYTPVLDCHTAHIACKFREIKEKCDRRSGKKLEDNPKFIKSGDAAIIDLVPSKPMCVETFTEFPPLGR

SEQ ID NO: 17591 - protein, 377 aa, Cylindroiulus punctatus
AELGKGSFKYAWVLDKLKAERERGITIDISLWKFETGKYYITIIDAPGHRDFIKNMITGTSQADCAVLIVAAGTGEFEAGISKNGQTREHALLAYTLGVKQLIVGVNKMDTTEPPYNEGRFDEIKKEVSSYIKKIGYNPATVAFVPISGWNGDNMLEPSPSMTWHKGWAIERKEGNASGKTLLEALDAIVAPARPTDKALRLPLQDVYKIGGIGTVPVGRVETGVLKPGMVVTFAPAALTTEVKSVEMHHEALLEAVPGDNVGFNVKNVSVKELRRGFVAGDSKANPPKAVSEFTAQVIVLNHPGQISNGYTPVLDCHTAHIACKFAEIKEKCDRRTGKTVEENPKAIKSGDAAIVNLVPTKPMCVESFSDFPPLGR

SEQ ID NO: 17592 - protein, 377 aa, Glomeris marginata
AELGKGSFKYAWVLDKLKAERERGITIDISLWKFETAKYYITIIDAPGHRDFIKNMITGTSQADCAVLIVAAGTGEFEAGISKNGQTREHALLAYTLGVKQLIVGVNKMDTTEPPYNEGRFDEIKKEVSSYIKKIGYNPVAVPFVPISGWNGDNMLEPSPSMTWHKGWSIERKEGNASGKTLLEALDAIVAPQRPTDKALRLPLQDVYKIGGIGTVPVGRVETGTLKPGMVVTFAPVNLTTEVKSVEMHHEALTEAVPGDNVGFNVKNVSVKELRRGYVCGDSKANPPKAVSEFTAQVIVLNHPGQIQNGYTPVLDCHTAHIACKFAEIKEKCDRRTGKTTEENPKAIKSGDAAIINLVPTKPLCVESFSDFPPLGR

SEQ ID NO: 17593 - protein, 413 aa, Prosimulium formosum
HVDSGKSTTTGHLIYKCGGIDKRTIEKFEKEAQEMGKGSFKYAWVLDKLKAERERGITIDIALWKFETGKYYVTIIDAPGHRDFIKNMITGTSQADCAVLIVAAGTGEFEAGISKNGQTREHALLAFTLGVKQLIVGVNKMDSTDPPFSESRFEEIKKEVSSYIKKIGYNPARVAFVPISGWHGDNMLEVSAKMPWFKGWKVERKDGNADGKCLIEALDAILPPSRPTDKALRLPLQDVYKIGGIGTVPVGRVETGVIKPGMVIVFAPVNLTTEVKSVEMHHEALQEAGPGDNVGFNVKNASVKELRRGYVAGDSKSNPPKGADNFTAQVIVLNHPGQISNGYTPVLDCHTAHIACKFSEIKEKVDRRTGKSTEDNPKAIKSGDAAIVILVPSKPLCVESFSEFPPLGRFAVR

SEQ ID NO: 17594 - protein, 413 aa, Helodon onychodactylus
HVDSGKSTTTGHLIYKCGGIDKRTIEKFEKEAQEMGKGSFKYAWVLDKLKAERERGITIDIALWKFETGKYYVTIIDAPGHRDFIKNMIPGTSQADCAVLIVAAGTGEFEAGISKNGQTREHALLAFTLGVKQLIVGVNKMDSTDPPFSEPRFEEIKKEVSSYIKKIGYNPACVAFVPISGWHGDNMLEVSAKMPWFKGWKVERKDGNADGKCLIEALDAILPPSRPTDKALRLPLQDVYKIGGIGTVPVGRVETGVIKPGMVIVFAPVNLTTEVKSVEMHHEALQEAGPGDNVGFNVKNVSVKELRRGYVAGDSKSNPPKGAENFTAQVIVLNHPGQISNGYTPVLDCHTAHIACKFAEIKEKVDRRTGKSTEDNPKAIKSGDAAIVILVPSKPLCVESFSEFPPLGRFAVR

SEQ ID NO: 17595 - protein, 413 aa, Cnesia dissimilis
HVDSGKSTTTGHLIYKCGGIDKRTIEKFEKEAQEMGKGSFKYAWVLDKLKAERERGITIDIALWKFETAKYYVTIIDAPGHRDFIKNMITGTSQADCAVLIVAAGTGEFEAGISKNGQTREHALLAFTLGVKQLIVGVNKMDSTEPPFSESRFEEIKKEVSSYIKKIGYNPACVPFVPISGWHGDNMLEVSAKMPWYKGWKVERKEGNADGKCLIESLDAILPPSRPTDKALRLPLQDVYKIGGIGTVPVGRVETGIIKPGMVVVFAPVNLTTEVKSVEMHHEALQEASPGDNVGFNVKNVSVKELRRGYVAGDSKSNPPKGAENFTAQVIVLNHPGQISNGYTPVLDCHTAHIACKFAEIKEKVDRRTGKSTEDNPKAIKSGDAAIVILVPSKPLCVESFSEFPPLGRFAVR

SEQ ID NO: 17596 - protein, 626 aa, Caenorhabditis elegans
MSRHRAIRNLNLEDEMDDDYDDDYDDYEDEENPEKQYTYDRNSLSTNYYTYLTDSGRNSPALPAPHPGIPSSSYHPPVSTPTPTAAPTTSLSSTIVRNMTAPLLHQNQKPPKNLNSRPSTPQTSSNLNTPKRTPQVKNLQAESTTPTVSRPSSEVDLTSFRRNQLQNIAKAPSVARKTPKPRVADKDLINLIVVGHVDAGKSTLMGHLLHDLEVVDSRTIDKFKHEAARNGKASFAYAWVLDETEEERERGVTMDIGRTSFETSHRRIVLLDAPGHKDFISNMITGTSQADAAILVVNATTGEFETGFENGGQTKEHALLLRSLGVTQLIVAVNKLDTVDWSQDRFDEIKNNLSVFLTRQAGFSKPKFVPVSGFTGENLIKRMELDWYDGPCLLELIDSFVAPQPPSDGPLRIGISDVLKVASNQLVVSGKIESGEVEKDDKVYIMSSVTAATVKECANNDGSRHCFAGDYILLTLQGTFEPESIQTGSVVVRAGPDTLIPSKKFEVRLVAFEIAMPIIKVYFCISNINLKTYCFQGAKAELYAHSLCVPCTFTNLLYTINKSNGEILKKGPRFIAKGASAVVEIETEYDIAIETFTSCRALGRVTFRAGGNTIAAGIVEKVITPQ

SEQ ID NO: 17597 - protein, 936 aa, Caenorhabditis elegans
MTLDDDPEGKYTMINLRRFVHTSCRLERGRTAFYNVHQKVTDPAKQDPDYFEKKARELPLDQNYIDALTKLYYEKIGSERDLGLKAADNLILEKTEFGLPRIEKSKTRAKYEDLDVLSNAPESVKKIFSVEMATRKELSQEWKQSLIKSVRQHSLDENSLEMKIAWLTALIRHWSLLVNDIGQETKKKPTWLTHRIWLVINERRKALRILRERNETAFEKTIAALKISYHVPKQPAHVKTRKAWAEAQLKLRVENEKEKRLEELHEKYDKEVEEHKRETQEKRKALNNELDKLAQEMRQIDVIEGKSFETMSRHRAIRNLNLEDEMDDDYDDDYDDYEDEENPEKQYTYDRNSLSTNYYTYLTDSGRNSPALPAPHPGIPSSSYHPPVSTPTPTAAPTTSLSSTIVRNMTAPLLHQNQKPPKNLNSRPSTPQTSSNLNTPKRTPQVKNLQAESTTPTVSRPSSEVDLTSFRRNQLQNIAKAPSVARKTPKPRVADKDLINLIVVGHVDAGKSTLMGHLLHDLEVVDSRTIDKFKHEAARNGKASFAYAWVLDETEEERERGVTMDIGRTSFETSHRRIVLLDAPGHKDFISNMITGTSQADAAILVVNATTGEFETGFENGGQTKEHALLLRSLGVTQLIVAVNKLDTVDWSQDRFDEIKNNLSVFLTRQAGFSKPKFVPVSGFTGENLIKRMELDWYDGPCLLELIDSFVAPQPPSDGPLRIGISDVLKVASNQLVVSGKIESGEVEKDDKVYIMSSVTAATVKECANNDGSRHCFAGDYILLTLQGTFEPESIQTGSVVVRAGPDTLIPSKKFEVRLVAFEIAMPIIKVYFCISNINLKTYCFQGAKAELYAHSLCVPCTFTNLLYTINKSNGEILKKGPRFIAKGASAVVEIETEYDIAIETFTSCRALGRVTFRAGGNTIAAGIVEKVITPQ

SEQ ID NO: 17598 - protein, 465 aa, Anisakis simplex
MGKEKFHINIVVIGHVDSGKSTTTGHLIYKCGGIDKRTIEKFEKEAQEMGKGSFKYAWVLDKLKAERERGITIDIALWKFETAKYYITIIDAPGHRDFIKNMITGTSQADCAVLVVACGTGEFEAGISKNGQTREHALLAQTLGVKQMIVACNKMDTTEPPFSEARFGEVSTEVSNYIKKIGYNPKAVAFVPISSFNGDNMLEPSTNMPWFKGWTVERKEGTASGKTLLGGPRLDYSTITTYRQATQIASSRRIQDWRVSGTVPVGRVETGILKPGMVVTFAPQNVTTEVKSVEMHHEALTEALPGDNVGFNVKNISVKDIRRGSVASDSKNDPAKEARSFTAQVIIMNHPGQLSAGYTPVLDCHTAHIACKFAELKEKVDRRSGKKVEDNPKFLKSGDAGIVELVPTKPMCVETFTEYAPLGRFAVRDMRQTVAVGVIKAVDKTEVGGKVTKAAQKAGVGGKKK

SEQ ID NO: 17599 - protein, 464 aa, Onchocerca volvulus
MGKEKTHINIVVIGHVDSGKSTTTGHLIYKCGGIDKRTIEKFEKEAQEMGKGSFKYAWVLDKLKAERERGIQIDIALWKFETPKYYITIIDAPGHRDFIKNMITGTSQADCAVLVVACGTGEFEAGISKNGQTREHALLAQTLGVKQMIVACNKMDSTDPPFSEARFGEVTTEVSNYIKKIGYNPKSIPFVPISGFNGDNMLEPSANMPWFKGWSVERKEGTMTGKTLLEALDSVVPPQRPTDKPLRLPLQDVYKIGGIGTVPVGRVETGILKPGMIVTFAPQNLTTEVKSVEMHHEALQEALPGDNVGFNVKNISIKDIRRGSVASDSKNDPAKETKMFTAQVIIMNHPGQISAGYTPVLDCHTAHIACKFAELKEKVDRRSGKKVEDNPKSLKSGDAGIIDLIPTKPLCVETFTEYPPLGRFAVRDMRQTVAVGVIKNVDKSEGVGKVQKAAQKAGVGGKKK

SEQ ID NO: 17600 - protein, 413 aa, Acronicta sp. AM-1997
HVDSGKSTTTGHLIYKCGGIDKRTIEKFEKEAQEMGKGSFKYAWVLDKLKAERERGITIDIALWKFETAKYYVTIIDAPGHRDFIKNMITGTSQADCAVLIVAAGTGEFEAGISKNGQTREHALLAFTLGVKQLIVGVNKMDSTEPPYSESRFEEIKKEVSSYIKKIGYNPAAVAFVPISGWHGDNMLEASTKMPWFKGWQVERKEGKAEGKCLIEALDAILPPARPTDKALRLPLQDVYKIGGIGTVPVGRVETGVLKPGTIVVFAPANITTEVKSVEMHHEALQEAVPGDNVGFNVKNVSVKELRRGYVAGDSKNNPPKGAADFTAQVIVLNHPGQISNGYTPVLDCHTAHIACKFAEIKEKVDRRTGKSTEDNPKSIKSGDAAIVNLVPSKPLCVESFQEFPPLGRFAVR

SEQ ID NO: 17601 - protein, 413 aa, Dasychira sp. AM-1997
HVDSGKSTTTGHLIYKCGGIDKRTIEKFEKEAQEMGKGSFKYAWVLDKLKAERERGITIDIALWKFETGKYYVTIIDAPGHRDFIKNMITGTSQADCAVLIVAAGTGEFEAGISKNGQTREHALLAFTLGVKQLIVGVNKMDSTEPPYSESRFEEIKKEVSSYIKKIGYNPAAVAFVPISGWHGDNMLEPSTKMPWFKGWLVERKEGKAEGKCLIEALDAILPPARPTDKPLRLPLQDVYKIGGIGTVPVGRVETGVLKPGTIVVFAPANITTEVKSVEMHHEALQEAVPGDNVGFNVKNVSVKELRRGYVAGDSKNNPPKGAADFTAQVIVLNHPGQISNGYTPVLDCHTAHIACKFAEIKEKVDRRTGKSTEENPKSIKSGDAAIVNLVPSKPLCVESFQEFPPLGRFAVR

SEQ ID NO: 17602 - protein, 413 aa, Meganola sp. AM-1997
HVDSGKSTTTGHLIYKCGGIDKRTIEKFEKEAQEMGKGSFKYAWVLDKLKAERERGITIDIALWKFETGKYYVTIIDAPGHRDFIKNMITGTSQADCAVLIVAAGTGEFEAGISKNGQTREHALLAFTLGVKQLIVGVNKMDSTEPPYSESRFEEIKKEVSSYIKKIGYNPAAVAFVPISGWHGDNMLEPSTKMPWFKGWMVERKEGKAEGKCLIEALDAILPPARPTDKALRLPLQDVYKIGGIGTVPVGRVETGVLKPGTIVVFAPANITTEVKSVEMHHEALQEAVPGDNVGFNVKNVSVKELRRGYVAGDSKNNPPKGAADFTAQVIVLNHPGQISNGYTPVLDCHTAHIACKFAEIKEKVDRRTGKSTEDNPKSIKSGDAAIVNLVPSKPLCVESFQEFPPLGRFAVR

SEQ ID NO: 17603 - protein, 413 aa, Palthis sp. AM-1997
HVDSGKSTTTGHLIYKCGGIDKRTIEKFEKEAQEMGKGSFKYAWVLDKLKAERERGITIDIALWKFETAKYYVTIIDAPGHRDFIKNMITGTSQADCAVLIVAAGTGEFEAGISKNGQTREHALLAFTLGVKQLIVGVNKMDSTEPPYSEPRFEEIKKEVSSYIKKIGYNPAAVAFVPISGWHGDNMLEPSTKMPWFKGWLVERKEGKAEGKCLIEALDAILPPARPTDKALRLPLQDVYKIGGIGTVPVGRVETGILKPGTIVVFAPANITTEVKSVEMHHEALQEAVPGDNVGFNVKNVSVKELRRGYVAGDSKNNPPKGAADFTAQVIVLNHPGQISNGYTPVLDCHTAHIACKFAEIKEKVDRRTGKSTEDNPKSIKSGDAAIVNLVPSKPLCVESFQEFPPLGRFSVR

SEQ ID NO: 17604 - protein, 413 aa, Schizura sp. AM-1997
HVDSGKSTTTGHLIYKCGGIDKRTIEKFQKEAQEMGKGSFKYAWVLDKLKAERERGITIDIALWKFETAKYYVTIIDAPGHRDFIKNMITGTSQADCAVLIVAAGTGEFEAGISKNGQTREHALLAFTLGVKQLIVGVNKMDSTEPPYSESRFEEIKKGVSSYIKKIGYNPAAVAFVPISGWHGDNMLEPSTKMPWFKGWQVERKEGKAEGKCLIEALDAILPPARPTDKALRLPLQDVYKIGGIGTVPVGRVETGVLKPGTVVVFAPANITTEVKSVEMHHEALQEAVPGDNVGFNVKNVSVKELRRGYVAGDSKNNPPKGAADFTAQVIVLNHPGQISNGYTPVLDCHTAHIACKFAEIKEKVDRRTGKSTEDNPKSIKSGDAAIVNLVPSKPLCVESFQEFPPLGRFAVR

SEQ ID NO: 17605 - protein, 411 aa, Ptychodera flava
DSGKSTSTGHLIYKCGGIDKRTIEKFEKEAQEMGKGSFKYAWVLDKLKAERERGITIDIALWKFETEKYYVTVIDAPGHRDFIKNMITGTSQADCAVLIVAAGTGEFEAGISKNGQTREHALLAYTLGVKQLIVCVNKMDNTEPPYSEARFKEIVKEVSTYIKKIGYNPKAVPFVPISGWHGDNMFEVSDKLGWFGGWNIERKEGNASGKTLMQALDSILPPKRPTEKPLRLPLQDMYKIGGIGTVPVGRVETGILKPGVVVTFSPANITTEVKSVEMHHEALTEALPGDNVGFNVKNVSVKEIRRGMVAGDSKNDPPKEAKNFTAQVIVLNHPGEIHAGYSPVLDCHTAHIARKFNELKEKCDRRSGKKLEDNPKSVKSGDAAIVEMIPSKLMCVESFADYPPLGRFAVR

SEQ ID NO: 17606 - protein, 374 aa, Owenia fusiformis
QEMGKGSFKYAWVLDKLKAERERGITIDIALWKFETPKYFVTVIDAPGHRDFIKNMITGTSQADCAVLICASSPGEFEAGISKNGQTREHALLAYTLGVKQLILGVNKIDNTEPPYSKARFEEIQKEVAQYVKKIGYNPDAVPFIPISGWHGDNMTQKSDNTTWFKQWKVTKNKKEFTGVTLVDALDNIDPPKRPTDKPLRLPLQDVYKIGGIGTVPVGRVETGMLKPGMVVTFAPNVVTTECKSVEMHHEALTEAIPGDNVGFNIKNVSVKEIRRGNVCGDSKNNPPKEAKSFVAQVIILNHPGQISNGYAPVLDCHTAHIACKFSEIQKKIDRRSGKELEDSPKFVKSGDAAIVVMIPQKPMCVEPFAEFAP

SEQ ID NO: 17607 - protein, 374 aa, Batillus cornutus
QEMGKGSFKYAWVLDKLKAERERGITIDIALWKFETSKYYITIIDAPGHRDFIKNMITGTSQADCAVLIVASGVGEFEAGISKDGQTREHALLAYTLGVKQLIIGLNKMDSTAPPYSEARYNEIVKEVSGYIKKIGYNPKAVAFVPISGFHGDNMIEPSTNMPWFKGWAIERKEGSANGKTLFEALDSILPPTRPTEKALRLPLQDVYKIGGIGTVPVGRVETGILKPGTLVTFAPSGLTTEVKSVEMHHEALTEALPGDNVGFNVKNVSVKELRRGFVAGDNKNDPPKECASFYAQVIILNHPGEIKNGYSPVLDCHTAHIAVKFSEIKEKCDRRSGKKLEDNPKFVKSGDAAMVTCIPSKPMCVEAFSDYQP

SEQ ID NO: 17608 - protein, 413 aa, Graellsia isabellae
HVDSGKSTTTGHLIYKCGGIDKRTIEKFEKEAQEMGKGSFKYAWVLDKLKAERERGITIDIALWKFETGKYYVTIIDAPGHRDFIKNMITGTSQADCAVLIVAAGTGEFEAGISKNGQTREHALLAFTLGVKQLIVGVNKMDSTEPPYSESRFEEIKKEVSSYIKKIGYNPAAVAFVPISGWHGDNMLEPSTKMPWFKGWMVERKEGKAEGKCLIEALDAILPPARPTDKALRLPLQDVYKIGGIGTVPVGRVETGILKPGTIVVFAPANITTEVKSVEMHHEALQEAVPGDNVGFNVKNVSVKELRRGYVAGDSKNNPPKGAADFTAQVIVLNHPGQISNGYTPVLDCHTAHIACKFAEIKEKVDRRTGKSTEDNPKSIKSGDAAIVNLVPSKPLCVESFQEFPPLGRFAVR

SEQ ID NO: 17609 - protein, 413 aa, Actias luna
  unsure (1)..(413): unsure at all Xaa locations
HVDSGKSTTTGHLIYKCGGIDKRTIEKFEKEAQEMGKGSFKYAWVLDKLKAERERGITIDIALWKFETSKYYVTIIDAPGHRDFIKNMITGTSQADCAVLIVAAGTGEFEAGISKNGQTREHALLAFTLGVKQLIVGVNKMDSTEPPYSESRFEEIKKEVSSYIKKIGYNPAAVAFVPISGWHGDNMLEPSTKMPWFKGWMVERKEGKAEGKCLIEALDAILPPARPTDKALRLPLQDVYKIGGIGTVPVGRVETGILKPGTIVVFAPANITTEVKSVEMHHEALQEAVPGDNVGFNVKNVSVKELRRGYVAGDSKNNPPKGAADFTAQVIVLNHPGQISNGYTPVLDCHTAHIACKFAEIKEKVDRRTGKSTEDNPKSIKSGDAAIVNLVPSKPLCVESFQEFPPXGRFAVR

SEQ ID NO: 17610 - protein, 413 aa, Archaeoattacus edwardsii
  unsure (1)..(413): unsure at all Xaa locations
HVDSGKSTTTGHLIYKCGGIDKRTIEKFEKEAQEMGKGSFKYAWVLDKLKAERERGITIDIALWKFETSRYYVTIIDAPGHRDFIKNMITGTSQADCAVLIVAAGTGEFEAGISKNGQTREHALLAFTLGVKQLIVGVNKMDSTEPPYSEPRFEEIKKEVSSYIKKIGYNPAAVAFVPISGWHGDNMLEPSTKMPWFKGWLVERKEGKAEGKCLIEALDAILPPARPTDKALRLPLQDVYKIGGIGTVPVGRVETGILKPGTIVVFAPANITTEVKSVEMHHEALQEAVPGDNVGFNVKNVSVKELRRGYVAGDSKNNPPKGAADFTAQVIVLNHPGQISNGYTPVLDCHTAHIACKFAEXKEKVDRRTGKSTEDNPKSIKSGDAAIVNLVPSKPLCVESFQEFPPLGRFAVR

SEQ ID NO: 17611 - protein, 413 aa, Attacus atlas
  unsure (1)..(413): unsure at all Xaa locations
HVDSGKSTTTGHLIYKCGGXDKRTIEKFEKEAQEMGKGSFKYAWVLDKLKAERERGITIDIALWKFETSKYYVTIIDAPGHRDFIKNMITGTSQADCAVLIVAAGTGEFEAGISKNGQTREHALLAFTLGVKQLIVGVNKMDSTEPPYSEPRFEEIKKEVSSYIKKIGYNPAAVAFVPISGWHGDNMLEPSTKMPWFKGWLVERKEGKAEGKCLIEALDAILPPARPTDKPLRLPLQDVYKIGGIGTVPVGRVETGILKPGTIVVFAPANITTEVKSVEMHHEALQEAVPGDNVGFNVKNVSVKELRRGYVAGDSKNNPPKGAADFTAQVIVLNHPGQISNGYTPVLDCHTAHIACKFAEIKEKVDRRTGKSTEDNPKSIKSGDAAIVNLVPSKPLCVESFQEFPPLGRFAVR

SEQ ID NO: 17612 - protein, 413 aa, Callosamia angulifera
  unsure (1)..(413): unsure at all Xaa locations
HVDSGKSTTTGHLIYKCGGIDKRTIEKFEKEAQEMGKGSFKYAWVLDKLKAERERGITIDIALWKFETSKYYVTIIDAPGHRDFIKNMXTGTSQADCAVLIVAAGTGEFEAGISKNGQTREHALLAFTLGVKQLIVGVNKMDSTEPPYSESRFEEIKKEVSSYIKKIGYNPAAVAFVPISGWHGDNMLEPSTKMPWFKGWMVERKEGKAEGKCLIEALDAILPPARPTDKALRLPLQDVYKIGGIGTVPVGRVETGILKPGTVVVFAPANITTEVKSVEMHHEALQEAVPGDNVGFNVKNVSVKELRRGYVAGDSKNNPPRGAADFTAQVIVLNHPGQISNGYTPVLDCHTAHIACKFAEIKEKVDRRTGKSTEDNPKSIKSGDAAIVNLVPSKPLCVESFQEFPPLGRFAVR

SEQ ID NO: 17613 - protein, 413 aa, Callosamia promethea
  unsure (1)..(413): unsure at all Xaa locations
HVDSGKSTTTGHLIYKCGGIDKRTIEKFEKEAQEMGKGSFKYAWVLDKLKAERERGITIDIALWKFETSKYYVTIIDAPGHRDFIKNMITGTSQADCAVLIVAAGTGEFEAGISKNGQTREHALLAFTLGVKQLIVGVNKMDSTEPPYSESRFEEIKKEVSSYIKKIGYNPAAVAFVPISGWHGDNMLEPSTKMPWFKGWMVERKEGKAEGKCLIEALDAXLPPARPTDKALRLPLQDVYKIGGIGTVPVGRVETGILKPGTVVVFAPANITTEVKSVEMHHEALQEAVPGDNVGFNVKNVSVKELRRGYVAGDSKNNPPRGAADFTAQVIVLNHPGQISNGYTPVLDCHTAHIACKFAEIKEKVDRRTGKSTEDNPKSIKSGDAAIVNLVPSKPLCVESFQEFPPLGRFAVR

SEQ ID NO: 17614 - protein, 413 aa, Callosamia securifera
HVDSGKSTTTGHLIYKCGGIDKRTIEKFEKEAQEMGKGSFKYAWVLDKLKAERERGITIDIALWKFETSKYYVTIIDAPGHRDFIKNMITGTSQADCAVLIVAAGTGEFEAGISKNGQTREHALLAFTLGVKQLIVGVNKMDSTEPPYSESRFEEIKKEVSSYIKKIGYNPAAVAFVPISGWHGDNMLEPSTKMPWFKGWMVERKEGKAEGKCLIEALDAILPPARPTDKALRLPLQDVYKIGGIGTVPVGRVETGILKPGTVVVFAPANITTEVKSVEMHHEALQEAVPGDNVGFNVKNVSVKELRRGYVAGDSKNNPPRGAADFTAQVIVLNHPGQISNGYTPVLDCHTAHIACKFAEIKEKVDRRTGKSTEDNPKSIKSGDAAIVNLVPSKPLCVESFQEFPPLGRFAVR

SEQ ID NO: 17615 - protein, 413 aa, Coscinocera hercules
  unsure (1)..(413): unsure at all Xaa locations
HVXSGKSTTTGHLIYKCGGIDKRTIEKFEKEAQEMGXGSFKYAWVLDKLKAERERGITIDIALWKFETAKYYVTIIDAPGHRDFIKNMXTGTSQADCAVLIVAAGTGEFEAGISKNGQTREHALLAFTLGVKQLIVGVNKMDSTEPPYSEPRFEEIKKEVSSYIKKIGYNPAAVAFVPISGWHGDNMLEPSTKMPWFKGWLVERKEGKAEGKCLIEALDAILPPARPTDKPLRLPLQDVYKIGGIGTVPVGRVETGILKPGTIVVFAPANITTEVKSVEMHHEALQEAVPGDNVGFNVKNVSVKELRRGYVAGDSKNNPPKGAADFTAQVIVLNHPGQISNGYTPVLDCHTAHIACKFAEIKEKVDRRTGKSTEDNPKSIKSGDAAIVNLVPSKPLCVESFQEFPPLGRFAVR

SEQ ID NO: 17616 - protein, 413 aa, Epiphora mythimnia
HVDSGKSTTTGHLIYKCGGIDKRTIEKFEKEAQEMGKGSFKYAWVLDKLKAERERGITIDIALWKFETSKYYVTIIDAPGHRDFIKNMITGTSQADCAVLIVAAGTGEFEAGISKNGQTREHALLAFTLGVKQLIVGVNKMDSTEPPYSESRFEEIKKEVSSYIKKIGYNPAAVAFVPISGWHGDNMLEPSTKMPWFKGWLVERKEGKAEGKCLIEALDAILPPARPTDKALRLPLQDVYKIGGIGTVPVGRVETGILKPGTIVVFAPANITTEVKSVEMHHEALQEAVPGDNVGFNVKNVSVKELRRGYVAGDSKNNPPKGAADFTAQVIVLNHPGQISNGYTPVLDCHTAHIACKFAEIKEKVDRRTGKSTEDNPKSIKSGDAAIVNLVPSKPLCVESFQEFPPLGRFAVR

SEQ ID NO: 17617 - protein, 413 aa, Eupackardia calleta
  unsure (1)..(413): unsure at all Xaa locations
HVDSGKSTTTGHLIYKXGGIDKRTIEKFEKEXQEMGKGSFKYAWVLDKLKAERERGITIDIALWKFETGKYYVTIIDAPGHRDFIKNMITGTSQADCAVLIVAAGTGEFEAGISKNGQTREHALLAFTLGVKQLIVGVNKMDSTEPPYSEPRFEEIKKEVSSYIKKIGYNPXAVAFVPISGWHGDNMLEPSTKMPWFKGWLVERKEGKAEGKCLIEALDAILPPARPTDKALRLPLQDVYKIGGIGTVPVGRVETGILKPGTIVVFAPANITTEVKSVEMHHEALQEAVPGDNVGFNVKNVSVKELRRGYVAGDSKNNPPKGAADFTAQVIVLNHPGQISNGYTPVLDCHTAHIACKFAEIKEKVDRRTGKSTEDNPKSIKSGDAAIVNLVPSKPLCVESFQEFPPLGRFAVR

SEQ ID NO: 17618 - protein, 413 aa, Hyalophora euryalus
  unsure (1)..(413): unsure at all Xaa locations
HVDSGKSTTTGHLIYKXGGIDKRTIEKFEKEAQEMGKGSFKYAWVLDKLKAERERGITXDIALWKFETSKYYVTIIDAPGHRDFIKNMITGTSQADCAVLIVAAGTGEFEAGISKNGQTREHALLAFTLGVKQLIVGVNKMDSTEPPYSESRFEEIKKEVSSYIKKIGYNPAAVAFVPISGWHGDNMLEPSTKMPWFKGWMVERKEGKAEGKCLIEALDAILPPARPTDKALRLPLQDVYKIGGIGTVPVGRVETGILXPGTVVVFAPANITTEVKSVEMHHEALQEAVPGDNVGFNVKNVSVKELRRGYVAGDSKNNPPRGAADFTAQVIVLNHPGQISNGYTPVLDCHTAHIACKXAEIKEKVDRRTGKSTEDNPKSIKSGDAAIVNLVPSKPLCVESFQEFPPLGRFAVR

SEQ ID NO: 17619 - protein, 413 aa, Loepa sikkima
  unsure (1)..(413): unsure at all Xaa locations
HVDSGKSTTTGHLIYKCGGIDKRTIEKFEKEAQEMGKGSFKYAWVLDKLKAERERGITIDIALWKFETSRYYVTIIDAPGHRDFIKNMITGTSQADCAVLIVAAGTGEFEAGISKNGQTREHALLAFTLGVKQLIVGVNKMDSTEPPYSEPRFEEIKKEVSSYIKKIGYNPAAVAFVPISGWHGDNMLEPSTKMPWFKGWNVERKEGKADGKCLIEALDAILPPARPTDKALRLPLQDVYKIGGIGTVPVGRVETGILKPGTIVVFAPANITTEVKSVEMHHEALQEAVPGDNVGFNVKNVSVKELRRGYVAGDSKNNPPKGAADFTAQVIVLNHPGQISNGYTPVLDCHTAHIACKFAEIKEKVDRRTGKSTEDNPKSIKSGDAAIVNLVPSKPLXVESFQEFPPLGRFAVR

SEQ ID NO: 17620 - protein, 413 aa, Rothschildia forbesi
HVDSGKSTTTGHLIYKCGGIDKRTIEKFEKEAQEMGKGSFKYAWVLDKLKAERERGITIDIALWKFETAKYYVTIIDAPGHRDFIKNMITGTSQADCAVLIVAAGTGEFEAGISKNGQTREHALLAFTLGVKQLIVGVNKMDSTEPPYSEPRFEEIKKEVSSYIKKIGYNPAAVAFVPISGWHGDNMLEPSTKMPWFKGWLVERKEGKAEGKCLIEALDAILPPARPTDKPLRLPLQDVYKIGGIGTVPVGRVETGILKPGTIVVFAPANITTEVKSVEMHHEALQEAVPGDNVGFNVKNVSVKELRRGYVAGDSKNNPPKGAADFTAQVIVLNHPGQISNGYTPVLDCHTAHIACKFAEIKEKVDRRTGKSTEDNPKSIKSGDAAIVNLVPSKPLCVESFQEFPPLGRFAVR

SEQ ID NO: 17621 - protein, 413 aa, Rothschildia orizaba
  unsure (1)..(413): unsure at all Xaa locations
HVDSGKSTTTGHLIYKCGGIDKRTIEKFEKEAXEMGKGSFKYAWVLDKLKAERERGITIDIALWKFETGRYYVTIIDAPGHRDFIKNMITGTSQADCAVLIVAAGTGEFEAGISKNGQTREHALLAFTLGVKQLIVGVNKMDSTEPPYSEPRFEEIKKEVSSYIKKIGYNPAAVAFVPISGWHGDNMLEPSTKMPWFKGWLVERKEGKAEGKCLIEALDAILPPARPTDKALRLPLQDVYKIGGIGTVPVGRVETGILKPGTIVVFAPANITTEVKSVEMHHEALQEAVPGDNVGFNVKNVSVKELRRGYVAGDSKNNPPKGAADFTAQVIVLNHPGQISNGYTPVLDCHTAHIACKFAEIKEKVDRRTGKSTEDNPKSIKSGDAAIVNLVPSKPLCVESFQEFPPLGRFAVR

SEQ ID NO: 17622 - protein, 413 aa, Samia ricini
HVDSGKSTTTGHLIYKCGGIDKRTIEKFEKEAQEMGKGSFKYAWVLDKLKAERERGITIDIALWKFETGKYYVTIIDAPGHRDFIKNMITGTSQADCAVLIVAAGTGEFEAGISKNGQTREHALLAFTLGVKQLIVGVNKMDSTEPPYSESRFEEIKKEVSSYIKKIGYNPAAVAFVPISGWHGDNMLEPSTKMPWFKGWLVERKEGKAEGKCLIEALDAILPPARPTDKALRLPLQDVYKIGGIGTVPVGRVETGILKPGTVVVFAPANITTEVKSVEMHHEALQEAVPGDNVGFNVKNVSVKELRRGYVAGDSKNNPPRGAADFTAQVIVLNHPGQISNGYTPVLDCHTAHIACKFAEIKEKVDRRTGKSTEDNPKSIKSGDAAIVNLVPSKPLCVESFQEFPPLGRFAVR

SEQ ID NO: 17623 - protein, 421 aa, Halobacterium sp. NRC-1
MSDNRHQNLAVIGHVDHGKSTMVGRLLYETGSVPEHVIEQHKEEAEEKGKGGFEFAYVMDNLAEERERGVTIDIAHQEFTTDEYEFTIVDCPGHRDFVKNMITGASQADNAVLVVAADDGVAPQTREHVFLSRTLGIDELIVAVNKMDVVDYDESKYNEVVSGVKDLFGQVGFNPDDAKFIATSAFEGDNVSDHSDNTPWYDGPTLLEALNGLPVPQPPTDADLRLPIQDVYTISGIGTVPVGRIETGVMNTGDNVSFQPSDVGGEVKTIEMHHEEVPNAEPGDNVGFNVRGIGKDDIRRGDVCGPADDPPSVADTFQAQVVVMQHPSVITAGYTPVFHAHTAQVACTIESIDKKMDPASGETQEENPDFIQSGDAAVVTVRPQKPLSLEPSSEIPELGSFAVRDMGQTIAAGKVLDVDEA

SEQ ID NO: 17624 - protein, 374 aa, Lamellibrachia sp.
QEMGKGSFKYAWVLDKLKAERERGITIDIALWKFETNKYYVTIIDAPGHRDFIKNMITGTSQADCAVLIVAAGVGEFEAGISKNGQTREHALLAYTLGVKQMIIGVNKMDNTEPPYSETRFEEIKKEVAQYIKKVGYNPDTVAFVPISGWHGDNMLESSPKMAWFKGWKVKKGSKDVSGNTLMDALDNVEQPKRPTDKPLRLPLQDVYKIGGIGTVPVGRVETGVMKPGMIVTFAPCNLTTEVKSVEMHHQALTEAAPGDNVGFNIKNVSVKDIRRGFVCGDSKNDPPLETDEFLAQVIILNHPGTIQAGYAPVLDCHTAHIACKFKELKEKIDRRSGKVLEATPQSVKSGDAAMVEMIPQKAMCVEKFSEYAP

SEQ ID NO: 17625 - protein, 380 aa, Phascolopsis gouldii
AEMGKGSFKYAWVLDKLKAERERGITIDIALWKFETTKYYITIIDAPGHRDFIKNMITGTSQADCAVLIVAAGVGEFEAGISKNGQTREHALLAYTLGVKQLIIGVNKMDSTEPPYSQARFEEIKKEVTQYVKKIGYNPEEVAFVPISGWHGDNMLEQSQKMSWFKGWEVQKGKGKKETKGGKTLFEALDSIDPPQRPTDKPLRLPLQDVYKIGGIGTVPVGRVETGTLKPGMVVKFAPKNITTEVKSVEMHHTALDEALPGDNVGFNIKNVSVKEIRRGNVCGDSKKSPPMEAKDFKAQVIILNHPGEIRAGYAPVVDCHTAHIACKFNTLLEKIDRRSGKKLEDNPQIVKSGDAAIVNMIPSKPMCVEAFSEFPPLGR

SEQ ID NO: 17626 - protein, 417 aa, Rhizopus oryzae
GKSTTTGHLIYKCGGIDKRTIEKFEKEAAELGKGSFKYAWVLDKLKAERERGITIDIALWKFETPKYQITVIDAPGHRDFIKNMITGTSQADCAILIIAGGTGEFEAGISKDGQTREHALLAFTLGVRQLIVAVNKMDTTKWSEARFNEIVKEVSSFIKKIGYNPKSVPFVPISGWHGDNMLEESTNMPWYKGWNKETKAGAKSGKTLLDAIDNIDPPTRPVDKPLRLPLQDVYKIGGIGTVPVGRVETGVIKAGMVVTFAPAAVTTEVKSVEMHHETLTEGLPGDNVGFNVKNVSVKDIRRGNVCSDSKNDPAKEAGSFTAQVIILNHPGQIGAGYAPVLDCHTAHIACKFAELIEKIDRRSGKSLEATPKFVKSGDSAIVKMIPSKPMCVEAYTDYPPLGRFAVRDMRQTVAVGV

SEQ ID NO: 17627 - protein, 403 aa, Echinosporangium transversale
VVVIGHVDSGKSTTTGHLIYKCGGIDKRTIEKFEKEAAELGKGSFKYAWVLDKLKAERERGITIDIALWKFETPKYYVTVIDAPGHRDFIKNMITGTSQADCAILIIAAGTGEFEAGISKEGQTREHALLAFTLGVKQLIVAINKMDSTKWNKERFEEIVKEVSTFVKKVGYNPKAVAFVPISGWHGDNMLEESVNMPWYKGWVKETKGGEVKGRTLLDAIDAIEPPARPTDKPLRLPLQDVYKIGGIGTVPVGRVETGIIKAGMVVTFAPTNVTTEVKSVEMHHEVLTEGIPGDNVGFNVKNVSVKDIRRGNVCSDSKNDPAKEAASFNAQVIVLNHPGQISNGYAPVLDCHTAHIACKFSEILEKIDRRTGKATEEFPKFIKSGDAAIVKMVPSKPLCVET

SEQ ID NO: 17628 - protein, 425 aa, Radiomyces spectabilis
VVVIGHVDSGKSTTTGHLIYKCGGIDKRTIEKFEKEAAELGKGSFKYAWVLDKLKAERERGITIDIALWKFETPKYHVTVIDAPGHRDFIKNMITGTSQADCGILIIAAGTGEFEAGISKDGQTREHALLAFTLGVRQLIVAINKMDSTKWSEARYNEIVKEVSAFIKKIGFNPKAVPFVPISGWHGDNMLEESTNMPWFKGWTKETKAGSKTGKTLLEAIDNIEPPVRPSDKPLRLPLQDVYKIGGIGTVPVGRVETGVIKAGMVVTFAPANVTTEVKSVEMHHEQLVEGVPGDNVGFNVKNVSVKDIRRGNVCSDSKNDPAKEAGSFTAQVIVLNHPGQIGAGYAPVLDCHTAHIACKFAELLEKIDRRSGKSLEAAPKFVKSGDSAIVKMVPSKPMCVEAYTEYPPLGRFAVRDMRQTVAVG

SEQ ID NO: 17629 - protein, 417 aa, Mucor indicus
GKSTTTGHLIYKCGGIDKRTIEKFEKEAAELGKGSFKYAWVLDKLKAERERGITIDIALWKFETPKYNVTVIDAPGHRDFIKNMITGTSQADCAILIIAGGTGEFEAGISKDGQTREHALLAFTLGVRQLIVAINKMDTTKWSEARYNEIVKEVSSFIKKIGFNPKSVPFVPISGWHGDNMLDESTNMPWFKGWNKETKAGSKTGKTLLEAIDAIDPPTRPVDKPLRLPLQDVYKIGGIGTVPVGRVETGVIKAGMVVTFAPAAVTTEVKSVEMHHETLTEGLPGDNVGFNVKNVSVKDIRRGNVCSDSKNDPAKESASFTAQVIILNHPGQISAGYAPVLDCHTAHIACKFAELIEKIDRRSGKKLEDAPKFVKPGDSAIVKMIPSKPMCVEAYTDYPPLGRFAVRDMRQTVAVGV

SEQ ID NO: 17630 - protein, 417 aa, Benjaminiella poitrasii
GKSTTTGHLINKCGGIDKRTIEKFEKEAAELGKGSFKYAWVLDKLKAERERGITIDIALWKFETPKYHVTVIDAPGHRDFIKNMITGTSQADCAILIIAGGTGEFEAGISKDGQTREHALLAFTLGVRQLIVAINKMDTTKWSEARYNEIVKEVSNFIKKIGFNPKSVPFVPISGWHGDNMLDESTNMPWFKGWTKETKAGSKTGKTLLEAIDAIDPPSRPVDKPLRLPLQDVYKIGGIGTVPVGRVETGVIKAGMVVSFAPAAVTTEVKSVEMHHETLTEGLPGDNVGFNVKNVSVKDIRRGNVCSDSKNDPAKESASFTAQVIILNHPGQISAGYAPVLDCHTAHIACKFSELIEKIDRRSGKKLEDAPKFVKSGDSAIVKMVPSKPMCVEAYTEYPPLGRFAVRDMRQTVAVGV

SEQ ID NO: 17631 - protein, 417 aa, Mycotypha africana
GKSTTTGHLINKCGGIDKRTIEKFEKEAAELGKGSFKYAWVLDKLKAERERGITIDIALWKFETPKYHVTVIDAPGHRDFIKNMITGTSQADCGILIIAAGTGEFEAGISKDGQTREHALLAFTLGVRQLIVAINKMDTTKWSEARYNEIVKEVSSFIKKIGFNPKSVPFVPISGWHGDNMLDESNNMPWFKGWTKETKAGSKTGKTLLEAIDAIDPPTRPVDKPLRLPLQDVYKIGGIGTVPVGRVETGVIKAGMVVTFAPANVTTEVKSVEMHHETLTEGLPGDNVGFNVKNVSVKDIRRGNVCSDSKNDPAKESGSFTAQVIILNHPGQISAGYAPVLDCHTAHIACKFAELVEKIDRRSGKKLEDAPKFVKSGDSAIVKMIPSKPMCVEAYTDYPPLGRFAVRDMRQTVAVGV

SEQ ID NO: 17632 - protein, 416 aa, Mycotypha microspora
GKSTTTGHLIYKCGGIDKRTIEKFEKEAAELGKGSFKYAWVLDKLKAERERGITIDIALWKFETPKYHVTVIDAPGHRDFIKNMITGTSQADCGILIIAAGTGEFEAGISKDGQTREHALLAFTLGVRQLIVAINKMDTTKWSEARYNEIVKEVSSFIKKIGFNPKSVPFVPISGWHGDNMLDESTNMPWFKGWTKETKAGSKTGKTLLEAIDAIDPPTRPSDKPLRLPLQDVYKIGGIGTVPVGRVETGVIKAGMVVTFAPANVTTEVKSVEMHHETLTEGLPGDNVGFNVKNVSVKDIRRGNVCSDSKNDPAKESGSFTAQVIILNHPGQISAGYAPVLDCHTAHIACKFAELVEKIDRRSGKKLEDAPKFVKSGDSAIVKMIPSKPMCVEAYTDYPPLGRFAVRDMRQTVAVG

SEQ ID NO: 17633 - protein, 365 aa, Pilaira anomala
GKSTTTGHLIYKCGGIDKRTIEKFEKEAAELGKGSFKYAWVLDKLKAERERGITIDIALWKFETPKYMVTVIDAPGHRDFIKNMITGTSQADCAILIIAGGTGEFEAGISKDGQTREHALLAFTLGVRQLIVAINKMDTTKWSEARYNEIVKEVSSFIKKIGFNPKTVPFVPISGWHGDNMLEESKNMPWFKGWNKETKAGAKTGKTLLEAIDAIDPPVRPSDKPLRLPLQDVYKIGGIGTVPVGRVETGVIKAGMVVNFAPAAVTTEVKSVEMHHETLSEGLPGDNVGFNVKNVSVKDIRRGNVCSDSKNDPAKEAGSFTAQVIILNHPGQISNGYSPVLDCHTAHIACKFSELIEKIDRRSGK

SEQ ID NO: 17634 - protein, 365 aa, Pirella circinans
GKSTTTGHLIYKCGGIDKRTIEKFEKEAAELGKGSFKYAWVLDKLKAERERGITIDIALWKFETPKYHVTVIDAPGHRDFIKNMITGTSQADCAILIIAGGTGEFEAGISKDGQTREHALLAFTLGVRQLIVAINKMDTTKWSEARYTEIVKEVSSFIKKIGFNPKSVPFVPISGWHGDNMLEESKNMGWFKGWTKETKAGSKTGKTLLEAIDAIEPPVRPSDKPLRLPLQDVYKIGGIGTVPVGRVETGIIKAGMVVNFAPAAVTTEVKSVEMHHETLTEGLPGDNVGFNVKNVSVKDIRRGNVCSDSKNDPAKEAGSFTAQVIILNHPGQISNGYSPVLDCHTAHIACKFSELIEKIDRRSGK

SEQ ID NO: 17635 - protein, 407 aa, Actinomucor elegans
GKSTTTGHLIYKCGGIDKRTIEKFEKEAAELGKGSFKYAWVLDKLKAERERGITIDIALWKFETPKYNVTVIDAPGHRDFIKNMITGTSQADCAILIIAGGTGEFEAGISKDGQTREHALLAFTLGVRQLIVAINKMDTTKWSEARYTEIVKEVSSFIKKIGFNPKSVPFVPISGWHGDNMLEESKNMPWFKGWNKETKAGSSTGKTLLQAIDAIEPPTRPSDKPLRLPLQDVYKIGGIGTVPVGRVETGTIKAGMVVNFAPAAVTTEVKSVEMHHETLTEGLPGDNVGFNVKNVSVKDIRRGNVCSDSKNDPAKESASFTAQVIILNHPGQISAGYAPVLDCHTAHIACKFAELIEKIDRRSGKKMEDAPKFVKSGDSAIVKMIPSKPMCVEAYTDYPPLGRFAVR

SEQ ID NO: 17636 - protein, 366 aa, Backusella circina
GKSTTTVHLIYKCGGIDKRTIEKFEKEAAELGKGSFKYAWVLDKLKAERERGITIDIALWKFETPKYNVTVIDAPGHRDFIKNMITGTSQADCAILIIAGGTGEFEAGISKDGQTREHALLAFTLGVRQLIVAINKMDTTKWSEARYNEIVKEVSSFIKKIGFNPKSVPFVPISGWHGDNMLEESTNMPWFKGWNKETKAGAKTGKTLLEAIDNIEPPSRPVDKPLRLPLQDVYKIGGIGTVPVGRVETGVIKAGMVVTFAPANVTTEVKSVEMHHELLPEGGLPGDNVGFNVKNVSVKDIRRGNVTSDSKNDPAKEAGSFTAQVIILNHPGQIGAGYAPVLDCHTAHIACKFSELIEKIDRRPGK

SEQ ID NO: 17637 - protein, 426 aa, Zychaea mexicana
VVVIGHVDSGKSTTTGHLIYKCGGIDKRTIEKFEKEAAELGKGSFKYAWVLDKLKAERERGITIDIALWKFETPKYHVTVIDAPGHRDFIKNMITGTSQADCGILIIAAGTGEFEAGISKDGQTREHALLAFTLGVRQLIVAINKMDSTKYSEARYNEIVKEVSTFIKKIGFNPKSVPFVPISGWNGDNMLDESPNMPWFKGWNKETKAGAKSGKTLLEAIDSIDPPVRPSDKPLRLPLQDVYKIGGIGTVPVGRVETGVIKAGMVVTFAPANVTTEVKSVEMHHEQLVEGVPGDNVGFNVKNVSVKDIRRGNVCSDSKNDPAKEAASFTAQVIVLNHPGQIGSGYSPVLDCHTAHIACKFSELLEKVDRRSGKKLEDAPKFVKSGDSAIVKMVPSKPMCVEAYTEYPPLGRFAVRDTRQTVAVGV

SEQ ID NO: 17638 - protein, 401 aa, Planoprotostelium aurantium
AGKSTTTGHLIYKCGGIDKRTIEKFEKEAKEIGKASFKYAWVLDKLKAERERGITIDIALWKFETTKYYFTIIDAPGHRDFIKNMITGTSQADCAILVIASPTGEFEAGIDKNGQTREHALLAFTLGVKQLIVLVNKMDEKSTNYSEARFNEIRTEVSSFIKKIGYNPEKVPFVPISGWNGDNMLEKPDNMPWWKGPTLLEALDSITEPKRPSDKPLRVPLQDVYKIGGIGTVPVGRVETGILKPGVSVTFAPAGVTTEVKSVEMHHVQLPEARPGDNVGFNVKNVSVKDIRRGYVAGDAKADPPLGTEFFVAQVIILNHPGEIHNGYAPVLDCHTAHIACKFAEITSKIDRRSGKELEALPKSVKSGDAAMVKLVPQKPMCVETFTEYPPLGRFAVRDMR

SEQ ID NO: 17639 - protein, 388 aa, Planoprotostelium aurantium
CGGIDKRTIEKFEKEAKEIGKASFKYAWVLDKLKAERERGITIDIALWKFETTKYYFTIIDAPGHRDFIKNMITGTSQADCAILVIASPTGEFEAGIDKNGQTREHALLAFTLGVKQLIVLVNKMDEKSTNYSEARFNEIRTEVSSFIKKIGYNPEKVPFVPISGWNGDNMLEKSDNMPWWKGPTLLEALDSITEPKRPSDKPLRVPLQDVYKIGGIGTVPVGRVETGILKPGVSVTFAPAGVTTEVKSVEMHHVQLPEARPGDNVGFNVKNVSVKDIRRGYVAGDAKADPPLGTEFFVAQVIILNHPGEIHNGYAPVLDCHTAHIACKFAGITSKIDRRSGKELEALPKSVKSGDAAMVKLVPQKPMCVETFTEYPPLGRFAVRDMR

SEQ ID NO: 17640 - protein, 377 aa, Mytilus edulis
AEMGKGSFKYAWVLDKLKAERERGITIDIALWKFETTKYYVTIIDAPGHRDFIKNMITGTSQADCAILIVASGTGEFEAGISSNGQTREHALLAFTLGVKQMIVGVNKMDNTEPPYSESRFMEIQKEVSSYLKKIGYNPKCVAFVPISGWHGDNMIETSEKMGWYKGWSIERKEGNASGKTLFEALDSILPPSRPTDKALRLPLQDVYKIGGIGTVPVGRVETGIIKPGMVVTFAPANISTEVKSVEMHHESLPEALPGDNVGFNVKNVSVKEIRRGMVAGDSKNDPPKGAKSFIAQVIILNHPGEIKNGYAPVLDCHTAHIACKFVEIKEKIDRRSGKKLEEFPKFIKSGDAGIVDMTPSKPMCVESFQSYAPLGR

SEQ ID NO: 17641 - protein, 395 aa, Dinenympha exilis
STTTGHLIYKCGGIDERTIKKFEQESEAMGKGSFKYAWVLDKLKAERERGITIDIALWKFETNKYYFTIIDAPGHRDFIKNMITGTSQADAAILVVAANVGEFEAGISKDGQTREHALLAYTLGVEQMIVCVNKMDDKSVNWAESRYNEIKTEMRTYLKKIGYNPDKILMIPISGFNGDNMLDRSTNMPWYKDPILFDALDLLEVPKRPSDKPLRLPIQDVFKIGGIGTVPVGRVETGILTPGQVITIAPCMITTEVKSVEMHHEALTQAVPGDNVGFNVKGIAVKDLKRGFVAGDAKNDPPKEADTFSAQVIVMAHPGQIQNGYTPVLDCHTSHIACKFKEIQSKIDRRTNKVQEENPKFIKTGDSAIVEMQPSKPMVVETFVEYPPLGRFAVR

SEQ ID NO: 17642 - protein, 395 aa, Unidentified Oxymonadida A-14
STTTRHLIYKCGGIDQRTLDRFQKESEAMGKGSFKYAWVLDKLKAERERGITIDIALWKFETGKYYFTIIDAPGHRDFIKNMITGTSQADGAILVVAANVGEFEAGISKEGQTREHALLAYTLGVRQMIVCVNKMDDKSVNWAESRYNEVKTEMGTYLKKIGYNPDKILMIPISGFNGDNMMERSPNMPWYKGPVLFEALDLLEIPKRPSEKPLRLPIQDVFKIGGIGTVPVGRVETGILTPGQVITIAPCMITTEVKSVEMHHEALTQAVPGDNVGFNVKGIAVKDLKRGFVAGDSKNDPPKEADSFTAQVIVMAHPGQIQNGYTPVLDCHTSHIACKFKEIQSKIDRRTNKVLEENPKSIKSGDSAFVEMQPSKPMVVETFVEYPPLGRFAVR

SEQ ID NO: 17643 - protein, 364 aa, Libinia emarginata
LDKLKAERERGITIDIALWKFETNRFYVTIIDAPGHRDFIKNMITGTSQADCAVLIVAAGTGEFEAGISKNGQTREHVLLCFTLGVKQLIVAVNKMDSTEPKYSETRFNEIKKELTAYVKKVGYNPAVVPILPISGFNGDNMLEKSDNMTWWGKTKIERKSGSYEFITLFDALDNIEPPSRPVDKPLRLPLQDVYKIGGIGTVPVGRVETGILKPGMVVNFAPTGPTTEVKSVEMHHEALVEAVPGDNVGFNVKNVSVKELKRGFVASDSKNDPAKEAGDFTAQVIVLNHPGQIQAGYSPVLDCHTAHIACKFAELIQKIDRRTGKEIEANPKQIKSGDSCIVKMIPSKPMCVETFQKYAPLGR

SEQ ID NO: 17644 - protein, 377 aa, Carcinoscorpius rotundicauda
AELGKGSFKYAWVLDKLKAERERGITIDITLWKFETPKYYITVIDAPGHRDFIKNMITGTSQADCAVLIVAAGTGEFEAGISKNGQTREHALLAYTLGVKQMIVGVNKMDTTEPPYSEKRFEEIQKEVSAYIKKIGYNPATVAFVPISGWNGDNMLEPSSNTAWFKGFKIERKGQVSEGKTLLQALDCAEPPSRPTEKPLRLPLQDVYKIGGIGTVPVGRVETGILKPGMVVTFAPAMITTEVKSVEMHHESLTEALPGDNVGFNVKNVSVKELRRGYVAGDSKNDPPQSTADFIAQVIILNHPGQISNGYAPVLDCHTAHIACKFKEIKEKCDRRSGKKLEDNPKFIKSGDAAIVELVPSKPMCVESFTNYPPLGR

SEQ ID NO: 17645 - protein, 364 aa, Periplaneta americana
LDKLKAERERGITIDIALWKFETSKYYVTIIDAPGHRDFIKNMITGTSQADCAVLIVAAGTGEFEAGISKNGQTREHALLAFTLGVKQLIVGVNKMDSTEPPYSETRFEEIKKEVSNYIKKIGYNPAAVAFVPISGWHGDNMLEHSDKMSWFKGWSIERKEGKADGKCLIEALDAILPPSRPTEKPLRLPLQDVYKIGGIGTVPVGRVETGVLKPGMVVTFAPANLTTEVKSVEMHHEALQEAVPGDNVGFNVKNVSVKELRRGYVAGDSKNNPPKGAADFIAQVIVLNHPGQISNGYTPVLDCHTAHIACKFAEIKEKCDRRTGKTTEENPKSIKSGDAAIVNLVPSKPMCVESFQEFPPLGR

SEQ ID NO: 17646 - protein, 461 aa, Locusta migratoria
MGKEKIHINIVVIGHVDSGKSTTTGHLIYKCGGIDKRTIEKFEKEAQEMGKGSFKYAWVLDKLKAERERGITIDIALWKFETSKYYVTIIDAPGHRDFIKNMITGTSQADCAVLIVAAGTGEFEAGISKNGQTREHALLAFTLGVKQLIVGVNKMDSTEPPYSEARFEEIKKEVSNYIKKIGYNPVAVAFVPISGWHGDNMLEHSDKMSWFKGWSIERNEGKAEGKTLIEALDAILPPNRPTEKPLRLPLQDVYKIGGIGTVPVGRVETGILKPGMVVTFAPANLTTEVKSVEMHHEALQEAVPGDNVGFNVKNVSVKELRRGYVAGDSKNNPPKGAADFTAQVIVLNHPGQIAMDIHQCLTVTQLILHASLLKSKRSVTRRTGKTTEENPKSIKSGDAAIVKFGTQQTNVCGIISRSSFIGKNCCQNMRQTGAVGVIKNVSFKEALVVSNQGTGKAQKKK

SEQ ID NO: 17647 - protein, 413 aa, Malacosoma americanum
HVDSGKSTTTGHLIYKCGGIDKRTIEKFEKESQEMGKSSFKYAWVLDKLKAERERGITIDIALWKFETSKYYVTIIDAPGHRDFIKNMITGTSQADCAVLIVAAGTGEFEAGISKNGQTREHALLAFTLGVKQLIVGINKMDSTEPPYSESRFEEIKKEVSSYIKKIGYNPAAVAFVPISGWHGDNMLEPSTKMPWFKGWHVERKEGKAEGKCLIEALDAILPPARPTDKPLRLPLQDVYKIGGIGTVPVGRVETGILKPGTIVVFAPANITTEVKSVEMHHEALQEAVPGDNVGFNVKNVSVKELRRGYVAGDSKNNPPKGAADFTAQVIVLNHPGQISNGYTPVLDCHTAHIACKFAEIKEKVDRRTGKSTEENPKAIKSGDAAIVILVPSKPLCVESFQEFPPLGRFAVR

SEQ ID NO: 17648 - protein, 413 aa, Spodoptera frugiperda
HVDSGKSTTTGHLIYKCGGIDKRTIEKFEKEAQEMGKGSFKYAWVLDKLKAERERGITIDIALWKFETAKYYVTIIDAPGHRDFIKNMITGTSQADCAVLIVAAGTGEFEAGISKNGQTREHALLAFTLGVKQLIVGVNKMDSTEPPYSESRFEEIKKEVSSYIKKIGYNPAAVAFVPISGWHGDNMLEASTKMPWFKGWNVERKEGKAEGKCLIEALDAILPPARPTDKPLRLPLQDVYKIGGIGTVPVGRVETGILKPGTIVVFAPANITTEVKSVEMHHEALQEAVPGDNVGFNVKNVSVKELRRGYVAGDSKNNPPKGAADFTAQVIVLNHPGQISNGYTPVLDCHTAHIACKFAEIKEKVDRRTGKSTEDNPKSIKSGDAAIVNLVPSKPLCVESFQEFPPLGRFAVR

SEQ ID NO: 17649 - protein, 413 aa, Trichoplusia ni
HVDSGKSTTTGHLIYKCGGIDKRTIEKFEKEAQEMGKGSFKYAWVLDKLKAERERGITIDIALWKFETAKYYVTIIDAPGHRDFIKNMITGTSQADCAVLIVAAGTGEFEAGISKNGQTREHALLAFTLGVKQLIVGVNKMDSTEPPYSESRFEEIKKEVSSYIKKIGYNPAAVAFVPISGWHGDNMLEPSTKMPWFKGWLVERKEGKAEGKCLIEALDAILPPARPTDKPLRLPLQDVYKIGGIGTVPVGRVETGILKPGTIVVFAPANITTEVKSVEMHHEALQEAVPGDNVGFNVKNVSVKELRRGYVAGDSKNNPPKGAADFTAQVIVLNHPGQISNGYTPVLDCHTAHIACKFAEIKEKVDRRTGKSTETNPKSIKSGDAAIVNLVPSKPLCVESFQEFPPLGRFAVR

SEQ ID NO: 17650 - protein, 413 aa, Antheraea pernyi
HVDSGKSTTTGHLIYKCGGIDKRTIEKFEKEAQEMGKGSFKYAWVLDKLKAERERGITIDIALWKFETSRYYVTIIDAPGHRDFIKNMITGTSQADCAVLIVAAGTGEFEAGISKNGQTREHALLAFTLGVKQLIVGVNKMDSTEPPYSEPRFEEIKKEVSSYIKKIGYNPAAVAFVPISGWHGDNMLEPSTKMPWFKGWMVERKEGKAEGKCLIEALDAILPPARPTDKALRLPLQDVYKIGGIGTVPVGRVETGILKPGTIVVFAPANITTEVKSVEMHHEALQEAVPGDNVGFNVKNVSVKELRRGYVAGDSKNNPPKGAADFTAQVIVLNHPGQISNGYTPVLDCHTAHIACKFAEIKEKVDRRTGKSTEDNPKSIKSGDAAIVNLVPSKPLCVESFQEFPPLGRFAVR

SEQ ID NO: 17651 - protein, 413 aa, Antheraea polyphemus
HVDSGKSTTTGHLIYKCGGIDKRTIEKFEKEAQEMGKGSFKYAWVLDKLKAERDRGITIDIALWKFETSKYYVTIIDAPGHRDFIKNMITGTSQADCAVLIVAAGTGEFEAGISKNGQTREHALLAFTLGVKQLIVGVNKMDSTEPPYSESRFEEIKKEVSSYIKKIGYNPAAVAFVPISGWHGDNMLEPSTKMPWFKGWMVERKEGKAEGKCLIEALDAILPPARPTDKALRLPLQDVYKIGGIGTVPVGRVETGILKPGTIVVFAPANITTEVKSVEMHHEALQEAVPGDNVGFNVKNVSVKELRRGYVAGDSKNNPPKGAADFTAQVIVLNHPGQISNGYTPVLDCHTAHIACKFAEIKEKVDRRTGKSTEDNPKSIKSGDAAIVNLVPSKPLCVESFQEFPPLGRFAVR

SEQ ID NO: 17652 - protein, 413 aa, Samia cynthia
  unsure (1)..(413): unsure at all Xaa locations
HVDSGKSTTTGHLIYKCGGIDKRTIEKFEKEAQEMGKGSFKYAWVLDKLKAERERGITIDIALWKFETGKYYVTIIDAPGHRDFIKNMITGTSQADCAVLIVAAGTGEFEAGISKNGQTREHALLAFTLGVKQLIVGVNKMDSTEPPYSESRFEEIKKEVSSYIKKIGYNPAAVAFVPISGWHGDNMLEPSTKMPWFKGWLVERKEGKAEGKCLIEALDAILPPARPTDKALRLPLQDVYKIGGIGTVPVGRVETGILKPGTVVVFAPANITTEVKSVEMHHEALQEAVPGDNVGFNVKNVSVKELRRGYVAGDSKNNPPRGAADFTAQVIVLNHPGQISNGYTPVLDCHTAHIACKFAEIKEKVDRRTGKSTEDNPKSIKSGDAAIVXLVPSKPLCVESFQEFPPLGRFAVR

SEQ ID NO: 17653 - protein, 413 aa, Manduca sexta
HVDSGKSTTTGHLIYKCGGIDKRTIEKFEKEAQEMGKGSFKYAWVLDKLKAERERGITIDIALWKFETSKYYVTIIDAPGHRDFIKNMITGTSQADCAVLIVAAGTGEFEAGISKNGQTREHALLAFTLGVKQLIVGVNKMDSTEPPYSESRFEEIKKEVSSYIKKIGYNPAAVAFVPISGWHGDNMLEPSTKMPWFKGWLVERKEGKAEGKCLIEALDAILPPARPTDKPLRLPLQDVYKIGGIGTVPVGRVETGVLKPGTIVVFAPANITTEVKSVEMHHEALQEAVPGDNVGFNVKNVSVKELRRGYVAGDSKNNPPKGAADFTAQVIVLNHPGQISNGYTPVLDCHTAHIACKFAEIKEKVDRRTGKSTEDNPKSIKSGDAAIVNLVPSKPMCVESFQEFPPLGRFAVR

SEQ ID NO: 17654 - protein, 412 aa, Rhynchosciara americana
  unsure (1)..(412): unsure at all Xaa locations
GSFKYAWVLDKLKAERERGITIDIALWKFETAKYYVTIIDAPGHRDFIKNMITGTSQADCAVLIVAAGTGEFEAGISKNGQTREHALLAFTLGVKQLIVGVNKMDSTEPPFSENRYEEIKKEVSSYIKKIGYNPVAVAFVPISGWHGDNMLEPSSNMRWLKGWKVERINGNGEGKCGSXALDAILPPPRPTDQALRLPLPDVYKIGGIGTVPVGRLETGILKPGTVVVFAPANITTEVKSVEMHHEALTEAVPGDNVGFNVKNVSVKELRRGYVAGDSKANPPKGAENFTAQVIVLNHPGQISNGYTPVLDCHTAHIACKFAEIKXKVDRRSGKSTEDNPKAIKSGDAAIVILQPSKPLCVESFQEFPPLGRFAVRDMRQTVAVGVIKSVVFKDATGRKVTKAAEKATKGKK

SEQ ID NO: 17655 - protein, 661 aa, Drosophila melanogaster
MDYNDEYDGYDDIYGHSVEDEHCISPTDAQQWLYDRARGQQSISAFISKNKDIQEEEADEDEDEDAAFAKARRDSESFQMPQLDEIEQAKLSSCVDEVRSVVGDAVSERRIVETSMKFDYDMQKILDEILNEETNKSAKPAVNKMKAPAAPVLPKTVSKTVPTPPPKISLKEPRRGFEIPSPKVPSSPVVSGRNTPVDISAGDDISRSSATVFKVSKEQAVRNARQLYEKERADQKSHIHMIVIGHVDAGKSTLMGHLLYDTGNVSQRVMHKHEQESKKLGKQSFMYAWVLDETGEERARGITMDVGQSRIETKTKIVTLLDAPGHKDFIPNMISGATQADVALLVVDATRGEFESGFELGGQTREHAILVRSLGVNQLGVVINKLDTVGWSQDRFTEIVTKLKSFLKLAGFKDSDVSFTPCSGLTGENLTKKAQEPALTNWYSGRHLLDVIENFKIPERAIDRPLRMSVSDIYKGTGSGFCISGRVETGVLCLNDKVLVGASREQAQVKSLTMNEFPQTCVFAGDQVSVTLPALDINNVTVGCIISDPQTPIPVTTRFQARIIVFNVKVPITMGFPVLLHHQSLIEPAVVCKLTASIHKSTGEVVKKKPRCLGNNSCALVELETSRPICIERYADFKELGRVMLRVAGVTIAAGMVTKIR

SEQ ID NO: 17656 - protein, 670 aa, Drosophila melanogaster
MSRHRIVRTMDYNDEYDGYDDIYGHSVEDEHCISPTDAQQWLYDRARGQQSISAFISKNKDIQEEEADEDEDEDAAFAKARRDSESFQMPQLDEIEQAKLSSCVDEVRSVVGDAVSERRIVETSMKFDYDMQKILDEILNEETNKSAKPAVNKMKAPAAPVLPKTVSKTVPTPPPKISLKEPRRGFEIPSPKVPSSPVVSGRNTPVDISAGDDISRSSATVFKVSKEQAVRNARQLYEKERADQKSHIHMIVIGHVDAGKSTLMGHLLYDTGNVSQRVMHKHEQESKKLGKQSFMYAWVLDETGEERARGITMDVGQSRIETKTKIVTLLDAPGHKDFIPNMISGATQADVALLVVDATRGEFESGFELGGQTREHAILVRSLGVNQLGVVINKLDTVGWSQDRFTEIVTKLKSFLKLAGFKDSDVSFTPCSGLTGENLTKKAQEPALTNWYSGRHLLDVIENFKIPERAIDRPLRMSVSDIYKGTGSGFCISGRVETGVLCLNDKVLVGASREQAQVKSLTMNEFPQTCVFAGDQVSVTLPALDINNVTVGCIINDPQTPIPVTTRFQARIIVFNVKVPITMGFPVLLHHQSLIEPAVVCKLTASIHKSTGEVVKKKPRCLGNNSCALVELETSRPICIERYADFKELGRVMLRVAGVTIAAGMVTKIR

SEQ ID NO: 17657 - protein, 376 aa, Hediste japonica
QEMGKGSFKYAWVLDKLKAERERGITIDIALWKFETAKYYVTIIDAPGHRDFIKNMITGTSQADCAVLIVAAGTGEFEAGISKNGQTREHALLAYTLGVKQLIVGVNKMDSTEPPYSKARFEEIQKEVSTYIKKIGYNPDTVAFVPISGWHGDNMLEASPNMSWFNSWSVKKGKEKKECTGKTLLDALDNIDPPSRPTDKALRLPLQDVYKIGGIGTVPVGRVETGILKPGMIVQFAPGGLATEVKSVEMHHTALEQAVPGDNVGFNVKNISVKDIRRGNVASDSKNDPAKETEDFKAQVIILNHPGEIRAGYAPVIDCHTAHIACKFAELKEKIDRRSGKKMEDNPEKVKSGDAAIVQMVPQKAMCVEAFSDYAP

SEQ ID NO: 17658 - protein, 374 aa, Laetmonice sp.
QEMGKGSFKYAWVLDKLKAERERGITIDIALWKFETNKYYVTIIDAPGHRDFIKNMITGTSQADCAVLIVAAGVGEFEAGISKNGQTREHALLAYTLGVKQLIIGINKMDSTEPPYSETRYQEIVKEVSAYIKKIGYNPDNVPFVPISGWHGDNMLEPSKYMQWFKGWKCKKGGKESNGNTLLEALDVIEAPKRPTDKPLRLPLQDVYKIGGIGTVPVGRVETGILKPGMLVTFAPCNLTTEVKSVEMHHTALVEATPGDNVGFNVKNVSVKDVRRGNVAGDNKNDPPKETHEFRAQVIILNHPGQISAGYAPVVDCHTAHIACKFKELMEKIDRRSGKKLEDNPQFVKSGDAAIVEMVPQKPLCVEAFSQYPP

SEQ ID NO: 17659 - protein, 376 aa, Eunice yamamotoi
AEMGKGSFKYAWVLDKLKAERERGITIDIALWKFETTRYYVTIIDAPGHRDFIKNMITGTSQADCAVLIVAAGTGEFEAGISKNGQTREHALLAYTLGVKQLVVGINKMDNTEPPYSQTRYEEIVKEVGSYIKKIGYNPDTVPFVPISGWHGDNMLEASDNMTWFKNWNVKKGKEKKEVTGKTLLEALDQIDPPKRPTDKPLRLPLQDVYKIGGIGTVPVGRVETGKLKAGMVVKFAPSNITTEVKSVEMHHTSLEEALPGDNVGFNVKNVSVKDIRRGNVCGDSKDDPPNQTANFKAQVIILNHPGQIQNGYAPVIDCHTAHIACRFSELLEKIDRRSGKKLEDNPTNVKSGDAAIVNMVPQKPMCVESFNQYPP

SEQ ID NO: 17660 - protein, 375 aa, Chaetopteridae sp.
SEMGKGSFKYAWVLDKLKAERERGITIDIALWKFETKKYYVTIIDAPGHRDFIKNMITGTSQADCAVLIVAAGTGEFEAGISKNGQTREHALLAYTLGVKQLIVGVNKMDNTEPPYSKTRFEEISKEVSTYIKKIGYDPKTVAFVPISGWHGDNMLEKSEKMSWFGGWKKTTKEGGDANGHTLFDSLDSINPPKRPTDKPLRLPLQDVYKIGGIGTVPVGRVETGQLKAGTVVTFAPANITTEVKSVEMHHQTLLKAEPGDNVGFNVKNVSVKDIRRGNVAGDSKNDPPKEAANFDAQVIILNHPGTIVKGYTPVLDCHTAHIACKFFELKEKIDRRSGKKLEENPDKLKSGDSAIVTMVPSKPMCVEAFSDYQP

SEQ ID NO: 17661 - protein, 373 aa, Capitella sp.1
QEMGKGSFKYAWVLDKLKAERERGITIDIALWKFETDKYFVTIIDAPGHRDFIKNMITGTSQADCAVLIVAAGMGEFEAGISKNGQTREHALLAFTLGVKQLIIGVNKMDNTEPPYSEARFKEISKEVEAYIKKIGYNPKAVAFVPISGWHGDNMLEASDKMPWFKGWNVDRKLAKLRKTLYEALDSILPPERPTDKALRLPLQDVYKIGGIGTVPVGRVETGIIKPGMVVTFAPCMVTTEVKSVEMHHTSLPEALPGDNVGFNVKNVSVKEIRRGYVAGDSKNDPPKETDEFRAQVIVLNHPGQISNGYAPVLDCHTAHIACKFQELIEKIDRRSGKTMEEKPQHVKSGDAAIVEMKPGKPMCVEAFADYAP

SEQ ID NO: 17662 - protein, 375 aa, Maldane cristata
QEMGKGSFKYAWVLDKLKAERERGITIDIALWKFETSKYYVTIIDAPGHRDFIKNMITGTSQADCAVLIVAAGTGEFEAGISKNGQTREHALLAYTLGVKQLIVGVNKMDNTEPPYSGPRFDEIKKEVGGYIKKIGYNPDTVPFVPISGWHGDNMLEKSDKMSWYNGWQVKKVDKKEYKGVTLMDALDNIDPPKRPTDKALRLPLQDVYKIGGIGTVPVGRVETGVLKPGMVVTFAPPMITTEVKSVEMHHQALTEAEPGDNVGFNIKNVSVKDVRRGNVCGDSKNDPPAGTEEFKSQVIILNHPGQIQAGYAPVVDCHTAHIACRFKELLEKIDRRSGKKLEDNPAHVKSGDACIVEMVPGKSMCVEAFVNYAP

SEQ ID NO: 17663 - protein, 376 aa, Ophelina sp.
NEMGKGSFKYAWVLDKLKAERERGITIDIALWKFETGKYYVTIIDAPGHRDFIKNMITGTSQADCAVLIVAAGVGEFEAGISKNGQTREHALLAYTLGVKQMIIGVNKMDSTEPPYSENRFLEIKKEVSQYIKKIGYNPDAVPFVPISGWVGDNMVAPSDKTQWFKGWTTKKSSKGKEESGKTLLDALDNIEQPKRPTDRPLRLPLQDVYKIGGIGTVPVGRVETGIMKPGMIVTFAPAHITTEVKSVEMHHCSLEEALPGDNVGFNIKNVSVKDIRRGNVCSESKNDPAKEAEEFKAQVIILNHPGQIQAGYAPVVDCHTSHIACKFRELLEKIDRRSGKKMEDNPQHVKSGDAAIVEMVPQKPMCVEAFSDYAP

SEQ ID NO: 17664 - protein, 375 aa, Amphitrite sp.
QEMGKGSFKYAWVLDKLKAERERGITIDIALWKFSTEKYDITIIDAPGHRDFIKNMITGTSQADCAVLIVAAGVGEFEAGISKNGQTREHALLAFTLGVKQLIIGVNKMDSTEPPYSEKRFLEIQKEVATYIKKIGYNPDTVPFVPISGWHGDNMIESSDNMSWFSKWETKEKGGKTNSGKTLIDALNNIKPPERPTDKPLRLPLQDVYKIGGIGTVPVGRVETGILKAGMVVTFAPSNLTTEVKSVEMHHATLEKAEPGDNVGFNVKNVSVKDIRRGNVCGDTKNDPPKEAEEFRSQVIILNHPGQICAGYAPVVDCHTAHIACKFLELVKKIDRRSGKELEDSPQHVKSGDAAIVEMISQKPLCVEAFNDYAP

SEQ ID NO: 17665 - protein, 375 aa, Ampharetidae sp.
QEMGKGSFKYAWVLDKLKAERERGITIDIALWKFETENYYVTIIDAPGHRDFIKNMITGTSQADCAVLIVAAGVGEFEAGISKNGQTREHALLAFTLGVKQLIIGVNKIDSTEPPYSETRFEEIKKEVTTYIKKIGYNPDKVPFVPISGWHGDNMIEESSNMSWFKGWEVKAGKDKKITGKTLLNALDNIEKPKRPTDKALRLPLQDVYKIGGIGTVPVGRVETGILKPGMIITFAPSNVTTEVKSVEMHHQSIPEALPGDNVGFNVKNVSVKDIRRGNVCGDSKNDPPKEAGSFKAQVIILNHPGQIQKGYSPVLDCHTAHIACKFAEILEKIDRRSGKKLEDNPQHVKSGDAAIVEMVPSKPLCCEAFSDYPP

SEQ ID NO: 17666 - protein, 375 aa, Allolobophora sp.
QEMGKGSFKYAWVLDKLKAERERGITIDISLWKFETAKYYVTIIDAPGHRDFIKNMITGTSQADCAVLVVAAGVGEFEAGISKNGQTREHALLAFTLGVKQLIVGVNKMDSTEIPYSEARFEEIKKEVSTYIKKIGYNPDCVPFVPISGWHGDNMLEASPKMAWFKGWTVKKADKKEYSGVTIMEALDNIDPPKRPTDKPLRLPLQDVYKIGGIGTVPVGRVETGIIKAGMIVTFAPVNLTTEVKSVEMHHQALEEAVPGDNVGFNVKNVSVKDIRRGNVAGDSKNDPPKETEEFKAQVIILNHPGQINAGYAPVVDCHTSHIACKFRELLEKIDRRSGKKLEDNPANVKSGDAAIVEMVPQKPMCVEAFADYAP

SEQ ID NO: 17667 - protein, 375 aa, Branchiura sp.
QEMGKGSFKYAWVLDKLKAERERGITIDISLWKFETAKYYITIIDAPGHRDFIKNMITGTSQADCAVLVVAAGTGEFEAGISKNGQTREHALLAFTLGVKQLIVGVNKMDSTEPPYSEARFQEIQKEVGAYIKKIGYNPDTVPFVPISGWHGDNMLEPSPKMPWFKGWKVTKSDKKEYTGVTILESLDNIDPPKRPTDKPLRLPLQDVYKIGGIGTVPVGRVETGTLKAGMIVTFAPVNLTTEVKSVEMHHTALEEAVPGDNVGFNVKNVSVKDIRRGNVAGDSKNDPPKETEEFKAQVIILNHPGQINAGYAPVVDCHTSHIACKFRELLEKIDRRSGKKLEDNPANVKSGDAAIVEMVPQKAMCVESFADYPP

SEQ ID NO: 17668 - protein, 375 aa, Myxobdella sinaensis
QEMGKGSFKYAWVLDKLKAERERGITIDISLWKFETAKYYITIIDAPGHRDFIKNMITGTSQADCAVLVVAAGVGEFEAGISKNGQTREHALLAYTLGVKQLIVGVNKMDSTEPPYSEARFEEIKKEVSAYIKKIGYNPETVPFVPISGWNGDNMLEASPKMTWFKSWSVKKADKKEYSGVTILEALDNIDPPKRPTDKPLRLPLQDVYKIGGIGTVPVGRVETGILKAGTIVTFAPANLTTEVKSVEMHHQALEEALPGDNVGFNVKNVSVKDIRRGNVGGDSKNDPPKETEEFKAQVIIMNHPGQISAGYAPVVDCHTCHIACKFRELLEKIDRRSGKKIEDNPANVKAGDAAIVNMVPQKPMCVESFSEYPP

SEQ ID NO: 17669 - protein, 374 aa, Haemadipsa zeylanica japonica
QEMGKGSFKYAWVLDKLKAERERGITIDISLWKFETAKYYVTIIDAPGHRDFIKNMITGTSQADCAVLIVAAGVGEFEAGISKNGQTREHALLAYTLGVKQMIIGVNKMDSTEPPYSEARFEEIKKEVATYIKKVGYNPDTVAFVPISGWNGDNMLETSPKMGWFKGWSVKRGEKTTSGTTMIEALDNIEPPKRPTDKPLRLPLQDVYKIGGIGTVPVGRVETGTLKAGTVVTFAPSNLSTEVKSVEMHHQTLEEAFPGDNVGFNIKNVSVKDIRRGNVCGDSKNDPPRETEEFKAQVIIMNHPGQISAGYAPVVDCHTAHIACKFRELLEKIDRRSGKKIEDNPAHVKAGDAAIVNMVPQKPMCVESFVEYPP

SEQ ID NO: 17670 - protein, 362 aa, Panorpa japonica
RERGITIDIALWKFETAKYYVTIIDAPGHRDFIKNMITGTSQADCAVLIVAAGTGEFEAGISKNGQTREHALLAFTLGVKQLIVGVNKMDSTEPPYSESRFEEIKKEVSSYIKKIGYNPAAVAFVPISGWHGDNMLEVSTKMSWFKGWAVERKEGKADGKCLIEALDAILPPARPTDKPLRLPLQDVYKIGGIGTVPVGRVETGVLKPGTVVVFAPANLTTEVKSVEMHHEALQEAVPGDNVGFNVKNVSVKELRRGYVAGDSKANPPKGAADFTAQVIVLNHPGQISNGYTPVLDCHTAHIACKFAEIKEKVDRRTGKSTEDNPKAIKSGDAAIVNLVPSKPMCVESFQEFPPLGRFAVRD

SEQ ID NO: 17671 - protein, 372 aa, Lysiphlebus fabarum
YAWVLDKLKAERERGITIDIALWKFETSKYYVTIIDAPGHRDFIKNMITGTSQADCAVLIVAAGTGEFEAGISKNGQTREHALLAFTLGVKQFIVGVNKMDSTEPPYSENRFEEIKKEVSSYIKKIGYNPAAVAFVPISGWHGDNMLEVSTKMPWFKGWNVERKEGKADGKCLIEALDAILPPSRPTDKALRLPLQDVYKIGGIGTVPVGRVETGVLKPGMVVTFAPSAVTTEVKSVEMHHEALTEAVPGDNVGFNVKNVSVKDLRRGYVAGDTKANPPKGAADFTAQVIVLNHPGQISNGYTPVLDCHTAHIACKFAEIKEKCDRRTGKTTEESPKAIKSGDAAIVNLVPSKPMCVEAFQEFPPLGRFAVR

SEQ ID NO: 17672 - protein, 408 aa, Asterias amurensis
DSGKSTTTGHLIYKCGGIDKRAIEKFEKEAQEMGKGSFKYAWVLDKLKAERERGITIDIALWKFETVKFYITVIDAPGHRDFIKNMITGTSQADCAVASGTGEFEAGISKNGQTREHALLAFTLGVKQLIVCANKMDTTDPPFSEARFAEITKEVSGFLKKVGYNPKAVCFVPISGFHGDNMIEPSERMPWYKGWSIERKEGNASGKTLFEALDSILPPKRPTDKPLRHPLQDVYKIGGIGTVPVGRVETGILKPGTVATFAPANLTTEVKSVEMHHEALTEALPGDNVGFNVKNVSVKDIRRGMVAGDSKNDPPKAAETFKAQVIILNHPGQIHNGYAPVLDCHTAHIACKFTEIHEKCDRRSGKTLEENPKFVKSGDAAIVTLTPSKPMCVESFAEYPPLGRFAVR

SEQ ID NO: 17673 - protein, 336 aa, Papilio demoleus
HVDSGKSTTTGHLIYKCGGIDKRTIEKFEKEAQEMGKGSFKYAWVLDKLKAERERGITIDIALWKFETSKYYVTIIDAPGHRDFIKNMITGTSQADCAVLIVAAGTGEFEAGISKNGQTREHALLAFTLGVKQLIVGVNKMDSTEPPYSESRFEEIKKEVSSYIKKIGYNPAAVAFVPISGWHGDNMLEPSTKMPWFKGWNVERKEGKAEGKCLIEALDAILPPARPTDKALRLPLQDVYKIGGIGTVPVGRVETGVLKPGTIVVFAPANITTEVKSVEMHHEALQEAVPGDNVGFNVKNVSVKELRRGYVAGDSKNNPPKGAADFTAQVIVLNHP

SEQ ID NO: 17674 - protein, 331 aa, Luehdorfia japonica
KSTTTGHLIYKCGGIDKRTIEKFEKEAQEMGKGSFKYAWVLDKLKAERERGITIDIALWKFETSRYYVTIIDAPGHRDFIKNMITGTSQADCAVLIVAAGTGEFEAGISKNGQTREHALLAFTLGVKQLIVGVNKMDSTEPPYSEPRFEEIKKEVSSYIKKIGYNPAAVAFVPISGWHGDNMLEPSTKMPWFKGWQVERKEGKAEGKCLIEALDAILPPARPTDKALRLPLQDVYKIGGIGTVPVGRVETGVLKPGTIVVFAPANITTEVKSVEMHHEALQEAVPGDNVGFNVKNVSVKELRRGYVAGDSKNNPPKGASDFTAQVIVLNHP

SEQ ID NO: 17675 - protein, 331 aa, Sericinus montela
KSTTTGHLIYKCGGIDKRTIEKFEKEAQEMGKGSFKYAWVLDKLKAERERGITIDIALWKFETSKYYVTIIDAPGHRDFIKNMITGTSQADCAVLIVAAGTGEFEAGISKNGQTREHALLAFTLGVKQLIVGVNKMDSTEPPYSESRFEEIKKEVSSYIKKIGYNPAAVAFVPISGWHGDNMLEPSTKMPWFKGWQVERKEGKAEGKCLIEALDAILPPARPTDKALRLPLQDVYKIGGIGTVPVGRVETGVLKPGTIVVFAPANITTEVKSVEMHHEALQEAVPGDNVGFNVKNVSVKELRRGYVAGDSKNNPPKGAADFTAQVIVLNHP

SEQ ID NO: 17676 - protein, 462 aa, Anthocidaris crassispina
MGKEKQHINIVVVGHVDSGKSTTTGHLIYKCGGIDKRTIEKFEKEAAELGKGSFKYAWVLDKLKAERERGITIDIALWKFETEKYFVTVIDAPGHRDFIKNMITGTSQADCAVLVVAAGTGEFEAGISKDGQTREHALLCYTLGVKQLIVAVNKMDSTVPKYEEKRFNEIVKEVQSYIKKVGYNIKGVPFIPISGWCGDNMLETSENMPWFKGWAIERKEGNASGKTLYNALDAILLPERPTKKPLRLPLQDVYKIGGIGTVPVGRVETGIIKPGVVVTFAPTNLSTEVKSVEMHHEQMAQAEPGDNVGFNVKNVSVKEIKRGYVAGDSKNVPPVGALSFKAQVIIMNHPGQIHAGYCPVLDCHTAHIACKFAELQEKLDRRSGKTLEENPKFIKTGDACIAKLVPSKQMCVETFSEFPPLGRFAVRDMRQTVAVGVVKSVEKSEASGGKTTKSAQKAQKKK

SEQ ID NO: 17677 - protein, 411 aa, Ciona intestinalis
  unsure (1)..(411): unsure at all Xaa locations
DSGKSTTTGHLIYKCGGIDKRAIEKFEKEAAEMGKGSFKYAWVLDKLKAERERGITIDIALWKFETNYYQITIIDAPGHRDFIKNMITGTSQADCAVLIVAAGVGEFEAGISKNGQTREHALLAFTLGVKQIIVAVNKMDSTEPKYSSKRFEEISREVTAYLKKVGYNPKAVAFVPISGWNGDNMLEESANMPWYKGWEREQDXKKLTGKTLFDALDSIAAPKRPTDKPLRLPLQDVYKIGGIGTVPVGRVETGIIKPGVVVTFAPSQLTTEVKSVEMHHEALTEALPGDNVGFNVKNVSVKDIKRGNVAGDSKNDPPKGAENFTAQVIILNHPGQIQQGYAPVLGCXTAHIACKFKELIEKIDRRSGKKLEDHPKFVKSGDAAIIVLHPQKPMCVEAFSQYPPLGRFAVR

SEQ ID NO: 17678 - protein, 336 aa, Eurytides marcellus
HVDSGKSTTTGHLIYKCGGIDKRTIEKFEKEAQEMGKGSFKYAWVLDKLKAERERGITIDIALWKFETSKYYVTIIDAPGHRDFIKNMITGTSQADCAVLIVAAGTGEFEAGISKNGQTREHALLAFTLGVKQLIVGVNKMDSTEPPYSESRFEEIKKEVSSYIKKIGYNPAAVAFVPISGWHGDNMLEASTKMPWFKGWQVDRKEGKAEGKCLIEALDAILPPARPTDKALRLPLQDVYKIGGIGTVPVGRVETGVLKPGTIVVFAPANITTEVKSVEMHHEALQEAVPGDNVGFNVKNVSVKELRRGYVAGDSKNNPPKGAADFTAQVIVLNHP

SEQ ID NO: 17679 - protein, 336 aa, Papilio canadensis
HVDSGKSTTTGHLIYKCGGIDKRTIEKFEKEAQEMGKGSFKYAWVLDKLKAERERGITIDIALWKFETSKYYVTIIDAPGHRDFIKNMITGTSQADCAVLIVAAGTGEFEAGISKNGQTREHALLAFTLGVKQLIVGVNKMDSTEPPYSESRFEEIKKEVSSYIKKIGYNPAAVAFVPISGWHGDNMLEPSTKMPWFKGWNVERKEGKAEGKCLIEALDAILPPARPTDKALRLPLQDVYKIGGIGTVPVGRVETGVLKPGTIVVFAPANITTEVKSVEMHHEALQEAVPGDNVGFNVKNVSVKELRRGYVAGDSKNNPPRGAADFTAQVIVLNHP

SEQ ID NO: 17680 - protein, 336 aa, Papilio palamedes
HVDSGKSTTTGHLIYKCGGIDKRTIEKFEKEAQEMGKGSFKYAWVLDKLKAERERGITIDIALWKFETSKYYVTIIDAPGHRDFIKNMITGTSQADCAVLIVAAGTGEFEAGISKNGQTREHALLAFTLGVKQLIVGVNKMDSTEPPYSESRFEEIKKEVSSYIKKIGYNPAAVAFVPISGWHGDNMLEPSTKMPWFKGWNVERKEGKAEGKCLIEALDAILPPARPTDKALRLPLQDVYKIGGIGTVPVGRVETGVLKPGTIVVFAPANITTEVKSVEMHHEALQEAVPGDNVGFNVKNVSVKELRRGYVAGDSKNNPPRGTADFTAQVIVLNHP

SEQ ID NO: 17681 - protein, 336 aa, Papilio scamander
HVDSGKSTTTGHLIYKCGGIDKRTIEKFEKEAQEMGKGSFKYAWVLDKLKAERERGITIDIALWKFETSKYYVTIIDAPGHRDFIKNMITGTSQADCAVLIVAAGTGEFEAGISKNGQTREHALLAFTLGVKQLIVGVNKMDSTEPPYSEPRFEEIKKEVSSYIKKIGYNPAAVAFVPISGWHGDNMLEPSTKMPWFKGWNVERKEGKAEGKCLIEALDAILPPARPTDKALRLPLQDVYKIGGIGTVPVGRVETGVLKPGTIVVFAPANITTEVKSVEMHHEALQEAVPGDNVGFNVKNVSVKELRRGYVAGDSKNNPPKGAADFTAQVIVLNHP

SEQ ID NO: 17682 - protein, 336 aa, Papilio indra
HVDSGKSTTTGHLIYKCGGIDKRTIEKFEKEAQEMGKGSFKYAWVLDKLKAERERGITIDIALWKFETSKYYVTIIDAPGHRDFIKNMITGTSQADCAVLIVAAGTGEFEAGISKNGQTREHALLAFTLGVKQLIVGVNKMDSTEPPYSESRFEEIKKEVSSYIKKIGYNPAAVAFVPISGWHGDNMLEPSTKMPWFKGWNVERKEGKAEGKCLIEALDAILPPARPTDKALRLPLQDVYKIGGIGTVPVGRVETGVLKPGTIVVFAPANITTEVKSVEMHHEALQEAVPGDNVSFNVKNVSVKELRRGYVAGDSKNNPPKGAADFTAQVIVLNHP

SEQ ID NO: 17683 - protein, 336 aa, Pachliopta neptunus
HVDSGKSTTTGHLIYKCGGIDKRTIEKFEKEAQEMGKGSFKYAWVLDKLKAERERGITIDIALWKFETGKYYVTIIDAPGHRDFIKNMITGTSQADCAVLIVAAGTGEFEAGISKNGQTREHALLAFTLGVKQLIVGVNKMDSTEPPYSEPRFEEIKKEVSSYIKKIGYNPAAVAFVPISGWHGDNMLEPSTKMPWFKGWNVERKEGKAEGKCLIEALDAILPPARPTDKPLRLPLQDVYKIGGIGTVPVGRVETGVFKPGTIVVFAPANITTEVKSVEMHHEALQEAVPGDNVGFNVKNVSVKELRRGYVAGDSKNNPPKGASDFTAQVIVLNHP

SEQ ID NO: 17684 - protein, 336 aa, Papilio cresphontes
HVDSGKSTTTGHLIYKCGGIDKRTIEKFEKEAQEMGKGSFKYAWVLDKLKAERERGITIDIALWKFETSKYYVTIIDAPGHRDFIKNMITGTSQADCAVLIVAAGTGEFEAGISKNGQTREHALLAFTLGVKQLIVGVNKMDSTEPPYSESRFEEIKKEVSSYIKKIGYNPAAVAFVPISGWHGDNMLEPSTKMPWFKGWNVERKEGKAEGKCLIEALDAILPPARPTDKPLRLPLQDVYKIGGIGTVPVGRVETGVLKPGTIVVFAPANITTEVKSVEMHHEALQEAVPGDNVGFNVKNVSVKELRRGYVAGDSKNNPPRGAADFTAQVIVLNHP

SEQ ID NO: 17685 - protein, 336 aa, Papilio garamas
HVDSGKSTTTGHLIYKCGGIDKRTIEKFEKEAQEMGKGSFKYAWVLDKLKAERERGITIDIALWKFETAKYYVTIIDAPGHRDFIKNMITGTSQADCAVLIVAAGTGEFEAGISKNGQTREHALLAFTLGVKQLIVGVNKMDSTEPPYSESRFEEIKKEVSSYIKKIGYNPAAVAFVPISGWHGDNMLEPSTKMPWFKGWNVERKEGKAEGKCLIEALDAILPPARPTDKALRLPLQDVYKIGGIGTVPVGRVETGVLKPGTIVVFAPANITTEVKSVEMHHEALQEAVPGDNVGFNVKNVSVKELRRGYVAGDSKNNPPRGAADFTAQVIVLNHP

SEQ ID NO: 17686 - protein, 336 aa, Papilio pilumnus
HVDSGKSTTTGHLIYKCGGIDKRTIEKFEKEAQEMGKGSFKYAWVLDKLKAERERGITIDIALWKFETGKYYVTIIDAPGHRDFIKNMITGTSQADCAVLIVAAGTGEFEAGISKNGQTREHALLAFTLGVKQLIVGVNKMDSTEPPYSESRFEEIKKEVSSYIKKIGYNPAAVAFVPISGWHGDNMLEPSTKMPWFKGWNVERKEGKAEGKCLIEALDAILPPARPTDKALRLPLQDVYKIGGIGTVPVGRVETGVLKPGTIVVFAPANITTEVKSVEMHHEALQEAVPGDNVGFNVKNVSVKELRRGYVAGDSKNNPPRGAADFTAQVIVLNHP

SEQ ID NO: 17687 - protein, 336 aa, Papilio phorcas
HVDSGKSTTTGHLIYKCGGIDKRTIEKFEKEAQEMGKGSFKYAWVLDKLKAERERGITIDIALWKFETSKYYVTIIDAPGHRDFIKNMITGTSQADCAVLIVAAGTGEFEAGISKNGQTREHALLAFTLGVKQLIVGVNKMDSTEPPYSESRFEEIKKEVSSYIKKIGYNPAAVAFVPISGWHGDNMLEPSTKMPWFKGWNVERKEGKGEGKCLIEALDAILPPARPTDKALRLPLQDVYKIGGIGTVPVGRVETGVLKPGTIVVFAPANITTEVKSVEMHHEALQEAVPGDNVGFNVKNVSVKELRRGYVAGDSKNNPPKGAADFTAQVIVLNHP

SEQ ID NO: 17688 - protein, 409 aa, Halocynthia roretzi
  unsure (1)..(409): unsure at all Xaa locations
DSGKSTTTGRMIYKCGGIDKRTIDKFEKEAQETGKGSFKYAWVLDKLKAERERGITIDIALWKFETTKYYITIIDAPGHRDFIKNMITGTSQADCAVLIIAAGTGEFEAGISKSGQTREHALLAFTLGVKQMICAINKMDNTEPPYSEARFKEIVTEVSSYMKKVGYNPKKIPFVPISGWHGDNMMEKSDKTPWYKGFTKMSDKPVGATLKEAFDLIEXPTRPTDKPLRLPLQDVYKIGGIGTVPVGRVETGIIKPGQIVKFSPVNLTTEVKSVEMHHESLVEGCPGDNVGFNVKNVSVKDIRRGNVCGDAKNCPPQKASSFLARVIILNHPGNISKGYTPVLDCHTAHIACKFAEIKEKIDRRSGKTMEENPKSVKSGDAAMIELIPSKPMCVEKFSEFPPLGRFAVR

SEQ ID NO: 17689 - protein, 411 aa, Branchiostoma floridae
DSGKSTSTGHLIYKCGAIDKRAIEQFEKEAKEMGKGSFKYAWVLDKLKAERERGITIDIALWKFETIKYIVTIIDAPGHRDFIKNMITGTSQADCAVLIVAAGTGEFEAGISNDGQTREHALLAYALGVKQLIVGVNKMDSTEPPYSEARFAEITEEVGVYIKKIGYNPESVAFVPISGWHGDNMIEESTNMPWFKGWTIERKSGRSSGHTLRQALDAIEPPTRPTDKPLRLPLQDVYRIGGIGTVPVGRVETGILKPGMVVTFAPVNITTEVKSVEMHHEYLPEALPGDNVGFNVKNVSRKDIKRGYVAGDSNNDPPKEAASFVAEITVLNHPGEIHAGYAPVLDCHTAHIACKFVELKEKIDRRSGKKLEDNPKSVKCGDAAIVEMLPSKPMCVEAFSSYPPLGRFAVR

SEQ ID NO: 17690 - protein, 406 aa, Branchiostoma floridae
DSGKSTSTGHLIYKCGGIDKRTIEKFEKEAAEMGKGSFKYAWVLDKLKAERERGITIDIALWKFETTKYYVTVIDAPGHRDFIKNMITGTSQADCGCWYGEFEAGISKNGQTREHALLAYTLGVKQLIVGVNKMDSTEPPYSADRFTEITKEVSTYIKKVGYNPKAVAFVPISGWHGDNMLEPSEKMGWYKGWAIERKEGNASGKTLFEALDSILPPKRPTDKPLRLPLQDVYKIGGIGTVPVGRVETGILKPGVVVTFAPVNLTTEVKSVEMHHESLPEALPGDNVGFNVKNVSVKEIKRGMVAGDSKNDPPKEAESFTAQVIVMNHPGEIHNGYAPVLDCHTAHIACKFAELKEKIDRRSGKKLEDNPKMVKSGDAAIVEMTPSKPMCVETFSEYPPLGRFAVR

SEQ ID NO: 17691 - protein, 331 aa, Pieris napi
KSTTTGHLIYKCGGIDKRTIEKFEKEAQEMGKGSFKYAWVLDKLKAERERGITIDIALWKFETGKYYVTIIDAPGHRDFIKNMITGTSQADCAVLIVAAGTGEFEAGISKNGQTREHALLAFTLGVKQLIVGVNKMDSTEPPYNESRFEEIKKEVSSYIKKIGYNPAAVAFVPISGWHGDNMLEPSTKMPWFKGWNVERKEGKAEGKCLIEALDAILPPARPTDKALRLPLQDVYKIGGIGTVPVGRVETGVLKPGTIVVFAPANITTEVKSVEMHHEALQEAVPGDNVGFNVKNVSVKELRRGYVAGDSKSNPPKGAADFTAQVIVLNHP

SEQ ID NO: 17692 - protein, 653 aa, Danio rerio
MSRHRNVRGYNYDEDFEDDDMYGQSVEDDYCISPATAAQFIYSRQDSRQARHVETVEEAEYEEEEEEMPTSPTMTSTLDSLQQGRLYSCLDQMRTVLGDSIPDSTLTQAALKYDCDPHRALDFILSENTNTQAPSARTNPQLEPNTTAAPQKAKVREAPESRVESEVVPKVARMTVSGKKQTMGFDVRSAEENGGVAPSLRRGPSPEATAVPTTETPSKQSTVTEDSAAPTPTRPSGKSKQQLNIRAELEKRQGGKPLLNLVVIGHVDAGKGTLMGHLLYLLGNVNKRTMHKYEQEAKKAGKASFAYAWVLDETGEERDRGVTMDVGMTKFETDSKVVTLMDAPGHKDFIPNMITGAAQADVAVLVVDASRGEFEAGFEAGGQTREHALLVRSLGVTQLAVAVNKMDQVNWQQERFQEIISKLGHFLKQAGFKDSDVFYVPTSGLSGENLTTKSKVADLTAWYTGPCLVEQIDAFKPPQRSVEKPFRLCVSDVFKDQGSGFCVTGKIEAGYIQTGDKVLAMPPNETCTVKGISLHDEALDWAAAGDHVSLTVTGMDIIKINVGCVFCDPKEPIRACTRFRARILLFNIELPITQGFPVLLHYQTVSEPATIRKLVSVLHKSSGEVLKKKPKCLSKGQNAVVEIQTETCGYGAL

SEQ ID NO: 17693 - protein, 462 aa, Cyprinus carpio
MGKEKTHINIVVIGHVDSGKSTTTGHLIYKCGGIDKRTIEKFEKEAAEMGKGSFKYAWVLDKLKAERERGITIDIALWKFETSKYYVTIIDAPGHRDFIKNMITGTSQADCAVLIVAGGVGEFEAGISKNGQTREHALLAFTLGVKQLIVGVNKMDSTEPPYSQARFEEITKEVSAYIKKIGYNPASVAFVPISGWHGDNMLEPSTNMGWFKGWKIERKEGNANGVTLLDALDAILPPSRPTDKPLRLPLQDVYKIGGIGTVPVGRVETGVLKPGMVVTFAPANLTTEVKSVEMHHESLAEATPGDNVGFNVKNVSVKDIRRGNVAGDSKNDPPMEAGSFNAQVIILNHPGQISQGYAPVLDCHTAHIACKFAELKEKIDRRSGKKLEDNPKALKSGDAAIVEMIPGKPMCVESFSTYPPLGRFAVRDMRQTVAVGVIKSVEKKVGGSGKVTKSAQKAAKTK

SEQ ID NO: 17694 - protein, 447 aa, Elaeis oleifera
MGKEKVHINIVVIGHVDSGKSTTTGHLIYKLGGIDKRVIERFEKEAAEMNKRSFKYAWVLDKLKAERERGITIDIALWKFETTKYYCTVIDAPGHRDFIKNMITGTSQADCAVLIIDSTTGGFEAGIFKDGQTREHALLAFTLGVKQMICCCNKMDATTSKYSKARYDEIVKEVSSYLKKVGYNPDKIPFVPISGFEGDNMIERSTNLDWYKGQTLLEALDLIQEPKRPSDKPLRLSLQDGYKIGGIGTVQVGRVETGVIKPGMVVTFGPTGLTTEVKSVEMHHEALQEALPGDNVGFNVKNVAVKDLKRGYVASNSKDDPAKEAANFIAQVIIMNHPGQIGNGYAPVLDCHTSHIAVKFAELVTKIDRRSGKELEKEPKFLKNGDAGFVKMLPTKPMVVETFSEYPPLGRFAVRDMRQTVAVGVIKSVEKKDPTGAKITKAAAKKK

SEQ ID NO: 17695 - protein, 461 aa, Oryzias latipes
MGKEKIHINIVVIGHVDSGKSTSTGHLIYKCGGIDKRTIEKFEKEAAEMGKGSFKYAWVLDKLKAERERGITIDIALWKFETSKYYVTIIDAPGHRDFIKNMITGTSQADCAVLIVAAGVGEFEAGISKNGQTREHALLAFTLGVKQLIVGVNKMDSTEPPYSQARFEEIQKEVSTYIKKIGYNPAAVAFVPISGWHGDNMLEASDKMSWFKGWKIERKDGNASGTTLLEALDAILPPSRPTDKPLRLPLQDVYKIGGIGTVPVGRVETGVLKPGMVVTFAPPNLTTEVKSVEMHHESLPEAVPGDNVGFNIKNVSVKEIRRGYVAGDSKNDPPKAAASFNAQVIILNHPGQINQGYAPVLDCHTAHIACKFNELIEKIDRRSGKKLEDNPKFVKSGDAAIVKLIPQKPMVVEPFSNYPPLGRFAVRDMRQTVAVGVIKAVDTKEISGKTTKAAEKAQKKK

SEQ ID NO: 17696 - protein, 456 aa, Oryzias latipes
MAKEKVHVNVVVIGHVDSGKSTTTGHLVYKCGGIDPRKLEKFEKAAAQLGKSSFKFAWVLDKLKAERERGITIDISLLKFNTQKYTMTIIDAPGHRDFIKNMITGTSQADVALLMVSAAKGEYEAGVSRSGQTREHALLAYTLGVKQIIVCVNKMDLTEPPYSQKRYEEVMRGVSGFLRKIGYDTNAVPFVPVSGWTGENMISVTQKMPWYQGWKIRRREGPSTGKTLLEVLDSIQPPVRTINKPLRLPLQDVYKIGGVGTVPVGKIETGVLKPGMTLVFSPAKLTAEVKSIEMHHQGLQTALPGHNVGFNIKNVSVKNLRRGDVAGNAQQDPPSDVRSFEAQVIILNHPGKIKAGYSPVLDCHTTHVTCRFTELKEKLDRRTGKKLEEQPQTLVSGDAATVKLVPVKPMCVESFFTYPPLGRFAARDLKQTVAVGVIKSVEKDQGSKAQKLQVCK

SEQ ID NO: 17697 - protein, 461 aa, Seriola quinqueradiata
MGKEKIHINIVVIGHVDSGKSTSTGHLIYKCGGIDKRTIEKFEKEAAEMGKGSFKYAWVLDKLKAERERGITIDIALWRFETSKYYVTIIDAPGHRDFIKNMITGTSQADCAVLIVAAGVGEFEAGISKNGQTREHALLAFTLGVKQLIVGVNKMDSTEPPYSQARFEEITKEVSTYIKKIGYNPATVAFVPISGWHGDNMLETSEKMGWFKGWKIERKEGNASGTTLLEALDAILPPSRPTEKPLRLPLQDVYKIGGIGTVPVGRVETGVLKPGMVVTFAPPNLTTEVKSVEMHHESLPEAVPGDNVGFNVKNVSVKEIRRGYVAGDSKNDPPKAADSFNAQVIILNHPGQINEGYAPVLDCHTAHIACKFKELIEKIDRRSGKKLEDHPKFVKSGDAAIVKLIPQKPMVVEPFSNYAPLGRFAVREMKQTVAVGVIKAVDVKEISGKTTKAAEKAQKKK

SEQ ID NO: 17698 - protein, 461 aa, Sparus aurata
MGKEKIHINIVVIGHVDSGKSTSTGHLIYKCGGIDKRTIEKFEKEAAEMGKGSFKYAWVLDKLKAERERGITIDIALWKFETSRYYVTIIDAPGHRDFIKNMITGTSQADCAVLIVAAGVGEFEAGISKNGQTREHALLAFTLGVKQLIVGVNKMDSTEPPYSQARFEEITKEVSTYIKKIGYNPASVAFVPISGWHGDNMLETSEKMSWFKGWKVERKEGNANGTTLLEALDAIVPPSRPTDKPLRLPLQDVYKIGGIGTVPVGRVETGVLKPGMVVTFAPPQLTTEVKSVEMHHESLPEAVPGDNVGFNIKNVSVKEIRRGYVAGDSKNDPPKGADNFNAQVIILNHPGQINARYAPVLDCHTAHIACKFTELIEKIDRRSGKKLEDAPKFVKSGDAAIVKLHPQKPMVVEPFSSYPPLGRFAVRDMRQTVAVGVIKAVELKEVSGKTTKAAEKAQKKK

SEQ ID NO: 17699 - protein, 462 aa, Monosiga brevicollis
MTDGKQHVSIVICGHVDAGKSTTTGRLIFELGGIPEREMQKLKDEAERLGKGSFAFAFYMDRQKEERERGVTIACTTKEFFTATKHYTVIDAPGHRDFIKNMITGASQADVALLMVPCDGNFTAAIAKGNHKAGEVQGQTRQHAVLINLLGVKQLIVGCNKMDCDVAGYGEARFKEVRDEMVHMLIKVGWKKSFVEESVPVLPISGWKGDNLITKTTNMSWWNGVDVKVDSETIHIDCLQDALEKMVRVPQRATDKPMRTPISGVFKIKGVGDVLTGRVEQGTVKPGDEVVFLPTHTSSTACTGKVFTVEMHHKSVEAAMTGDNVGLNIKGLNKDNMPRVGDVMILKSDDSIGRVKSFTVQVQIMNHPGELKVGYCPIAFVRTSRSACRMTAINWKIGKETGGKKAEDPVALKSNEVAEVVMAPQQPFVVDTFKTCEGLGRVAIMEGNSVVMLGKVTKVERA

SEQ ID NO: 17700 - protein, 413 aa, Antherina suraka
  unsure (1)..(413): unsure at all Xaa locations
HVDSGKXTTTGHLIYKCGGIDKRTIEKFEKEAQEMGKGSFKYAWVLDKLKAERERGITIDIALWKFETSRYYVTIIDAPGHRDFIKNMITGTXQADCAVLIVAAGTGEFEAGISKNGQTREHALLAFTLGVKQLIVGVBKMDSTEPPYSEXRFEEIKKEVSSYIKKIGYNPAAVAFVPISGWHGDNMLEQSTKXPWFKGWLVERKXGKAEGKXLIEALDAILPPAXPTDKALRLPLQDVYKIGGIGTVPVGRVETGILKPGTIVVFAPANITTEVKSVEMHHEALQEAVPGDNVGFNVKNVSVKELRRGYVAGDSKNNPPKGAADFTAQVIVLNHPGQISNGYTPVLDCXTAHIACKFAEIKEKVDRRTGKSTEDNPKSIKSGDAAIVNLVPSKPLCVESFQXFPPLGRFAVR

SEQ ID NO: 17701 - protein, 413 aa, Lapara coniferarum
HVDSGKSTTTGHLIYKCGGIDKRTIEKFEKEAQEMGKGSFKYAWVLDKLKAERERGITIDIALWKFETAKYYVTIIDAPGHRDFIKNMITGTSQADCAVLIVAAGTGEFEAGISKNGQTREHALLAFTLGVKQLIVGVNKMDSTEPPYSESRFEEIKKEVSSYIKKIGYNPAAVAFVPISGWHGDNMLEASTKMPWFKGWLVERKEGKAEGKCLIEALDAILPPARPTDKALRLPLQDVYKIGGIGTVPVGRVETGILKPGTIVVFAPANITTEVKSVEMHHEALQEAVPGDNVGFNVKNVSVKELRRGYVAGDSKNNPPKGAADFTAQVIVLNHPGQISNGYTPVLDCHTAHIACKFAEIKEKVDRRTGKSTEDNPKSIKSGDAAIVNLVPSKPMCVESFQEFPPLGRFAVR

SEQ ID NO: 17702 - protein, 413 aa, Paonias myops
  unsure (1)..(413): unsure at all Xaa locations
HVDSGKSTTTGHLIYKCGGIDKRTIEKFEKEAQEMGKGSFKYAWVLDKLKAERERGITIDIALWKFETSKYYVTIIDAPGHRDFIKNMITGTSQADCAVLIVAAGTGEFEAGISKNGQTREHALLAFTLGVKQLIVGVNKMDSTEPPYSESRFEEIKKEVSSYIKKIGYNPAAVAFVPISGWHGDNMLEASTKMPWFKGWAVERKEGKADGKCLIEALDAILPPARPTDKALRLPLQDVYKIGGIGTVPVGRVETGVLKPGTVVVFAPANITTEVKSVEMHHEALQEAVPGDNVGFNVKNVSVKELRRGYVAGDSKNNPPRGAADFTAQVIVLNHPGQISNGYTPVLDCHTAHIACKFAEIKXKVDRRTGKSTEDNPKSIKSGDAAIVNLVPSKPMCVESFQEFPPLGRFAVR

SEQ ID NO: 17703 - protein, 339 aa, Grillotia erinaceus
HLIFKCGGIDKRTIEKFEKEAQDMGKGSFKYAWVLDKLKAERERGITIDIALWKFITSKFEVTIIDAPGHRDFIKNMITGTSQADCAVLIVAAGVGEFEAGISKEGQTREHALLAFTLGVKQLIIAVNKMDDIKYNETRFNEIKDEMTSYIKKVGYNPENVAVVPISGWHGDNMIEPSSNMPWYKGWSRGGKSKGMTLLEAIDDIAVPKRPTDKPLRLPLQDVYKIGGVGTVPVGRVETGVLKPGMVVTFAPAGLSTEVKSVEMHHEVLSEALPGDNVGFNIKNVSVKDIRRGNVAGDSKNCPPGETDTFNAQVIIMNHPGSIRNGYTPVLDCHTAHIA

SEQ ID NO: 17704 - protein, 449 aa, Avicennia marina
MGKEKSHINLVVIGHVDSGKSTTTGHLIYKLGGIDKRVIERFEKEAAEMNKRSFKYAWVLDKLKAERERGITIDIALWKFETTKYYCTVIDAPGHRDFIKNMITGTSQADCAVLIIDSTTGGFEAGISKDGQTREHALLSFTLGVKQMICCCNKMDATTPKYSKARYDEIVKEVSSYIKKVGYNPEKIPFVPISGFEGDNMIERSTNLDWYKGPTLLEALDMVQEPKRPSDKPLRLPLQDVYKIGGIGTVPVGRVETGMLKPGMLVTFGPSGLTTEVKSVEMHHEALQEALPGDNVGFNVKNVSVKDLKRGYVASNSKDDPAKGAASFTSQVIIMNHPGQIGNGYAPVLDCHTSHIAVKFAELVTKIDRRSGKELEKEPKFLKNGDAGFVKMIPTKPMVVETFSEYPPLGRFAVRDMRQTVAVGVIKSVEKKEPSGAKVTKAAVKKGAK

SEQ ID NO: 17705 - protein, 331 aa, Lambdina fiscellaria
KSTTTGHLIYKCGGIDKRTIEKFEKEAQEMGKGSFKYAWVLDKLKAERERGITIDIALWKFETAKFYVTIIDAPGHRDFIKNMITGTSQADCAVLIVAAGTGEFEAGISKNGQTREHALLAFTLGVKQLIVGVNKMDSTEPPYSEPRFEEIKKEVSSYIKKIGYNPAAVAFVPISGWHGDNMLEPSTKMPWFKGWLVERKEGKAEGKCLIEALDAILPPARPTDKALRLPLQDVYKIGGIGTVPVGRVETGVLKPGTIVVFAPANITTEVKSVEMHHEALQEAVPGDNVGFNVKNVSVKELRRGYVAGDSKNNPPKGAADFTAQVIVLNHP

SEQ ID NO: 17706 - protein, 364 aa, Limnadia lenticularis
LDKLKAERERGITIDIALWKFETAKYYVTIIDAPGHRDFIKNMITGTSQADCAVLIVAAGVGEFEAGISKNGQTREHALLAYTLGVKQLIVGVNKMDSTEPPYSEARFEEIKKEVSSYIKKIGYNPVAVPFVPISGWHGDNMLEASTNLPWYKGWAIERKEGKADGKTLIDALDAILPPSRPTEKPLRLPLQDVYKIGGIGTVPVGRVETGVIKPGTVVTFAPCNLTTEVKSVEMHHEALEEAVPGDNVGFNVKNVSVKELRRGYVAGDSKNNPPKGAADFYAQVIVLNHPGQISNGYTPVLDCHTAHIACKFAEIKEKCDRRTGKTTEENPKFIKSGDAAMITLVPSKPLCVESFSDFPPLGR

SEQ ID NO: 17707 - protein, 377 aa, Speleonectes tulumensis
QEMGKGSFKYAWVLDKLKAERERGITIDIALWKFETSKYYVTIIDAPGHRDFIKNMITGTSQADCAVLIVAAGTGEFEAGISKNGQTREHALLAYTLGVKQLIVGVNKMDTTEPPYSEARYNEIKKEVGNYIKKIGYNPASVAFVPISGWVGDNMLEQSTNMSWYKGWTVERKEGKAEGKTLLESLDSILPPSRPTDKPLRLPLQDVYKIGGIGTVPVGRVETGSLKPGVLVTFAPCNITTEVKSVEMHHESLPEANPGDNVGFNVKNVSVKELRRGYVAGDSKNKPPKGTADFTAQVIVLNHPGQIQNGYCPVLDCHTAHIACKFSEIQEKCDRRTGKKLEDNPKFVKSGDAAIVLLVPSKPMCVEAFTDFPPLGR

SEQ ID NO: 17708 - protein, 331 aa, Atrophaneura alcinous
KSTTTGHLIYKCGGIDKRTIEKFEKEAQEMGKGSFKYAWVLDKLKAERERGITIDIALWKFETSKYYVTIIDAPGHRDFIKNMITGTSQADCAVLIVAAGTGEFEAGISKNGQTREHALLAFTLGVKQLIVGVNKMDSTEPPYSESRFEEIKKEVSSYIKKIGYNPAAVAFVPISGWHGDNMLEPSTKMPWFKGWNVDRKEGKAEGKCLIEALDAILPPARPTDKALRLPLQDVYKIGGIGTVPVGRVETGVLKPGTIVVFAPANITTEVKSVEMHHEALQEAVPGDNVGFNVKNVSVKELRRGYVAGDSKNNPPKGASDFTAQVIVLNHP

SEQ ID NO: 17709 - protein, 340 aa, Atrophaneura alcinous
FEKEAQEMGKGSFKYAWVLDKLKAERERGITIDIALWKFETSKYYVTIIDAPGHRDFIKNMITGTSQADCAVLIVAAGTGEFEAGISKNGQTREHALLAFTLGVKQLIVGVNKMDSTEPPYSESRFEEIKKEVSSYIKKIGYNPAAVAFVPISGWHGDNMLEPSTKMPWFKGWNVDRKEGKAEGKCLIEALDAILPPARPTDKALRLPLQDVYKIGGIGTVPVGRVETGVLKPGTIVVFAPANITTEVKSVEMHHEALQEAVPGDNVGFNVKNVSVKELRRGYVAGDSKNNPPKGASDFTAQVIVLNHPGQISNGYTPVLDCHTAHIACKFAEIKEKVDR

SEQ ID NO: 17710 - protein, 385 aa, Bombus balteatus
KFEKEAQEMGKGSFKYAWVLDKLKAERERGITIDIALWKFETAKYYVTIIDAPGHRDFIKNMITGTSQADCAVLIVAAGIGEFEAGISKNGQTREHALLAFTLGVKQLIVGVNKMDMTDPPYSEARFEEIKKEVSSYIKKIGYNTASVAFVPISGWHGDNMLEPSPNTPWYKGWKVERKDGNADGKTLIEALDAILPPSRPTDKALRLPLQDVYKIGGIGTVPVGRVETGILKPGMLVTFAPAALTTEVKSVEMHHEALTEALPGDNVGFNVKNISVKELRRGYVAGDSKNQPPRGAADFTAQVIVLNHPGQISNGYTPVLDCHTAHIACKFAEIKEKCDRRTGKTTEENPKSIKSGDAAIVMLQATKPMCVEAFQEFPPLGRFA

SEQ ID NO: 17711 - protein, 385 aa, Bombus hortorum
KFEKEAQEMGKGSFKYAWVLDKLKAERERGITIDIALWKFETAKYYVTIIDAPGHRDFIKNMITGTSQADCAVLIVAAGIGEFEAGISKNGQTREHALLAFTLGVKQLIVGVNKMDMTDPPYSEARFEEIKKEVSSYIKKIGYNTASVAFVPISGWHGDNMLEPSPNTSWYKGWKVERKDGNADGKTLIEALDAILPPSRPTDKALRLPLQDVYKIGGIGTVPVGRVETGILKPGMLVTFAPAALTTEVKSVEMHHEALTEALPGDNVGFNVKNISVKELRRGYVAGDSKNQPPRGAADFTAQVIVLNHPGQISNGYTPVLDCHTAHIACKFAEIKEKCDRRTGKTTEENPKSIKSGDAAIVMLQPTKPMCVEAFQEFPPLGRFA

SEQ ID NO: 17712 - protein, 385 aa, Bombus hyperboreus
KFEKEAQEMGKGSFKYAWVLDKLKAERERGITIDIALWKFETAKYYVTIIDAPGHRDFIKNMITGTSQADCAVLRVAAGIGEFEAGISKNGQTREHALLAFTLGVKQLIVGVNKMDMTDPPYSEARFEEIKKEVSSYIKKIGYNTASVAFVPISGWHGDNMLEPSPNTPWYKGWKVERKDGNADGKTLIEALDAILPPSRPTDKALRLPLQDVYKIGGIGTVPVGRVETGILKPGMLVTFAPAALTTEVKSVEMHHEALTEALPGDNVGFNVKNISVKELRRGYVAGDSKNQPPRGAADFTAQVIVLNHPGQISNGYTPVLDCHTAHIACKFAEIKEKCDRRTGKTTEENPKSIKSGDAAIVMLQPTKPMCVEAFQEFAPLGRFA

SEQ ID NO: 17713 - protein, 385 aa, Bombus wurflenii
KFEKEAQEMGKGSFKYAWVLDKLKAERERGITIDIALWKFETAKYYVTIIDAPGHRDFIKNMITGTSQADCAVLIVAAGIGEFEAGISKNGQTREHALLAFTLGVKQLIVGVNKMDMTDPPYSEARFEEIKKEVSSYIKKIGYNTASVAFVPISGWHGDNMLEPSPNTPWYKGWKVERKDGNADGKTLIEALDAILPPSRPTDKALRLPLQDVNKIGGIGTVPVGRVETGILKPGMLVTFAPAALTTEVKSVEMHHEALTEALPGDNVGFNVKNISVKELRRGYVAGDSKNQPPRGAADFTAQVIVLNHPGQISNGYTPVLDCHTAHIACKFAEIKEKCDRRTGKTTEENPKSIKSGDAAIVMLQPTKPMCVEAFQEFPPLGRFA

SEQ ID NO: 17714 - protein, 408 aa, Kentrophoros sp.
VDSGKSTSTGHLIYKCGGIDKRTIEKFDKEAAEMGKGSFKYAWVLDKLKAERERGITIDIALWKFESPKCVFTIIDAPGHRDFIKNMITGTSQADVAILIIAAGTGEFEAGISKEGQTREHALLAFTMGVKQMLVCVNKMDDKSVNYKEARFLEIKKEVSDYLKKIGYNPDKIPFIPISGWVGDNMIEKSDNMPWYKGQCLLDVLDTLEPPRRPKDKALRLPLQDVYKIGGIGTVPVGRVETGLIKPGMTVTSAPMNITTEVKSVEMHHESLAEAEPRDNVGFNVKNVSVKDVRCGNVAGDTKNDPPMEAAGFTAQVIILIHPGQISAGYAPVLDCHTAHIACKCAELKEKIDRRSGKKLNDGPKFLKSGDAAIVDMVPGKPLCVESFSDYPPLGRFAVHDMRQTVAV

SEQ ID NO: 17715 - protein, 408 aa, Paranophrys carnivora
VDSGKSTTTGHLIYKCGGIDKRVIEKFEKESAEMGKGSFKYAWVLDKLKAERERGITIDISLWNFETAKRSYTIIDAPGHRDFIKNMITGTSQADAAILIIAAGQGEFEAGISKECQTREHALLAYTMGVKQMVVAVNKMDSKTVDWDEERYEEIKKELSDYLAKIGLKPRQVPFIPISGFNGDNMLERSTNAPWYKGPILCAALDALDPPKRPIDKPLRLPLQDVYKIGGIGTVPVGRVETGLLKPGMSIQFAPMGIITECKSVEMHHESLPEAEPGDNVGSNVKNISVKDLRRGFVASDSKSDPAKDTTNFLAQVIIINHPGQIQAGYTPVLDCHTAHIACKFEEIESKVDRRSGKVLEEEPKFIKSGDAALVRLIPTKALCVEVFSEYPPLGRYAVRDMKQTVAV

SEQ ID NO: 17716 - protein, 411 aa, Telotrochidium henneguyii
GHVDSGKSTSTGHLIYKCGGIDKRTLEKFEKEAAEMGKASFKYAWVMDKLKSEGERGITIDISLWQFETAKYHFTIIDAPGHRDFIKNMITGTSQADCAILMIASPKGEFEAGISKEGQTREHALLSFTLGVKQMIICMNKMDEKSVKLSEDRYLEIKKEVEGFLKKVGYKPAKIPFIPISGWNGDNMLERSPNTPWYKGPILIEALDKIVPPKGPTEKPLRLPLQDVYKIGGIGTVPVGRVETGIIKAGMSVSFAPGDAKTEVKSVEMHHTSIPEAIPGDNVGFNVKGLSAKDIKRGYVCGDAKNDPPKEVENFLAQVIIMNHPGQIENGYCPVLDCHTAHIACKFTEIQAKIDRRTGKAIEESPKSVKNGDSALIILTPTKPMCVESFAEYPPLGRFAVRDMKQTVAVG

SEQ ID NO: 17717 - protein, 408 aa, Naxella sp.
VDSGKSTTTGHLIYKCGGIDKRTIEKFEKESAEQGKGSFKYAWVLDKLKAERERGITIDISLWKFETQKFWFTIIDAPGHRDFIKNMITGTSQADVAILMIASPQGEFEAGISKDGQTREHALLSFTLGVKQMIVCVNKMDDKTVNYDEERYQEIKKEVGLDLKKIGLKPNQIPFIPISGWNGDNMLEDSQILPWTRGQSLLKALDPYVPPKRPTEKPHRLPLQDVYKISGIGTVPVGRVETGIIKPGITVQFAPSGISTEVKSVEMHHQQLVEAVPGDNVGSNVKNISVKDIRRGFVCSDSKNDPAKETTNFLAQVIIIINHPGQIQPGYCPVLDCHTAHIACKFDEILSKNDRRSGKVLEEEPKFIKSGDAALVRVPQKPMCVEIFNEYPPLGRFAVRDMKQTVAV

SEQ ID NO: 17718 - protein, 365 aa, Rhizopus azygosporus
GKSTTTGHLIYKCGGIDKRTIEKFEKEAAELGKGSFKYAWVLDKLKAERERGITIDIALWKFETPKYNVTVIDAPGHRDFIKNMITGTSQADCGILIIAAGTGEFEAGISKDGQTREHALLAFTLGVRQLIVAINKMDTTKWSEARYNEIVKEVSSFIKKIGYNPKSVPFVPISGWHGDNMLEESTNMPWFKGWTKETKAGNKTGKTLLEAIDNIDPPTRPVDKPLRLPLQDVYKIGGIGTVPVGRVETGVIKAGMVVTFAPANVTTEVKSVEMHHETLTEGLPGDNVGFNVKNVSVKDIRRGNVCSDSKNDPAKESGSFTAQVIILNHPGQIGAGYAPVLDCHTAHIACKFAELIEKIDRRSGK

SEQ ID NO: 17719 - protein, 417 aa, Rhizopus microsporus var. microsporus
GKSTTTGHLIYKCGGIDKRTIEKFEKEAAELGKGSFKYAWVLDKLKAERERGITIDIALWKFETPKYNVTVIDAPGHRDFIKNMITGTSQADCGILIIAAGTGEFEAGISKDGQTREHALLAFTLGVRQLIVAINKMDTTKWSEARYNEIVKEVSSFIKKIGYNPKSVPFVPISGWHGDNMLEESNNMPWFKGWTKETKAGNKTGKTLLEAIDNIDPPTRPVDKPLRLPLQDVYKIGGIGTVPVGRVETGVIKAGMVVTFAPANVTTEVKSVEMHHETLTEGLPGDNVGFNVKNVSVKDIRRGNVCSDSKNDPAKESGSFTAQVIILNHPGQIGAGYAPVLDCHTAHIACKFAELIEKIDRRSGKKLEDAPKFVKSGDSAIVKMVPSKPMCVEAYTDYPPLGRFAVRDMRQTVAVGV

SEQ ID NO: 17720 - protein, 377 aa, Eurytemora affinis
QEMGKGSFKYAWVLDKLKAERERGITIDIALWKFETPKYYVTIIDAPGHRDFIKNMITGTSQADCGVLIIASGTGEFEAGISKNGQTREHALLAYTLGVKQLIVGVNKMDSTEPPYSQARFEEIQKEVSGFIKKVGYNPAAVPFVPISGWHGDNMLATSPNMSWYKGWNIERKEGKASGTTLLEAFDAIIPPTRPTDKPLRLPLQDVYKIGGIGTVPVGRVETGIIKPGMVVTFAPGQLSTEVKSVEMHHESLPEATPGDNVGFNVKNVSVKDIKRGNVASDSKNRPATGVQDFTAQVIVLNHPGQISNGYSPVLDCHTAHIACKFAEIKEKVDRRTGKSTEDNPKFIKSGDAAIVRLVPSKPMCVEAFSDFPPLGR

SEQ ID NO: 17721 - protein, 377 aa, Heteromysis formosa
  unsure (1)..(377): unsure at all Xaa locations
SEMGKGSFKYAWVXDKLKAERERGITIDIALWKFETNKFYVTIIDAPGHRDFIKNMITGTSQADCAVLIVAAGTGEFEAGISKNGQTREHVLLCFTLGVKQLXVAVNKMDXTEPKYSEARFKEISKEVSTYVKKVGYNPNIVPIIPISGFNGDNMLEKSSNMDWWKKQKIERKSGNYEFETLFDALDNIEPPSRPLDKPLRLPLQDVYKIGGIGTVPVGRVETGVIKPGMVVTFAPSGLTTEVKSVEMHHEALTEASPGDNVGFNVKNVSVKDLKRGFVASDSKSDPAKEAADFNAQVIVLNHPGQIQAGYSPVLDCHTAHIACKFSELLTKIDRRTGKEIEANPKFIKSGDSCVVKMVPSKPMCVESFQKYPPLGR

SEQ ID NO: 17722 - protein, 377 aa, Proteroiulus fuscus
AELGKGSFKYAWVLDKLKAERERGITIDISLWKFETQKFYITIIDAPGHRDFIKNMITGTSQADCAVLIVAAGTGEFEAGISKNGQTREHALLAYTLGVKQLIVGVNKMDTTEPPYNEGRFEEIRKEVSSYIKKIGYNPATVAFVPISGWNGDNMLEPSASMTWHKGWAIERKEGNANGKTLLEALDAIVAPARPTDKALRLPLQDVYKIGGIGTVPVGRVETGVLKPGMVVTFAPAALTTEVKSVEMHHEALVEAVPGDNVGFNVKNVSVKELRRGFVAGDSKANPPKAVSEFTAQVIVLNHPGQISNGYTPVLDCHTAHIACKFAEIKEKCDRRTGKTVEENPKAIKSGDAAIVNLVPTKPMCVESFSDFPPLGR

SEQ ID NO: 17723 - protein, 377 aa, Tanystylum orbiculare
QEMGKGSFKYAWVLDKLKAERERGITIDIALWKFETQKYHVTIIDAPGHRDFIKNMITGTSQADCAVLIVAAGVGEFEAGISKNGQTREHALLAYTLGVKQLVVAVNKMDSTEPPYSEARFQEIVKEVQAYIKKIGYNPKTVAFVPISGWHGDNMLEKSDKMSWWKTWEIERKEGNASGSTLLDALDAIVPPHRPTEKPLRLPLQDVYKIGGIGTVPVGRVETGVLKPGVLVTFAPVNLTTEVKSVEMHHEQLTQAVPGDNVGFNVKNVSVKDIRRGYVAGDSKNNPPKATESFCAQVIVLNHPGQIQNGYSPVLDCHTAHIACRFNEIKEKCDRRSGKKLEDAPKFVKSGDVAIVDLIPSKPMCVETFAEFPPLGR

SEQ ID NO: 17724 - protein, 358 aa, Lasioglossum cognatum
ERERGITIDIALWKFETAKYYVTIIDAPGHRDFIKNMITGTSQADCAVLIVAAGTGEFEAGISKNGQTREHALLAFTLGVKQLIVGVNKMDSTEPPYSEARFEEIKKEVSSYIKKIGYNPAAVAFVPISGWHGDNMLEVSSKMPWFKGWNVERKEGKAEGKCLIEALDAILPPSRPTDKALRLPLQDVYKIGGIGTVPVGRVETGLLKPGMVVTFAPAGITTEVKSVEMHHESLTEAVPGDNVGFNVKNVSVKELRRGYVAGDSKNNPPKGAADFTAQVIVLNHPGQISNGYTPVLDCHTAHIACKFHTIIEKCDRRTGKTTEMEPKAIKSGDAAIVTLVPTKPMCVEAFQEFPPLGR

SEQ ID NO: 17725 - protein, 360 aa, Lasioglossum conspicuum
ERERGITIDIALWKFETAKYYVTIIDAPGHRDFIKNMITGTSQADCAVLIVAAGTGEFEAGISKNGQTREHALLAFTLGVKQLIVGVNKMDSTEPPYSEARFEEIKKEVSSYIKKIGYNPAAVAFVPISGWHGDNMLEVSSKMPWFKGWNVERKEGKGEGKCLIEALDAILPPSRPTDKALRLPLQDVYKIGGIGTVPVGRVETGLLKPGMVVTFAPAGITTEVKSVEMHHEALLEAVPGDNVGFNVKNVSVKELRRGYVAGDSKNNPPKGAADFTAQVIVLNHPGQISNGYTPVLDCHTAHIACKFHKIIEKCDRRTGKTTEVEPKAIKSGDAAIVSLVPTKPMCVEAFQEFPPLGRFA

SEQ ID NO: 17726 - protein, 358 aa, Lasioglossum convexum
ERERGITIDIALWKFETSKYYVTIIDAPGHRDFIKNMITGTSQADCAVLIVAAGTGEFEAGISKNGQTREHALLAFTLGVKQLIVGVNKMDSTEPPYSEARFEEIKKEVSSYIKKIGYSPAAVAFVPISGWHGDNMLEVSSKMPWFKGWNVERKEGKVEGKCLIEALDAILPPSRPTDKALRLPLQDVYKIGGIGTVPVGRVETGLLKPGMVVTFAPAGITTEVKSVEMHHETLTEAVPGDNVGFNVKNVSVKELRRGYVAGDSKNNPPKGAADFTAQVIVLNHPGQISNGYTPVLDCHTAHIACKFHQIIEKCDRRTGKTTEMEPKAIKSGDAAIVTLVPTKPMCVEAFQEFPPLGR

SEQ ID NO: 17727 - protein, 358 aa, Lasioglossum erythrurum
ERERGITIDIALWKFETSKYYVTIIDAPGHRDFIKNMITGTSQADCAVLIVAAGTGEFEAGIPKNGQTREHALLAFTLGVKQLIVGVNKMDSTEPPYSEARFEEIKKEVSSYIKKIGYNPAAVAFVPISGWHGDNMLEVSSKMPWFKGWNVERKEGKAEGKCLIEALDAILPPSRPTDKALRLPLQDVYKIGGIGTVPVGRVETGLLKPGMVVTFAPAGITTEVKSVEMHHEALTEAVPGDNVGFNVKNVSVKELRRGYVAGDSKNNPPKGAADFTAQVIVLNHPGQISNGYTPVLDCHTAHIACKFHKIIEKCDRRTGKTTEMEPKAIKSGDAAIVTLVPTKPMCVEAFQEFPPLGR

SEQ ID NO: 17728 - protein, 358 aa, Lasioglossum florale
ERERGITIDIALWKFETSKYYVTIIDAPGHRDFIKNMITGTSQADCAVLIVAAGTGEFEAGISKNGQTREHALLAFTLGVKQLIVGVNKMDSTEPPYSENRFEEIKKEVSSYIKKIGYNPAAVAFVPISGWHGDNMLEVSSKMPWFKGWNVERKEGKAEGKCLIEALDAILPPSRPTDKALRLPLQDVYKIGGIGTVPVGRVETGLLKPGMVVTFAPAGITTEVKSVEMHHEALTEAVPGDNVGFNVKNVSVKELRRGYVAGDSKNNPPKGAADFTAQVIVLNHPGQISNGYTPVLDCHTAHIACKFHKIIEKCDRRTGKTTEMEPKAIKSGDAAIVTLVPTKPMCVEAFQEFPPLGR

SEQ ID NO: 17729 - protein, 358 aa, Lasioglossum lanarium
ERERGITIDIALWKFETSKYYVTIIDAPGHRDFIKNMITGTSQADCAVLIVAAGTGEFEAGISKNGQTREHALLAFTLGVKQLIVGVNKMDSTEPPYSEPRFEEIKKEVSSYIKKIGYNPAAVAFVPISGWHGDNMLEVSSKMPWFKGWNVERKEGKAEGKCLIEALDAILPPSRPTDKALRLPLQDVYKIGGIGTVPVGRVETGLLKPGMVVTFAPAGITTEVKSVEMHHEALTEAVPGDNVGFNVKNVSVKELRRGYVAGDSKNNPPKGAADFTAQVIVLNHPGQISNGYTPVLDCHTAHIACKFHKIIEKCDRRTGKTTEMEPKAIKSGDAAIVTLIPTKPMCVEAFQEFPPLGR

SEQ ID NO: 17730 - protein, 358 aa, Lasioglossum mediopolitum
ERERGITIDIALWKFETSKYYVTIIDAPGHRDFIKNMITGTSQADCAVLIVAAGTGEFEAGISKNGQTREHALLAFTLGVKQLIVGVNKMDSTEPPYSEPRFEEIKKEVSSYIKKIGYNPAAVAFVPISGWHGDNMLEVSSKMPWFKGWNVDRKEGKAEGKCLIEALDAILPPSRPTDKALRLPLQDVYKIGGIGTVPVGRVETGLLKPGMVVTFAPAGITTEVKSVEMHHEALTEAVPGDNVGFNVKNVSVKELRRGYVAGDSKNNPPKGAADFTAQVIVLNHPGQISNGYTPVLDCHTAHIACKFQKIIEKCDRRTGKTTEMEPKAIKSGDAAIVTLVPTKPMCVEAFQEFPPLGR

SEQ ID NO: 17731 - protein, 358 aa, Lasioglossum mirandum
ERERGITIDIALWKFETAKYYVTIIDAPGHRDFIKNMITGTSQADCAVLIVAAGTGEFEAGISKNGQTREHALLAFTLGVKQLIVGVNKMDSTEPPYSEPRFEEIKKEVSSYIKKIGYNPAAVAFVPISGWHGDNMLEVSSKMPWFKGWYVERKEGKAEGKCLIEALDAILPPSRPTDKALRLPLQDVYKIGGIGTVPVGRVETGLLKPGMVVTFAPAGITTEVKSVEMHHEALTEAVPGDNVGFNVKNVSVKELRRGYVAGDSKNNPPKGAADFTAQVIVLNHPGQISNGYTPVLDCHTAHIACKFHKIIEKCDRRTGKTTEMEPKAIKSGDAAIVTLVPTKPMCVEAFQEFPPLGR

SEQ ID NO: 17732 - protein, 358 aa, Lasioglossum parasphecodum
ERERGITIDIALWKFETAKYYVTIIDAPGHRDFIKNMITGTSQADCAVLIVAAGTGEFEAGISKNGQTREHALLAFTLGVKQLIVGVNKMDSTEPPYSEARFEEIKKEVSSYIKKIGYNPAAVAFVPISGWHGDNMLEVSSKMPWFKGWNVERKEGKAEGKCLIEALDAILPPSRPTDKALRLPLQDVYKIGGIGTVPVGRVETGLLKPGMVVTFAPAGITTEVKSVEMHHETMTEAVPGDNVGFNVKNVSVKELRRGYVAGDSKNNPPKGAADFTAQVIVLNHPGQISNGYTPVLDCHTAHIACKFHKIIEKCDRRTGKTTELEPKAIKSGDAAIVTLIPTKPMCVEAFQEFPPLGR

SEQ ID NO: 17733 - protein, 358 aa, Lasioglossum sp. NDA(1)-A
ERERGITIDIALWKFETAKYYVTIIDAPGHRDFIKNMITGTSQADCAVLIVAAGTGEFEAGISKNGQTREHALLAFTLGVKQLIVGVNKMDSTEPPYSEARFEEIKKEVSSYIKKIGYNPAAVAFVPISGWHGDNMLEVSSKMPWFKGWAVERKEGKAEGKCLIEALDAILPPSRPTDKALRLPLQDVYKIGGIGTVPVGRVETGLLKPGMVVTFAPAGITTEVKSVEMHHEALTEAVPGDNVGFNVKNVSVKELRRGYVAGDSKNNPPKGAADFTAQVIVLNHPGQISNGYTPVLDCHTAHIACKFQKIIEKCDRRTGKTTEMEPKAIKSGDAAIVTLVPSKPMCVEAFQEFPPLGR

SEQ ID NO: 17734 - protein, 360 aa, Lasioglossum cressonii
ERERGITIDIALWKFETAKYYVTIIDAPGHRDFIKNMITGTSQADCAVLIVAAGTGEFEAGISKNGQTREHALLAFTLGVKQLIVGVNKMDSTEPPYSEARFEEIKKEVSSYIKKIGYNPAAVAFVPISGWHGDNMLEASSKMPWFKGWAVERKEGKAEGKCLIEALDAILPPSRPTDKALRLPLQDVYKIGGIGTVPVGRVETGLLKPGMVVTFAPAGLTTEVKSVEMHHEALTEAVPGDNVGFNVKNVSVKELRRGYVAGDSKNNPPKGAADFTAQVIVLNHPGQISNGYTPVLDCHTAHIACKFHKIIEKCDRRTGKTTEMEPKAIKSGDAAIVTLVPSKPMCVEAFQEFPPLGRFA

SEQ ID NO: 17735 - protein, 358 aa, Lasioglossum gundlachii
ERERGITIDIALWKFETSKYYVTIIDAPGHRDFIKNMITGTSQADCAVLIVAAGTGEFEAGISKNGQTREHALLAFTLGVKQLIVGVNKMDSTEPPYSEARFEEIKKEVSSYIKKIGYNPAAVAFVPISGWHGDNMLEASSKMPWFKGWAVERKEGKAEGKCLIEALDAILPPSRPTDKALRLPLQDVYKIGGIGTVPVGRVETGLLKPGMVVTFAPAGLTTEVKSVEMHHEALTEAVPGDNVGFNVKNVSVKELRRGYVAGDSKNNPPKGAADFTAQVIVLNHPGQISNGYTPVLDCHTAHIACKFHKIIEKCDRRTGKTTEMDPKAIKSGDAAIVTLVPSKPMCVEAFQEFPPLGR

SEQ ID NO: 17736 - protein, 360 aa, Lasioglossum hyalinum
ERERGITIDIALWKFETSKYYVTIIDAPGHRDFIKNMITGTSQADCAVLIVAAGTGEFEAGISKNGQTREHALLAFTLGVKQLIVGVNKMDSTEPPYSEARFEEIKKEVSSYIKKIGYNPAAVAFVPISGWHGDNMLEASSKMPWFKGWAVERKEGKAEGKCLIEALDAILPPSRPTDKALRLPLQDVYKIGGIGTVPVGRVETGLLKPGMVVTFAPAGLTTEVKSVEMHHEALTEAVPGDNVGFNVKNVSVKELRRGYVAGDSKNNPPKGAADFTAQVIVLNHPGQISNGYTPVLDCHTAHIACKFHKIIEKCDRRTGKTTEMEPKAIKSGDAAIVTLVPSKPMCVEAFQEFPPLGRLP

SEQ ID NO: 17737 - protein, 358 aa, Lasioglossum imitatum
ERERGITIDIALWKFETSKYYVTIIDAPGHRDFIKNMITGTSQADCAVLIVAAGTGEFEAGISKNGQTREHALLAFTLGVKQLIVGVNKMDSTEPPYSEARFEEIKKEVSSYIKKIGYNPAAVAFVPISGWHGDNMLEASSKMPWFKGWAVERKEGKAEGKCLIEALDAILPPSRPTDKALRLPLQDVYKIGGIGTVPVGRVETGLLKPGMVVTFAPAGLTTEVKSVEMHHEALTEAVPGDNVGFNVKNVSVKELRRGYVAGDSKNNPPKGAADFTAQVIVLNHPGQISNGYTPVLDCHTAHIACKFHKIIEKCDRRTGKTTEMEPKAIKSGDAAIVTLVPSKPMCVEAFQEFPPLGR

SEQ ID NO: 17738 - protein, 358 aa, Lasioglossum parvum
ERERGITIDIALWKFETSKYYVTIIDAPGHRDFIKNMITGTSQADCAVLIVAAGTGEFEAGISKNGQTREHALLAFTLGVKQLIVGVNKMDSTEPPYSEARFEEIKKEVSSYIKKIGYNPAAVAFVPISGWHGDNMLEASSKMPWFKGWAVERKEGKAEGKCLIEALDAILPPSRPTDKALRLPLQDVYKIGGIGTVPVGRVETGLLKPGMVVTFAPAGLTTEVKSVEMHHEALTEAVPGDNVGFNVKNVSVKELRRGYVAGDSKNNPPKGAADFTAQVIVLNHPGQISNGYTPVLDCHTAHIACKFHKIIEKCDRRTGKTTEMDPKAIKSGDAAIVTLDLSKPMCVEAFQEFPPLGR

SEQ ID NO: 17739 - protein, 360 aa, Lasioglossum umbripenne
ERERGITIDIALWKFETSKYYVTIIDAPGHRDFIKNMITGTSQADCAVLIVAAGTGEFEAGISKNGQTREHALLAFTLGVKQLIVGVNKMDSTEPPYSEARFEEIKKEVSSYIKKIGYNPAAVAFVPISGWHGDNMLEASSKMPWFKGWAVERKEGKAEGKCLIEALDAILPPSRPTDKALRLPLQDVYKIGGIGTVPVGRVETGLLKPGMVVTFAPAGLTTEVKSVEMHHEALTEAVPGDNVGFNVKNVSVKELRRGYVAGDSKNNPPKGAADFTAQVIVLNHPGQISNGYTPVLDCHTAHIACKFHKIIEKCDRRTGKTTETDPKAIKSGDAAIVTLVPSKPMCVEAFQEFPPLGRLP

SEQ ID NO: 17740 - protein, 360 aa, Lasioglossum vierecki
ERERGITIDIALWKFETSKYYVTIIDAPGHRDFIKNMITGTSQADCAVLIVAAGTGEFEAGISKNGQTREHALLAFTLGVKQLIVGVNKMDSTEPPYSEARFEEIKKEVSSYIKKIGYNPAAVAFVPISGWHGDNMLEASSKMPWFKGWAVERKEGKAEGKCLIEALDAILPPSRPTDKALRLPLQDVYKIGGIGTVPVGRVETGLLKPGMVVTFAPAGLTTEVKSVEMHHEALTEAVPGDNVGFNVKNVSVKELRRGYVAGDSKNNPPKGAADFTAQVIVLNHPGQISNGYTPVLDCHTAHIACKFHKIIEKCDRRTGKTTEMDPKAIKSGDAAIVTLVPSKPVCVEAFQEFPPLGRFA

SEQ ID NO: 17741 - protein, 375 aa, Lasioglossum zephyrum
MGKGSFKYAWVLDKLKAERERGITIDIALWKFETSKYYVTIIDAPGHRDFIKNMITGTSQADCAVLIVAAGTGEFEAGISKNGQTREHALLAFTLGVKQLIVGVNKMDSTEPPYSEARFEEIKKEVSSYIKKIGYNPAAVAFVPISGWHGDNMLEASSKMPWFKGWAVERKEGKAEGKCLIEALDAILPPSRPTDKALRLPLQDVYKIGGIGTVPVGRVETGLLKPGMVVTFAPAGLTTEVKSVEMHHEALTEAVPGDNVGFNVKNVSVKELRRGYVAGDSKNNPPKGAADFTAQVIVLNHPGQISNGYTPVLDCHTAHIACKFHKIIEKCDRRTGKTTEMEPKAIKSGDAAIVTLVPSKPMCVEAFQEFPPLGR

SEQ ID NO: 17742 - protein, 358 aa, Lasioglossum albipes
ERERGITIDIALWKFETAKYYVTIIDAPGHRDFIKNMITGTSQADCAVLIVAAGTGEFEAGISKNGQTREHALLAFTLGVKQLIVGVNKMDSTEPPYSEARFEEIKKEVSSYIKKIGYNPAAVAFVPISGWHGDNMLEASSKMPWFKGWAVERKEGKAEGKCLIEALDAILPPSRPTDKALRLPLQDVYKIGGIGTVPVGRVETGLLKPGMVVTFAPAGLTTEVKSVEMHHEALTEAVPGDNVGFNVKNVSVKELRRGYVAGDSKNNPPKGAADFTAQVIVLNHPGQISNGYTPVLDCHTAHIACKFHKIIEKCDRRTGKTTEMEPKAIKSGDAAIVTLVPSKPMCVEAFQEFPPLGR

SEQ ID NO: 17743 - protein, 360 aa, Lasioglossum apristum
ERERGITIDIALWKFETSKYYVTIIDAPGHRDFIKNMITGTSQADCAVLIVAAGTGEFEAGISKNGQTREHALLAFTLGVKQLIVGVNKMDSTEPPYSEARFEEIKKEVSSYIKKIGYNPAAVAFVPISGWHGDNMLEASSKMPWFKGWAVERKEGKGEGKCLIEALDAILPPSRPTDKALRLPLQDVYKIGGIGTVPVGRVETGLLKPGMVVTFAPAGLTTEVKSVEMHHEALTEAVPGDNVGFNVKNVSVKELRRGYVAGDSKNNPPKGAADFTAQVIVLNHPGQISNGYTPVLDCHTAHIACKFHKIIEKCDRRTGKTTEMEPKAIKSGDAAIVTLVPSKPMCVEAFQEFPPLGRFA

SEQ ID NO: 17744 - protein, 358 aa, Lasioglossum cinctipes
ERERGITIDIALWKFETSKYYVTIIDAPGHRDFIKNMITGTSQADCAVLIVAAGTGEFEAGISKNGQTREHALLAFTLGVKQLIVGVNKMDSTEPPYSEARFEEIKKEVSSYIKKIGYNPAAVAFVPISGWHGDNMLEASSKMPWFKGWAVERKEGKAEGKCLIEALDAILPPSRPTDKALRLPLQDVYKIGGIGTVPVGRVETGLLKPGMVVTFAPAGLTTEVKSVEMHHEALTEAVPGDNVGFNVKNVSVKELRRGYVAGDSKNNPPKGAADFTAQVIVLNHPGQITNGYTPVLDCHTAHIACKFHKIIEKCDRRTGKTTEMDPKTIKSGDAAIVTLVPSKPMCVEAFQEFPPLGR

SEQ ID NO: 17745 - protein, 358 aa, Lasioglossum comagenense
ERERGITIDIALWKFETSKYYVTIIDAPGHRDFIKNMITGTSQADCAVLIVAAGTGEFEAGISKIGQTREHALLAFTLGVKQLIVGVNKMDSTEPPYSEARFEEIKKEVSSYIKKIGYNPAAVAFVPISGWHGDNMLEASSKMPWFKGWAVERKEGKAEGKCLIEALDAILPPSRPTDKALRLPLQDVYKIGGIGTVPVGRVETGLLKPGMVVTFAPAGLTTEVKSVEMHHEALTEAVPGDNVGFNVKNVSVKELRRGYVAGDSKNNPPKGAADFTAQVIVLNHPGQISNGYTPVLDCHTAHIACKFHKIIEKCDRRTGKTTEMEPKAIKSGDAAIVTLVPSKPMCVEAFQEFPPLGR

SEQ ID NO: 17746 - protein, 360 aa, Lasioglossum gattaca
ERERGITIDIALWKFETAKYYVTIIDAPGHRDFIKNMITGTSQADCAVLIVAAGTGEFEAGISKNGQTREHALLAFTLGVKQLIVGVNKMDSTEPPYSEARFEEIKKEVSSYIKKIGYNPAAVAFVPISGWHGDNMLEASSKMPWFKGWAVERKEGKGEGKCLIEALDAILPPSRPTDKALRLPLQDVYKIGGIGTVPVGRVETGLLKPGMVVTFAPAGLTTEVKSVEMHHEALTEAVPGDNVGFNVKNVSVKELRRGYVAGDSKNNPPKGAADFTAQVIVLNHPGQISNGYTPVLDCHTAHIACKFHKIIEKCDRRTGKTTEMEPKAIKSGDAAIVTLVPSKPMCVEAFQEFPPLGRLP

SEQ ID NO: 17747 - protein, 360 aa, Lasioglossum laticeps
  unsure (1)..(360): unsure at all Xaa locations
ERERGITIDIALWKFETSKYYVTIIDAPGHRDFIKNMITGTSQADCAVLIVAAGTGEFEAGISXNGQTREHALLAFTLGVKQLIVGVNKMDSTEPPYSESRFEEIKKEVSSYIKKIGYNPAAVAFVPISGWHGDNMLEASSKMPWFKGWAVERKEGKAEGKCLIEALDAILPPSRPTDKALRLPLQDVYKIGGIGTVPVGRVETGLLKPGMVVTFAPAGLTTEVKSVEMHHEALTEAVPGDNVGFNVKNVSVKELRRGYVAGDSKNNPPKGAADFTAQVIVLNHPGQISNGYTPVLDCHTAHIACKFHKIIEKCDRRTGKTTEMEPKAIKSGDAAIVTLVPSKPMCVEAFQEFPPLGRFA

SEQ ID NO: 17748 - protein, 360 aa, Lasioglossum lineare
ERERGITIDIALWKFETSKYYVTIIDAPGHRDFIKNMITGTSQADCAVLIVAAGTGEFEAGISKNGQTREHALLAFTLGVKQLIVGVNKMDSTEPPYSEARFEEIKKEVSSYIKKIGYNPAAVAFVPISGWHGDNMLEASSKMPWFKGWAVERKEGKAEGKCLIEALDAILPPSRPTDKALRLPLQDVYKIGGIGTVPVGRVETGLLKPGMVVTFAPAGLTTEVKSVEMHHEALTEAVPGDNVGFNVKNVSVKELRRGYVAGDSKNNPPKGAADFTAQVIVLNHPGQISNGYTPVLDCHTAHIACKFHKIIEKCDRRTGKTTEMEPKAIKSGDAAIVTLVPSKPMCVEAFQEFPPLGRFA

SEQ ID NO: 17749 - protein, 358 aa, Lasioglossum malachurum
ERERGITIDIALWKFETSKYYVTIIDAPGHRDFIKNMITGTSQADCAVLIVAAGTGEFEAGISKNGQTREHALLAFTLGVKQLIVGVNKMDSTEPPYSESRFEEIKKEVSSYIKKIGYNPAAVAFVPISGWHGDNMLEASSKMPWFKGWAVERKEGKAEGKCLIEALDAILPPSRPTDKALRLPLQDVYKIGGIGTVPVGRVETGLLKPGMVVTFAPAGLTTEVKSVEMHHEALTEAVPGDNVGFNVKNVSVKELRRGYVAGDSKNNPPKGAADFTAQVIVLNHPGQISNGYTPVLDCHTAHIACKFHKIIEKCDRRTGKTTEMEPKAIKSGDAAIVTLVPSKPMCVEAFQEFPPLGR

SEQ ID NO: 17750 - protein, 358 aa, Lasioglossum morio
ERERGITIDIALWKFETSKYYVTIIDAPGHRDFIKNMITGTSQADCAVLIVAAGTGEFEAGISKNGQTREHALLAFTLGVKQLIVGVNKMDSTEPPYSEARFEEIKKEVSSYIKKIGYNPAAVAFVPISGWHGDNMLESSSKMPWFKGWAVERKEGKAEGKCLIEALDAILPPSRPTDKALRLPLQDVYKIGGIGTVPVGRVETGLLKPGMVVTFAPAGLTTEVKSVEMHHEALTEAVPGDNVGFNVKNVSVKELRRGYVAGDSKNNPPKGAADFTAQVIVLNHPGQISNGYTPVLDCHTAHIACKFHKIIEKCDRRTGKTTEMEPKAIKSGDAAIVTLVPSKPMCVEAFQEFPPLGR

SEQ ID NO: 17751 - protein, 360 aa, Lasioglossum politum
ERERGITIDIALWKFETSKYYVTIIDAPGHRDFIKNMITGTSQADCAVLIVAAGTGEFEAGISKNGQTREHALLAFTLGVKQLIVGVNKMDSTEPPYSEARFEEIKKEVSSYIKKIGYNPAAVAFVPISGWHGDNMLEVSSKMPWFKGWAVERKEGKAEGKCLIEALDAILPPSRPTDKALRLPLQDVYKIGGIGTVPVGRVETGLLKPGMVVTFAPAGLTTEVKSVEMHHEALTEAVPGDNVGFNVKNVSVKELRRGYVAGDSKNNPPKGAADFTAQVIVLNHPGQISNGYTPVLDCHTAHIACKFHKIIEKCDRRTGKTTEMEPKAIKSGDAAIVTVVPSKPMCVEAFQEFPPLGRFA

SEQ ID NO: 17752 - protein, 358 aa, Lasioglossum puncticolle
ERERGITIDIALWKFETSKYYVTIIDAPGHRDFIKNMITGTSQADCAVLIVAAGTGEFEAGISKNGQTREHALLAFTLGVKQLIVGVNKMDSTEPAYSETRFEEIKKEVSSYIKKIGYNPAAVAFVPISGWHGDNMLEASSKMPWFKGWAVERKEGKAEGKCLIEALDAILPPSRPTDKALRLPLQDVYKIGGIGTVPVGRVETGLLKPGMVVTFAPAGLTTEVKSVEMHHEALTEAVPGDNVGFNVKNVSVKELRRGYVAGDSKNNPPKGAADFTAQVIVLNHPGQISNGYTPVLDCHTAHIACKFQKIIEKCDRRTGKTTEVDPKAIKSGDAAIVTLVPSKPMCVEAFQEFPPLGR

SEQ ID NO: 17753 - protein, 361 aa, Lasioglossum quebecense
ERERGITIDIALWKFETSKYYVTIIDAPGHRDFIKNMITGTSQADCAVLIVAAGTGEFEAGISKNGQTREHALLAFTLGVKQLIVGVNKMDSTEPPYSEARFEEIKKEVSSYIKKIGYNPAAVAFVPISGWHGDNMLEASSKMPWFKGWAVERKEGKAEGKCLIEALDAILPPSRPTDKALRLPLQDVYKIGGIGTVPVGRVETGLLKPGMVVTFAPAGLTTEVKSVEMHHEALTEAVPGDNVGFNVKNVSVKELRRGYVAGDSKNNPPKGAADFTAQVIVLNHPGQISNGYTPVLDCHTAHIACKFHKIIEKCDRRTGKTTEMEPKAIKSGDAAIVTLVPSKPMCVEAFQEFPPLGRFAV

SEQ ID NO: 17754 - protein, 358 aa, Lasioglossum villosulum
  unsure (1)..(358): unsure at all Xaa locations
ERERGITIDIALWKFETSKYYVTIIDAPGHRDFIKNMITGTSQADCAVLIVAAGTGXFEAGISKNGQTREHALLAFTLGVKQLIVGVNKMDSTEPPYSEARFEEIKKEVSSYIKKIGYNPAAVAFVPISGWHGDNMLEASSKMPWFKGWAVERKEGKAEGKCLIEALDAILPPSRPTDKALRLPLQDVYKIGGIGTVPVGRVETGLLKPGMVVTFAPAGLTTEVKSVEMHHEALTEAVPGDNVGFNVKNVSVKELRRGYVAGDSKNNPPKGAADFTAQVIVLNHPGQISNGYTPVLDCHTAHIACKFHKIIEKCDRRTGKTTEMEPKAIKSGDAAIVTLVPSKPMCVEAFQEFPPLGR

SEQ ID NO: 17755 - protein, 375 aa, Lasioglossum lustrans
MGKGSFKYAWVLDKLKAERERGITIDIALWKFETSKYYVTIIDAPGHRDFIKNMITGTSQADCAVLIVAAGTGEFEAGISKNGQTREHALLAFTLGVKQLIVGVNKMDSTEPPYSEARFEEIKKEVSSYIKKIGYNPAAVAFVPISGWHGDNMLEASSKMPWFKGWAVERKEGKAEGKCLIEALDAILPPSRPTDKALRLPLQDVYKIGGIGTVPVGRVETGPLKPGMVVTFAPAGLTTEVKSVEMHHEALTEAVPGDNVGFNVKNVSVKELRRGYVAGDSKNNPPKGAADFTAQVIVLNHPGQISNGYTPVLDCHTAHIACKFHKIIEKCDRRTGKTTEMDPKAIKSGDAAIVTLVPSKPMCVEAFQEFPPLGR

SEQ ID NO: 17756 - protein, 358 aa, Lasioglossum lustrans
ERERGITIDIALWKFETSKYYVTIIDAPGHRDFIKNMITGTSQADCAVLIVAAGTGEFEAGISKNGQTREHALLAFTLGVKQLIVGVNKMDSTEPPYSEARFEEIKKEVSSYIKKIGYNPAAVAFVPISGWHGDNMLEASSKMPWFKGWAVERKEGKAEGKCLIEALDAILPPSRPTDKALRLPLQDVYKIGGIGTVPVGRVETGPLKPGMVVTFAPAGLTTEVKSVEMHHEALTEAVPGDNVGFNVKNVSVKELRRGYVAGDSKNNPPKGAADFTAQVIVLNHPGQISNGYTPVLDCHTAHIACKFHKIIEKCDRRTGKTTEMDPKAIKSGDAAIVTLVPSKPMCVEAFQEFPPLGR

SEQ ID NO: 17757 - protein, 358 aa, Lasioglossum coriaceum
ERERGITIDIALWKFETSKYYVTIIDAPGHRDFIKNMITGTSQADCAVLIVAAGTGEFEAGISKNGQTREHALLAFTLGVKQLIVGVNKMDSTEPPYSEARFEEIKKEVSSYIKKIGYNPAAVAFVPISGWHGDNMLEASSKMPWFKGWAVERKEGKAEGKCLIEALDAILPPSRPTDKALRLPLQDVYKIGGIGTVPVGRVETGLLKPGMVVTFAPAGITTEVKSVEMHHEALTEAVPGDNVGFNVKNVSVKELRRGYVAGDSKNNPPKSAADFTAQVIVLNHPGQITNGYTPVLDCHTAHIACKFHKIIEKCDRRTGKTTEMDPKTIKSGDAAIVTLVPSKPMCVEAFQEFPPLGR

SEQ ID NO: 17758 - protein, 358 aa, Lasioglossum desertum
ERERGITIDIALWKFETSKYYVTIIDAPGHRDFIKNMITGTSQADCAVLIVAAGTGEFEAGISKNGQTREHALLAFTLGVKQLIVGVNKMDSTEPPYSEARFEEIKKEVSSYIKKIGYNPAAVAFVPISGWHGDNMLEASSKMPWFKGWAVERKEGKAEGKCLIEALDAILPPSRPTDKALRLPLQDVYKIGGIGTVPVGRVETGLLKPGMVVTFAPAGITTEVKSVEMHHEALTEAVPGDNVGFNVKNVSVKELRRGYVAGDSKNNPPKSAADFTAQVIVLNHPGQISNGYTPVLDCHTAHIACKFHKIIEKCDRRTGKTTEMDPKAIKSGDAAIVTLVPSKPMCVEAFQEFPPLGR

SEQ ID NO: 17759 - protein, 358 aa, Lasioglossum fuscipenne
ERERGITIDIALWKFETSKYYVTIIDAPGHRDFIKNMITGTSQADCAVLIVAAGTGEFEAGISKNGQTREHALLAFTLGVKQLIVGVNKMDSTEPPYSEARFEEIKKEVSSYIKKIGYNPAAVAFVPISGWHGDNMLEASSKMPWFKGWAVERKEGKAEGKCLIEALDAILPPSRPTDKALRLPLQDVYKIGGIGTVPVGRVETGLLKPGMVVTFAPAGITTEVKSVEMHHEALTEAVPGDNVGFNVKNVSVKELRRGYVAGDSKNNPPKGAADFTAQVIVLNHPGQISNGYTPVLDCHTAHIACKFHKIIEKCDRRTGKTTEMDPKAIKSGDAAIVTLVPSKPMCVEAFQEFPPLGR

SEQ ID NO: 17760 - protein, 360 aa, Lasioglossum laevigatum
ERERGITIDIALWKFETSKYYVTIIDAPGHRDFIKNMITGTSQADCAVLIVAAGTGEFEAGISKNGQTREHALLAFTLGVKQLIVGVNKMDSTEPPYSEARFEEIKKEVSSYIKKIGYNPAAVAFVPISGWHGDNMLEASSKMPWFKGWAVERKEGKAEGKCLIEALDAILPPSRPTDKALRLPLQDVYKIGGIGTVPVGRVETGLLKPGMVVTFAPAGITTEVKSVEMHHEALTEAVPGDNVGFNVKNVSVKELRRGYVAGDSKNNPPKGAADFTAQVIVLNHPGQISNGYTPVLDCHTAHIACKFYKIIEKCDRRTGKTTELEPKAIKSGDAAIVTLVPSKPMCVEAFQEFPPLGRFA

SEQ ID NO: 17761 - protein, 360 aa, Lasioglossum leucozonium
ERERGITIDIALWKFETSKYYVTIIDAPGHRDFIKNMITGTSQADCAVLIVAAGTGEFEAGISKNGQTREHALLAFTLGVKQLIVGVNKMDSTEPPYSEARFEEIKKEVSSYIKKIGYNPAAVAFVPISGWHGDNMLEVSSKMPWFKGWAVERKEGKAEGKCLIEALDAILPPSRPTDKALRLPLQDVYKIGGIGTVPVGRVETGVLKPGMVVTFAPAGITTEVKSVEMHHEALTEAVPGDNVGFNVKNVAVKELRRGYVAGDSKNNPPKGAADFTAQVIVLNHPGQISNGYTPVLDCHTAHIACKFHKIIEKCDRRTGKTTEMEPKAIKSGDAAIVTLVPSKPMCVEAFQEFPPLGRFA

SEQ ID NO: 17762 - protein, 358 aa, Lasioglossum majus
ERERGITIDIALWKFETSKYYVTIIDAPGHRDFIKNMITGTSQADCAVLIVAAGTGEFEAGISKNGQTREHALLAFTLGVKQLIVGVNKMDSTEPPYSEARFEEIKKEVSSYIKKIGYNPAAVAFVPISGWHGDNMLEVSSKMPWFKGWAVERKEGKAEGKCLIEALDAILPPSRPTDKALRLPLQDVYKIGGIGTVPVGRVETGVLKPGMVVTFAPAGITTEVKSVEMHHEALTEAVPGDNVGFNVKNVAVKELRRGYVAGDSKNNPPKGAADFTAQVIVLNHPGQISNGYTPVLDCHTAHIACKFHKIIEKCDRRTGKTTEMEPKAIKSGDAAIVTLVPSKPMCVEAFQEFPPLGR

SEQ ID NO: 17763 - protein, 359 aa, Lasioglossum pavonotum
ERERGITIDIALWKFETSKYYVTIIDAPGHRDFIKNMITGTSQADCAVLIVAAGTGEFEAGISKNGQTREHALLAFTLGVKQLIVGVNKMDSTEPPYSEARFEEIKKEVSSYIKKIGYNPAAVAFVPISGWHGDNMLEASSKMPWFKGWAVERKEGKAEGKCLIEALDAILPPSRPTDKALRLPLQDVYKIGGIGTVPVGRVETGLLKPGMVVTFAPAGITTEVKSVEMHHEALTEAVPGDNVGFNVKNVSVKELRRGYVAGDSKNNPPKGAADFTAQVIVLNHPGQISNGYTPVLDCHTAHIACKFHKIIEKCDRRTGKTTEMDPKAIKSGDAAIVTLVPSKPMCVEAFQEFPPLGRF

SEQ ID NO: 17764 - protein, 358 aa, Lasioglossum sexnotatum
ERERGITIDIALWKFETAKYYVTIIDAPGHRDFIKNMITGTSQADCAVLIVAAGTGEFEAGISKNGQTREHALLAFTLGVKQLIVGVNKMDSTEPPYSEARFEEIKKEVSSYIKKIGYNPAAVAFVPISGWHGDNMLEASSKMPWFKGWAVERKEGKAEGKCLIEALDAILPPSRPTDKALRLPLQDVYKIGGIGTVPVGRVETGLLKPGMVVTFAPAGITTEVKSVEMHHEALTEAVPGDNVGFNVKNVSVKELRRGYVAGDSKNNPPKGAADFTAQVIVLNHPGQISNGYTPVLDCHTAHIACKFHKIIEKCDRRTGKTTEMDPKAIKSGDAAIVTLVPSKPMCVEAFQEFPPLGR

SEQ ID NO: 17765 - protein, 361 aa, Lasioglossum sisymbrii
ERERGITIDIALWKFETSKYYVTIIDAPGHRDFIKNMITGTSQADCAVLIVAAGTGEFEAGISKNGQTREHALLAFTLGVKQLIVGVNKMDSTEPPYSEARFEEIKKEVSSYIKKIGYNPAAVAFVPISGWHGDNMLEASSKMPWFKGWAVERKEGKAEGKCLIEALDAILPPSRPTDKALRLPLQDVYKIGGIGTVPVGRVETGLLKPGMVVTFAPAGITTEVKSVEMHHEALTEAVPGDNVGFNVKNVSVKELRRGYVAGDSKNNPPKGAADFTAQVIVLNHPGQISNGYTPVLDCHTAHIACKFHKIIEKCDRRTGKTTEMDPKAIKSGDAAIVTLVPSKPMCVEAFQEFPPLGRFAV

SEQ ID NO: 17766 - protein, 360 aa, Lasioglossum titusi
ERERGITIDIALWKFETSKYYVTIIDAPGHRDFIKNMITGTSQADCAVLIVAAGTGEFEAGISKNGQTREHALLAFTLGVKQLIVGVNKMDSTEPPYSEARFEEIKKEVSSYIKKIGYNPAAVAFVPISGWHGDNMLEASSKMPWFKGWAVERKEGKAEGKCLIEALDAILPPSRPTDKALRLPLQDVYKIGGIGTVPVGRVETGLLKPGMVVTFAPAGITTEVKSVEMHHEALTEAVPGDNVGFNVKNVSVKELRRGYVAGDSKNNPPKGAADFTAQVIVLNHPGQISNGYTPVLDCHTAHIACKFHKIIEKCDRRTGKTTEMDPKAIKSGDAAIVTLVPSKPMCVEAFQEFPPLGRFA

SEQ ID NO: 17767 - protein, 358 aa, Lasioglossum hybodinum
ERERGITIDIALWKFETSKYYVTIIDAPGHRDFIKNMITGTSQADCAVLIVAAGTGEFEAGISKNGQTREHALLAFTLGVKQLIVGVNKMDSTEPPYSEARFEEIKKEVSSYIKKIGYNPAAVAFVPISGWHGDNMLEASSKMPWFKGWAVERKEGKAEGKCLIEALDAILPPSRPTDKALRLPLQDVYKIGGIGTVPVGRVETGLLKPGMLVTFAPAGITTEVKSVEMHHEALTEAVPGDNVGFNVKNVSVKELRRGYVAGDSKNNPPRGAADFTAQVIVLNHPGQISNGYTPVLDCHTAHIACKFHKIIEKCDRRTGKTTEMEPKAIKSGDAAIVTLVPSKPMCVEAFQEFPPLGR

SEQ ID NO: 17768 - protein, 359 aa, Lasioglossum oenotherae
ERERGITIDIALWKFETSKYYVTIIDAPGHRDFIKNMITGTSQADCAVLIVAAGTGEFEAGISKNGQTREHALLAFTLGVKQLIVGVNKMDSTEPPYSEARFEEIKKEVSSYIKKIGYNPAAVAFVPISGWHGDNMLEASSKMPWFKGWAVERKEGKAEGKCLIEALDAILPPSRPTDKALRLPLQDVYKIGGIGTVPVGRVETGLLKPGMVVTFAPAGLTTEVKSVEMHHEALTEAVPGDNVGFNVKNVSVKELRRGYVAGDSKNNPPKGAADFTAQVIVLNHPGQISNGYTPVLDCHTAHIACKFHKIIEKCDRRTGKTTEMEPKAIKSGDAAIVTLVPSKPMCVEAFQEFPPLGRF

SEQ ID NO: 17769 - protein, 360 aa, Lasioglossum alphenum
ERERGITIDIALWKFETSKYYVTIIDAPGHRDFIKNMITGTSQADCAVLIVAAGTGEFEAGISKNGQTREHALLAFTLGVKQLIVGVNKMDSTEPPYSEARFEEIKKEVSSYIKKIGYNPAAVAFVPISGWHGDNMLEASSKMPWFKGWAVERKEGKGEGKCLIEALDAILPPSRPTDKALRLPLQDVYKIGGIGTVPVGRVETGLLKPGMVVTFAPAGLTTEVKSVEMHHEALTEAVPGDNVGFNVKNVSVKELRRGYVAGDSKNNPPKGAADFTAQVIVLNHPGQISNGYTPVLDCHTAHIACKFHKIIEKCDRRTGKTTEMEPKAIKSGDAAIVILVPSKPMCVEAFQEFPPLGRFA

SEQ ID NO: 17770 - protein, 378 aa, Enchytraeus sp. 'Enc'
QELGKGSFKYAWVLDKLKAERERGITIDIALWKFETPKYYVTIIDAPGHRDFIKNMITGTSQADCAVLIVAAGVGEFEAGISKNGQTREHALLAFTLGVKQLIVGVNKMDSTEPPFSEARYKEIQKEVSQYIKKIGYNPDAVPFVPISGWHGDNMLEPSAKMGWFKGWSATKADKKVYTGTTILEALDNVDVPKRPSDRPLRLPLQDVYKIGGIGTVPVGRVETGVIKPGMVVTFAPANVTTEVKSVEMHHTALDEAGPGDNVGFNVKNVSVKDIRRGNVAGDSKNDPPKETEEFKAQVIILNHPGQINAGYAPVVDCHTAHIACKFRDLLEKIDRRSGKKLEDNPPNVKSGDAAIVEMVPQKAMCVESFSEYAPLGR

SEQ ID NO: 17771 - protein, 416 aa, Cokeromyces recurvatus
GKSTTTGHLIYKCGGIDKRTIEKFEKEAAELGKGSFKYAWVLDKLKAERERGITIDIALWKFETPKYHVTVIDAPGHRDFIKNMITGTSQADCAILIIAGGTGEFEAGISKDGQTREHALLAFTLGVRQLIVAINKMDTTKWSEARYNEIVKEVSNFIKKIGFNPKSVPFVPISGWHGDNMLDESTNMPWFKGWTKETKAGSKTGKTLLEAIDAIDPPTRPVDKPLRLPLQDVYKIGGIGTVPVGRVETGVIKAGMVVTFAPSAVTTEVKSVEMHHETLAEGLPGDNVGFNVKNVSVKDIRRGNVCSDSKNDPAKESASFTAQVIILNHPGQISAGYAPVLDCHTAHIACKFAELIEKIDRRSGKKLEDAPKFVKSGDSAIVKMVPSKPMCVEAYTEYPPLGRFAVRDMRQTVAVG

SEQ ID NO: 17772 - protein, 417 aa, Saksenaea vasiformis
GKSTTTGHLIYKCGGIDKRTIEKFEKEAAELGKGSFKYAWVLDKLKAERERGITIDIALWKFETPKYHVTVIDAPGHRDFIKNMITGTSQADCGILIIAAGTGEFEAGISKDGQTREHALLAFTLGVRQLIVAINKMDSTKWSEARYNEIVKEVSAFIKKIGFNPKAVPFVPISGWHGDNMLEESTNMPWFKGWTKETKAGSKTGKTLLEAIDNIEPPVRPSDKPLRLPLQDVYKIGGIGTVPVGRVETGVIKAGMVVTFAPANVTTEVKSVEMHHEQLAEGVPGDNVGFNVKNVSVKDIRRGNVCSDSKNDPAKESASFTAQVIVLNHPGQIGAGYAPVLDCHTAHIACKFAELLEKIDRRSGKSLESSPKYVKSGDSAIVKMVPSKPMCVESYTEYPPLGRFAVRDMRQTVAVGV

SEQ ID NO: 17773 - protein, 417 aa, Rhizopus microsporus var. rhizopodiformis
GKSTTTGHLIYKCGGIDKRTIEKFEKEAAELGKGSFKYAWVLDKLKAERERGITIDIALWKFETPKYNVTVIDAPGHRDFIKNMITGTSQADCGILIIAAGTGEFEAGISKDGQTREHALLAFTLGVRQLIVAINKMDTTKWSEARYNEIVKEVSSFIKKIGYNPKSVPFVPISGWHGDNMLEESTNMPWFKGWTKETKAGNKTGKTLLEAIDNIDPPTRPVDKPLRLPLQDVYKIGGIGTVPVGRVETGVIKAGMVVTFAPANVTTEVKSVEMHHETLAEGLPGDNVGFNVKNVSVKDIRRGNVCSDSKNDPAKESGSFTAQVIILNHPGQIGAGYAPVLDCHTAHIACKFAELIEKIDRRSGKKLEDAPKFVKSGDSAIVKMVPSKPMCVEAYTDYPPLGRFAVRDMRQTVAVGV

SEQ ID NO: 17774 - protein, 426 aa, Absidia coerulea
VVVIGHVDSGKSTTTGHLIYKCGGIDKRTIEKFEKEAAELGKGSFKYAWVLDKLKAERERGITIDIALWKFETPKYHVTVIDAPGHRDFIKNMITGTSQADCGILIIAAGTGEFEAGISKDGQTREHALLAFTLGVRQLIVAINKMDSTKWSEQRFNEIIKEVSGFIKKIGFNPKSVPFVPISGWHGATMLKESTNMPWSKGWTKEPKAGAKSGKTLLDAIDAIDPPQRPSDKPLRLPLQDVYKIGGIGTVPVGRVETGVIKAGMVVTFAPANVTTEVKSVEMHHEQLVEGLPGDNVGFNVKNVSVKDIRRGNVCSDSKNDPAKEAGSFTAQVIVLNHPGQIGAGYAPVLDCHTAHIACKFAELLEKIDRRSGKKLEDAPKFVKSGDSAIVKMIPSKPMCVEAYTDYPPLGRFAVRDMRQTVAVGV

SEQ ID NO: 17775 - protein, 403 aa, Mucor amphibiorum
GKSTTTGHLIYKCGGIDKRTIEKFEKEAAELGKGSFKYAWVLDKLKAERERGITIDIALWKFETPKYNVTVIDAPGHRDFIKNMITGTSQADCAILIIAGGTGEFEAGISKDGQTREHALLAFTLGVRQLIVAINKMDTTKWSEARYNEIVKEVSSFIKKIGFNPKSVPFVPISGWHGDNMLDESTNMPWFKGWTKETKAGSKTGKTLLEAIDAIEPPTRPVDKPLRLPLQDVYKIGGIGTVPVGRVETGVIKAGMVVTFAPAAVTTEVKSVEMHHETLTEGLPGDNVGFNVKNVSVKDIRRGNVCSDSKNDPAKESASFTAQVIILNHPGQISAGYAPVLDCHTAHIACKFAELIEKIDRRSGKKLEDAPKFVKSGDSAIVKMIPSKPMCVEAYTDYPPLGR

SEQ ID NO: 17776 - protein, 402 aa, Mucor ramosissimus
GKSTTTGHLIYKCGGIDKRTIEKFEKEAAELGKGSFKYAWVLDKLKAERERGITIDIALWKFETPKYNVTVIDAPGHRDFIKNMITGTSQADCAILIIAGGTGEFEAGISKDGQTREHALLAFTLGVRQLIVAINKMDTTKWSQDRYNEIVKEVSGFIKKIGFNPKSVPFVPISGWHGDNMLDESTNMPWFKGWTKETKAGSKTGKTLLEAIDSIEPPVRPSDKPLRLPLQDVYKIGGIGTVPVGRVETGTIKAGMVVNFAPAAVTTEVKSVEMHHETLSEGLPGDNVGFNVKNVSVKDIRRGNVCSDSKNDPAKESASFTAQVIILNHPGQISAGYAPVLDCHTAHIACKFSELIEKIDRRSGKKMEDAPKFVKSGDSAIVKMVPSKPMCVEAYTDYPPLG

SEQ ID NO: 17777 - protein, 365 aa, Rhizomucor variabilis
GKSTTTGHLIYKCGGIDKRTIEKFEKEAAELGKGSFKYAWVLDKLKAERERGITIDIALWKFETPKYNVTVIDAPGHRDFIKNMITGTSQADCAILIIAGGTGEFEAGISKDGQTREHALLAFTLGVRQLIVAINKMDTTKWSEARYTEIVKEVSSFIKKIGFNPKSVPFVPISGWHGDNMLDESKNMPWFKGWNKETKAGSKTGKTLLEAIDAIEPPTRPSDKPLRLPLQDVYKIGGIGTVPVGRVETGTIKAGMVVNFAPAAVTTEVKSVEMHHETLAEGLPGDNVGFNVKNVSVKDIRRGNVCSDSKNDPAKESASFLAQVIILNHPGQISAGYAPVLDCHTAHIACKFSELVEKIDRRSGK

SEQ ID NO: 17778 - protein, 426 aa, Apophysomyces elegans
VVVIGHVDSGKPTTTGHLIYKCGGIDKRTIEKFEKEAAELGKGSFKYAWVLDKLKAERERGITIDIALWKFETPKYHVTVIDAPGHRDFIKNMITGTSQADCGILIIAAGTGEFEAGISKDGQTREHALLAFTLGVRQLIVAINKMDSTKWSEARYNEIVKEVSAFIKKIGFNPKAVPFVPISGWHGDNMLEESNNMPWFKGWTKETKAGAKTGKTLLEAIDNIEPPVRPSDKPLRLPLQDVYKIGGIGTVPVGRVETGVIKAGMVVTFAPANVTTEVKSVEMHHEQLAEGVPGDNVGFNVKNVSVKDIRRGNVCSDSKNDPAKESASFTAQVIVLNHPGQIGAGYAPVLDCHTAHIACKFAELLEKIDRRSGKSLEASPKFVKSGDSAIVKMVPSKPMCVESYTEYPPLGRFAVRDMRQTVAVGV

SEQ ID NO: 17779 - protein, 462 aa, Gallus gallus
MGKEKTHINIVVIGHVDSGKSTTTGHLIYKCGGIDKRTIEKFEKEAAEMGKGSFKYAWVLDKLKAERERGITIDISLWKFETSKYYVTIIDAPGHRDFIKNMITGTSQADCAVLIVAAGVGEFEAGISKNGQTREHALLAYTLGVKQLIVGVNKMDSTEPPYSQKRYEEIVKEVSTYIKKIGYNPDTVAFVPISGWNGDNMLEPSSNMPWFKGWKVTRKDGNASGTTLLEALDCILPPTRPTDKPLRLPLQDVYKIGGIGTVPVGRVETGVLKPGMVVTFAPVNVTTEVKSVEMHHEALSEALPGDNVGFNVKNVSVKDVRRGNVAGDSKNDPPMEAAGFTAQVIILNHPGQISAGYAPVLDCHTAHIACKFAELKEKIDRRSGKKLEDGPKFLKSGDAAIVDMIPGKPMCVESFSDYPPLGRFAVRDMRQTVAVGVIKAVDKKAGGAGKVTKSAQKAQKAK

SEQ ID NO: 17780 - protein, 447 aa, Suaeda japonica
MGKEKIHISLVVIGHVDSGKSTTTGHLIYKLGGIDKRVIERFEKEAAEMNKRSFKYAWVLDKLKAERERGITIDIALWKFETNKYYCTVIDAPGHRDFIKNMITGTSQADCAILIIDSTTGGFEAGISKDGQTREHALLSFTLGVRQMICCCNKMDATTPKYSKARYDEIVKEVSSYLKKVGYNPEKVPFVPISGFEGDNMIERSTNLDWYKGPTLLEALDMINEPKRPSDKPLRLPIQDVYKIGGIGTVPVGRIETGVLKPNMVVTFGPTGLTTEVKSVEMHHESLPEALPGDNVGFNVKNVSIKDLKRGYVASDSKNDPAKGASSFTAQVIIMNHPGQIGNGYAPVLDCHTSHIAVKFAELLTKIDRRSGKELEKEPKFLKNGDAGMVKMIPTKPMVVETFAEYSPLGRFAVRDMRQTVAVGVIKSVDKKEPTSAKVTKAAMKKK

SEQ ID NO: 17781 - protein, 365 aa, Mucor hiemalis f. hiemalis
GKSTTTGHLIYKCGGIDKRTIEKFEKEAAELGKGSFKYAWVLDKLKAERERGITIDIALWKFETPKFNVTVIDAPGHRDFIKNMITGTSQADCAILIIAGGTGEFEAGISKDGQTREHALLAFTLGVRQLIVAINKMDTTKWSESRYTEIVKEVSSFIKKIGFNPKSVPFVPISGWHGDNMLEESKNMGWFKGWNKETKAGSKTGKTLLEAIDAIEPPTRPSDKPLRLPLQDVYKIGGIGTVPVGRVETGVIKAGMVVNFAPAAVTTEVKSVEMHHETLTEGLPGDNVGFNVKNVSVKDIRRGNVCSDSKNDPAKESGSFLAQVIILNHPGQISAGYAPVLDCHTAHIACKFAELVEKIDRRSGK

SEQ ID NO: 17782 - protein, 359 aa, Boreus brumalis
ERERGITIDIALWKFETARYYVTIIDAPGHRDFIKNMITGTSQADCAVLIVAAGTGEFEAGISKNGQTREHALLAFTLGVKQLIVGVNKMDSTEPPYSESRFEEIKKEVSSYIKKIGYNPMTVPFVPISGWHGDNMLEPSAKMSWFKGWAVERKEGKADGKCLIEALDAIVPPSRPTDKALRLPLQDVYKIGGIGTVPVGRVETGIIKPGTVVVFAPANIVTEVKSVEMHHEALQEAVPGDNVGFNVKNVSVKELKRGYVAGDTKVNPPKGAADFTAQVIVLNHPGQISNGYTPVLDCHTAHIACKFAEIKEKVDRRTGKSTEDNPKAIKSGDAAIVNLVPSKPMCVESFSEFPPLGRF

SEQ ID NO: 17783 - protein, 377 aa, Semibalanus balanoides
QQMGKGSFKYAWVLDKLKAERERGITIDIALWKFETAKYYVTIIDAPGHRDFIKNMITGTSQADCAVLIVASGVGEFEAGISKNGQTREHALLAYTLGVKQMIIGVNKMDTTEPPYSEARFKEIVSEVSAYIKKVGYDPKTVAFVPISGWHGDNMLEASEKMPWYKGWETTRKSGSGSGKTLLEALDNIEPPSRPSDKPLRLPLQDVYKIGGIGTVPVGRVETGTIKPGMIVCFAPSGLTTEVKSVEMHHESLPEAFPGDNVGFNVKNVSVKELRRGYVASDSKNKPATGCEDFTAQVIILNHPGQVSAGYTPVLDCHTAHIACRFADLQQKVDRRTGKVTEEAPKSLKSGDAAIIKLIPSKPMVVETFTDFPPLGR

SEQ ID NO: 17784 - protein, 413 aa, Abagrotis alternata
HVDSGKSTTTGHLIYKCGGIDKRTIEKFEKEAQEMGKGSFKYAWVLDKLKAERERGITIDIALWKFETARYYVTIIDAPGHRDFIKNMITGTSQADCAVLIVAAGTGEFEAGISKNGQTREHALLAFTLGVKQLIVGVNKMDSTEPPYSEPRFEEIKKEVSSYIKKIGYNPAAVAFVPISGWHGDNMLEPSSKMPWFKGWYVERKEGKAEGKCLIEALDAILPPARPTDKALRLPLQDVYKIGGIGTVPVGRVETGILKPGTIVVFAPANITTEVKSVEMHHEALQEAVPGDNVGFNVKNVSVKELRRGYVAGDSKNNPPKGAADFTAQVIVLNHPGQISNGYTPVLDCHTAHIACKFAEIKEKVDRRTGKSTEDNPKSIKSGDAAIVNLVPSKPLCVESFQEFPPLGRFAVR

SEQ ID NO: 17785 - protein, 413 aa, Caenurgina crassiuscula
HVDSGKSTTTGHLIYKCGGIDKRTIEKFEKEAQEMGKGSFKYAWVLDKLKAERERGITIDIALWKFETAKYYVTIIDAPGHRDFIKNMITGTSQADCAVLIVAAGTGEFEAGISKNGQTREHALLAFTLGVKQLIVGVNKMDSTEPPYSEPRFEEIKKEVSSYIKKIGYNPAAVAFVPISGWHGDNMLEASTKMPWFKGWMVERKEGKAEGKCLIEALDAILPPARPTDKPLRLPLQDVYKIGGIGTVPVGRVETGILKPGTIVVFAPANITTEVKSVEMHHEALQEAVPGDNVGFNVKNVSVKELRRGYVAGDSKNNPPKGAADFTAQVIVLNHPGQISNGYTPVLDCHTAHIACKFAEIKEKVDRRTGKSTEENPKSIKSGDAAIVNLVPSKPLCVESFQEFPPLGRFAVR

SEQ ID NO: 17786 - protein, 413 aa, Chrysanympha formosa
HVDSGKSTTTGHLIYKCGGIDKRTIEKFEKEAQEMGKGSFKYAWVLDKLKAERERGITIDIALWKFETGKYYVTIIDAPGHRDFIKNMITGTSQADCAVLIVAAGTGEFEAGISKNGQTREHALLAFTLGVKQLIVGVNKMDSTEPPYNEGRFEEIKKEVSSYIKKIGYNPAAVAFVPISGWHGDNMLEPSTKMPWFKGWMVERKEGKAEGKCLIEALDAILPPARPTDKALRLPLQDVYKIGGIGTVPVGRVETGILKPGTIVVFAPANITTEVKSVEMHHEALQEAVPGDNVGFNVKNVSVKELRRGYVAGDSKNNPPKGAADFTAQVIVLNHPGQISNGYTPVLDCHTAHIACKFAEIKEKVDRRTGKSTETNPKSIKSGDAAIVNLVPSKPLCVESFQEFPPLGRFAVR

SEQ ID NO: 17787 - protein, 413 aa, Cisseps fulvicollis
HVDSGKSTTTGHLIYKCGGIDKRTIEKFEKEAQEMGKGSFKYAWVLDKLKAERERGITIDIALWKFETSKYYVTIIDAPGHRDFIKNMITGTSQADCAVLIVAAGTGEFEAGISKNGQTREHALLAFTLGVKQLIVGVNKMDSTEPPYSESRFEEIKKEVSSYIKKIGYNPAAVAFVPISGWHGDNMLEASTKMPWFKGWNVERKEGKAEGKCLIEALDAILPPARPTDKALRLPLQDVYKIGGIGTVPVGRVETGILKPGTIVVFAPANITTEVKSVEMHHEALQEAVPGDNVGFNVKNVSVKELRRGYVAGDSKNNPPKGAADFTAQVIVLNHPGQISNGYTPVLDCHTAHIACKFAEIKEKVDRRTGKSTEDNPKSIKSGDAAIVNLVPSKPLCVESFQEFPPLGRFAVR

SEQ ID NO: 17788 - protein, 413 aa, Gluphisia septentrionis
HVDSGKSTTTGHLIYKCGGIDKRTIEKFEKEAQEMGKGSFKYAWVLDKLKAERERGITIDIALWKFETAKYYVTIIDAPGHRDFIKNMITGTSQADCAVLIVAAGTGEFEAGISKNGQTREHALLAFTLGVKQLIVGVNKMDSTEPPYSESRFEEIKKEVSSYIKKIGYNPAAVAFVPISGWHGDNMLEASTKMPWFKGWLVERKEGKAEGKCLIEALDAILPPARPTDKALRLPLQDVYKIGGIGTVPVGRVETGVLKPGTIVVFAPANITTEVKSVEMHHEALQEAVPGDNVGFNVKNVSVKELRRGYVAGDSKNNPPKGASDFTAQVIVLNHPGQISNGYTPVLDCHTAHIACKFAEIKEKVDRRTGKSTEDNPKSIKSGDAAIVNLVPSKPLCVESFQEFPPLGRFAVR

SEQ ID NO: 17789 - protein, 413 aa, Homophoberia sp.
  unsure (1)..(413): unsure at all Xaa locations
HVDSGKSTTTGHLIYKCGGIDKRTIEKFEKEAQEMGKGSFKYAWVLDKLKAERERGITIDIALWKFETAKYYVTIIDAPGHRDFIKNMITGTSQADCAVLIVAAGTGEFEAGISKNGQTREHALLAFTLGVKQLIVGVNKMDSTEPPYSESRFEEIKKEVSSYIKKIGYNPAAVAFVPISGWHGDNMLEXSTKMPWFKGWNVERKEGKAEGKCLIEALDAILPPARPTDKALRLPLQDVYKIGGIGTVPVGRVETGVLKPGTIIVFAPANITTEVKSVEMHHEALQEAVPGDNVGFNVKNVSVKELRRGYVAGDSKNNPPKGAADFTAQVIVLNHPGQISNGYTPVLDCHTAHIACKFAEIKEKVDRRTGKSTEDNPKSIKSGDAAIVNLVPSKPLCVESFQEFPPLGRFAVR

SEQ ID NO: 17790 - protein, 413 aa, Hypena scabra
HVDSGKSTTTGHLIYKCGGIDKRTIEKFEKEAQEMGKGSFKYAWVLDKLKAERERGITIDIALWKFETAKYYVTIIDAPGHRDFIKNMITGTSQADCAVLIVAAGTGEFEAGISKNGQTREHALLAFTLGVKQLIVGVNKMDSTEPPYSEPRFEEIKKEVSSYIKKIGYNPAAVAFVPISGWHGDNMLEASTKMPWFKGWLVERKEGKAEGKCLIEALDAILPPARPTDKPLRLPLQDVYKIGGIGTVPVGRVETGVLKPGTIVVFAPANITTEVKSVEMHHEALQEAVPGDNVGFNVKNVSVKELRRGYVAGDSKNNPPKGAADFTAQVIVLNHPGQISNGYTPVLDCHTAHIACKFAEIKEKVDRRTGKSTEDNPKSIKSGDAAIVNLVPSKPLCVESFQEFPPLGRFAVR

SEQ ID NO: 17791 - protein, 413 aa, Idia aemula
HVDSGKSTTTGHLIYKCGGIDKRTIEKFEKEAQEMGKGSFKYAWVLDKLKAERERGITIDIALWKFETAKYYVTIIDAPGHRDFIKNMITGTSQADCAVLIVAAGTGEFEAGISKNGQTREHALLAFTLGVKQLIVGVNKMDSTEPPYSEPRFEEIKKEVSSYIKKIGYNPAAVAFVPISGWHGDNMLEASTKMPWFKGWNVERKEGKAEGKCLIEALDAILPPARPTDKALRLPLQDVYKIGGIGTVPVGRVETGILKPGTIVVFAPANITTEVKSVEMHHEALQEAVPGDNVGFNVKNVSVKELRRGYVAGDSKNNPPKGAADFTAQVIVLNHPGQISNGYTPVLDCHTAHIACKFAEIKEKVDRRTGKSTEDNPKSIKSGDAAIVNLVPSKPLCVESFQEFPPLGRFAVR

SEQ ID NO: 17792 - protein, 413 aa, Lophoptera sp.
HVDSGKSTTTGHLIYKCGGIDKRTIEKFEKEAQEMGKGSFKYAWVLDKLKAERERGITIDIALWKFETAKYYVTIIDAPGHRDFIKNMITGTSQADCAVLIVAAGTGEFEAGISKNGQTREHALLAFTLGVKQLIVGVNKMDSTEPPYSESRFEEIKKEVSSYIKKIGYNPAAVAFVPISGWHGDNMLEASTKMPWFKGWLVERKEGKAEGKCLIEALDAILPPARPTDKPLRLPLQDVYKIGGIGTVPVGRVETGILKPGTIVVFAPAQITTEVKSVEMHHEALQEAVPGDNVGFNVKNVSVKELRRGYVAGDSKNNPPKGAADFTAQVIVLNHPGQISNGYTPVLDCHTAHIACKFAEIKEKVDRRTGKSTEDNPKSIKSGDAAIVNLVPSKPLCVESFQEFPPLGRFAVR

SEQ ID NO: 17793 - protein, 413 aa, Nerice bidentata
HVDSGKSTTTGHLIYKCGGIDKRTIEKFEKEAQEMGKGSFKYAWVLDKLKAERERGITIDIALWKFETAKYYVTIIDAPGHRDFIKNMITGTSQADCAVLIVAAGTGEFEAGISKNGQTREHALLAFTLGVKQLIVGVNKMDSTEPPYSESRFEEIKKEVSSYIKKIGYNPAAVAFVPISGWHGDNMLEASTKMPWFKGWQVERKEGKADGKCLIEALDAILPPARPTDKALRLPLQDVYKIGGIGTVPVGRVETGILKPGTIVVFAPANITTEVKSVEMHHEALQEAVPGDNVGFNVKNVSVKELRRGYVAGDSKNNPPKGAADFTAQVIVLNHPGQISNGYTPVLDCHTAHIACKFAEIKEKVDRRTGKSTEDNPKSIKSGDAAIVNLVPSKPLCVESFQEFPPLGRFAVR

SEQ ID NO: 17794 - protein, 413 aa, Orgyia leucostigma
HVDSGKSTTTGHLIYKCGGIDKRTIEKFEKEAQEMGKGSFKYAWVLDKLKAERERGITIDIALWKFETSKYYVTIIDAPGHRDFIKNMITGTSQADCAVLIVAAGTGEFEAGISKNGQTREHALLAFTLGVKQLIVGVNKMDSTEPPYSEPRFEEIKKEVSSYIKKIGYNPAAVAFVPISGWHGDNMLEPSTKMPWFKGWLVERKEGKAEGKCLIEALDAILPPARPTDKPLRLPLQDVYKIGGIGTVPVGRVETGILKPGTIVVFAPANITTEVKSVEMHHEALQEAVPGDNVGFNVKNVSVKELRRGYVAGDSKNNPPKGAADFTAQVIVLNHPGQISNGYTPVLDCHTAHIACKFAEIKEKVDRRTGKSTEENPKSIKSGDAAIVNLVPSKPLCVESFQEFPPLGRFAVR

SEQ ID NO: 17795 - protein, 413 aa, Papaipema sp.
HVDSGKSTTTGHLIYKCGGIDKRTIEKFEKEAQEMGKGSFKYAWVLDKLKAERERGITIDIALWKFETAKYYVTIIDAPGHRDFIKNMITGTSQADCAVLIVAAGTGEFEAGISKNGQTREHALLAFTLGVKQLIVGVNKMDSTEPPYSESRFEEIKKEVSSYIKKIGYNPLAVAFVPISGWHGDNMLEPSTKMPWFKGWNVERKEGKAEGKCLIEALDAILPPARPTDKALRLPLQDVYKIGGIGTVPVGRVETGILKPGTIVVFAPANITTEVKSVEMHHEALQEAVPGDNVGFNVKNVSVKELRRGYVAGDSKNNPPKGAADFTAQVIVLNHPGQISNGYTPVLDCHTAHIACKFAEIKEKVDRRTGKSTEDNPKSIKSGDAAIVNLVPSKPLCVESFQEFPPLGRFAVR

SEQ ID NO: 17796 - protein, 413 aa, Triocnemis saporis
HVDSGKSTTTGHLIYKCGGIDKRTIEKFEKEAQEMGKGSFKYAWVLDKLKAERERGITIDIALWKFETAKYYVTIIDAPGHRDFIKNMITGTSQADCAVLIVAAGTGEFEAGISKNGQTREHALLAFTLGVKQLIVGVNKMDSTEPPYSESRFEEIKKEVSSYIKKIGYNPAAVAFVPISGWHGDNMLEPSTKMPWFKGWAVERKEGKAEGKCLIEALDAILPPARPTDKALRLPLQDVYKIGGIGTVPVGRVETGILKPGTIVVFAPANITTEVKSVEMHHEALQEAVPGDNVGFNVKNVSVKELRRGYVAGDSKNNPPKGAADFTAQVIVLNHPGQISNGYTPVLDCHTAHIACKFAEIKEKVDRRTGKSTEDNPKSIKSGDAAIVNLVPSKPLCVESFQEFPPLGRFAVR

SEQ ID NO: 17797 - protein, 413 aa, Hypsoropha sp.
HVDSGKSTTTGHLIYKCGGIDKRTIEKFEKEAQEMGKGSFKYAWVLDKLKAERERGITIDIALWKFETSKYYVTIIDAPGHRDFIKNMITGTSQADCAVLIVAAGTGEFEAGISKNGQTREHALLAFTLGVKQLIVGVNKMDSTEPPYSEPRFEEIKKEVSSYIKKIGYNPAAVAFVPISGWHGDNMLEASTKMPWFKGWLVERKEGKAEGKCLIEALDAILPPARPTDKPLRLPLQDVYKIGGIGTVPVGRVETGILKPGTIVVFAPANITTEVKSVEMHHEALQEAVPGDNVGFNVKNVSVKELRRGYVAGDSKNNPPKGAADFTAQVIVLNHPGQISNGYTPVLDCHTAHIACKFAEIKEKVDRRTGKSTEDNPKSIKSGDAAIVNLVPSKPLCVESFQEFPPLGRFAVR

SEQ ID NO: 17798 - protein, 331 aa, Troides helena
KSTTTGHLIYKCGGIDKRTIEKFEKEAQEMGKGSFKYAWVLDKLKAERERGITIDIALWKFETSKYYVTIIDAPGHRDFIKNMITGTSQADCAVLIVAAGTGEFEAGISKNGQTREHALLAFTLGVKQLIVGVNKMDSTEPPYSEPRFEEIKKEVSSYIKKIGYNPAAVAFVPISGWHGDNMLEPSTKMPWFKGWNVERKEGKAEGKCLIEALDAILPPARPTDKPLRLPLQDVYKIGGIGTVPVGRVETGVLKPGTIVVFAPANITTEVKSVEMHHEALQEAVPGDNVGFNVKNVSVKELRRGYVAGDSKNNPPRGASDFTAQVIVLNHP

SEQ ID NO: 17799 - protein, 496 aa, Homo sapiens
SFHTPQKGPPIEDAIASSDVLETASKSANPPHTIQASEEQSSTPAPVKKSGKLRQQIDVKAELEKRQGGKQLLNLVVIGHVDAGKSTLMGHMLYLLGNINKRTMHKYEQESKKAGKASFAYAWVLDETGEERERGVTMDVGMTKFETTTKVITLMDAPGHKDFIPNMITGAAQADVAVLVVDASRGEFEAGFETGGQTREHGLLVRSLGVTQLAVAVNKMDQVNWQQERFQEITGKLGHFLKQAGFKESDVGFIPTSGLSGENLITRSQSSELTKWYKGLCLLEQIDSFKPPQRSIDKPFRLCVSDVFKDQGSGFCITGKIEAGYIQTGDRLLAMPPNETCTVKGITLHDEPVDWAAAGDHVSLTLVGMDIIKINVGCIFCGPKVPIKACTRFRARILIFNIEIPITKGFPVLLHYQTVSEPAVIKRLISVLNKSTGEVTKKKPKFLTKGQNALVELQTQRPIALELYKDFKELGRFMLRYGGSTIAAGVVTEIKE

SEQ ID NO: 17800 - protein, 684 aa, Homo sapiens
MARHRNVRGYNYDEDFEDDDLYGQSVEDDYCISPSTAAQFIYSRRDKPSVEPVEEYDYEDLKESSNSVSNHQLSGFDQARLYSCLDHMREVLGDAVPDEILIEAVLKNKFDVQKALSGVLEQDRVQSLKDKNEATVSTGKIAKGKPVDSQTSRSESEIVPKVAKMTVSGKKQTMGFEVPGVSSEENGHSFHTPQKGPPIEDAIASSDVLETASKSANPPHTIQASEEQSSTPAPVKKSGKLRQQIDVKAELEKRQGGKQLLNLVVIGHVDAGKSTLMGHMLYLLGNINKRTMHKYEQESKKAGKASFAYAWVLDETGEERERGVTMDVGMTKFETTTKVITLMDAPGHKDFIPNMITGAAQADVAVLVVDASRGEFEAGFETGGQTREHGLLVRSLGVTQLAVAVNKMDQVNWQQERFQEITGKLGHFLKQAGFKESDVGFIPTSGLSGENLITRSQSSELTKWYKGLCLLEQIDSFKPPQRSIDKPFRLCVSDVFKDQGSGFCITGKIEAGYIQTGDRLLAMPPNETCTVKGITLHDEPVDWAAAGDHVSLTLVGMDIIKINVGCIFCGPKVPIKACTRFRARILIFNIEIPITKGFPVLLHYQTVSEPAVIKRLISVLNKSTGEVTKKKPKFLTKGQNALVELQTQRPIALELYKDFKELGRFMLRYGGSTIAAGVVTEIKE

SEQ ID NO: 17801 - protein, 400 aa, Malva pusilla
HENKRSFKYAWVLDKLKAERERGITIDIALWKFETTKYYCTVIDAPGHRDFIKNMITGTSQADCAVLIIDSTLVGFEAGISKDGQPREHALFAFTLGVKQMICLSHKMDACSPKYSKGRYDEIVREVSSYLKKLGYNPDKIPFVPISGFEGDNMIERSTNLDWYKGPTLLEALDQINEPKRPSDKPLRLPLQDVYKIGGIGTVPVGRVETGVLKPGMVVTFGPTGLTTEVKSVEMHHESLPEALPGDNVGFNVKNVAVKDIKRGFVASNSKDDPAKEAANFTSQVIIMNHPGQIGNGYAPVLDCHTSHIAVKFAEILPRIDQGSGKRNSEEPKFLKNGDAGMVKMIPTKPMVVETFSAHSPVCRFAVRDMRQTVAVGVIKSVEKKDPTGAKITKAAAKKK

SEQ ID NO: 17802 - protein, 364 aa, Dolophilodes distinctus
  unsure (1)..(364): unsure at all Xaa locations
MGXGSFRYAWVLDKLKAERERGITIDIALWKFETAKYYVTIIDAPGHRDFIKNMITGTSQADCAVLIVAAGTGEFEAGISKNGQTREHALLAFTLGVKQLIVGVNKMDSTEPAFSEARFEEIKKEVSSYIKKIGYNPTAVAFVPISGWHGDNMLEVSAKMPWFKGWTVERKEGKAEGKCLIEALDAIAPPSRPTDKALRLPLQDVYKIGGIGTVPVGRVETGILKPGTIVVFAPANLTTEVKSVEMHHEALQEAVPGDNVGFNVKNVSVKELRRGYVAGDTKVNPPKGTADFTAQVIVLNHPGQISNGYTPVLDCHTAHIACKFAEIQQKVDRRTGKSTEEFPKAIKSGDAAIVNLVPTKPMCV

SEQ ID NO: 17803 - protein, 350 aa, Mesostoma lingua
HLIFKCGGIDKRTIEKFEKEAADMGKGSFKYAWVLDKLKAERERGITIDIALWKFETSNYYVTVIDAPGHRDFIKNMITGTSQADCAILIVAAGVGEFEAGISKDGQTREHALLAYTLGVKQMIVGVNKIDSTNPPYSEDRYNEIKKEVSTYIKKVGYNPDNVAFVPISGWHGDNMLEASPNMGWFKGWEIERKKAGSADTVSVKGVTLLDALDAIEPPSRPTDKPLRLPLQDVSKIGGIGTVPVGRVETGIIKPGMVVTFAPQGLTTEVKSVEMHHESLPEAVPGDNVGFNVKNVSVKEIRRGNVCGDSKNDPPRGAEDFVAQVIVMNHPGQICPGYSPVLDCHTAHIA

SEQ ID NO: 17804 - protein, 196 aa, Methanopyrus kandleri AV19
MRRYVEPGKFVLPGDKITVAEAFYPGPGTYEDGGVVRAAITGRVEVDLEEREVRVEPYVDTPPKLKRGASVIGRVQSVKEQVVLVKICFVDDRTDREPPTSGVGGIHISKVRDAYVEDLADEFQPGDIVRARVVSTKMPVQLSTVGKEYGVVLAYCTRCRSELEKVKGRTLRCPVCGHTETRKVAAGYLREAESDA

SEQ ID NO: 17805 - protein, 292 aa, Saccharomyces cerevisiae; identical to SEQ ID NO: 497

SEQ ID NO: 17806 - protein, 195 aa, Plasmodium falciparum
MNFEDDDDIVIPGEFLGLQAEYINGNNTYLLKDEIRSSILGQKIINKNNDKKTIISVYNLKPPSLYLPKIGDIVICKVQRVSFHMIYCYILSSHNIFTKNALKGFILKSDIHINEGELGDNFICFKQGDIIKAKVLSIGQYSSYKLSTVGSELGVIAAFNQKGEILRPVAWNLVLNINDMTFERRKASNDFSLLL

SEQ ID NO: 17807 - protein, 250 aa, Schistosoma japonicum
MLGNRIVVPGDLICCSNATNKSGTSTYCRSGNIFSSAFGYIKEESHADGSKTVSVEPLKTAGIVPYAGAIVLAKVCSITGRFVRCDIVAVGDVYLSGPFKGLIRREDIRATQRDQAEPGCCFRPGDIVRARVINLLGPGAYTDTGSFMSSTSSQTLSTLLTTQAISCSVAATNDANISGYNSICLLSTAEPDLGVVLGFGRSPDNGFLELFGSTSGCPLVPVGWTEMLCPHTLTRYPRKVAECQMNLLPS

SEQ ID NO: 17808 - protein, 208 aa, Caenorhabditis elegans
MLAETLVAPGDKVLDAIGEYRMGKGLYEANRRIFASVAGFVNVYGFRDKSDNLVQVIEVRRSEDQLDNELLPFHGAIVTAKVMAVGLRFAKCDIISIGDKVYKKRFSALLPKKKLRPLEPELSEPFKNFVRPNDYILAKVCEDAEIKDKFVLSIAEDELGVVLCRGRFGEPMQKVDWNTVVSTRTGKTEPRKMAKVPQKCTLPTQSVA

SEQ ID NO: 17809 - protein, 195 aa, Plasmodium yoelii yoelii
MMDNIVLPGEVVGNLNNYISGNNTYILNNEIRSTILGKKNISINNENKEIINIDVIKDYTPLPQVGDLVICKVYRVTFNMIYCNILLTNNKPLKNSLKGYINKSDIHIYEGDLGDNFDCFKQGDIIKAKVLSIGQHSSYKLSTVGSDLGVIIALSEKGDILQPAAWNLMVNLSDMSFEQRKVSNEFSFPCNAYTS

SEQ ID NO: 17810 - protein, 291 aa, Mus musculus
MASVALSEAEKVYIVHGVQEDLRVDGRGCEDYRCVEVETDVVSNTSGSARVKLGHTDILVGVKAEMGTPKLEKPNEGYLEFFVDCSANATPEFEGRGGDDLGTEIANTLYRIFNNKSSVDLRSLCISPREHCWVLYVDVLLLECGGNLFDAISIAVKAALFNTRIPRVRVLEDEEGAKDIELSDDPYDCIRLSVENVPCIVTLCKIGCRHVVDATLQEEACSLASLLVSVTSKGVVTCMRKVGKGSLDPESIFEMMESSKRVGKVLHVSLQSLLHKEESLGPKRPRVGFLG

SEQ ID NO: 17811 - protein, 291 aa, Mus musculus
MASVALSEAEKVYIVHGVQEDLRVDGRGCEVYRCVEVETDVVSNTSGSARVKLGHTDILVGVKAEMGTPKLEKPNEGYLEFFVDCSANATPEFEGRGGDDLGTEMLTPSTGIFNNKSSVDLRSLCISPREHCWVLYVDVLLLECGGNLFDAISIAVKAALFNTRIPRVRVLEDEEGAKDIELSDDPYDCIRLSVENVPCIVTLCKIGCRHVVDATLQEEACSLASLLVSVTSKGVVTCMRKVGKGSLDPESIFEMMESSKRVGKVLHVSLQSLLHKEESLGPKRPRVGFLG

SEQ ID NO: 17812 - protein, 320 aa, Rattus norvegicus
MASVSLSEAEKVYIVHGVQVSVAAEDLRVDGRGCEDYRCVEVETDVVSNTSGSARVKLGHTDILVGVKAEMGTPKLERPSEGYLEFFVDCSANATPEFEGRGGDDLGTEIANTLYRIFNNKSSVDLRSLCISPREHCWVLYVDVLLLECGGNLFDAISIAVKAALFNTRIPRVRVLEDEEGSKDIELSDDPYDCIRLSVENVPCIVTLCKIGCRHVVDATLQEEACSLASLLVSVTSKGVVTCMRKVGKGSLDPESIFEMMEQLANNPVQGLALAPEYLYLGDCCQSSKRVGKVLHMSLQSLLHKEESLGPKRPKVGFLG

SEQ ID NO: 17813 - protein, 275 aa, Sulfolobus tokodaii
MSITPSNQNITSLLKKESILNALERGIRLDGRKNSDYRPISVTLNYAKKAEGSALVKLGDTMVLAGVKLEEEEPFPDTPNQGNLVVNVELLPLAYETFEPGPPDENAIELARVVDRSLRDSKAVDLSKLVIIPGKKVWTAWVDVYVLDYGGNVLDACTLAAVAALYNTKLPKVEIEGDNVKIIKEEKTDVTPIAYPVVTVTVAKIGKYLVVDPSLDEESIADVKISFSYVQDGRIVGMQKSNFGSLSLQEVDVAESLARSASQKLFEELKKQINM

SEQ ID NO: 17814 - protein, 274 aa, Pyrobaculum aerophilum str. IM2
MASISPYGKRFISYLRREQIRRLLATKYRVDGRGPEQTRNVEINVGVVKTADGSAEVKLGKTHVVAGVKVGLGQPFPDAPDEGVLVVNAEVLPHASPYTEVGPPDEFAIELARVVDRGIRHCGYVDFKKLAVEGGKAYVLWIDLYVINDDGNLIDVANLASVAALKNTQLPVVVKDEAGVVKLDRNNKAPLPVDISKAPIAVSVGKIGNVLFLDPTFEEELSLDGRITFTFSEDKIVAAQKTLGYFTQSEIEAALNLALRGRDRLLEALKSALK

SEQ ID NO: 17815 - protein, 312 aa, Anopheles gambiae str. PEST
FEISYKTSTMANVLLSEAEKTYILHGIQKNMRNDGRTNRDYRPMEFESEIVVHAAGSARLRLANTDILVGVKAEIDTPNPDRPNEGKVDFFIDCSANATPEFEGRGGEQLATEISNTLSKAYESQKGFDLAGLCIMAGHQCWKLYVDVLILECGGNLFDAVSLAVKGALFNTRIPRVSTAMHDGGSMDLILTDDPYDCERLDVTTAPILVTVCKIGDQCVVDPSAEEEECSVASVAVGVSCRPDGNTTTKQSITTVRTSGEGSIRLETLKKCFDTATTVGASLNKALMKALHEDETRNSKGLGKREIYGFLK

SEQ ID NO: 17816 - protein, 277 aa, Pyrococcus furiosus DSM 3638
MSNDEIVAGIMRDYILNLLKEKKRIDDRGFEDYRPIEVEVGVIEKAEGSALVKLGNTQVLVGIKATLGEPFPDTPNMGVMTTNVELVPLASPTFEPGPPDERAIELARVIDRGIRESRALNLEKMVIAPGKIVRVVFIDVHVLDHDGNLMDAIGIGAIAALLNARVPKVLYNEETGEVEILEEKEPLPVEKIPISVTFAKIGNYLVVDPTLEEEQIMDGRLTITTDETGHISAVQKSEGGAFKLEEVMYAVETAFKKAEEIRKIILNALEKANNSEE

SEQ ID NO: 17817 - protein, 266 aa, Methanosarcina acetivorans C2A
MKKMSEIIATLKKDYIYNLMIKGKRQDGRGFKDFRDLKLETNVIVKAEGSAKVTLGNTQVLVGVKLQTGTPFPDSQDEGVIITNLELNPIASPEFEPGPPREEAIEMARVVDRGIRESGAIDIKKLCITVGESVWIVFIDVHVLNDDGNIIDASCLAAIAALMTTMVPNEQQGLGEDVPLAMKEMPVGITIAKIGSKLMVDPSLDEEAVCETKLTIVSSSDGSVAGMQKMGISPLTEAELFEAIDLALEKAAELRGLYLEGLAKSE

SEQ ID NO: 17818 - protein, 266 aa, Methanosarcina mazei Goe1
MKKMSEIIATLKKDYIYNLMIKDKRQDGRGFKDFRELKLETNVISKAEGSAKVTLGNTQVLVGVKLQTGTPFPDSQDEGVIITNLELNPIASPEFEPGPPREDAIEMARVVDRGIRESGAIDIKKLCITVGESVWIVFIDVHILNNDGNIIDASCLAAIAALMTTMVPNEQQGLGENVPLAMKEMPVGITLAKIGSKLMVDPSLDEEAVCETKLTIVSSSDGSVAGMQKMGPVPLTEAELFEAIDMAIEKAAEIRGLYLEGLAKSE

SEQ ID NO: 17819 - protein, 263 aa, Methanosarcina barkeri
MKTMSEVIATLKKDYIYNLMIKGKRQDGRGFKDFRDIKLETNVIPKAEGSAKVTLGDTQVLVGVKLQPGTPFPDSQDEGVIITNLELNPIASPEFEPGPPREEAIEMARVVDRGIRESGAIDIKKLCISVGESVWIAYIDVHVLNDDGNIIDASSLAAIAALMTTIVPNEQHGIGADVPLAMKEMPVGVTLAKIGSKLMVDPSLDEGAVCETKLTVVSSSDGSVAGMQKMGTVPFTEAEVLEAIDMACEKAAEIRKLYLEALV

SEQ ID NO: 17820 - protein, 259 aa, Archaeoglobus fulgidus DSM 4304
MPEDILVDIKRDYVLSKLRDNERIDGRGFDEFRKVEIIPNVIEKAEGSALVKLGDTQVVVGVKMQPGEPYPDTPDRGVIIVNAELVPLASPTFEPGPPDENSIELARVVDRGIRESEAVDLSKLVIEEGEKVWIVFVDIHALDDDGNLLDASALAAIAALMNTKVPAERFDLGEDYLLPVRDLPVSVTSLIVGNKYLVDPSREEMSVGDTTLTITTDKDDNVVAMQKSGGYLLDEKLFDELLDVSINCARKLREKFKEI

SEQ ID NO: 17821 - protein, 275 aa, Sulfolobus solfataricus
MSSTPSNQNIIPIIKKESIVSLFEKGIRQDGRKLTDYRPLSITLDYAKKADGSALVKLGTTMVLAGTKLEIDKPYEDTPNQGNLIVNVELLPLAYETFEPGPPDENAIELARVVDRSLRDSKALDLTKLVIEPGKSVWTVWLDVYVLDYGGNVLDACTLASVAALYNTKVYKVEQHSNGISVNKNEVVGKLPLNYPVVTISVAKVDKYLVVDPDLDEESIMDAKISFSYTPDLKIVGIQKSGKGSMSLQDIDQAENTARSTAVKLLEELKKHLGI

SEQ ID NO: 17822 - protein, 260 aa, Thermoplasma acidophilum
MVKESAEILSEIRKNYILSTMKGGKRIDGRLPDEFRELTIIENYIPRANGSAYVALGNTRVVAGVKIEAGEPFPDTPDQGVLTTNVELLPIAFPSFEAGPPNDLAIEVSRVVDRGIRESKMISPEKLVIEQGKKVWIVFLDINVLDYDGNLIDASTIAAVAALRNAVVPASKEGGEDFKLPVSSTPISVTMVKIGDTLVCDPSLEEDQICGGRITVTTTEDGHIRAMQKGEIGAFTVEDVKKAVKMSLEVGKKLREKYFR

SEQ ID NO: 17823 - protein, 240 aa, Thermoplasma acidophilum
MKGGKRIDGRLPDEFRELTIIENYIPRANGSAYVALGNTRVVAGVKIEAGEPFPDTPDQGVLTTNVELLPIAFPSFEAGPPNDLAIEVSRVVDRGIRESKMISPEKLVIEQGKKVWIVFLDINVLDYDGNLIDASTIAAVAALRNAVVPASKEGGEDFKLPVSSTPISVTMVKIGDTLVCDPSLEEDQICGGRITVTTTEDGHIRAMQKGEIGAFTVEDVKKAVKMSLEVGKKLREKYFR

SEQ ID NO: 17824 - protein, 274 aa, Pyrococcus abyssi
MSDNEIVAGIMRDHIINLLKEGKRIDDRGFEDYRPIEIEVGVIEKAEGSALVKLGSTQVLVGIKTSLGEPFPDTPNMGVMTTNVELVPLASPTFEPGPPDERAIELARVIDRGIRESKALNLEKMVIVPGKIVRVVFIDVHVLDHDGNLMDAIGIAAIAALLNARVPKVRYNEETGEVETLDETEPLPVEKIPVPVTFAKIGNILVVDPSLDEELVMDGKITITTDETGHISAVQKSEGGAFKLEEVMYAVETAFKKAEEIRKLILEAVEKAKQ

SEQ ID NO: 17825 - protein, 278 aa, Plasmodium falciparum 3D7
MSSLNYIEDSINCNIRIDGRTLLTYRSIEINKNILVSGDGSSSVINEENNVICGIKLSLITPDVDTYDEGNVNLQIDCPASVAANRIKKDHLQTMTTIIYNLCIKNNINKKILCILPGKFAWSVDINVMVLNAGGGLLDIISIAIYVALKDTFFPIVKPKKEIEEENTFHEISNKDYQLEIVENEHVNFPYENIPICISIGEINNKYIYDMSKVEEELVQNIFVVAITSKGKCVAFHKLYGISMEISSILNITENSSKISHTLFDKIHQALDKIHANM

SEQ ID NO: 17826 - protein, 477 aa, Plasmodium falciparum 3D7
MIICNNNVNHFWKNIKKNIRLDGRTFEDSRNVCINFLKDYGHVEISIGFTKVICKITSEIVKPHDRKLKEGILKINLDIDNFIEDNENSDNMSDECLEIKNIIDRVLKTSNIINFESLCIIPGKKVWCICINIMVIENDGNLTDACYLSAYCGLVHFKNHQVRVIKNGDIIIDKEEINYSPLSILNSPIVTTFAYYEEHDVCLIDPCLHEEEFMSSKISIALNKNGNLISLLKPGGIPLACSHIMESIEIAKKRILTILKILEDTLEEDKNIRSYLTKRNLHVKYSSAPVTIRYDNSFKLKPDISLERYTKNTLIFEDTIKKIEQYIQYNQVQECLNNMNVKLEENDQEEIETCTLKGEGNLNNPNFIDPMRNTNLLNPTDITIIKRQEFVDNHYDANNNKYNTQANKTFKKELIDFSNLLTQNHKKSNNLSNNQKDISEQHDNSQESSDDASTIRSDESSDIDFSVAINQNIKKKK

SEQ ID NO: 17827 - protein, 286 aa, Arabidopsis thaliana
MGLSLGEQHFIKGGIAQDLRTDGRKRLTYRPIYVETGVIPQANGSARVRIGGTDVIASVKAEIGRPSSLQPDKGKVAVFIDCSPTAEPTFGGRGGEELSSELALALQRCLLGGKSGAGAGINLSSLLIKEGKVCWDLYIDGLVISSDGNLLDALGAAIKAALTNTAIPKVNVSAEVADDEQPEIDISDEEYLQFDTSSVPVIVTLTKVGTHYIVDATAEEESQMSSAVSISVNRTGHICGLTKRSGSGLDPSVILDMISVAKHVTETLMSKLDSEISAAEACEDES

SEQ ID NO: 17828 - protein, 293 aa, Arabidopsis thaliana
MGLSLGEQHFIKGGIAQDLRTDGRKRLTYRPIYVETGVIPQANGSARVRIGGTDVIASVKAEIGRPSSLQPDKGKVAVFIDCSPTAEPTFGGRGGEELSSELALALQRCLLGGKSGAAIHVLVPGAGINLSSLLIKEGKVCWDLYIDGLVISSDGNLLDALGAAIKAALTNTAIPKVNVSAEVADDEQPEIDISDEEYLQFDTSSVPVIVTLTKVGTHYIVDATAEEESQMSSAVSISVNRTGHICGLTKRSGSGLDPSVILDMISVAKHVTETLMSKLDSEISAAEACEDES

SEQ ID NO: 17829 - protein, 297 aa, Arabidopsis thaliana
MGLSLGEQHFIKGGIAQDLRTDGRKRLTYRPIYVETGVIPQANGSARVRIGGTDVIASVKAEIGRPSSLQPDKGKVAVFIDCSPTAEPTFGGRGGEELSSELALALQRCLLGGKSGAGLQSSIHVLVPGAGINLSSLLIKEGKVCWDLYIDGLVISSDGNLLDALGAAIKAALTNTAIPKVNVSAEVADDEQPEIDISDEEYLQFDTSSVPVIVTLTKVGTHYIVDATAEEESQMSSAVSISVNRTGHICGLTKRSGSGLDPSVILDMISVAKHVTETLMSKLDSEISAAEACEDES

SEQ ID NO: 17830 - protein, 291 aa, Glycine max
  unsure (1)..(291): unsure at all Xaa locations
MVGLSLGETHFIQGGIAQDLRCDGRKRLTYRPISVETGVIPQTNGSARVRMGATDVIASVKAELGKPSLLQPDKGKVSIYVDCSSTAEPAFEGRGGDELAAELSNALQRCLLGGKSGAGAGIDLSSLIVVEGKICWDLYIDGLVVSSDGNLLDALGTAIKAALSNTGIPRVQVAAGTSNDEHPEVDVSDEEFLQFDTSRVPVIVTLTKVGRHYIVDATSEEESQMSSAVSISVNRQGHICGITKRGGVGLDPSIILDMISVAKHVSEQLINKLDSEIASAEAEEESXQRST

SEQ ID NO: 17831 - protein, 294 aa, Glycine max
  unsure (1)..(294): unsure at all Xaa locations
MVGLSLGETHFIQGGIAQDLRCDGRKRLTYRPISVETGVIPQTNGSARVRMGATDVIASVKAELGKPSLLQPDKGKVSIYIDCSSTAEPAFEGRGGDELAAELSNAPQRCLLGGSCGALIXFPSGARIGLSSLIVVEGKICWDLYIDGLLVNSDGNLLDALIEXSKAALSNTGIPRVQVAAGTSNDEQPEVDVSNEEFLQFDTSGVPVIVTLAKVGTWEXHYIVDATSEEESQISSAVXSVNRQGHICGITKRGGVGLDPSTILQLFXVTRLNYGKFVSEIVASELCGPDLSFY

SEQ ID NO: 17832 - protein, 104 aa, Glycine max
  unsure (1)..(104): unsure at all Xaa locations
MVGLSLGEKHFIQGGIGQDLRCDGRKRFTYKPISVETEVIPQTNGSARVRMGATDVIASAKAVLGKPSLLQPDKXKVSIYIDCSSTAEPAFEGRRGDELAAELX

SEQ ID NO: 17833 - protein, 90 aa, Glycine max
  unsure (1)..(90): unsure at all Xaa locations
XIVTLTKVGRHYIVDATSEEESQMSSGVSISVNRQGHICGITKRGGVGLDPSIILDMISVAKHVSEQLINKLDSEIASAEADEESXHRST

SEQ ID NO: 17834 - protein, 197 aa, Oryza sativa
  unsure (1)..(197): unsure at all Xaa locations
RXAWAAIDLSSLIVVDGKVCWDLYIDGLVVSSDGNLLDALAAAIKVALSDTGIPKVNVSLSATTDEEPEVNVSDEEFLQFDTSSVPVIVTLTKVGKHYIVDATSEEESQMSSAVSVSVNRHGQIRGLTKRGGAGLDPSVIFDMISVAKHVSRQFISVLDSETLAAEAAEXRGRRAEVLIIDMPSLQCIYRFQFGSQR

SEQ ID NO: 17835 - protein, 124 aa, Oryza sativa
  unsure (1)..(124): unsure at all Xaa locations
MAGLXEGEKHFIRGGIAQDLRTDGRRRVEIQAISAETGAIPQAYGSAXRVRLGATEVIATVKAELRKPSILHPDQGKDSIFDECSPTAAPMFEGRGSEESSAELCVALQRCLLRGKSGAGAAIX

SEQ ID NO: 17836 - protein, 236 aa, Triticum aestivum
  unsure (1)..(236): unsure at all Xaa locations
MVGLSEGEKHFIRGGIAQDLRADGRTRLQFRALTVETGIIPQANGSARVRMGATEVIASVKAELGKPTILHPDKGKVSIYVDCSPTAAPMFEGRGSEELSAELSVALQRCLLGGKSGAGAAIDLSSLIVVEGKACWDLYIDGLVVSSDGDLLDALAAAIKVALSDTGIPKVNVSLNNETDGEPEVDISDEEFLQFDTSGVPVIITLTKVGKHYIVHATSEEESHISSAVSVSVNSX

SEQ ID NO: 17837 - protein, 291 aa, Schizosaccharomyces pombe
MSRHLETSLNNKEFVLNSLEKGLRLDGRQLSDFRSLEIQFGKEYGQVDVSFGHTRVMARITTEITKPYTDRPFDGIFSITTELTPLAYSAFEAGRVSDQEIVISRLIEKAVRRSNALDTESLCIISGQKCWHVRASVHFINHDGNLVDAACIAVIAALCHFRRPELTVVGEEVTVHPVEERVPVPLSILHMPICVTFSFFNNGELAIVDATLEEEDLCNGSMTITLNKNREVCQIYKAGGIIIDPSKIISCAKTAFDIAVSVCSVIQQALDEDLRKKETQYLGGSAENERS

SEQ ID NO: 17838 - protein, 270 aa, Schizosaccharomyces pombe
MKTVSGVKQLSFTPSIFKKITPEQYLSHLLNQDVRSDGRSVSEFREIVINDNCISTANGSAIIRAGENVFVCGIKAEIAEPFENSPNEGWIVPNLELSPLCSSKFKPGPPSDLAQVVSQELHQTLQQSNLINLQSLCIFEKKAAWVLYADIICLNYDGSAFDYAWAALFAALKTVKLPTAVWDEDLERVICASTLTRPVQLSTEVRSFSWSVFDDKLLADPTDEEEDLSTEFLTIMLNSSKNIVKIIKLGGTHIQPLLLKKCIEVARSKF

SEQ ID NO: 17839 - protein, 299 aa, Schizosaccharomyces pombe
MQLSLPELSYTHKSITEFEPAIRNDGRSIDQLRPLSGQVDVLPGTNGSARVKWASSVEIVIGVKAEVGDATPEGGKYVASVEISPSVSIQNRETDEIPSFLTSALQDLLNALAVDYLKFTPSKAWIIHVDAVVILSSSPYENILSALSLAAYLALQTTRLPKISTPNVTDITIGSTKYEPSEEYDVDSEWENALPLQGLELMSVIILVSSIDQVIIVDPTIEESSVAQVTYAIGVQASGAISYTRVVGTGGGYASTGRAITVERYIELLETASTVGTKLLNASSDILSFKGLGFFDILP

SEQ ID NO: 17840 - protein, 305 aa, Saccharomyces cerevisiae
MAKDIEISASESKFILEALRQNYRLDGRSFDQFRDVEITFGKEFGDVSVKMGNTKVHCRISCQIAQPYEDRPFEGLFVISTEISPMAGSQFENGNITGEDEVLCSRIIEKSVRRSGALDVEGLCIVAGSKCWAVRADVHFLDCDGGFIDASCIAVMAGLMHFKKPDITVHGEQIIVHPVNEREPVPLGILHIPICVTFSFFNPQDTEENIKGETNSEISIIDATLKEELLRDGVLTVTLNKNREVVQVSKAGGLPMDALTLMKCCHEAYSIIEKITDQILQLLKEDSEKRNKYAAMLTSENAREI

SEQ ID NO: 17841 - protein, 265 aa, Saccharomyces cerevisiae
MSLSVAEKSYLYDSLASTPSIRPDGRLPHQFRPIEIFTDFLPSSNGSSRIIASDGSECIVSIKSKVVDHHVENELLQVDVDIAGQRDDALVVETITSLLNKVLKSGSGVDSSKLQLTKKYSFKIFVDVLVISSHSHPVSLISFAIYSALNSTYLPKLISAFDDLEVEELPTFHDYDMVKLDINPPLVFILAVVGNNMLLDPAANESEVANNGLIISWSNGKITSPIRSVALNDSNVKSFKPHLLKQGLAMVEKYAPDVVRSLENL

SEQ ID NO: 17842 - protein, 260 aa, Thermoplasma volcanium
MVKESAEILSEIRKNYILTTMKGGKRIDGRLPDEFREITIIENYVPRANGSAYVALGKTRVVAGVKIEAGEPFPDTPDQGVLTTNVELLPIAFPSFEAGPPNDLAIEVSRVVDRGIRESKMISPDKLVIEQGKKVWIVFLDINVLDYDGNLIDACTIAAVSALRNAIVPASREGGEDFKLPVVNTPISVTMVKIGDTLVCDPSLEEDQICGGRITVTTTEDGHIRAMQKGEIGVFTLDDVKKAIKMSLKVGKNIREKYFR

SEQ ID NO: 17843 - protein, 297 aa, Neurospora crassa
MPREAEPSANEKAFLLKALQDEQIRLDGREFDQYRPLELTFGDEYGVANVSLGKTKILAKASAEVTVPFADRPLDGIFTIATELSPMAAPHFEVNRPTETEVLLSRLLEKTVRRSGALDTESLCLVAGQKCWSVRVDVHVLSHDGNLTDAACFAVVAALRHFRKPDTSMENGVLTVYTPAEREPVPLGWLHSPFCVTWSFFGEEGETALLDADWMEEQVRVASVTISLNRHGEICQIAKLGGVPVEAVALLQCTSVALTKVKEFSTYLDDKLAEDAKRRDKGGFMAELRAENDRIVG

SEQ ID NO: 17844 - protein, 274 aa, Pyrococcus horikoshii
MSDNEIVAGIMRDHIINLLKEGKRIDDRGFEDYRPIEIEVGIIEKAEGSALVKLGSTQVLVGIKTTLGEPFPDTPNMGVMTTNVELVPLASPTFEPGPPDERAIELARVTDRGIRESRALNLEKMVIVPGKIVRVVFIDVHVLDHDGNLMDAIGIASIAALLNAKVPKVEYNEETGEVEILEEKEPLPVERIPIPVTFAKIGNILVVDPSLEEELVMDGRLTVTTDETGHISAVQKGEGGAFKLEEVMYAVETAFKKAEEIRKIVLEAIKKSGE

SEQ ID NO: 17845 - protein, 276 aa, Aeropyrum pernix
MSITPHRLPVAPVIVREAYLSLLRKGWRPGDRDLKTPRNVKIETGIIEKAEGSALVKLGKTQVIAGVKAGVGAPFKDTPNQGVLTVHAEFVPLASPVFEPGPPDENAIELARVVDRSLREVGAVDLESLVIRPGEKVWVLWVDLYIIDHDGNLFDASMLATMAVLLTARLPRYEESETGEIIISKEGEGEELKVKTRVVTVTTAKIDRYIVVDPNIEEEAVSDVRLVTAVDENGRIVGLQKTGMGSLTEADIETMIGYSLEASKVYFKALEEAIKP

SEQ ID NO: 17846 - protein, 312 aa, Caenorhabditis elegans
MEVHLSDDEKLFLITGAEANIRNDGRSCQDFRQIILERGVLSGTNGSCRVQLGQTTDVLAGIKLELESYDAETEKEPKQPINFNVDFSANASSQFAGKGGDEYAEELSAAFQAAYSKALDIMPNLAKTQLADGYRWKINVDISVLQWDGSVSDAISIAIIGALSDLEFPEGDVAPDDGGKVRIVLKRPKVAGNVRDENVQVAMWKLDVMRCPLLLTISKIGTANLVDCTPEEECCIRSQLLVGLAAIADSSENNEPNYDVTCVKQVGGGLLEMESIQEMLELAAKSVGGLYGALAKRLKNEEMRKPGHSFLL

SEQ ID NO: 17847 - protein, 305 aa, Caenorhabditis elegans
MEVHLSDDEKLFLITGAEANIRNDGRSCQDFRQIILERGVLSGTNGSCRVQLGQTTDVLAGIKLELESYDAETEKEPKQPINFNVDFSANASSQFAGKGGDEYAEELSAAFQAAYSKALDIMPNLAKTQLADGYRWKINVDISVLQWDGSVSDAISIAIIGALSDLEFPEGDVAPDDGGKVRIVLKRPKVAGNVRDENVQVAICPLLLTISKIGTANLVDCTPEEECCIRSQLLVGLAAIADSSENNEPNYDVTCVKQVGGGLLEMESIQEMLELAAKSVGGLYGALAKRLKNEEMRKPGHSFLL

SEQ ID NO: 17848 - protein, 434 aa, Caenorhabditis elegans
MRVQPVTNCEKAVILEALKIGKRFDFRSLEEFRDVKLVVGAEVGTAICTIGNTKVMAAVSAEIAEPSSMRPHKGVINIDVDLSPMANYANEHDRLGSKGMELIRLLELIIRDSRCIDVEALCIRAGKEIWKIRVDVRILDEDGSLLDCACLAAITALQHFRRPNVTLEPHHTLIYSEYEKAPVPLNIYHMPICTTIGLLDKGQIVVIDPTDKETACLDGSIVVACNKRREVCALHQSTNLILSTKQIERCVKLAMARAEALTAVVSDVIKQDQIERSAFKRPDGFAITTPSLILTAGTTASRQIRAPVIKTEPESFTQRSLYQPSVILNENPLSVGSVKQEDVDEETLLAEQLTTIQNSVGQVEVTEKQTVAVSSRKREVEEVNDLLDGLDDDDEEEEVQTMTLGSETVLNDVPMEEAPDAEDSLVNAKKKKKK

SEQ ID NO: 17849 - protein, 617 aa, Caenorhabditis elegans
MRVQPVTNCEKARFDFRSLEEFRDVKLVVGAEVGTAICTIGNTKVMAAVSAEIAEPSSMRPHKGVINIDVDLSPMANYANEHDRLGSKGMELIRLLELIIRDSRCIDVEALCIRAGKEIWKIRVDVRILDEDGSLLDCACLAAITALQHFRRPNVTLEPHHTLIYSEYEKAPVPLNIYHMPICTTIGLLDKGQIVVIDPTDKETACLDGSIVVACNKRREVCALHQSTNLILSTKQIERCVKLAMARAEALTAVVSDVIKQDQIERSAFKRPDGFAITTPSLILTAGTTASRQIRAPVIKTEPESFTQRSLYQPSVILNENPLSVGSVKQEDVDEETLLAEQLTTIQNSVGQVEVTEKQTVAVSSRKREVEEVNDLLDGLDDDDEEEEVQTMTLGSETVLNDVPMEEAPDAEDSLVNAKKKKKNGIPTIFTPVPPHEKALIAEQSLRRFRTSVAKTPSKSDMSSFQESTAADSKQIADPHVLPRMALIRVYFMQNLFTTFELATDRSLQTLLRIVLNAISKEIRNEFSFYVFASPYDVIWKRPRCEVMKTPPSDNIFRQILVPSQMNLTLSELFLETKTDGLELMNIYLFVKNMTDENGSVDGMQSRKSWKYQQVIN

SEQ ID NO: 17850 - protein, 296 aa, Drosophila melanogaster
MAYVALSEAEKTYILHGVEDDFRCDGRSRRDYRPMDLETGLVSNASGSARLRLANTDILVGVKTEIDVPNPLTPEFGKLEFFVDCSANATPEFEGRGGSDLAQELILSLQNAYESPLAFNYRTLCLIPGQQCWKLYIDILILECGGNLHDAVSLAAKAALFNTKLPRVTATMLDAGITDLIISDNPYDCTRIGIETVPLLVTVCKIGDYVLVDPSAEEEVCSTVSMVVSVSMRNGQAFLSGTHLTGGGAMHRDTMRNCLELGLAIGEHLDRLLTKMLNLEQQRVGLKRPQIVGFLK

SEQ ID NO: 17851 - protein, 281 aa, Plasmodium yoelii yoelii
MSSLKYIEEGINSNIRVDGRTLLTYRTIEINKSILVSADGSSSVMNEENNVICGIKLSLLPPEPHSIDEGFVNLQIDCPASVASNRIKKEHLQIMTSIIYDLCIKNNIDKKKLCVLPSKFVWGIDINVMVLNGGGGLLDIISIAIYVALNDMNIPVVKAPKKIDELNMFHNTKSKEYELEIVENEKLPFPCENIPICISIGEINNKYIYDMSKIEEELVENVFVVAVTSSGKCVAFHKLYGISMEVSSILNMSENSVKISQNLFKKINEAIDKIQANTIHV

SEQ ID NO: 17852 - protein, 391 aa, Plasmodium yoelii yoelii
MKTCKNNTNFFWCNLKNKLRLDGRNFEDSRNVSIYFLGDYGNVEVSIGNTKVVCKITSEIVKPYDKKPNEGIIKINLDVESFNTYNNDISKITDECLEIKNLIERIFKASNILNFESLCIIPYKKVWCLLINITVIENDGNLYDSCYLSAYSALLHFRNNNVNIDNTGNVIIDEEEVNYTSLSVHNSPILTTFAYFNFEEICLIDPSLYEEEFMSSKLSIAINKNENLISILKPGGLPISYDTILQGIELAKKRVKSILKILEDALKEDNDLRNNLKKKNLHIKYSSNPVHIKYDGEDIVEKSLDVTINQMVINNLNIEKIVKKYEQYILSNGENINSIIDKNNIEENKILNNNLTLNKQYDIDQELRRIKEENIIKSKIIFIVFLTIIPI

SEQ ID NO: 17853 - protein, 276 aa, Xenopus laevis
MAAGFKTVEPLEYYRRFLKEACRPDGRELTEFRTTTINVGSITTADGSALVKLGNCTVLCGVKAELAAPPADSPDKGYVVPNVDLTPLCSSQFRPGPPGEEAQVASQFMADVIDNSQMLLKEDLCIAHGKLAWVLYCDLICLDYDGNLLDTCMCALVAALQNVRLPSVKINEETGLAEVNLKTKCALKILKHPVATSFALFDDTSLLVDPTGEEESLASGLLTVVTDEDERLCATRKPGGSALSAEKLQECISRAITRHKEVTNLLQEALASVKSE

SEQ ID NO: 17854 - protein, 290 aa, Homo sapiens
ASVTLSEAEKVYIVHGVQEDLRVDGRGCEDYRCVEVETDVVSNTSGSARVKLGHTDILVGVKAEMGTPKLEKPNEGYLEFFVDCSASATPEFEGRGGDDLGTEIANTLYRIFNNKSSVDLKTLCISPREHCWVLYVDVLLLECGGNLFDAISIAVKAALFNTRIPRVRVLEDEEGSKDIELSDDPYDCIRLSVENVPCIVTLCKIGYRHVVDATLQEEACSLASLLVSVTSKGVVTCMRKVGKGSLDPESIFEMMETGKRVGKVLHASLQSVLHKEESLGPKRQKVGFLG

SEQ ID NO: 17855 - protein, 291 aa, Homo sapiens
MASVTLSEAEKVYIVHGVQEDLRVDGRGCEDYRCVEVETDVVSNTSGSARVKLGHTDILVGVKAEMGTPKLEKPNEGYLEFFVDCSASATPEFEGRGGDDLGTEIANTLYRIFNNKSSVDLKTLCISPREHCWVLYVDVLLLECGGNLFDAISIAVKAALFNTRIPRVRVLEDEEGSKDIELSDDPYDCIRLSVENVPCIVTLCKIGYRHVVDATLQEEACSLASLLVSVTSKGVVTCMRKVGKGSLDPESIFEMMETGKRVGKVLHASLQSVLHKEESLGPKRQKVGFLG

SEQ ID NO: 17856 - protein, 260 aa, Ferroplasma acidarmanus
MPMDSSAVLSEIRKGFILESIKTGKRLDGRGLQDYREIKITENFVPKAAGSAMVEIGKTKVVAGIKVEEGDPFEDSPDSGVMALNIELLPMAFPTFESGPPSEQAIEYSRVVDRGIRESKMVDTSKLVIESGKRVWMIFVDIDVLNYDGNIIDAATLAAVTALKNTVVPASKIGQKDYSLPINATPVSITMVKIGDEIVCDPDLEEEQVSNGRITVTIAEDHNIHAMQKGDIGEFSLDEIRKAIKTSSDIGNRLRESYLR

SEQ ID NO: 17857 - protein, 339 aa, Mus musculus
MTDRSPFETDMLTLTRYVMEKGRQAKGTGELTQLLNSMLTAIKAISSAVRKAGLANLYGISGSVNVTGDEVKKLDVLSNSLVINMLQSSYSTCVLVSEENKEAVITAQERRGKYVVCFDPLDGSSNIDCLASIGTIFAIYRKTTEDEPSEKDALQPGRNIVAAGYALYGSATLVALSTGQGVDLFMLDPALGEFVLVEKDVRIKKKGKIFSLNEGYAKYFDAATAEYVQKKKFPEDGSEPYGARYVGSMVADVHRTLVYGGIFMYPANQKSPNGKLRLLYECNPVAYIIEQAGGMATTGTQPVLDVKPESIHQRVPLILGSPEDVQEYLSCVQRNQAGR

SEQ ID NO: 17858 - protein, 339 aa, Mus musculus
MTDRSPFETDMLTLTRYVMEKGRQAKGTGELTQLLNSMLTAIKAISSAVRKAGLANLYGISGSVNVTGDEVKKLDVLSNSLVINMLQSSYSTCVLVSEENKEAVITAQERRGKYVVCFDPLDGSSNIDCLASIGTIFAIYRKTTEDEPSEKDALQPGRNIVAAGYALYGSATLVALSTGQGVDLFMLDPALGEFVLVEKDVRIKKKGKIFSLNEGYAKYFDAATAEYVQKKKFPEDGSAPYGARYVGSMVADVHRTLVYGGIFMYPANQKSPNGKLRLLYECNPVAYIIEQAGGMATTGTQPVLDVKPESIHQRVPLILGSPEDVQEYLSCVQRNQAGR

SEQ ID NO: 17859 - protein, 354 aa, Mus musculus
MTDRSPFETDMLTLTRYVMEKGRQAKGTGELTQLLNSMLTAIKAISSAVRKAGLANLYGISGSVNVTGDEVKKLDVLSNSLVINMLQSSYSTCVLVSEENKEAVITAQERRGKYVVCFDPLDGSSNIDCLASIGTIFAIYRKTTEDEPSEKDALQPGRNIVAAGYALYGSRTLVALSTGQGVDLFMLDPALGEFVLVEKDVRIKKKGKIFSLNEGYAKYFDAATAEYVQKKKFPEDGSEPYGARYVGSMVADVHRTLVYGGIFMYPANQKSPNGKLRLLYECNPVAYIIEQAGGMATTGTQPVLDVKPESIHQRVPLILGPLRMCKSISAVCRETRQAGSEPEPMSPLPFVFVN

SEQ ID NO: 17860 - protein, 338 aa, Mus musculus
MANHAPFETDISTLTRFVMEQGRKAQGTGELTQLLNSLCTAIKAISSAVRQAGIAQLYGIAGSTNVTGDQVKKLDILSNDLVINMLKSSYATCVLVSEENTNAIIIEPEKRGKYVVCFDPLDGSSNIDCLVSIGTIFGIYRKKSTDEPSEKDALQPGRDLVAAGYALYGSATMLVLAMDCGVNCFMLDPSIGEFIMVDRDVKMKKKGNIYSLNEGYAKDFDPAINEYLQRKKFPPDGSAPYGARYVGSMVADIHRTLVYGGIFLYPANKKSPSGKLRLLYECNPIAYVMEKAGGLATTGDKDILDIVPTEIHQKAPVVMGSSEDVQEFLEIYRKHKAK

SEQ ID NO: 17861 - protein, 94 aa, Mus musculus
LQPGRDLVAAGYALYGSATMLVLAMDCGVNCFMLDPSIGEFIMVERDGKMKKKGNIYSLNEGYAKDFNPAILEYHQRQKFHEDGTAPYGTRYVG

SEQ ID NO: 17862 - protein, 339 aa, Rattus norvegicus
MTDRSPFETDMLTLTRYVMEKGRQAKGTGELTQLLNSMLTAIKAISSAVRKAGLANLYGIAGSVNVTGDEVKKLDVLSNSLVINMLQSSYSTCVLVSEENKEAVITAKERRGKYVVCFDPLDGSSNIDCLASIGTIFAIYRKTTEDEPSEKDALQPGRNIVAAGYALYGSATLVALSTGQGVDLFMLDPALGEFVLVEKDIRIKKKGKIFSLNEGYAKYFDAATAEYVQKKKFPEDGSAPYGARYVGSMVADVHRTLVYGGIFMYPANQKSPNGKLRLLYECNPVAYIIEQAGGMATTGTQPVLDVKPESIHQRVPLILGSPEDVQEYLSCVQRNQAGR

SEQ ID NO: 17863 - protein, 363 aa, Rattus norvegicus
MVDHAPFETDISTLTRFVLEEGRKAGGTGEMTQLLNSLCTAIKAISSAVRQAGIAQLYGIAGSTNVTGDQVKKLDILSNDLVINMLKSSYATCVLVSEEDTHAIIIEPEKRGKYVVCFDPLDGSSNIDCLASIGTIFGIYRKTSANEASEKDALQPGRNLVAAGYALYGSATMLVLAMNCGVNCFMLDPSIGEFILVDRDVKIKKKGNIYSINEGYAKDFDPAINEYIQRKKFPPDNSAPYGARYVGSMVADVHRTLVYGGIFLYPANKKNPSGKLRLLYECNPIAYVMEKAGGLATTGNEDILDIVPTEIHQKAPVIMGSTEDVQEFLEIYNKDKAKSRPSLPLPQSRARESPVHSICDELF

SEQ ID NO: 17864 - protein, 363 aa, Rattus norvegicus
MVDHAPFETDISTLTRFVLEEGRKAGGTGEMTQLLNSLCTAIKAISSAVRQAGIAQLYGIAGSTNVTGDQVKKLDILSNDLVINMLKSSYATCVLVSEEDTHAIIIEPEKRGKYVVCFDPLDGSSNIDCLASIGTIFGIYRKTSANEPSEKDALQPGRNLVAAGYALYGSATMLVLAMNCGVNCFMLDPSIGEFILVDRDVKIKKKGNIYSINEGYAKDFDPAINEYIQRKKFPPDNSAPYGARYVGSMVADVHRTLVYGGIFLYPANKKNPSGKLRLLYECNPIAYVMEKAGGLATTGNEDILDIVPTEIHQKAPVIMGSTEDVQEFLEIYNKDKAKSRPSLPLPQSRARESPVHSICDELF

SEQ ID NO: 17865 - protein, 349 aa, Nostoc sp. PCC 7120
MAKASESLDLSVNESTDKALDRDCTTLSRHVLQQLQSFSADAQDLSALMNRIALAGKLVARRLSRAGLMEGVLGFTGEVNVQGESVKKMDVYANDVFISVFKQSGLVCRLASEEMDEPYYIPENCPIGRYTLLYDPIDGSSNTDTNLSLGSIFSIRQQEGDDSDGQAKDLLTNGRKQIAAGYILYGPSTMLVYTMGTGVHSFTLDPSLGEFILSEENIRIPDHGAVYSVNEGNFWQWEESMREYIRYVHRTEGYTARYSGAMVSDIHRILVQGGVFLYPGTIQNPEGKLRLLYESAPLAFLIQQAGGRATTGLVDILDVVPKKLHQRTPLIIGSKEDVAKVESFIQNGH

SEQ ID NO: 17866 - protein, 331 aa, Rhodobacter capsulatus
MAIELEGLGLSPELADVMTRLARVGADLARTIARNGVETDLAAGVGTNAGGDGQKALDVMADDAFREALTGTAVAYYASEEQDEVVTLGKGTLALAIDPLDGSSNIDVNVSIGTIFSIFPATDDPNTSFLRKGSEQIAGGYIIYGPQCALVCSFGRGVHHWVLDLDSRSFKRLPDIKALPQDTSEYAINASNYRHWPSPIRAFIDDLVAGAEGPRGRNFNMRWIASLVAETHRILMRGGVFLYPGDERKGYARGRLRHVYECAPIAFLITQVGGGATDGCEDILSALPDKLHARTPFVFGCAAKVARVTAYHDLPGQETSAPFNTRGLFRS

SEQ ID NO: 17867 - protein, 418 aa, Rhodobacter sphaeroides
MEERHAEGFLQVPDLAVDCRRRQTEARGPARQRGAARHRHEGAQLLQGDRIEPHHFQIPEQNFYLIKFHKIRSAASWAHVAEEMPVKPFPTHPDAIPAELQDVMDRLGSVAIEVANRIARGGIDEDLAGLCGTNTDGDGQKALDVIADDAFRVALEGSAVRFYASEEQDTAVTLNEAGTLALAIDPLDGSSNIDTNLSVGTIFAIWPAAATAEASFLRLGSELIAAGYVIYGPQVCMMVSFGKGTQKYVLDPGSRSFVLVDRAVKVPPSSTEFAINASNYRHWPKPIRAYIDDCVAGTEGPRGRNFNMRWLASLVAETHRILARGGVFLYPRDSRKGYEQGRLRYLYECAPIAFVITQAGGGATDGENPILGQTPSRLHARTPFVFGSAEKVARITAYHDLPEQETSALFGNRGLFRS

SEQ ID NO: 17868 - protein, 333 aa, Rhodobacter sphaeroides
MKPFPTHPDAIPAELQDVMDRLGSVAIEVANRIARGGIDEDLAGLCGTNTDGDGQKALDVIADDAFRVALEGSAVRFYASEEQDTAVTLNEAGTLALAIDPLDGSSNIDTNLSVGTTFAIWPAAPRPNPSFLRLGSELIAAGYVIYGPQVCMMVSFGKGTQKYVLDPGSRSFVLVDRAVKVPPSSTEFAINASNYRHWPKPIRAYIDDCVAGTEGPRGRNFNMRWLASLVAETHRILARGGVFLYPRDSRKGYEQGRLRYLYECAPIAFVITQAGGGATDGENPILGQTPSRLHARTPFVFGSAEKVARITAYHDLPEQETSALFGNRGLFRS

SEQ ID NO: 17869 - protein, 331 aa, Rhodobacter sphaeroides
MAIELEDLGLSPDVADVMQRLARVGAGIARIISRNGLERDLGAGVGTNAGGDGQKALDVIADDAFRAALEGSAVAYYASEEQDEVVTLGEGSLALAIDPLDGSSNIDVNVSIGTIFSIFPAAAGPEASFLRPGTEQIAGGYIIYGPQCALVCSFGQGVQHWVLDLDAGIFRRMPDIRPLPAETSEFAINASNYRHWPQPIRAFVDDLVAGAEGPRGKNFNMRWIASLVAETHRILMRGGVFLYPGDERKGYERGRLRHVYECAPIAFLIANVGGGATDGCADILTALPDRLHARTPFVFGCASKVARVAAYHDLACEETSALFGSRGLFRS

SEQ ID NO: 17870 - protein, 369 aa, Rhodopseudomonas palustris
MTDRLTSSAQRSSRNHLVALRCGGVIMDQGQTLSVLLDSYAVDPQKKAVAAAVGAIAAGSIEISELIGQGALAGITGAAHGGSNADGDVQKDLDVKAEQIIVKSLKDVPYAALASEESDTLLDGDPNAPISIAYDPLDGSSNIDTNMTVGTIFSIIPNQPGVKPFTAAGSCQIAAGFVVYGPQTSLVLTLGDGVNIFTLDRKAKVYRLIRERVKVPADTAEYAVNASNHRHWEQPIRDFVDECIAGADGPRAKDFNMRWIGSLVAEVYRILTRGGVFLYPGDNRPGYGNGRLRLLYETHPMSFVMEQAGGAASTGRERVLDLTAKTIHQRSPLIMGSIDKVKRIELLHTDPSAASRSAPLFARRGLFRV

SEQ ID NO: 17871 - protein, 369 aa, Rhodospirillum rubrum
MSVLSQDRPRERPPMLATDRTTLAQFLVEECRGRAGDDSELLGLLLDVAQACKTISKMTAMGSLAGVHGYNGDVNPQGENQARLDLMSNQAFVRATERTGHAAGLASEEMEEVLGFPESYARGTLLLVFDPLDGSSNIDINGTVGSIFSILPMPRPGEAPQTADFLQSGRQQVAAGYALYGPSTMFVLTIGSGVHGFTLDPLLGDFILTHPSMTVIPESGEFAINSSNSRFWEPPIRAYVDELLAGRSGPRSKDYNMRWIAALVADVHRILLRGGIYLYPRDTKTPDLAGRLRLLYEAAPVAFLMEQAGGRCTTGTRTMLDLVPGSLHERVPLIFGSAVEVERVETLYREPQRREFATPLFNQRGLFRD

SEQ ID NO: 17872 - protein, 344 aa, Synechococcus sp. PCC 7942
MAQSTTSETHTRDLDRDCTTLSRHVLEQLQSFSPEAQDLAALMQRIGLAAKLIARRLSHAGLVDDALGFTGEINVQGEAVKRMDVYANQVFISVFRQSGLVCRLASEEMEKPYYIPENCPIGRYTLLYDPLDGSANVDVDLNVGSIFAVRRQEFYDESHEAKDLLQPGDRQIAAGYVLYGASTLLVYSMGQGVHVFVLDPSLGEFVLAQSDIQLPNSGQIYSVNEGNFWQWPEGYRQYIREMHRREAYSGRYSGALVADFHRILMQGGVFLYPETVKNPTGKLRLLYEAAPMAFLAEQAGGKASDGQKPILLRQPQALHERCPLIIGSAADVDFVEACLAESVP

SEQ ID NO: 17873 - protein, 347 aa, Synechocystis sp. PCC 6803; identical to SEQ ID NO: 463

SEQ ID NO: 17874 - protein, 338 aa, Ralstonia metallidurans
MTRISLTRYLVEEQRKHNTIEPELRLLIEVVARACKAISNAVSKGALAGVLGSAGTGNVQGETQQKLDVIANEVLLDANEWGGHLAAMASEEMDSFYEIPNRYPKGEYLLLFDPLDGSSNIDVNVSIGTIFSVLHMHKPGQTVTEHDFMQPGTQQVAAGYAVYGPQTTLVLTVGNGVHMFTLDREAGSFVLTQSDVMIPEDTKEFAINMSNMRHWAPPVRRYIDECLAGDEGPRGKNFNMRWIASMVADVHRILTRGGVFMYPWDKREPEKPGKLRLMYEANPMAFLVEQAGGAATNGQQRILDVEPTKLHQRVSVILGSKNEVERVTRYHQEDAAKA

SEQ ID NO: 17875 - protein, 289 aa, Ralstonia metallidurans
  unsure (1)..(289): unsure at all Xaa locations
MPLSHRQTLTRYLIEERRRCXPRATRRTQRADPRCGAGMQGAGPRSVSSREXXRATALSDGSAAPTGGGINVQGEVQKPLDVQSNEMFIRMNEWNGQLAGMASEEMEEPYLIPSSYPRGKYLLVFDPLDGSSNIDVNVSIGSIFSILRAPADVVASGRDVTEADFLQPGAAQVAAGYTIYGPTTQLVLTVGNGVAAFTLDPNLGEFLLTRSDIRVPEQTQEFAINSSNSRFWEPPVKRYVDECLAGKTGPRGKDFNMRWVASMVAEAHRILMRGGVFMYPRDTKDPAKP

SEQ ID NO: 17876 - protein, 196 aa, Ralstonia metallidurans
MIATACKVIATAASRGALAGVLGSAEHENVQGEVQKKLDVISNAILVHATERGGHLVALASEEMDTIYPIPAAFPRGKYLLVFDPLDGSSNIDANISVGAIFSVLRSPDPEVPPTLEHFLQAGAGQVCAGYALYGPATMLVLTTGQGTHGFTLDRDVGEFILTHPMLRIPAATQEFAINTSRGLLVFSAISDGTQS

SEQ ID NO: 17877 - protein, 339 aa, uncultured cyanobacterium
MAQSTTSETHTRDLDRDCTTLSRHVLEQFQSFSPEAQDLAALMQRIGLAAKLIARRLSHAGLVDDALGFTGEINVQGEASKRMDVYANQVFISVFRQSGLVCRLASEEMEKPYYIPENCPIGRYTLLYDPLDGSANVDVDLNVGSIFAVRRQEFYDESHEAKDLLQPGDRQIAAGYVLYGASTLLVYSMGQGVHVFVLDPSLGEFVLAQSDIQLPNSGQIYSVNEGNFCSGPKVSPVHPGNASPRRLQRRYSGALVADFHRILMQGGVFLYPETVKNPTGKLRLLYEAPPMAFLAEQAGGKASDGQKPILLRQPQALHRRCPLIIGSAADVDFVDSLLG

SEQ ID NO: 17878 - protein, 324 aa, Neisseria meningitidis MC58
MDTLTRFLPEHLQQNQLPEALGGVLLSVVSACTEINAKVRLGALAGVLGMAGTGNIQGEDQKKLDVIANNIMIDTLKANSAVAGLASEEEDTFVNAGENGRYLVLFDPLDGSSNIDVNISVGTIFSILEKPEGALATESFLQTGRQQLAAGYVLYGPQTQLVFTFGHGVYMFTLNAENEFVLTKENPKVPESTKEFAINMSNRRHWLPPVQQYIDELLAGETGTRGKNYNMRWVASMVAEIHRILMRGGVFMYPQDKRDPAKPGKLRLMYEANPMSLILEQAGASASNAYQAMLDIQPENLHQRVAVFMGSSEEVAYLDRLHAK

SEQ ID NO: 17879 - protein, 324 aa, Neisseria meningitidis Z2491
MDTLTRFLPEHLQQNQLPEALGGVLLSVVSACTEINAKVRLGALAGVLGMAGTGNIQGEDQKKLDVIANNIMIDTLKANPAVAGLASEEEDSFVSAGENGRYLVLFDPLDGSSNIDVNISVGTIFSILEKPEGALATESFLQTGRQQLAAGYVLYGPQTQLVFTFGHGVYMFTLNAENEFVLTKEKPKVPESTKEFAINMSNRRHWLPPVQQYIDELLAGETGTRGKNYNMRWVASMVAEIHRILMRGGVFMYPQDKRDPSKPGKLRLMYEANPMALILEQAGASASNARQDILGIRPESLHQRVAVIMGSSEEVDYLNRLHSK

SEQ ID NO: 17880 - protein, 422 aa, Cyanidium caldarium
EFGTRKDVQVYFIQVLLYLYKEECQEITTAKDIFLIRWISIKMIAVQPQPKKTPVAEYLQTSQDTPTSLTRYLLEVAKQNKDMGDMVALINGIQFACKKIASLVGKAGVTDLMGIYQQGIVNVHGEEQKKLDVLSNEVLKNALKYSGKMAVIASEEEDVPIMVEESYSGNYVVVFDPLDGSSNLDAGLPTGTIFGVFQQQFSCLIHDYEESIDNMELACLQNTLQPGRRLIAAGYCIYSSSTMLVLSLGNGLHCFTLDTEVGEFVLTRANIQIPQRGNIYSFNESNFYQWDKGVQDYIERLKKGNNQTNCRYSARYVGSMVADVHRTILYGGIFGYPADKKNVSGKLRLVYECAPMAYLVEQAGGKATTGIENILDLTPKDIHERKPLILGSPADIEEFLQVYGMSRVDREDMHMWDNLSSL

SEQ ID NO: 17881 - protein, 338 aa, Burkholderia fungorum
MALQRRTTLTKYLIEQQRETNNLPADLRLLIEVVARACKAISYHVSKGALGDALGTAGSENVQGEVQKKLDILSNEILLEANEWGGNLAGMASEEMEQFFPIPANYPKGEYLLVFDPLDGSSNIDVNVSIGTIFSVLRCPDGQQPTEQSFLQPGTQQVAAGYAVYGPQTVLVLTTGNGVNCFTLDRELGSWVLTQSDMRIPVETREYAINASNERHWYPPVQQYIGELKDGKEGSRQSDFNMRWIASMVADVHRILNRGGIFMYPADKRTPDKPGKLRLMYEANPMAFIVEQAGGAATNGEKRILDIQPKSLHERVAVFLGSKNEVDRVTRYHLETKK

SEQ ID NO: 17882 - protein, 378 aa, Burkholderia fungorum
MQDGRTTLSKFLIDTLDRQPCSTETARNAGLSALLIDVAAAIKSISAMLTKGALGGNYGSAQSINTHGEEQKKLDVATNEIFVQQCEWDGLLAAMVSEEMESVYAIPPGYPRGDYLLAFDPLDGSSNIDINGVVGSIFSVLRNGEGNGNANEKNGSDPRGTVGESAFLRPGCEQVAAGYAVYGPSTMLVLSVGNGTHGFTLEREIGNFVLTHSNIRIPEDTVEFAINASNERFWEPPVRRYVQECKDGRSGCRASDFNMRWIASMVAEVHRILMRGGVFMYPRDSKTPAMEGRLRLLYEANPMSFLVEQAGGLSITGRERILDVVPRALHGRVPVILGSKHEVERIGRYHGEYDRGEDQPFTSPLFSRRSLFLPGFTA

SEQ ID NO: 17883 - protein, 313 aa, Rhizobium sp. TAL1145
MTDIREWTSTVGLENELGEVLSGLANACATIARTLRTAPLAQLSGSAGSLNVQGEAQKPLDIISNEVFVNACRELAQISLAVSEEEEDPIPISATGSYAVVFDPLDGSSNLDVNVTVGSIFSVVSATTPKHILPGGRPQHIAGFASYGPSTDLTVLAKGRVARFTLDASDTWRLVELDMRLPDRFPEIAINAARADSWDDVIRGFVNDAFHGNEIRYNARWVASLVAETQRILSRGGLFLYPADSSGRGRLRLLYEARPIAAIVEAAGGRCSTGFMPILEVNAETLHDRVPLIFGGASQVEALEAAYRADKEN

SEQ ID NO: 17884 - protein, 332 aa, Escherichia coli O157:H7 EDL933
MKTLGEFIVEKQHEFSHATGELTALLSAIKLGAKIIHRDINKAGLVDILGASGAENVQGEVQQKLDLFANEKLKAALKARDIVAGIASEEEDEIVVFEGCEHAKYVVLMDPLDGSSNIDVNVSVGTIFSIYRRVTPVGTPVTEEDFLQPGNKQVAAGYVVYGSSTMLVYSTGCGVHAFTYDPSLGVFCLCQERMRFPEKGKTYSINEGNYIKFPNGVKKYIKFCQEEDKSTNRPYTSRYIGSLVADFHRNLLKGGIYLYPSTASHPDGKLRLLYECNPMAFLAEQAGGKASDGKERILDIIPETLHQRRSFFVGNDHMVEDVERFICEFPDA

SEQ ID NO: 17885 - protein, 331 aa, Saccharum sp.
MTITRHVLNEQSRNPESRGDFTILLSHIVLGCKFVASAVNKAGLAQLIGLAGETNVQGEEQKKLDVLSNEVFVKALVSSGRTCVLVSEEDEETTFVDPKLRGKYCVCFDPLDGSSNIDCGVSIGTIFGIYMIKDKDNVTLSDVLQPGKDMLAAGYCMYGSSCTLVLSTGTGVNGFTLDPSLGEFILTHPDIKIPKKGKIYSVNEGNAKNWDVPVAKFVEKCKYPKDGSPPKSLRYIGSMVADVHRTLLYGGVFLYPADQKSPNGKLRVLYEVFPMSFLMEQAGGQSFTGKERALDLVPTKIHERSPIFLGSYDDVEEIKALYAEQAKSSSA

SEQ ID NO: 17886 - protein, 336 aa, Pseudomonas putida KT2440
MSRVTLSRYLIEQTRSNNTPADLRFLIEVVARACKEISHHVSKGALGGVLGSMGTENVQGEVQKKLDVISNDILLEANEWGGHLAGMASEEMDNAYQIPGRYPKGAYLLVFDPLDGSSNIDVNVSVGTIFSVLRCPNQYLSQNESLNEEAFLQPGTEQVAAGYAIYGPQTMLILTLGNGVKGFTLDRELGSFVLTHENIRVPETTAEFAINMSNQRHWEAPVQRYVGELLAGETGPLKKNYNMRWIASMVADVHRILTRGGLFMYPRDAREPSKPGKLRLMYEANPMSFIIEQAGGASTNGYDRILDIKPESLHQRVSVILGSKEEVERVTAYHKE

SEQ ID NO: 17887 - protein, 341 aa, Beta vulgaris
MDHAADATRTDLMTITRFVLNEQSKRPESRGDFTILMSHIVLGCKFVCSAVNKAGLAKLIGLAGETNIQGEEQKKLDVLSNEVFIKALISSGRTCILVSEEDEEATFVEPSLRGKYCVVFDPLDGCSNIDCGVSIGTIFGIYMVKDLNNATLDDVLQPGKNMVAAGYCMYGSSCTLVMSTGSGVNGFTHDPSLGEFILTHPDIKIPKKGKIYSVNEGNAKNWDGPTTKYVEKCKFPKDGSSPKSLRYIGSMVADVHRTLLYGGIFMYPGDKKSPNGKLRVLYEVFPMSFLMEQAGGQAFTGEQRALDLVPKNIHDRSPVFLGSYDDVEDIKALYAAEQKNA

SEQ ID NO: 17888 - protein, 329 aa, Beta vulgaris
MTITRFVLNEQSKRPESRGDFTILMSHIVLGCKFVCSAVNKAGLAKLIGLAGETNIQGEEQKKLDVLSNEVFIKALISSGRTCILVSEEDEEATFVEPSLRGKYCVVFDPLDGCSNIDCGVSIGTIFGIYMVKDLNNATLDDVLQPGKNMVAAGYCMYGSSCTLVMSTGSGVNGFTHDPSLGEFILTHPDIKIPKKGKIYSVNEGNAKNWDGPTTKYVEKCKFPKDGSSPKSLRYIGSMVADVHRTLLYGGIFMYPGDKKSPNGKLRVLYEVFPMSFLMEQAGGQAFTGEQRALDLVPKNIHDRSPVFLGSYDDVEDIKALYAAEQKNA

SEQ ID NO: 17889 - protein, 355 aa, Aspergillus nidulans
MTTNSTGNGGAVGQENINTDIVTLSRFFTEEQTKVPEATGDFTLLCHALQFSFKSIAYYIRRASLINLTGLAGSSNTTGDDQKKLDVIGNDLFVSAMRTSGKCRILVSEEEEEAIIFDEHPNARYAVVCDPIDGSSNLDAGVSVGTIFGIFRLPDDILGPGKKVTAKDVLLPGTEMVAAGFTMYGASAQLVITMKNGGVNGFTLENSLGEFILTHPNMKLPPSRAIYSVNEGNSMYWDDWCNAYFDSLKRPGEGKKPYSARYIGSMVADAYRTLLYGGVFAYPADSKSPKGKLRILYECAPMAMVFENAGGKAVNSRMERLLSVQPESIHDKSGVFLGSRDEVQKVIDTYNKYKK

SEQ ID NO: 17890 - protein, 343 aa, Anopheles gambiae str. PEST
ESASVAIMTQQGPAFDSNCMTLTRFVLQEQKKYKHATGDLSQLLNCIQTAIKAISSAVRKAGIAKLQGISGDTNVQGEQVKKLDVLSNEIFINMLKSSYATCLLVSEENDNVIEIETDKRGKYVVSFDPLDGSSNIDCLVSIGSIFAITKQVKENTTPSEQDALQPGNKIVAAGYALYGSATMIVISLGNGVHGFMYDPSIGEFVLTDYNMRIPERGNIYSINEGYASTWDESVLNYVKDKKDPAKGKPYGARYVGSMVADVHRTIKYGGIFIYPATAAAKNGKLRLLYECNPMAYLVTQAGGKAYATKGKEILDVMPTSIHQRSPIYLGSKLDVEEAISYIK

SEQ ID NO: 17891 - protein, 372 aa, Yersinia pestis KIM
MELPMNQSYLWATLLTLAVLCINKSIFNRRFRDCVMKTLGEFIVEKQLDFSHATGELTALLSAIKLGAKIIHRDINKAGLVDILGASGVSNIQGEDQMKLDLFANEKLKAALKARGEVAGIASEEEDDIVIFDGGRAENAKYVVLMDPLDGSSNIDVNVSVGTIFSIYRRITPFGTPITEEDFLQPGTKQVTAGYVVYGSSTMLVYTTGYGVHAFTYDPSLGVFCLSHEKVRYPATGCMYSINEGNYIKFPLGVKKYIKYCQEQDEATKRPYTSRYIGSLVADFHRNLLKGGIYIYPSTASHPQGKLRLLYECNPMAFLAEQAGGKATDGVNRILDIVPEKLHQRAPFFVGTKSMVEDAEGFIAKFPDEEAK

SEQ ID NO: 17892 - protein, 337 aa, Magnetospirillum magnetotacticum
MPYKRITLTHFLLQEQRRLGGSGSFTALMTDIIFACKMISHEVNRGALAGNLGVAGSENVQGEEQKKLDVLANDIFLHMNALGGSYAGMASEELEDVHAVHGAADGKYLLLFDPLDGSSNIDVNISVGSIFSILKLPEGADAGSKDAFLQPGVKQVAAGYALYGSSTMMVLTTGNGVNGFTLDNNVGMFLLTHPNMTIPADTKEFAINASRERFWEPPVKRYIDECRQGKEGPRGKDFNMRWVASMVAEVHRILCRGGVFLYPADTENMKKGGKLRLMYEANPMAFIVEQAGGAATTGRGRMMEVQPTGLHQRVPVILGSKTEVERIGAYHTEYDAK

SEQ ID NO: 17893 - protein, 374 aa, Leptospira interrogans serovar lai str. 56601
MSFHFQTFYGIFSLEFTDPQKNSVGIIFLEESMSVHPTQTLSLSQYLIEEQLKLPQATGDFTALMSHLVYAAKIVSREVRKAGLLENILGATETVNVQGETQMKLDEYADKVFNHTLTRSGHLCILGSEEHEETVPVPNGYKIGKYTIAIDPLDGSSNIDANVSIGTIFSVHLRKSPAGTPGTLSDLLQQGSGQRAAGYVLYGSSTMLILCTGKGVSGFTLDPSCGEFILSHPDMQIPETGGIYSINEGNYNYWSDEVKNYIRDIKSIEGGRKPQSGRYIGSLVADFHRNLLKGGIFLYPNDTKSTKYPNGKLRLLYEAAPMAFIAEQAGGMAVTVYGERILDLTPKELHERTTLVVGSKKEVEHFLKFAPKKS

SEQ ID NO: 17894 - protein, 338 aa, Xanthomonas campestris pv. campestris str. ATCC 33913
MSRPSLTRFLIEEQHAGRIDPELRQLITIVSRACKRISIAVSKGALGGVLGDAGTGNVQGEAQKKLDVLSNDILLEANAWGGHLAACASEEMDHSQPVPDQYPSGDFLLLFDPLDGSSNIDVNVSVGTIFSVLRAPKGTEKPGDEHFLQPGTQQVAAGYCIYGPSTMLVLTLGHGTHAFTLEREEGSFLLTQADMRVPEDTAEFAINMSNQRHWEPAMQAYVGDLLAGKDGARGKDFNMRWIASMVADVHRILTRGGIFIYPWDKKDAAKPGKLRLMYEANPMGMLVEQAGGAATTGRERILDIQPTQLHQRVPVFLGSKNEVAEATRYHVEFDKAQG

SEQ ID NO: 17895 - protein, 336 aa, Xanthomonas axonopodis pv. citri str. 306
MSRPSLTRFLIEEQHAGRIDAELRQLITIVSRACKRISIAVSKGALGGVLGDAGTGNVQGEAQKKLDVLSNDILLEANAWGGHLAACASEEMDHSQPVPDQYPSGDFLLLFDPLDGSSNIDVNVSVGTIFSVLRAPKGTEKPGDEHFLQPGTQQVAAGYCIYGPSTMLVLTLGHGTHAFTLEREEGSFLLTQANMRVPEDTAEYAINMSNQRHWEPAMQAYVGDLLAGKDGARGKDFNMRWIASMVADVHRILTRGGIFIYPWDKKDPSKPGKLRLMYEANPMSMLVEQAGGAATTGRERILDIQPTQLHQRVPVFLGSKNEVAEATRYHLDADKA

SEQ ID NO: 17896 - protein, 336 aa, Caulobacter crescentus CB15
MGRSAFGSRTRMTAFVDLAARLAAEPADAALKDVVLTIAETCAQISRVVASGALSGSLGAAGSTNVQDEEQKKLDVITNDMLSDALKACGPVAGLASEELEEVEPTGRVGGYLVTFDPLDGSSNIDVNVSVGTIFSVLPAPAGHAPTEGDFLQPGRNQVAAGYAVYGPQTMLVVTLSGGVNGFTLSADGRWLLTHPDLAIKPDTAEFAINMSNQRHWAPAVRRYIDGCLQGKDGARGKNFNMRWVASMVADVHRIMMRGGVFMYPWDAREPDKPGKLRLMYEANPMSLLAERAGGKSIEGLNEILDINPAKLHQRVPVVLGSANEVEVIRAEMRAG

SEQ ID NO: 17897 - protein, 280 aa, Campylobacter jejuni subsp. jejuni NCTC 11168
MQEVISYIQKAVLEISNALKFPDTSYSQNQNFTGDTQLKFDVLSDEIITKTLSQCSSIKAIISEEKDEILTLNERANFIVAYDPLDGSSLMDVNFAIGSIFAIYEEKASAKNLRAALYSMYGARLELVICKDQPKLYRLNANNEFIFIKDLRMNEKGKINATGGTQKFWEEKHAKFIKSLFDEGYRLRYSGAMVSDINQILLKGGGIFSYPATQDAPNGKLRAFFEVFPLAFIIEKAGGKTTNGKNRSLLELEFDKIHATTPCFFGSEYEISKLLKAYNE

SEQ ID NO: 17898 - protein, 333 aa, Chlorobium tepidum TLS
MNKLTTIESHFLQLQKRYPEINSEVTDLLNDVAFAAKLVRREVVRAGLADILGLAGSTNVQGEEVKKLDLFANERLINAIGQHGRFAIMGSEENEEIIKPPKFESGEYVLLFDPLDGSSNIDVNVSVGTIFSIYRLKSGEPSQASLEDCLQKGADQIAAGYVIYGSSVMMVYTTGHGVHGFTYDQTVGEFLLSHENITTPEHGKYYSVNEGSWQEFNDGTKRFLDYLKEEDKATGRPYSTRYIGSFVADFHRNLLTGGVFVYPATKKHKNGKLRLMYEANPMAFICEQAGGRATDGYRRILDIEPKELHQRTPLYIGSKNDVLIAEEFEQGKR

SEQ ID NO: 17899 - protein, 348 aa, Thermosynechococcus elongatus BP-1
MTDYAAHQQALDRDCLTLSRHVLQQLQSFDAAAQDLSALMNRIALAGKLIARRLSRAGLMEGVLGFTGAVNIQGEDVKKMDVYANEVFIAAFKQSGLVCRLASEEMAQPYYIPENCPIGRYTLLYDPLDGSSNVDINLNVGSIFAIRQQEGTDLDSTAADLLQDGHQQIAAGYILYGPSTMLVYSLGKGTHVFVLDPSLGEFILAIENLQIPASGAIYSVNEGNFWAWEEPIRNYVRHVHRQPGYSARYSGALVADIHRILMEGGVFLYPGTQKNPAGKLRLLYEAAPIAFLVEQAGGKASTGTQPLLDVVPDHLHMRTPLIVGSPENVALVESFIQQTPAQPTVTQV

SEQ ID NO: 17900 - protein, 353 aa, Shigella flexneri 2a str. 301
MRLFVKIVAVALLHKHCRESFMKTLGEFIVEKQHEFSHATGELTALLSAIKLGAKIIHRDINKAGLVDILGASGAENVQGEVQQKLDLFANEKLKAALKARDIVAGIASEEEDEIVVFEGCEHAKYVVLMDPLDGSSNIDVNVSVGTIFSIYRRVTPVGTPVTEEDFLQPGNKQVAAGYVVYGSSTMLVYTTGCGVHAFTYDPSLGVFCLCQERMRFPEKGKTYSINEGNYIKFPNGVKKYIKFCQEEDKSTNRPYTSRYIGSLVADFHRNLLKGGIYLYPSTASHPDGKLRLLYECNPMAFLAEQAGGKASDGKERILDIIPETLHQRRSFFVGNDHMVEDVERFIREFPDA

SEQ ID NO: 17901 - protein, 353 aa, Escherichia coli CFT073
MGLFVKIVAVALLHKHCRESFMKTLGEFIVEKQHEFSHATGELTALLSAIKLGAKIIHRDINKAGLVDILGASGAENVQGEVQQKLDLFANEKLKAALKARDIVAGIASEEEDEIVVFEGCEHAKYVVLMDPLDGSSNIDVNVSVGTIFSIYRRVTPVGTPVTEEDFLQPGNKQVAAGYVVYGSSTMLVYTTGCGVHAFTYDPSLGVFCLCQERMRFPEKGKTYSINEGNYIKFPNGVKKYIKFCQEEDKSTNRPYTSRYIGSLVADFHRNLLKGGIYLYPSTASHPDGKLRLLYECNPMAFLAEQAGGKASDGKERILDIIPETLHQRRSFFVGNDHMVEDVERFIREFPDA

SEQ ID NO: 17902 - protein, 322 aa, Microbulbifer degradans 2-40
MQNLQGMLRDQRVAQDLQEVIFSIELACKDIAKKVQLGALAGVLGATESENVQGETQKKLDVISNDILKASLAANSNVLALASEEEDNVVAANAGGRYVVAFDPLDGSSNIDINGQIGTIFTIFEALDGVAANSGKHFLQQGNKQVCAGYVLYGASTLMVITVDGPTSCLTLDPATQTFSLTNTALQVPDQTQEFAVNLANERFWLPKFKSYVADLKLGEEGVRGKRFNMRWNASMVGDVHRVLMRGGIFMYPSDTRNPKQPAKLRLLYEANPMALLIERAGGKAFNETQRILDVTPCALHERIAVILGSEQEVATCLEYLN

SEQ ID NO: 17903 - protein, 354 aa, Trichodesmium erythraeum IMS101
MVNTQAREDLHIRLEETQLLDRDCTTLSRHVLQQLHFSPDAQDISSLMNRIGLAGKLIARRLTRAGLLEDTLGFTGTVNVQGESVKKMDIYANDVFISVFKQSGLVCRLASEEMEKPYYIPENCPIGRYTLLYDPLDGSSNLDTNLNVGSIFSVRQQEGNDENGLAQDLLQNGHKQIAAGYILYGPSTMLVYSIGQGVHAFTLDPSLGEFILVNENIKIPEHGPVYSVNEGNFWQWDDSMRDYIRYVHRHEGYTARYGGALVGDFHRILYQGGVFLYPGTVKKPEGKLRLLYESAPMGYLVEQAGGRASTGTEEILDVVADQLHQRTPLIIGSKEDVALVESFIKEQKRISNQG

SEQ ID NO: 17904 - protein, 271 aa, Trichodesmium erythraeum IMS101
GESVKKMDIYANDVFISVFKQSGLVCRLASEEMEKPYYIPENCPIGRYTLLYDPLDGSSNLDTNLNVGSIFSVRQQEGNDENGLAQDLLQNGHKQIAAGYILYGPSTMLVYSIGQGVHAFTLDPSLGEFILVNENIKIPEHGPVYSVNEGNFWQWDDSMRDYIRYVHRHEGYTARYGGALVGDFHRILYQGGVFLYPGTVKKPEGKLRLLYESAPMGYLVEQAGGRASTGTEEILDVVADQLHQRTPLIIGSKEDVALVESFIKEQKRISN

SEQ ID NO: 17905 - protein, 340 aa, Brucella suis 1330
MTLVGNFSPLVLVGDSDRVEAETVGAYLDGWAGHDKVRLATANAIKAILSGAGRLVGRIARGYLPGDPGKLVGVNSDQDQQKSIDVGSHNLFVELLIAAGVASILSEEADLPVAGKADGLVAVAIDPLDGSGNVGLGAPLGTIFSIFPADVEEPFLQPGNRQIAAGYVSYGNSVDLGFSVGEGVIFATLDPVSGQFHITRRNVKLPERTSDLAFNASVQRHLSAGMQAYVNDAFLGKDGPRGRNFNMRWLGAAVGDMHRIMQRGGLFFYVNDSRPGYEKGRLRLVYEANPIAFLAREAGGKATDGSRPILDIVPQTYHERSALVFGVAEELDILGEYFVK

SEQ ID NO: 17906 - protein, 336 aa, Pseudomonas syringae pv. syringae B728a
MSRVTLSRYLIEQTRSNNTPADLRFLIEVVARACKEISHAVSKGALGGVLGSMGTENVQGEVQKKLDVISNEILLEANEWGGHLAGMASEEMDNAYQIPGKYPKGAYLLVFDPLDGSSNIDINAPVGTIFSVLRCPNEYLSQNEALNEKAFLQPGTEQVAAGYAIYGPQTMLVLTLGDGVKGFTLDREMGSFVLTHEDITIPESTQEFAVNMSNQRHWEAPVQRYVSELLAGEDGPLKKNYNMRWVAAMVADVHRILTRGGLFMYPRDSREPSKPGKLRLMYEANPMSFLVEQAGGASTDGHQRILDIQPEGLHQRVAVYLGSKEEVERATAYHKA

SEQ ID NO: 17907 - protein, 336 aa, Pseudomonas fluorescens PfO-1
MSRVTLSRYLIEQTRSNNTPADLRFLIEVVARACKEISHAVSKGALGGVLGSMGTENVQGEVQKKLDVLSNEILLEANEWGGHLAGMASEEMDNAYQIPGKYPKGAYLLVFDPLDGSSNIDINAPVGTIFSVLRCPNEYLSQNEALDEKAFLQPGTQQVAAGYAIYGPQTMLVLTLGHGVKGFTLDREMGSFVLTHEDITIPESTQEFAINMSNQRHWEAPVQRYVSELLAGEEGPLKKNYNMRWVAAMVADVHRILTRGGLFMYPRDSREPSKPGKLRLMYEANPMSFLVEQAGGASTDGHQRILDIKPEGLHQRVAVFLGSKEEVARATAYHKE

SEQ ID NO: 17908 - protein, 338 aa, Desulfovibrio desulfuricans G20
MRQVTVTEHLLLHQTKSPAATGQFTALLYDLILAAKIISKSVNKAGLLDVLGGTGQVNVQGEHVQKLDEYANRVLIHRMERTGVLCAMASEENADLIRVPERFEAGDYILIFDPLDGSSNIDVNINVGTIFSILKRKPGASGSKDVTLGDVLQSGVEQVAAGYFLYGPSTMLVYSSGQGVHGFTLDPSVGEFLLSHPDIRYPEQGRIYSVNESYWHYWDEPTREVVSYFKGPDNPLGKPYSLRYVGSLVADFHRNLFYGGIFMYPMDYRLPEKPQGKLRLMCEASPLAFLAEQAGGRATDGTKRILDIVPGELHQRVPLFIGSAGDVDAVEAIYRRHS

SEQ ID NO: 17909 - protein, 336 aa, Pseudomonas aeruginosa PAO1
MSRVTLSRYLIEQTRSHNTPADLRFLIEVVARACKEISHAVSKGALGGVLGSMGTENVQGEVQKKLDVMSNEILLEANEWAGNLAGMASEEMDHPYQIPGRYPKGAYLLVFDPLDGSSNIDVNVSVGTIFSVLRCPNEYLNQNDTLREEAFLQPGTTQVAAGYAIYGPQTMLMLTLGNGVKGFTLDRELGSFVLTHDNISVPESTAEFAINMSNQRHWEAPVKRYVEELLAGKEGPLGKNYNMRWIASMVADVHRILTRGGVFMYPRDAREPEKPGKLRLMYEANPMSFIIEQAGGAATNGTQRILDIKPENLHQRVAVFLGSKQEVERITGYHAE

SEQ ID NO: 17910 - protein, 325 aa, Shewanella oneidensis MR-1
MQTLAQHLTSKAVNESLAQLILTLADTSKAISHAVRHGALAGVLGATEQENVQGETQKKLDIITNDMLKDALKADGTVRGLASEEEDHVVEVSANGQYLVCFDPLDGSSNIDINSLVGTIFSVLPAPQGELTEASFLQSGRNQLAAGYVLYGPSTMLALTTGQGVQLFTLHPETNEFLLTNATMSISPDTSEFAINMSNQRFWEAPMQTYIADLLLGKIGPREKSFNMRWIAAMVGDVHRVLSRGGIFTYPTDNKDPKKPYKLRLMYEANPMAFLVEQAGGKASTGYETILDIQPTQIHQRVAVILGSANEVDACLSYHGIDSRK

SEQ ID NO: 17911 - protein, 337 aa, Yersinia pestis CO92
MKTLGEFIVEKQLDFSHATGELTALLSAIKLGAKIIHRDINKAGLVDILGASGVSNIQGEDQMKLDLFANEKLKAALKARGEVAGIASEEEDDIVIFDGGRAENAKYVVLMDPLDGSSNIDVNVSVGTIFSIYRRITPFGTPITEEDFLQPGTKQVTAGYVVYGSSTMLVYTTGYGVHAFTYDPSLGVFCLSHEKVRYPATGCMYSINEGNYIKFPLGVKKYIKYCQEQDEATKRPYTSRYIGSLVADFHRNLLKGGIYIYPSTASHPQGKLRLLYECNPMAFLAEQAGGKATDGVNRILDIVPEKLHQRAPFFVGTKSMVEDAEGFIAKFPDEEAK

SEQ ID NO: 17912 - protein, 338 aa, Vibrio vulnificus CMCP6
MSGMRTLGEFIVEKQADFPHASGDLSSLLSSIRLAAKIVNREINKAGLVDITGAAGVENIQGEVQQKLDVYANEKFKSALEARDQVCGVASEEEDEAVAFNKELNKNAKYVVLMDPLDGSSNIDVNVSVGTIFSIYRRVSPIGTPPTQEDFLQPGHKQVAAGYIIYGSSTMLVYTTGNGVNGFTYDPSLGTFCLSHENMMIPQNGNIYSINEGNYIRFPMGVKKYIKYCQENVPEDGRPYTSRYIGSLVADFHRNLLKGGIYLYPSTQSHPQGKLRLLYECNPMAFLIEQAGGLASDGVNRILDLKPTELHQRVPFFVGSTNMVKKVEEFLEVYRDEA

SEQ ID NO: 17913 - protein, 336 aa, Pseudomonas syringae pv. tomato str. DC3000
MSRVTLSRYLIEQTRSNNTPADLRFLIEVVARACKEISHAVSKGALGGVLGSMGTENVQGEVQKKLDVISNEILLEANEWGGHLAGMASEEMDNAYQIPGKYPKGAYLLVFDPLDGSSNIDINAPVGTIFSVLRCPNEYLSQNEALNEKAFLQPGTEQVAAGYAIYGPQTMLVLTLGDGVKGFTLDREMGSFVLTHEDITIPETTQEFAVNMSNQRHWEAPVQRYVSELLAGEDGPLKKNYNMRWVAAMVADVHRILTRGGLFMYPRDSREPSKPGKLRLMYEANPMSFLVEQAGGASTDGHQRILDIQPEGLHQRVAVYLGSKEEVERATAYHKE

SEQ ID NO: 17914 - protein, 338 aa, Vibrio parahaemolyticus RIMD 2210633
MSGMRTLGEFIVEKQADFPHASGDLSSLLASIRLAAKIVNREINAAGLGDITGAVGTENVQGEAQQKLDVYANDKFKAALEARDQVCGVASEEEDEAVAFNKELNQNAKYVVLMDPLDGSSNIDVNVSVGTIFSIYRRVSPIGTPATEEDFLQPGHKQVAAGYVIYGSSTMLVYTTGNGVNGFTYDPSIGSFCLSHENMMIPEDGKIYSINEGNYIRFPQGVKKYIKYCQENVPEDGRPYTSRYIGSLVADFHRNLLKGGIYLYPSTQSHPQGKLRLLYECNPMAFLIEQAGGIASDGVNRIMDIKPTELHQRVPFFVGSKNMVRKVEEFLELHRDEE

SEQ ID NO: 17915 - protein, 345 aa, Bradyrhizobium japonicum USDA 110
MTGQLRLDDHLQRYSETAPHALAVATAVDAIAAAAIEIADLIGAGDLADASGLTTGRNSDGDVQRDLDVQADAILRRCLGKLSIAALASEEMREPQIGDRAARICVAIDPLDGSSNIDINMTVGTIFSILPAPDDLALAFHQRGSAQFAAGFVTYGPQTSLVLTLGDGVDIFTLDRKAGCFRLARSAIQISEAGEEFAINASNRRHWDPPVRAFIDECLAGVEGPANHDFNMRWVGSLVAEAYRILTRGGVFLYPSDARPGYGDGRLRLTYEAHPMAYIIEQAGGSASTGRERILDLSAQSLHQRVPLIMGSSNEVRRVEELHCDPLLVASISAPLFARRGFFRL

SEQ ID NO: 17916 - protein, 340 aa, Brucella melitensis 16M
MTLVGNFSPLVLVGDSDRVEAETVGAYLDGWAGHDKVRLATANAIKAILSGAGRLVGRIARGYLPGDPGKLVGVNSDQDQQKSIDVGSHNLFVELLIAAGVASILSEEADLPVAGKADGLVAVAIDPLDGSGNVGLGAPLGTIFSIFPADVEEPFLQPGNRQIAAGYVSYGNSVDLGFSVGEGVIFATLDPVSGQFHITRRNVKLPERTSDLAFNASVQRHLSAGMQAYVNDAFLGKDGPRGRNFNMRWLGAAVGDMHRIMQRGGLFFYVNDSRPGYEKGRLRLVYEANPIAFLAREAGGKATDGSRPILDIVPQTYHERSALVFGVAEEVDILGEYFVK

SEQ ID NO: 17917 - protein, 364 aa, Xanthobacter flavus
MLEPNADHRAAVAQAAGVAASRITLTVMLDEWAGADARRRAVADTVCALATGCASLAAAIAEGPLAGDLARTLSSGEAGEGQKALDVISNDIVIGALKAAPVAAVASEENDAPVLLDPTAPLLVAIDPLDGSSNIDTDISVGTIFAVFPRPEGADASEPSAFLQNGRDMLAAGYVIYGPHTAMMLTLGAGTWHFALDRAGLFRLVDAEVKVKEGAAEFAINMSNYHHWDVPVRDYVDDCLAGKKGPRERDFNMRWVASMVADAHRIFQRGGIYLYPGDGRKGYTHGRLRLLYEAFPVAFLMEQASGSATDGRGAILDLSATGLHQRVPFIFGSRDEVARVSRYHLEPNGHGERSPLFARRGLFI

SEQ ID NO: 17918 - protein, 314 aa, Geobacter metallireducens
MPFSEPGKTKFQVDLRRHLRNQGICDNLVHLICEIAEASKYVINAVRTGDLGVAGTSNLYGEEQLALDVLSDRIIKKRLIHSGVVCNIASEEMDEIFQAQADADGLYSVAYDPLDGSSLVDVNLAVGTIVSIYEGCNLLQKGRNQVAALYILYGPRVSMVYSVGRGVHEFTMNHLMEFTLSRENIVMQEEGNIYAPGGLRNKYQEGTEQFVRYLEEKGAKLRYSGGFVPDINQVIMKGKGIFMYPALNGSPNGKLRLLFELNAMAYLVENAGGAATDGKQPILDLEPHSLDQRAPVYIGCKADVVKAMEFVSRN

SEQ ID NO: 17919 - protein, 355 aa, Kluyveromyces lactis
MAGIKHRRDSAESINTDIITLSRFILDQQHLSAKNATGEFSMLLNSLQFAFKFISQTIRRAELVNLIGLAGASNSTGDQQKKLDVLGDEIFINAMKASGNVKVLVSEEQEDLIVFRNSPGKYAVCCDPIDGSSNLDAGVSVGTIVSLFKIHENQNGNSGEEDSEGTINDVARCGREMVAACYTMYGASTHLVLTTGAGVNGFTLDNNLGEFILTYPELRLPEQKSIYSINEGNTCYWEPTIADFIAKLKENSEENNGKPYSARYIGSMVADVHRTLLYGGLFSYPGDKKNPNGKLRLLYEAFPMAFLVEQAGGKAVNDRGERILDLVPQHIHDKSSIWLGSSGDVDKYLKHIGKL

SEQ ID NO: 17920 - protein, 344 aa, Nitrobacter vulgaris
MSQELTLQQRMDGEAGSDPLRQAVKEAVAALARAAVDISDLTCRGALAGITGQAQGRNTDGDIQKDLDVRADQIIRDALGKLPIAALASEEMADLDILNPAAPICVAFDPLDGSSNINTNMSVGTIFSIMPTPSDVNAAFRQAGSAQLAAGFVVYGPQTSLVLTLGRGVDIFTLDRADRVFKLTGSSVQIPTDANEFAINASNRRHWDLPVRAYIDECLAGADGPCGKNFNMRWIGSLVAEAFRILIRGGIFLYPGDARDGYEEGRLVVYEAHPMAFIVEQAGGGASTGRKRVLDIVPDSLHQRVPLIMGSIKNVQRLEHMHTVPDVALEANAPLFGNRGLFRV

SEQ ID NO: 17921 - protein, 359 aa, Hydrogenophilus thermoluteolus
MSWAHTPTLTQYLIEERRRYPQASGDFNALILDMARACKAIARQVAYGALAKSNHAVTTTINVQGEEQKPLDVISNECFMRLTEWGGYLAAMASEEMDEPYLIPEQYPRGRYLLLFDPLDGSSNIDVNVSVGSIFSVLRAPEGKTEITVDDFLQPGTQQVAAGYAIYGPTTMLVLTVGRGVVGFTLDPDFGEFMLTHPNIRIPESTKEFAINTSNARFWEPPVKRYVDECLKGKTGPRGKDFNMRWVASLVAETHRILSRGGVFLYPRDNKEPKKPGRLRLLYECNPIGMIVEQAGGRASTGYGPVLEVQPTELHQRIGFVFGSREEVERIEQYHNDPDASPVDLPLFAERTLFRDETL

SEQ ID NO: 17922 - protein, 338 aa, Ralstonia solanacearum
MKRINLTRYLIEEQREHNTIPAELRLLLEVVARACKAISHSVNKGALAGVLGSAGTGNVQGETQQKLDVIANEVLLEANEYGGNLAAMASEEMESFYEIPHRYPKGEYLLLFDPLDGSSNIDVNVSIGTIFSVLHMPKPGQTVTEADFMQPGVRQVAAGYAVYGPQTTLVLTVGNGVHMFTLDREVGSFILTNRDVKIPADTKEFAINMSNMRHWAPPVRRYIDECLAGTEGPRGKDFNMRWIASMVADVHRILTRGGIFMYPWDKREPGKAGKLRLMYEANPMAFLVEQAGGAATNGHQRILEIQPEKLHQRVAVILGSKNEVDRVTQYHREAQQTA

SEQ ID NO: 17923 - protein, 337 aa, Azotobacter vinelandii
MSRVTLSRYLIEQTRSHNTPADLRFLIEVVARACKEISHAVSKGALGGVLGSMGTENVQGEVQKKLDVMSNEILLEANEWGGHLAGMASEEMDSAYQIPGKYPKGAYLLVFDPLDGSSNIDVNVSVGTIFSVLRCPDQYLTQNDSLNEQAFLQPGTQQVAAGYAIYGPQTMLMLTLGNGVKGFTLDRELGSFVLTHDNLCVPETTAEFAINMSNQRHWEPPVKRYVDELLAGKTGPLDKDYNMRWIASMVADVHRILTRGGIFMYPRDAREPSKPGKLRLMYEANPMSFIIEQAGGAATNGTQRILDIQPESLHQRVAVFLGSKAEVERITDYHLEG

SEQ ID NO: 17924 - protein, 415 aa, Spinacia oleracea
MASIGPATTTAVKLRSSIFNPQSSTLSPSQQCITFTKSLHSFPTATRHNVASGVRCMAAVGEAATETKARTRSKYEIETLTGWLLKQEMAGVIDAELTIVLSSISLACKQIASLVQRAGISNLTGIQGAVNIQGEDQKKLDVVSNEVFSSCLRSSGRTGIIASEEEDVPVAVEESYSGNYIVVFDPLDGSSNIDAAVSTGSIFGIYSPNDECIVDSDHDDESQLSAEEQRCVVNVCQPGDNLLAAGYCMYSSSVIFVLTIGKGVYAFTLDPMYGEFVLTSEKIQIPKAGKIYSFNEGNYKMWDDKLKKYMDDLKEPGESQKPYSSRYIGSLVGDFHRTLLYGGIYGYPRDAKSKNGKLRLLYECAPMSFIVEQAGGKGSDGHQRILDIQPTEIHQRVPLYIGSVEEVEKLEKYLA

SEQ ID NO: 17925 - protein, 358 aa, Spinacia oleracea
AAVGEAATQTKARTRSKYEIETLTGWLLKQPMAGVIDAELTIVLSSISLACKQIASLVQRAGISNLTGIQGAVNIQGEDQKKLDVVSNEVFSSCLRSSGRTGIIASEEEDVPVAVEESYSGNYIVVFDPLDGSSNIDAAVSTGSIFGIYSPNDECIVDSDHDDESQLSAEEQRCVVNVCQPGDNLLAAGYCMYSSSVIFVLTIGKGVYAFTLDPMYGEFVLTSEKIQIPKAGKIYSFNEGNYKMWPDKLKKYMDDLKEPGESQKPYSSRYIGSLVGDFHRTLLYGGIYGYPRDAKSKNGKLRLLYECAPMSFIVEQAGGKGSDGHQRILDIQPTEIHQRVPLYIGSVEEVEKLEKYLA

SEQ ID NO: 17926 - protein, 335 aa, Agrobacterium rhizogenes
MTITPDIELGAYLLQRKIDPALASLIESIAASATVVADHLKEAAFQNHIGSAGTTNVQGEDQKLLDVLADRVFRETCGEAVSLAAYVSEEAEDVTWLKAPAAGDLILYVDPLDGSSNLEVNLSVGSIFAVSQVQADGDTNVLRKGRDYLCAGYAIYGPSTLFVITFGLGVVGFTLDPSDGQFKLTNARMRVPTETTEFAVNSSRQRFWDEPIRRYVDECLAGSAGPRGQDFNMRWTASMVADVHRILTRGGVFLYPADDSNRRAGGKLRLMYEANPMAFLIEAAGGAASTGTEDILRIQPQAHHQRVSVLLGSSNEIQRLVQFHQIHHSQEEIGS

SEQ ID NO: 17927 - protein, 328 aa, Wigglesworthia glossinidia endosymbiont of Glossina brevipalpis
MISLREFIFSNNVNKYISKEDLYSLFIIIELTSKIIHNYIILNNITRIKQEKIKKNIHGEHQTKLDLLSNKKFIDMIKTHYNIAGIASEEEAKFISFKQEKYGKYIFLIDPLDGSLSADCNTPVGTIFSLYCRVTPIGVEISEKDFLQPGNKQILSGYILYGSSTILVFTVKSGVHIFTYHPFFSTFFLSKKNFNYPKKNNIYSINEANYNNFSLGIKKYIMSCKSNNNISSRYTGSLVADFHRNLIKGGIYLYPNTKIYKHGKLRLMYECNPIALISSQANGSSSDGNINILDINPKILHQCSPFFVGTKSMVKLVNKFILGYYNHN

SEQ ID NO: 17928 - protein, 417 aa, Arabidopsis thaliana
MAASAATTTSSHLLLSSSRHVASSSQPSILSPRSLFSNNGKRAPTGVRNHQYASGVRCMAVAADASETKTAARKKSGYELQTLTGWLLRQEMKGEIDAELTIVMSSISLACKQIASLVQRAGISNLTGVQGAINIQGEDQKKLDVISNEVFSNCLRSSGRTGIIASEEEDVPVAVEESYSGNYVVVFDPLDGSSNIDAAVSTGSIFGIYSPNDECIVDDSDDISALGSEEQRCIVNVCQPGNNLLAAGYCMYSSSVIFVLTLGKGVFSFTLDPMYGEFVLTQENIEIPKAGRIYSFNEGNYQMWDDKLKKYIDDLKDPGPTGKPYSARYIGSLVGDFHRTLLYGGIYGYPRDAKSKNGKLRLLYECAPMSFIVEQAGGKGSDGHSRVLDIQPTEIHQRVPLYIGSTEEVEKLEKYLA

SEQ ID NO: 17929 - protein, 417 aa, Arabidopsis thaliana
MAATAATTTSSHLLLSSSRHVASSSQPSILSPRSLFSNNGKRAPTGVRNHQYASGVRCMAVAADAAETKTAARKKSGYELQTLTGWLLRQEMKGEIDAELTIVMSSISLACKQIASLVQRAGISNLTGVQGAVNIQGEDQKKLDVISNEVFSNCLRSSGRTGIIASEEEDVPVAVEESYSGNYVVVFDPLDGSSNIDAAVSTGSIFGIYSPNDECIVDDSDDISALGSEEQRCIVNVCQPGNNLLAAGYCMYSSSVIFVLTLGKGVFSFTLDPMYGEFVLTQENIEIPKAGRIYSFNEGNYQMWDDKLKKYIDDLKDPGPTGKPYSARYIGSLVGDFHRTLLYGGIYGYPRDAKSKNGKLRLLYECAPMSFIVEQAGGKGSDGHSRVLDIQPTEIHQRVPLYIGSTEEVEKLEKYLA

SEQ ID NO: 17930 - protein, 417 aa, Brassica napus
MAATAATTSSSHLLLSSSRHVAASSQPQILFQRSLFSGGKRSAAGKNHHASGGVRCMAVAADASAEAKPAAARKKSGYELQTLTGWLLRQEQKGEIDTELTIVMSSIAMACKQIASLVQRAGISNLTGVQGAVNIQGEDQKKLDVVSNEVFSNCLRSSGRTGIIASEEEDVPVAVEESYSGNYIVVFDPLDGSSNIDAAVSTGSIFGIYSPNDECIVDDSDDISSLGSEEQRCIVNVCQPGNNLLAAGYCMYSSSVIFVLTLGKGVFSFTLDPMYGEFVLTQENIEIPKAGKIYSFNEGNYQMWDEKLKKYIDDLKDPGPSGKPYSARYIGSLVGDFHRTLLYGGIYGYPRDAKSKNGKLRLLYECAPMSFIVEQAGGKGSDGHQRVLDIQPTEIHQRVPLYIGSKEEVEKLEKYLA

SEQ ID NO: 17931 - protein, 411 aa, Brassica napus
MAATAGATPSSHLLLSSSRHVAASPQPRILFPSLSGKRVAVGKNHHATGVRCMAVAADATAETKPAAKKKSGYELQTLTSWLLRQEMKGEIDTELTIVMSSIAMACKQIASLVQRAGISNLTGVQGAVNIQGEDQKKLDVVSNEVFSNCLRSSGRTGIIASEEEDVPVAVEESYSGNYVVVFDPLDGSSNIDAAVSTGSIFGIYSPNDECLPDSDDTSALGSEEERCIVNVCQPGNNLLAAGYCMYSSSVIFVLTLGKGVFAFTLDPMYGEFVLTQENIEIPKAGKIYSFNEGNYQMWDENLKKYIDDLKDPGPSGKPYSARYIGSLVGDFHRTLLYGGIYGYPRDAKSKNGKLRLLYECAPMSFIVEQAGGKGSDGHHRVLDIQPTEIHQRVPLYIGSKEEVEKLEKYLA

SEQ ID NO: 17932 - protein, 349 aa, Sinorhizobium meliloti
MSGATLEAYLASCTARGDDLSRDVAAVIQRLAKAALDIRKLVNQGALGTAFNGTHGGSNTDGDLQKDLDILCDDQFLTCLQGAPVACYASEELENPVLLDPSARLAVAIDPLDGSSNIDNNVSIGTIFSVLPAAKGPDVDPSQSFLQPGNRQLAAGFFIYGPQTALVLSLGKGTEIFIFSSRLGCFVEAYKSAIIPERAHEFAINMSNYRHWEEAIRLYVDDCLAGSEGPRERDFNMRWIASLVAETYRILIRGGIFLYPADGRKGYSQGRLRLVYEANPIAFIIENAGGAATTSIDRILDLVPENLHQRVPLVFGSRREVARITRYHVDPNMIGERAPLFGKRGLFRA

SEQ ID NO: 17933 - protein, 349 aa, Sinorhizobium meliloti
MSGATLEAYLASCTTHGDELSRDVAAVIQRLAKAALDIRKLVNQGALGTVFNGMHSGSNTDGDVQKDLDILCDDQFLSCLQGAPVACYASEELENPVLLDPAARLAVAIDPLDGSSNIDNNISIGTIFSVLPAAKGPDVDPSHSFLQPGNRQLAAGFFVYGPQTALVLSLGRGTDIFIFSSRLGCFVDAYKSVGIPDRANEFAINMSNYRHWEEAIRLYVDDCLAGSEGPRERDFNMRWIASLVAEAYRILVRGGIFLYPADSRKGYSHGRIRLVYEANPIAFIVENAGGSATTSVDRILDLVPESLHQRVPLVFGSRREVGRITRYHVDPNMIGERAPLFGKRGLFRA

SEQ ID NO: 17934 - protein, 202 aa, Sinorhizobium meliloti
MSGATLEAYLASCTARGDDLSRDVAAVIQRLAKAALDIRKLVNQGALGTAFNGTHGGSNTDGDLQKDLDILCDDQFLTCLQGAPVACYASEELENPVLLDPSARLAVAIDPLDGSSNIDNNVSIGTIFSVLPAAKGPDVDPSQSFLQPGNRQLAAGFFIYGPQTALVLSLGKGTEIFIFSSRLGCFVEAYKSAIIPERAHEF

SEQ ID NO: 17935 - protein, 410 aa, Glycine max
MVAMAAATASSQLIFSKPRSPSRLCPFQLCVFDTKQVLSSSSGRRRHVGGSGVRCMAVGEAATTETKKRSGYELQTLTNWLLKQEQAGVIDAELTIVLSSISMACKQIASLVQRANISNLTGVQGAVNVQGEDQKKLDVVSNEVFSNCLRSSGRTGIIASEEEDVPVAVEESYSGNYIVVFDPLDGSSNIDAAVSTGSIFGIYSPNDECLADIGDDPTLDTTEQRCVVNVCQPGSNLLAAGYCMYSSSIIFVLTLGNGVFVFTLDPMYGEFVLTQENLQIPRAGKIYAFNEGNYQLWDDKLKKYIDDLKDPGPSGKPYSARYIGSLVGDFHRTLLYGGIYGYPRDKKSKNGKLRLLYECAPMSFIVEQAGGKGSDGHQRILDIQPTEIHQRVPLYIGSVEEVEKVEKYLA

SEQ ID NO: 17936 - protein, 408 aa, Glycine max
MVAMAAATASTQLIFSKPCSPSRLCPFQLCVFDTKQVLSSGRRRHVGGSGVRCMAVGEAATTGTKKRSGYELQTLTNWLLKQEQAGVIDAELTIVLSSISMACKQIASLVQRANISNLTGVQGAVNVQGEDQKKLDVVSNEVFSNCLRSSGRTGIIASEEEDVPVAVEESYSGNYIVVFDPLDGSSNIDAAVSTGSIFGIYSPNDECLADIGDDPTLDTTEQRCVVNVCQPGSNLLAAGYCMYSSSIIFVLTLGNGVFVFTLDPMYGEFVLTQENLQIPRAGKIYAFNEGNYQLWDDKLKKYIDDLKDPGPSGKPYSARYIGSLVGDFHRTLLYGGIYGYPRDKKSKNGKLRLLYECAPMSFIVEQAGGKGSDGHQRILDIQPTEIHQRVPLYIGSVEEVEKVEKYLA

SEQ ID NO: 17937 - protein, 414 aa, Glycine max
  unsure (1)..(414): unsure at all Xaa locations
MVAMAAATASTQLIFSKPRSPSRLCPFQLCVFDTKQVLSSSSGRRRHVGGSGVRCMAVGEAATTGTKKRSGYELQTLTNWLLKQEQAGVIDAELTIVLSSISMACKQIASLVQRANISNLTGVQGAVNVQGEDQKKLDVVSNEVFSNCLRSSGRTGIIASEEEDVPVAVEESYSGNYIVVFDPLDGSSNIDAAVSTGSIFGIYSPNDECLADIGDDPTVSLLDTTEQRCVVXNVCQPGSNLLAAGYCMYSSSIIFVLTLGNGVFVFTLDPMYGEFVLTQENLQIPRAGKIYAFNEGNYQLWDDKLKKYIDDLKDPGPSGKPYSARYIGSLVGDFHRTLLYGGIYGYPRDKKSKNGKLRLLYECAPMSFIVEQAGGKGSDGHQRILDIQPTEIHQRVPLYIGSVEEVEKVEKYLA

SEQ ID NO: 17938 - protein, 412 aa, Glycine max
MELFATTMVAMAAATASTQLIFSKPCSPSRLCPFQLCVFDTKQVLSSGRRRHVGGSGVRCMAVGEAATTGTKKRSGYELQTLTSWLLKQEQAGVIDAELTIVLSSISMACKQIASLVQRANISNLTGVQGAVNVQGEDQKKLDVVSNEVFSNCLRSSGRTGIIASEEEDVPVAVEESYSGNYIVVFDPLDGSSNIDAAASTGSNFWIYSPNDECLADIDDDPTLDTTEQRCIVNVCQPGSNLLAAGYCMYSSSIIFVLTLGNGVFVFTLDPMYGEFVLTQENLQIPRAGKIYAFNEGNYQLWDEKLKKYIDDLKDPGQSGKPYSARYIGSLVGDFHRTLLYGGIYGYPRDKKSKNGKLRLLYECAPINFIVEQAGGKGTDGLQVLRLQGTEIHQRVPLYIGEEVEKVEKYLA

SEQ ID NO: 17939 - protein, 402 aa, Glycine max
MAAATASTQLIFSKPCSPSRLCPFQLCVFDTKQVLSSGRRRHVGGSGVRCMAVGEAATTGTKKRSGYELQTLTSWLLKQEQAGVIDAELTIVLSSISMACKQIASLVQRANISNLTGVQGAVNVQGEDQKKLDVVSNEVFSNCLRSSGRTGIIASEEEDVPVAVEESYSGNYIVVFDPLDGSSNIDAAASTGSNFWIYSPNDECLADIDDDPTLDTTEQRCIVNVCQPGSNLLAAGYCMYSSSIIFVLTLGNGVFVFTLDPMYGEFVLTQENLQIPRAGKIYAFNEGNYQLWDEKLKKYIDDLKDPGQSGKPYSARYIGSLVGDFHRTLLYGGIYGYPRDKKSKNGKLRLLYECAPINFIVEQAGGKGTDGLQVLRLQGTEIHQRVPLYIGEEVEKVEKYLA

SEQ ID NO: 17940 - protein, 407 aa, Pisum sativum
MAAATASSQLIFSKPYSPSRLCPFQLCVFDAKSVLSSSRRKHVNGSGVRCMAVKEATSETKKRSGYEIITLTSWLLQQEQKGIIDAELTIVLSSISMACKQIASLVQRANISNLTGTQGAVNIQGEDQKKLDVISNEVFSNCLRSSGRTGIIASEEEDVPVAVEESYSGNYIVVFDPLDGSSNLDAAVSTGSIFGIYSPNDECLPDFGDDSDDNTLGTEEQRCIVNVCQPGSNLLAAGYCMYSSSVIFVLTIGKGVFVFTLDPLYGEFVLTQENLQIPKSGKIYSFNEGNYKLWDENLKKYIDDLKEPGPSGKPYSARYIGSLVGDFHRTLLYGGIYGYPRDKKSKNGKLRLLYECAPMSFIVEQAGGKGSDGHQRVLDIQPTEIHQRVPLYIGSTEEVEKVEKYLA

SEQ ID NO: 17941 - protein, 381 aa, Pisum sativum
CVFDAKSVLSSSRRKHVNGSGVRCMAVKEATSETKKRSGYEIITLTSWLLQQEQKPIIDAELTIVLSSISMACKQIASLVQRANISNLTGTQGAVNIQGEDQKKLDVISNEVFSNCLRSSGRTGIIASEEEDVPVAVEESYSGNYIVVFDPLDGSSNLDAAVSTGSIFGIYSPNDECLPDFGDDSDDNTLGTEEQRCIVNVCQPGSNLLAAGYCMYSSSVIFVLTIGKGVFVFTLDPLYGEFVLTQENLQIPKSGKIYSFNEGNYKLWDENLKKYIDDLKEPGPSGKPYSARYIGSLVGDFHRTLLYGGIYGYPRDKKSKNGKLRLLYECAPMSFIVEQAGGKGSDGHQRVLDIQPTEIHQRVPLYIGSTEEVEKVEKYLA

SEQ ID NO: 17942 - protein, 357 aa, Pisum sativum
MAVKEATSETKKRSGYEIITLTSWLLQQEQKGIIDAELTIVLSSISMACKQIASLVQRANISNLTGTQGAVNIQGEDQKKLDVISNEVFSNCLRSSGRTGIIASEEEDVPVAVEESYSGNYIVVFDPLDGSSNLDAAVSTGSIFGIYSPNDECLPDFGDDSDDNTLGTEEQRCIVNVCQPGSNLLAAGYCMYSSSVIFVLTIGKGVFVFTLDPLYGEFVLTQENLQIPKSGKIYSFNEGNYKLWDENLKKYIDDLKEPGPSGKPYSARYIGSLVGDFHRTLLYGGIYGYPRDKKSKNGKLRLLYECAPMSFIVEQAGGKGSDGHQRVLDIQPTEIHQRVPLYIGSTEEVEKVEKYLA

SEQ ID NO: 17943 - protein, 407 aa, Pisum sativum
MAAATASSQLIFSKPYSPSRLCPFQLCVFDAKSVLSSSRRKHVNGSGVRCMAVKEATSETKKRSGYEIITLTSWLLQQEQKGIIDAELTIVLSSISMACKQIASLVQRANISNLTGTQGAVNIQGEDQKKLDVISNEVFSNCLRSSGRTGIIASEEEDVAVAVEESYSGNYIVVFDPLDGSSNLDAAVSTGSIFGIYSPNDECLPDFGDDSDDNTLGTEEQRCIVNVCQPGSNLLAAGYCMYSSSVAFVLTIGKGVFVFTLDPLYGEFVLTQENLQIPKSGEIYSFNEGNYKLWDENLKKYIDDLKEPGPSGKPYSARYIGSLVGDFHRTLLYGGIYGYPRDKKSKNGKLRLLYECAPMSFIVEQAGGKGSDGHQRVLDIQPTEIHQRVPLYIGSTEEVEKVEKYLA

SEQ ID NO: 17944 - protein, 357 aa, Pisum sativum
MAVKEATSETKKRSGYEIITLTSWLLQQEQKPIIDAELTIVLSSISMACKQIASLVQRANISNLTGTQGAVNIQGEDQKKLDVISNEVFSNCLRSSGRTGIIASEEEDVPVAVEESYSGNYIVVFDPLDGSSNLDAAVSTGSIFGIYSPNDECLPDFGDDSDDNTLGTEEQRCIVNVCQPGSNLLAAGYCMYSSSVIFVLTIGKGVFVFTLDPLYGEFVLTQENLQIPKSGKIYSFNEGNYKLWDENLKKYIDDLKEPGPSGKPYSARYIGSLVGDFHRTLLYGGIYGYPRDKKSKNGKLRLLYECAPMSFIVEQAGGKGSDGHQRVLDIQPTEIHQRVPLYIGSTEEVEKVEKYLA

SEQ ID NO: 17945 - protein, 357 aa, Pisum sativum
MAVKEATSETKKRSGYEIITLTSWLLQQEQKGIIDAELTIVLSSISMACKQIASLVQRANISNLTGTQGAVNIQGEDQKKLDVISNEVFSNCLRSSGRTGIIASEEEDVPVAVEESYSGNYIVVFDPLDGSSNLDAAVSTGSIFGIYSPNDESLPDFGDDSDDNTLGTEEQRCIVNVCQPGSNLLAAGYCMYSSSVIFVLTIGKGVFVFTLDPLYGEFVLTQENLQIPKSGKIYSFNEGNYKLWDENLKKYIDDLKEPGPSGKPYSARYIGSLVGDFHRTLLYGGIYGYPRDKKSKNGKLRLLYECAPMSFIVEQAGGKGSDGHQRVLDIQPTEIHQRVPLYIGSTEEVEKVEKYLA

SEQ ID NO: 17946 - protein, 357 aa, Pisum sativum
MAVKEATSETKKRSGYEIITLTSWLLQQEQKPIIDAELTIVLSSISMACKQIASLVQRANISNLTGTQGAVNIQGEDQKKLDVISNEVFSNCLRRSGRTGIIASEEEDVPVAVEESYSGNYIVVFDPLDGSSNLDAAVSTGSIFGIYSPNDECLPDFGDDSDDNTLGTEEQRCIVNVCQPGSNLLAAGYCMYSSSVIFVLTIGKGVFVFTLDPLYGEFVLTQENLQIPKSGKIYSFNEGNYKLWDENLKKYIDDLKEPGPSGKPYSARYIGSLVGDFHRTLLYGGIYGYPRDKKSKNGKLRLLYECAPMSFIVEQAGGKGSDGHQRVLDIQPTEIHQRVPLYIGSTEEVEKVEKYLA

SEQ ID NO: 17947 - protein, 168 aa, Oryza sativa (indica cultivar-group)
SSNIDCGVSIGTIFGIYMIKDKENVTLEDVLQPGKNMVAAGYCMYGSSCTLVLSTGNGVNGFTLDPSLGEFILTHPDIKIPKKGKIYSVNEGNAKNWDEPTAKFVEKCKFPKDGSSPKSLRYIGSMVADVHRTLLYGGVFLYPADKKSPNGKLRVLYEVFPMSFLMEQ

SEQ ID NO: 17948 - protein, 369 aa, Oryza sativa (japonica cultivar-group)
MDHEADAYRTDLMTITRYVLNEQSRNPEARGDLTILLSHIVLGCKFVASAVNKAGLAKLIGLAGETNVQASVPGNNCHLSQFLVSEIEIGEEQKKLDVLSNEVFVKALVSSGRTCVLVSEEDEEATFVDPALRGKYCVCFDPLDGSSNIDCGVSIGTIFGIYMIKDKENVTLEDVLQPGKNMVAAGYCMYGSSCTLVLSTGNGVNGFTLDPSLGEFILTHPDIKIPKKGKIYSVNEGNAKNWDEPTAKFVEKCKFPKDGSSPKSLRYIGSMVADVHRTLLYGGVFLYPADKKSPNGKLRVLYEVFPMSFLMEQAGGQSFTGKERALDLVPTKIHERSPIFLGSFEDVEEIKGLYAAQANVIVLRPGTAS

SEQ ID NO: 17949 - protein, 408 aa, Solanum tuberosum
MAASAATATATTSYLSALDKKTPFLFALDKKTPFLCPKSSTKRRSFNGGVKCMAIETTSGFTATKKRSGYELQTLTSWLLRQEQAGVIDAELTIVISSISMACKQIASLVQRAGISNLTGVQGAVNIQGEDQKKLDVVSNEVFSNCLRSSGRTGIIASEEEDVPVAVEESYSGNYIVVFDPLDGSSNIDAAVSTGSIFGIYNPNDECLADHGDDSTLDNIEQKCIVNVCQPGTNLLAAGYCMYSSSVIFVLTLGNGVFSFNLDPMYGEFVLTQENVQIPKSGKIYSFNEGNYQLWDDKLKKYIDDLKDPGPSGKPYSARYIGSLVGDFHRTLLYGGIYGYPRDQKSKNGKLRLLYECAPMSFIVEQAGGKGSDGHQRVLDIQPTEVHQRVPLYIGSTEEVEKLEKYLS

SEQ ID NO: 17950 - protein, 234 aa, Lactuca sativa
MDHAADAFRTDLMTITRFVLNEQSKHPESRGDFSILLSHIVLGCKFVCSAVNKAGLAKLIGLAGETNVQGEEQKKLDVLSNEVFVKALVSSGRTCILVSEEDEDAIIVEPSKRGRYCVVFDPLDGSSNIDCGVSIGTIFGIYMIKDGDEAILEDVLQPGKNMVAAGYCMYGSSCTLVLSTGSGVNGFTLDPSLGEFILTHADIKIPKKGKIYSVNEGNAKNWDGPTAKFVEKCK

SEQ ID NO: 17951 - protein, 409 aa, Triticum aestivum
MAAATTTASRPLLLSRQQAAASSLQCRLPRRPGSSLFAGQGQASTPNVRCMAVVDTPSAPAVAPARKRSSYDMITLTTWLLKQEQEGVIDNEMTIVLSSISTACKQIASLVQRAPISNLTGVQGATNVQGEDQKKLDVISNEVFSNCLRWSGRTGVIASEEEDVPVAVEESYSGNYIVVFDPLDGSSNIDAAVSTGSIFGIYSPSDECHIGDDATLDEVTQMCIVNVCQPGSNLLAAGYCMYSSSVIFVLTIGTGVYVFTLDPMYGEFVLTQEKVQIPKSGKIYSFNEGNYALWDDKLKKYMDSLKEPGTSGKPYSARYIGSLVGDFHRTMLYGGIYGYPSDQKSKNGKLRLLYECAPMSFIAEQAGGKGSDGHQRVLDIMPTEVHQRVPLYVGSVEEVEKVEKFLSSE

SEQ ID NO: 17952 - protein, 409 aa, Triticum aestivum
MAAATTTTSRPLLLSRQQAAASSLQCRLPRRPGSSLFAGQGQASTPNVRCMAVVDTASAPAPAAARKRSSYDMITLTTWLLKQEQEGVIDNEMTIVLSSISTACKQIASLVQRAPISNLTGVQGATNVQGEDQKKLDVISNEVFSNCLRWSGRTGVIASEEEDVPVAVEESYSGNYIVVFDPLDGSSNIDAAVSTGSIFGIYSPSDECHIGDDATLDEVTQMCIVNVCQPGSNLLAAGYCMYSSSVIFVLTIGTGVYVFTLDPMYGEFVLTQEKVQIPKSGKIYSFNEGNYALWDDKLKKYMDSLKEPGTSGKPYSARYIGSLVGDFHRTMLYGGIYGYPSDQKSKNGKLRLLYECAPMSFIAEQAGGKGSDGHQRVLDIMPTAVHQRVPLYVGSVEEVEKVEKFLSSE

SEQ ID NO: 17953 - protein, 409 aa, Triticum aestivum; identical to SEQ ID NO: 17952

SEQ ID NO: 17954 - protein, 411 aa, Triticum aestivum
  unsure (1)..(411): unsure at all Xaa locations
MAAATTTTSRPLRLSRQQAAASSLQCRNQPLSGSRPGVDSEQASPPNVRRMAVVDSGAAPEEEQLRQRSSXDMITLTXEQEGVIENEMTIVLSSISTACKQIASLVQRAPISNLTGVQGATNVQGEDQKKLDVISNEVFSNCLRWSGRTGVIASEEEDVPVAVEESYSGNYIVXAFDPLDGSSNIHAVESTGSIFRMYSLSDECHIGDDANCRRRXTLDELTQMCIVNVCQPGSNLLAAGYCMYSSSVIFVLTIGTGVYVFTLDPMYGEFVLTQEKVQIPKSGKIYSFNEGNYALWDDKLKKYMDSLKEPGTSGKPYSARYIGSLVGDFHRTMLYGGIYGYPSDQKSKNGKLRLLYECAPMSFIAEQAGGKGSDGHQRVLDIMPTAVHQRVPLYVGSVEEVEKVEKFLSSE

SEQ ID NO: 17955 - protein, 459 aa, Zea mays
  unsure (1)..(459): unsure at all Xaa locations
SRPGLGVSQNPTQPSTRKKTTSSHHHRQQEQRGETARVYVPPGAAAAMAAAATTSSSSHLLLLSRQQAASLRCRLSFLGQPRRPGRVTAQAXXAAKDVRCMAAVDTTAASTAAAETSRYEIVTLTTWLLQQERTGAIDNEMTIVLASISTACKQIAALVQRAPISNLTGVQGAVNVQGEDQKKLDVVSNEVFSNCLKSSGRTGVIASEEEDVPVAVEQSYSGNYIVVFDPLDGSSNIDAAVSTGSIFGIYNPNDECLADXSDDNDTLDSVEQRCIVNVCQPGSNLLAAGYCMYSSSVIFVLTVGTGVYVFTLDPMYGEFLLTQEKVHIPKAGKIYAFNEGNYALWDDXKLKLYMDSLKEPGDSGKPYSARYIGSLVGDFHRTLLYGGIYGYPRDKKSKNGKLRLLYECAPMSFIVEQAGGKGSDGHQRILDITPTEIHQRVPLYIGSVEEVDKVEKFLA

SEQ ID NO: 17956 - protein, 315 aa, Zea mays
  unsure (1)..(315): unsure at all Xaa locations
XAAAATSSSAPEFGPQVQIPKAGNLTGHQGAVNVQGEDQKKLDVVSNEVFSNCLKSSGRTGVIASEEEDVPVAVEQSYSGNYIVVFDPLDGSSNIDAAVSTGSIFGIYNPNDECLADVDDNDTLDSVEQRCIVNVCQPGSNLLAAGYCMYSSSVIFVLTVGTGVYVFTLDPMYGEFVLTQEKVQIPKAGKIYAFNEGNYALWDDKLKLYMDSLKEPGDSGKPYSARYIGSLVGDFHRTLLYGGIYGYPRDKKSKNGKLRLLYECAPMSFIVEQAGGKGSDGHQRILDITPTEIHQRVPLYIGSVEEVDKVEKFLA

SEQ ID NO: 17957 - protein, 300 aa, Zea mays
  unsure (1)..(300): unsure at all Xaa locations
MAAAATTSSSSHLLLLSRQQAASLRCRLSFLGQPRRPGRVTAQAPAAKDVRCMAAVDTAASAAAAETSPKSSSSYEIVTLTTWLLQQERTGAIDNEMTIVLASISTACKQIAALVQRAPISNLTGVQGAVNVQGEDQKKLDVVSNEVFSNCLKSSGRTGVIASEEEDVPVAVEQSYSGNYIVVFDPLDGSSNIDAAVSTGSIFGIYNPNDECLADVDDNDTLDSVEQRCIVNVCQPGSNLLAAGYCMYSSSVIFVLTVGTXXVYVFTLDPMYGEFVLTQEKVQIPKAGKIYAFHEGNYAX

SEQ ID NO: 17958 - protein, 188 aa, Zea mays
  unsure (1)..(188): unsure at all Xaa locations
XQRCIVNVCQPGSTCWPPGYCMYSSSVIFVLTVGTGVYVFTLDPMYGEFVLTQEKVQIPKAGKIYAFNEGNYALWDDKLKLYMDSLKEPGDSGKPYSARYIGSLVGDFHRTLLYGGIYGYPRDKKSKNGKLRLLYECAPMSFIVEQAGGKGSDGHQRILDITPTEIHQRVPLYIGSVEEVDKVEKFLA

SEQ ID NO: 17959 - protein, 341 aa, Musa acuminata
MDHEAEAHRTDLMTITRYVLNEQSRHQESRGDFTILLSHIVLGCKFVCSAVNKAGLAKLIGLAGETNVQGGSKRKLDVLSNEVFVKALISSGRTCILVSEEDEEATFVDPSLRGKYCVVFDPLDGSSNIDCGVSIGTIFGVYMVKDKDNVTLDEVLQPGKNMLAAGYCMYGSSCTLVLSTGSGVNGFTLDPSLGEFILTHPDIKIPKKGKIYSVNEGNAKNWDGPTTKYVEKCKFPKDGDSPKSLRYIGSMVADVHRTLLYGGIFLYPADKKSPNGKLRVLYEVFPMSFLMEQAGGQAFTGKQRALDLVPTKIHQRSPIFLGSYDEVEEIKALYAAEENTA

SEQ ID NO: 17960 - protein, 333 aa, Phytophthora infestans
MANQVDHSNPITLSRFILAEKEIQGNADLSVLFTSIELACKVIASSVRRAGLTGLYGLDGSENSTGDQVKKLDVLANDIFINSLKFSTKIEVMVSEEEEKPIVVQNDSSGTKYCIAFDPLDGSSNIDCNVSTGTIFAIYQRDASSEGGYKDILQPGSKLVSAGYCMYGSSTQLVLTWGKGVHCFTLDPTIGAFMLSHQDIRIPDEPKAIYSCNEGNYAQWDSATKAFVDECKTGSKAYAARYVGSMVSDIHRTILYGGIYLYPGSTKAKDGKLRLLYECNPMSFIVEQAGGMATTGTERILDLVPTDIHQRSPIFLGCKRDVERVIALYKEHN

SEQ ID NO: 17961 - protein, 347 aa, Schizosaccharomyces pombe
MKKDLDEIDTDIVTLSSFILQEQRRYNQKHKNEEGKPCIIQEASGELSLLLNSLQFSFKFIANTIRKAELVNLIGLSGIVNSTGDEQKKLDKICNDIFITAMKSNGCCKLIVSEEEEDLIVVDSNGSYAVTCDPIDGSSNIDAGVSVGTIFGIYKLRPGSQGDISDVLRPGKEMVAAGYTMYGASAHLLLTTGHRVNGFTLDTDIGEFILTHRNMKMPLQHSIYSINEGYTAFWDEKIARFIAHLKESTPDKKPYSARYIGSMVADMHRTILYGGLFAYPCSKGNNGKLRLLYECFPMAFLVEQAGGIAVNDKGDRILDLVPKTLHGKSSIWLGSKHEVEEYINFIK

SEQ ID NO: 17962 - protein, 344 aa, Schizosaccharomyces pombe
DLDEIDTDIVTLSSFILQEQRRYNQKHKNEEGKPCIIQEASGELSLLLNSLQFSFKFIANTIRKAELVNLIGLSGIVNSTGDEQKKLDKICNDIFITAMKSNGCCKLIVSEEEEDLIVVDSNGSYAVTCDPIDGSSNIDAGVSVGTIFGIYKLRPGSQGDISDVLRPGKEMVAAGYTMYGASAHLLLTTGHRVNGFTLDTDIGEFILTHRNMKMPLQHSIYSINEGYTAFWDEKIARFIAHLKESTPDKKPYSARYIGSMVADMHRTILYGGLFAYPCSKGNNGKLRLLYECFPMAFLVEQAGGIAVNDKGDRILDLVPKTLHGKSSIWLGSKHEVEEYINFIK

SEQ ID NO: 17963 - protein, 340 aa, Pichia anomala
MSHKASDEHHVDTDLITLSRFILTSQQKVAAQATGELTLLLNSLQFAFKFIANNIRKAELVNLMGLAGASNSTGDAQKKLDVIGDEIFINAMKASGNVKVLVSEEQEDLIVFDGPGNYAVVCDPIDGSSNIDAGVSVGTIFGIYKLLPGSKGSIKDVLRPGTEMVAAGYTMYGASAHLMLTTGQGVNGFTLDASLGEFILTHPNLTISDEKHIFSVNEGNTTYWTPEVQQFIADLKKPQFNGKPYSARYIGSMVADVHRTLLYGGLFAYPADAKSKAGKLRILYECFPMAFLFEQAGGKAVTDNGDRILELKPKAIHDRSGIWLGSKVEIDRFLKATGKI

SEQ ID NO: 17964 - protein, 348 aa, Saccharomyces cerevisiae
MPTLVNGPRRDSTEGFDTDIITLPRFIIEHQKQFKNATGDFTLVLNALQFAFKFVSHTIRRAELVNLVGLAGASNFTGDQQKKLDVLGDEIFINAMRASGIIKVLVSEEQEDLIVFPTNTGSYAVCCDPIDGSSNLDAGVSVGTIASIFRLLPDSSGTINDVLRCGKEMVAACYAMYGSSTHLVLTLGDGVDGFTLDTNLGEFILTHPNLRIPPQKAIYSINEGNTLYWNETIRTFIEKVKQPQADNNNKPFSARYVGSMVADVHRTFLYGGLFAYPCDKKSPNGKLRLLYEAFPMAFLMEQAGGKAVNDRGERILDLVPSHIHDKSSIWLGSSGEIDKFLDHIGKSQ

SEQ ID NO: 17965 - protein, 355 aa, Aspergillus oryzae
MSGHENNGAPPVGKEKINTDIVTLTRFLTEEQTKVPEATGDFTLLCHALQFSFKSIAYYIRCAFLINLTGLAGSSNTTGDDQKKLDVIGNDIFISAMRGSGKCRILVSEEEEEAIIFDEHPYARYAVVCDPIDGSSNLDAGVSVGTIFGIFKLPDSVLGPENKVSPKDLLLPGTEMVASGFTMYGASAQLVITMRNGGVNGFTLENSLGEFILTHPNMTLPAKRAIYSVNEGNSSYWEEWTNAYFHSLKFPPEGQKPYSARYIGSMVADAYRTLLYGGVFAYPADKKAPKGKLRILYECAPMAMLFENAGGLAVNSRMERLLGVVPEHIHDKSGVFLGSKDEVQKIIDTYNKYKK

SEQ ID NO: 17966 - protein, 364 aa, Ralstonia eutropha
MPEVQRMTLTQFLIEERRRYPDASGGFNGLILNVAMACKEIARAVAFGALGGLHGKASTQAGEEGAVNVQGEIQQKLDVLSNTTFLRVNEWGGYLAGMASEEMEAPYQIPENYPRGKYLLVFDPLDGSSNIDVNVSVGSIFSVLRAPEGADTVTEQDFLQPGSAQVAAGYALYGPTTMLVLTVGNGVNGFTLDPNLGEFFLTHPHLRVPPDTQEFAINASNSRFWEAPVQRYIGECMAGKSGPRGKDFNMRWIASMVAEAHRILMRGGVFMYPRDTKDPAKPGRLRLLYEANPIAFLMEQAGGRASTGRQTLMSVAPGALHQRIGVIFGSRNEVERIEGYHTNQTDPDLPSPLFNERSLFRASA

SEQ ID NO: 17967 - protein, 364 aa, Ralstonia eutropha
MPEVQRMTLTQFLIEERRRYPDASGGFNGLILNVAMACKEIARAVAFGALGGLHGKASNQAGEAGAVNVQGEIQQKLDVLSNTTFLRVNEWGGYLAGMASEEMEAPYQIPDHYPRGKYLLVFDPLDGSSNIDVNVSVGSIFSVLRAPEGASAVTEQDFLQPGSAQVAAGYALYGPTTMLVLTVGNGVNGFTLDPNLGEFFLTHPNLQVPADTQEFAINASNSRFWEAPVQRYIAECMAGKSGPRGKDFNMRWIASMVAEAHRILMRGGVFMYPRDSKDPAKPGRLRLLYEANPIAFLMEQAGGRASTGRQTLMSVAPGALHQRIGVIFGSRNEVERIEGYHTDQTDPDLPSPLFNERSLFRASA

SEQ ID NO: 17968 - protein, 206 aa, Ralstonia eutropha
LQPGSAQVAAGYALYGPTTMLVLTVGNGVNGFTLDPNLGEFFLTHPHLRVPPDTQEFAINASNSRFWEAPVQRYIGECMAGKSGPRGKDFNMRWIASMVAEAHRILMRGGVFMYPRDTKDPAKPGRLRLLYEANPIAFLMEQAGGRASTGRQTLMSVAPGALHQRIGVIFGSRNEVERIEGYHTNQTDPDLPSPLFNERSLFRASA

SEQ ID NO: 17969 - protein, 159 aa, Ralstonia eutropha
LQVPADTQEFAINASNSRFWEAPVQRYIAECMAGKSGPRGKDFNMRWIASMVAEAHRILMRGGVFMYPRDSKDPAKPGRLRLLYEANPIAFLMEQAGGRASTGRQTLMSVAPGALHQRIGVIFGSRNEVERIEGYHTDQTDPDLPSPLFNERSLFRASA

SEQ ID NO: 17970 - protein, 350 aa, Neurospora crassa
MSTFTTNGAGAENDGEKVNTHIVTLTRFLTEEQVKHKEATGDFTLLCHALQFSFKSIAYYIRRATLVNLTGLAGSSNTTGDEQKKLDVISNDLFIEAMRSSGKCALLVSEEEEHVIYFKDAKNARYAVACDPIDGSSNLDAGVSVGTIFAIHKLAEDSTGTKEDILKPGTELVAAGFTMYGASAQLVITMKGGSVNGFTLDQGVGEFILTHPNMTIPRKRSIYSVNEGNSLYWEDDVKAYFNSLKETQEDSGKPYSARYIGSMVADAYRTLLYGGMFAYPADKKSPKGKLRILYECAPMAMIFENAGGQAVDSKMNRMLEVVPEHIHDKAGIFMGSYDEVEKVKKYHGKA

SEQ ID NO: 17971 - protein, 331 aa, Candida albicans
MSGPVNSVSKQMNVDTDIITLTRFILQEQQTVAPTATGELSLLLNALQFAFKFIAHNIRRAELVNLIGVSGSANSTGDVQKKLDVIGDEIFINAMRSSNNVKVLVSEEQEDLIVFPGGGTYAVCTDPIDGSSNIDAGVSVGTIFGVYKLQEGSTGGISDVLRPGKEMVAAGYTMYGASAHLALTTGHGVNLFTLDTQLGEFILTHPNLKLPDTKNIYSLNEGYSNKFPEYVQDYLKDIKKEGYSLRYIGSMVADVHRTLLYGGIFAYPTLKLRVLYECFPMALLMEQAGGSAVTIKGERILDILPKGIHDKSSIVLGSKGEVEKYLKHVPK

SEQ ID NO: 17972 - protein, 320 aa, Candida albicans
MSGPVNSVSKQMNVDTDIITLTRFILQEQQTVAPTATGELSLLLNALQFAFKFIAHNIRRAELVNLIGVSGSANSTGDVQKKLDVIGDEIFINAMRSSNNVKVLVSEEQEDLIVFPGGGTYAVCTDPIDGSSNIDAGVSVGTIFGVYKLQEGSTGGISDVLRPGKEMVAAGYTMYGASAHLALTTGHGVNLFTLDTQLGEFILTHPNLKLPDTKNIYSLNEGYSNKFPEYVQDYLKDIKKEGYSLRYIGSMVADVHRTLLYGGIFAYPTLKLRVLYECFPMALLMEQAGGSAVTIKGERILDILPKGIHDKEFYCVGIQG

SEQ ID NO: 17973 - protein, 351 aa, Leishmania major
MDVRRTPTPTTLTQYIIKSQPPHSRGDFTLLMMAIQTSVKVIEKNIRRAGMKGMLGYIAGQSANATGDHQAKLDVISNIAFKAYLLSSTSVCVLGSEEEEQMIIAESGRRGDYLIFFDPLDGSSNIDANVSVGSIWGVWRLPKDTTINSVEDANAVIRMLKGTDMVSAGYAVYGSATNLVLTSGHGVDGFTLDPNIGEFILTHPHISIPKKRSIYSVNEGNYGKWEPWFKEYIDYLKMNKTTRYSARYIGSMVGDIHRTLLYGGIFCYPKDANQVEGKLRLLYEAAPMAMIVEQAGGKAVGSNGRILEQSITRLHQRTPVYFGSRQEVDLCMAFRDRNVKTEALAPTSSKL

SEQ ID NO: 17974 - protein, 350 aa, Trypanosoma brucei
MPDYSRVPSTLMQFLMHNQPKGSRGAFTLLMMAIQTSVKVIEMNIRSAGAQGLFGHLNDGRANATGDAQAKLDVVANNAFKAYLMSSASVSFMGSEEDESIVVVSSGQQGDYVVFFDPLDGSSNIDANISIGSVWGIWCLPKGTKVRTTKDALKVLPRLSGRYLVSSGYAMYGTATNLVITTGSGVNGFTLDTTVGEFIHTHPNITLPQSRPIYSVNEGNLRHWDAWFKQYLHHIKNEGEKAYTARYIGSMVADIHRTLLYGGIFCYPGDKKKPGGKLRLMYEAAPMAFLIEQAGGLALTGDGRLLDVVPKEIHQRAPVFMGSRREVELCMSFKQKYNDRGGVQRERSKL

SEQ ID NO: 17975 - protein, 179 aa, Naegleria fowleri
NIIAAGYAMYGSCTMIVNATKRGVNGYTLDPVSGDFVLTHPEMKVPKKGSIYSVNEGNHRTWNESTKEYALLKKGSDEKKPYSLRYVGSMVADVHRTIIKGGIFMYPADKASPSGKLRLLYECNPMSYIIEKAGGKSIAGLKGSMLDIVPTKIHQREPIYLGSTADVEEVEQIMKRHGL

SEQ ID NO: 17976 - protein, 381 aa, Toxoplasma gondii
MRQCFIDEDFRLSLRFLATTSTVFFRRHCHTMAASGHPIPELGEFIIANKEKLRNTGQESEMNRLLTAIKLAAKVVNREINKAGLADILGAAGNQNVQGEEQQKLDVFANHKFIQALVNREVVCGICTEEDDDFIEVNRDAHFVMLMDPLDGSSNIDVNVSVGTIFSIYQRVSPLGSPPELRDFLQPGNAQIAAGYVLYGSSTMLVMTTGDGVNGFTLDPSLGTFFLSHRGMRFPEKARIYSVNEGNYKAFPDGVKKFLEECHDDKTGPFSLRYIGSLVSDFHRNLLQGGIYMYPPTKKDKKGKLRLLYEANPMAFLAEQAGGKATDGFDRIMDIQPSELHQRVPLMIGTARLVDRVDALMVEHSPECRLHANCLVGKNSS

SEQ ID NO: 17977 - protein, 341 aa, Caenorhabditis elegans
MASETSQFGIETDSITLQRYVLQEQRKHADASGELTALLTNMLVAIKAIASATQKAGLAKLYGIAGATNVQGEEVKKLDVLSNELMINMLKSSYTTCLLVSEENDELIEVEEQRRGKYIVTFDPLDGSSNIDCLVSIGTIFGIYKKRGDGPATVDDVLKPGKEMVAAGYALYGSATMVVLSTGDGVNGFTLDPSIGEFILTHPNMKCKEKGSIYSLNEGYAQTWSKGFAEYIRTRKYPEAGKKAMGQRYVGSMVADVHRTILNGGIFLYPPTVSAPNGKLRLLYECNPMAYIIEQAGGLATTGKERILDIQPTQIHQRAPIILGSKLDVEEALEYLAKYDN

SEQ ID NO: 17978 - protein, 346 aa, Caenorhabditis elegans
MASETSQFGIETDSITLQRYVLQEQRKHADASGELTALLTNMLVAIKAIASATQKAGLAKLYGIAGATNVQGEEVKKLDVLSNELMINMLKSSYTTCLLVSEENDELIEVEEQRRGKYIVTFDPLDGSSNIDCLVSIGTIFGIYKKRGDGPATVDDVLKPGKEMVAAGYALYGSATMVVLSTGDGVNGFTLDPSIGEFILTHPNMKCKEKGSIYSLNEGYAQTWSKGFAEYIRTRKYPEAGKKAMGQRYVGSMVADVHRTILNGGIFLYPPTVSAPNGKLRLLYECNPMAYIIEQAGGLATTGKERILDIQPTQSRYSANTDSPTRSNHSRIETRRRGGSRISCQI

SEQ ID NO: 17979 - protein, 356 aa, Nostoc punctiforme
MAAENIKMAKTPESLESSINEITDRALDRDCTTLSRHVLQQLQSFSPDAQDLSALMNRIALAGKLVARRMSRAGLMEGVLGFTGEVNVQGESVKKMDVYANDVFISVFKQSGLVCRLASEEMENPYYIPENCPIGRYTLLYDPIDGSSNTDNNLSLGSIFAIRQQEGTDSDGKATDLLANGRKQLAAGYILYGPCTMLVYTIGKGVHSFVLDPSLGEFILTEENIRIPNHGSVYSVNEGNFWQWEESIREYIRYVHRTEGYSARYSGAMVSDIHRILVQGGVFLYPGTIQNPEGKLRLLYETAPLAFLIEQAGGRATTGLVNILDVVPKKLHQRTPLIIGSKEDVAKVESFIQNGH

SEQ ID NO: 17980 - protein, 349 aa, Nostoc punctiforme
MAKTPESLESSINEITDRALDRDCTTLSRHVLQQLQSFSPDAQDLSALMNRIALAGKLVARRMSRAGLMEGVLGFTGEVNVQGESVKKMDVYANDVFISVFKQSGLVCRLASEEMENPYYIPENCPIGRYTLLYDPIDGSSNTDNNLSLGSIFAIRQQEGTDSDGKATDLLANGRKQLAAGYILYGPCTMLVYTIGKGVHSFVLDPSLGEFILTEENIRIPNHGSVYSVNEGNFWQWEESIREYIRYVHRTEGYSARYSGAMVSDIHRILVQGGVFLYPGTIQNPEGKLRLLYETAPLAFLIEQAGGRATTGLVNILDVVPKKLHQRTPLIIGSKEDVAKVESFIQNGH

SEQ ID NO: 17981 - protein, 287 aa, Halobacterium sp. NRC-1
MADVIDAVFDAIADAAPEVRAGLPDHRATRDDQNASGDTQLEADVWADDLLFDRTESIEGVNWYASEERDAVVTVGDAEGGYAVALDPLDGSSNVKSNNPCGTVVGIYDQPLPAPGSSLVAAGFVLYGPTTTMVVARDDTVRESLVSETGATTDLGPVELPADPTVYGFGGRVPDWTPAFESFVRDVEDDLKLRYGGAMIADVNQVLVYGGVFGYPGMESAPDGKLRAQFEALPIAYIVETAGGASSDGTQSLLDVAPTRLHERTPTFVGTDDVIAALDAALPDHTN

SEQ ID NO: 17982 - protein, 336 aa, Vibrio cholerae
MQKMRTLGEFIVEKQHDFPHASGELSSLLASIRLAAKIVNREINKAGLADIIGASGNDNIQGEEQQKLDLYANEKFKAALEARDQVCGVASEEEDEAVAFSKELNKNAKYVVLMDPLDGSSNIDVNVSVGTIFSIYRRVSPVGTPPTQEDFLQPGNKQVAAGYVIYGSSTMLVYTTGNGVNGFTYDPSLGTFYLSHENMRIPENGKIYSINEGNYIRFPTGVKKYIKFCQENVPEEGRPYTSRYIGSLVADFHRNLLKGGIYLYPSTQSHPNGKLRLLYECNPMAFLIEQAGGLASDGARRIMDIKPTELHQRVPFFVGSKNMVHKVETFLETYPD

SEQ ID NO: 17983 - protein, 333 aa, Haemophilus influenzae Rd
MKTLSEFIVERQAEYPNAKGELSGILSSIRLLAKIIHRDINKAGLTNILGQSGIENVQGESQMKLDLFAHNTMKAALMAREEVAGFASEEEESFIAFDTERGRNAKYIILTDPLDGSSNIDVNVSVGTIFSIYRRVSPIGSPVTLEDFMQPGNKQVAAGYIVYGSSTMLVYTTGNGVNGFTYDPSIGTFCLSHENMQMPKEGKIYSINEGQYLKFPQGVKKYIKYCQEEDKATHRPYVSRYIGSLVADFHRNLLKGGIYIYPSATNYPNGKLRLLYEGNPIAFLAEQAGGVATDGYRRILDIEPTALHERVPLFVGSEDMVKKAQEMMEEFKE

SEQ ID NO: 17984 - protein, 334 aa, Drosophila melanogaster
MTQQRPAFDSNAMTLTRFVLQEQRKFKSATGDLSQLLNSIQTAIKATSSAVRKAGIAKLHGFAGDVNVQGEEVKKLDVLSNELFINMLKSSYTTCLMVSEENENVIEVEVEKQGKYIVCFDPLDGSSNIDCLVSIGSIFAIYRKKSDGPPTVEDALQPGNQLVAAGYALYGSATAIVLGLGSGVNGFTYDPAIGEFVLTDPNMRVPEKGKIYSINEGYAADWEDGVFNYIAAKKDPAKGKPYGARYVGSMVADVHRTIKYGGIFIYPATKSAPSGKLRLLYECVPMAYLMIQAGGLASDGKISILDIVPKKIHERSPIFLGSKSDVEEALSYLK

SEQ ID NO: 17985 - protein, 333 aa, Pasteurella multocida
MKTLGQFIVEKQAEYPNAKGELSGILSSIRLVAKVIHRDINKAGLTNNIIGTSGAENVQGETQMKLDLFAHNTMKQALISREEVAGFASEEEENFVAFDTERGRNAKYVILTDPLDGSSNIDVNVAVGTIFSIYRRVSPIGTPVTLADFMQPGNRQVAAGYIVYGSSTMLVYTTGNGVNGFTYDPSLGVFCLSHENIQIPANGKIYSINEGQYLKFPQGVKKYIKYCQEEDKATHRPYTSRYIGSLVSDFHRNMLKGGIYIYPSATNYPNGKLRLLYEGNPMAFLAEQAGGMASDGYQRILDIQPTELHQRVPLFLGSKEMVEKAQDFMKTFG

SEQ ID NO: 17986 - protein, 344 aa, Porteresia coarctata
MDHEADAYRTDLMTITRYVLNEQSRNPEARGDLTILLSHIVLGCKFVASAVNKAGLAKLIGLAGETNVQGEEQKKLDVLSNEVFVKALVSSGRTCVLVSEEDEEATFVDPALRGKYCVCFDPLDGSSNIDCGVSIGTIFGIYMIKDKDNVTLEDVLQPGKNMVAAGYCMYGSSCTLVLSTGNGVNGFTLDPSLGEFILTHPDIKIPKKGKIYSVNEGNAKNWDEPTAKFVEKCKFPKDGSSPKSLRYIGSMVADVHRTLLYGGVFLYPADKKSPNGKLRVLYEVFPMSFLMEQAGGQSFTGKERALDLVPTKIHERSPIFLGSFEDVEEIKGLYAAQAKLEHNH

SEQ ID NO: 17987 - protein, 132 aa, Cyprinus carpio
PLDGSSNIDCLASIGTIFAIYRKETDDEPSEKDALRSGRNIVAAGYALYGSATMLVLSTGQGVNCFMLDPAIGEFILVDQDVRIKKKGKIYSLNEGYAAHFYPDVTEYLQKKKFPEDGSSPYGGRYVGSMVA

SEQ ID NO: 17988 - protein, 161 aa, Esox lucius
IDCLASIGTIFAIYRKTTDNEPNEKDALQSGRHIVAAGYALYGSATMMVLSTGQGVNCFMLDPSIGEFILTDKNVKIKKRGKIYSLNEGYAQHFYPDVTDYLKKKKFPEDGSAPYGGRYVGSMVADVHRTLVYGGIFLYPANVKSPKGKLRLLYECNPMAF

SEQ ID NO: 17989 - protein, 132 aa, Oncorhynchus mykiss
PLDGSSNIDCLVSIGTIFAIYRKTTDDEPNERDALQSGRHIVAAGYALYGSATMMVLSTGQGVNCFMLDPSIGEFILTDKDVKIKKRGKIYSLNEGFAQHFYPDVTEYLKKKKYPEDGSAPYGGRYVGSMVA

SEQ ID NO: 17990 - protein, 332 aa, Escherichia coli K12
MKTLGEFIVEKQHEFSHATGELTALLSAIKLGAKIIHRDINKAGLVDILGASGAENVQGEVQQKLDLFANEKLKAALKARDIVAGIASEEEDEIVVFEGCEHAKYVVLMDPLDGSSNIDVNVSVGTIFSIYRRVTPVGTPVTEEDFLQPGNKQVAAGYVVYGSSTMLVYTTGCGVHAFTYDPSLGVFCLCQERMRFPEKGKTYSINEGNYIKFPNGVKKYIKFCQEEDKSTNRPYTSRYIGSLVADFHRNLLKGGIYLYPSTASHPDGKLRLLYECNPMAFLAEQAGGKASDGKERILDIIPETLHQRRSFFVGNDHMVEDVERFIREFPDA

SEQ ID NO: 17991 - protein, 173 aa, Xenopus laevis
VLSNDLVINMLKSSYGTCALVSEENKDVIIIPKDLRGKYIVCFDPLDGSSNIDCLASIGTIFAIYRKTTDTEPCEKDALQPGRNIVAAGYALYGSATLVALSTGQGVDCFMLDPALGEFVLVDKNVRIKKKGKIYSLNEGYAKYFDPAITEYLHNKKFPQDGSSPYSSRYVGS

SEQ ID NO: 17992 - protein, 122 aa, Xenopus laevis
IDCLASIGTIFAIYKKTSEGEPAEKDALQPGRNIVAAGYALYGSATMLVLATEFGVNCFMLDPAIGEFILVNQDVKIKKKGNIYSLNEGYAKYSDEAVTEYLQKKKFPEDGSSPYGARYVGS

SEQ ID NO: 17993 - protein, 248 aa, Dendronephthya klunzingeri
LKSSFQTCLLVSEENKTVIEVELDQQGKYIVYFDPLDGSSNIECLASIGSIFGIAKKPSESPMKQADALIPGRDFVAAGYALYGSATMVVLSTGNGVNGFTLDPSIGQFVLTDQDIRIKPRGKIYSINEGYYKYFDKETKDYIESVKFPKDGKAPYGARYVGSMVSDMHRLLVYGGIFMYPANSKSPEGKLRLMYECNPMAFIVSQAGGMATNGKIDILDIVPEIHERAPIAIGSTEDVKDYLTFVKK

SEQ ID NO: 17994 - protein, 340 aa, Zaocys dhumnades
MSDQSPFETDMITLNRYVMEKGRRVKGATGELTQLLNSTLTAIKAISSAVRKAGLAHMYGIAGSVNVTGDEQKKLDVLSNSLVINMLQSSYSTCVLVSEENKEALITPKEKRGKYVVCFDPLDGSSNIDCLASIGTIFAIYKKTTEDEPSEKDALQPGRNIVAAGYALYGSATLVALSTGQGVDSFMLDPGLGEFILVEKDVKIKKKGKIYSLNEGYAKYFDPAVTEYLHKKKFPEEGKSPYGARYVGSMVADVHRTLVYGGIFLYPANQKSPKGKLRLLYECNPIAFIIEQASGIATTGTEPVLDVKPESIHQRVPFVAGSPEDVQEYLAFVQKHQKSS

SEQ ID NO: 17995 - protein, 290 aa, Helicobacter pylori 26695
MDYKCFKGKHANIVIEIISLLEKGVKKAQEILEKPDAGSYTKLENSSGDTPIKADLALDKFLEENFLSLENIKSVFSEEKETPVTKENGSYLIAYDPLDGSSVMEANFLVGTIIGIYEKDYKAQNLAASLYVVFGHKIELVVALEEVYRYSFYQNKFHFIETIVLENKGKIVASGGNQKDFSLGLKKALEGFFAENYRLRYSGSMVADVHHVLVKKGGMFSYPQKKLRKLFEVFPLALMVEKAKGEAFYFDKGVKKRLLEQSVENYHEKSECYLASQHEAHILEKYLKGE

SEQ ID NO: 17996 - protein, 290 aa, Helicobacter pylori J99
MDYKRFKGKHANIVIEIISLLEKGVKKAQEILEKPDAGSYTQLENSSGDTPIKADLALDKFLEETFLSLENVKSVFSEEKETPVTKENGSYLIAYDPLDGSSVMEANFLVGTIIGVYEKDYKAQNLVASLYVVFGHKIELVVALEEVYRYAFYQNKFHFIETIVLENKGKIIASGGNQKDFSLGLKKALEGFFAENYRLRYSGSMVADVHHVLVKKGGMFSYPQKKLRKLFEVFPLALMVEKAKGEAFYFDKGVKKRLLDQSVESYHEKSECYLASPHEAQILEKHLKGE

SEQ ID NO: 17997 - protein, 166 aa, Gallus gallus
INMLQSSYSTCVLVTEENKEALITPKEKRGKYVVCFDPLDGSSNIDCLAPIGTIFAIYKKETDDEPSEKDALQPGRKIVAAGYALYGSATLVALSTGQGVDCFMLDPALGEFILVDRDVKIKKKGKIYSLNEGYAKYFDPAMTEYLKKKKFPEDGSSPYGARYVGS

SEQ ID NO: 17998 - protein, 168 aa, Gallus gallus
ILSNDLVINMLKSSFSTCVIVSEENKDAVIVEADRRGKYIVCIDPLDGSSNIDCLVSIGTIFGIYRKVSPDEPTGKDALQPGRNLVAAGYALYGSATMLVLATSAGGVNCFMLDPAIGEFILVDRDVKIKKKGNIYSLNEGYAKYFDAAVTEYLRKKKFPEDGSSPYG

SEQ ID NO: 17999 - protein, 332 aa, Salmonella enterica subsp. enterica serovar Typhi
MKTLGEFIVEKQHEFSQATGELTALLSAIKLGAKIIHRDINKAGLVDILGASCAENVQGEVQQKLDLFANEKLKAALKARDIVAGIASEEEDEIVVFEGCEHAKYVVLMDPLDGSSNIDVNVSVGTIFSIYRRVTPVGTPVTEEDFLQPGNKQVAAGYVVYGSSTMLIYTTGCGVHAFTYDPSLGVFCLCQERMRFPEKGKTYSINEGNYIKFPNGVKKYIKFCQEEDSSTSRPYTSRYIGSLVADFHRNLLKGGIYLYPSTASHPQGKLRLLYECNPMAFLAEQAGGKASDGKERILDIIPESLHQRRSFFVGNRHMVDDVERFIREYPDA

SEQ ID NO: 18000 - protein, 334 aa, Nitrosomonas europaea
MHTGTTLTQFIIEEQRHIAGASGDFTALLNDIVTAIKTISNAVNKGALIGVMGALDTENVQGETQKKLDVITNEIMIRNNEWAGHLSGMASEEMDDVYSIPSPYPLGKYLLVFDPLDGSSNVDLNISVGTIFSILRSPVPSRAASMEDFLQPGVKQVCAGYALYGSSTMLVLTTGHGVNGFTLDRDIGEFVLTHPNMRIPADTREFAINASNQRFWEAPVQRYVAECLAGSTGPRGRDFNMRWVASMVAEVHRILTRGGIFMYPRDTKDPSKPGRLRLMYEANPMSFIVEQAGGLSTTGYERILDVVPQDLHQRVPVILGSKNEVEVVLEYHNA

SEQ ID NO: 18001 - protein, 338 aa, Homo sapiens
MADQAPFDTDVNTLTRFVMEEGRKARGTGELTQLLNSLCTAVKAISSAVRKAGIAHLYGIAGSTNVTGDQVKKLDVLSNDLVMNMLKSSFATCVLVSEEDKHAIIVEPEKRGKYVVCFDPLDGSSNIDCLVSVGTIFGIYRKKSTDEPSEKDALQPGRNLVAAGYALYGSATMLVLAMDCGVNCFMLDPAIGEFILVDKDVKIKKKGKIYSLNEGYAKDFDPAVTEYIQRKKFPPDNSAPYGARYVGSMVADVHRTLVYGGIFLYPANKKSPNGKLRLLYECNPMAYVMEKAGGMATTGKEAVLDVIPTDIHQRAPVILGSPDDVLEFLKVYEKHSAQ

SEQ ID NO: 18002 - protein, 338 aa, Homo sapiens [sequence omitted]

SEQ ID NO: 18003 - protein, 337 aa, Homo sapiens
ADQAPFDTDVVTLTRFVMEEGRKARGTGELTQLLNSLCTAVKAISSAVRKAGIAHLYGIAGSTNVTGDQVKKLDVLSNDLVMNMLKSSFATCVLVSEEDKHAIIVEPEKRGKYVVCFDPLDGSSNIDCLVSVGTIFGIYRKKSTDEPSEKDALQPGRNLVAAGYALYGSATMLVLAMDCGVNCFMLDPAIGEFILVDKDVKIKKKGKIYSLNEAYAKDFDPAVTEYIQRKKFPPDNSAPYGARYVGSMVADVHRTLVYGGIFLYPANKKSPNGKLRLLYECNPMAYVMEKAGGMATTGKEAVLDVIPTDIHQRAPIILGSPDDVLEFLKVYEKHSAQ

SEQ ID NO: 18004 - protein, 337 aa, Homo sapiens
ADQAPFDTDVNTLTRFVMEEGRKARGTGELTQLLNSLCTAVKAISSAVRKAGIAHLYGIAGSTNVTGDQVKKLDVLSNDLVMNMLKSSFATCVLVSEEDKHAIIVEPEKRGKYVVCFDPLDGSSNIDCLVSVGTIFGIYRKKSTDEPSEKDALQPGRNLVAAGYALYGSATMLVLAMDCGVNCFMLDPAIGEFILVDKDVKIKKKGKIYSLNEAYAKDFDPAVTEYIQRKKFPPDNSAPYGARYVGSMVADVHRTLVYGGIFLYPANKKSPNGKLRLLYECNPMAYVMEKAGGMATTGKEAVLDVIPTDIHQRAPVILGSPDDVLEFLKVYEKHSGQ

SEQ ID NO: 18005 - protein, 338 aa, Homo sapiens [sequence omitted]

SEQ ID NO: 18006 - protein, 339 aa, Homo sapiens
MTDRSPFETDMLTLTRYVMEKGRQAKGTGELTQLLNSMLTAIKAISSAVRKAGLAHLYGIAGSVNVTGDEVKKLDVLSNSLVINMLQSSYSTCVLVSEENKDAIITAKEKRGKYVVCFDPLDGSSNIDCLASIGTIFAIYRKTSEDEPSEKDALQCGRNIVAAGYALYGSATLVALSTGQGVDLFMLDPALGEFVLVEKDVKIKKKGKIYSLNEGYAKYFDAATTEYVQKKKFPEDGSAPYGARYVGSMVADVHRTLVYGGIFLYPANQKSPKGKLRLLYECNPVAYIIEQAGGLATTGTQPVLDVKPEAIHQRVPLILGSPEDVQEYLTCVQKNQAGS

SEQ ID NO: 18007 - protein, 339 aa, Homo sapiens
MTDRSPFETDMLTLTRYVMEKGRQAKGTGELTQLLNSMLTAIKAISSAVRKAGLAHLYGIAGSVNVTGDEVKKLDVLSNSLVINMVQSSYSTCVLVSEENKDAIITAKEKRGKYVVCFDPLDGSSNIDCLASIGTIFAIYRKTSEDEPSEKDALQCGRNIVAAGYALYGSATLVALSTGQGVDLFMLDPALGEFVLVEKDVKIKKKGKIYSLNEGYAKYFDAATTEYVQKKKFPEDGSAPYGARYVGSMVADVHRTLVYGGIFLYPANQKSPKGKLRLLYECNPVAYIIEQAGGLATTGTQPVLDVKPEAIHQRVPLILGSPEDVQEYLTCVQKNQAGS
